United States Patent Application Publication US 2004/0123340 A1 - sequence listing, part 2

SEQ ID NO: 4593 - DNA, 562 bp, Gossypium hirsutum
  Clone ID: LIB3825-031-Q6-N6-B6
aatgtaaacttccactttatatttcttacaacaggattgatctttttcccgtgttacagtcaatcagaaaaaataataataacaaataaataatgcatgtgatacattcagaaaatcaaggtcaaagaaataacatatcaacacatcagaaatggcgaaagcacagagtcctgtggcttgcaagggactgacctcgtgaaagctaaaatcaaggcggtcaacccatcggcatattctggtcggtatgtatcatcagccaccacactcttacatcaaagattacttggagtggcgcacttagaagataactctattttgttatcgagcataatctggattcagagctaaggcttcccggtaaatcatgtccttcatctgctcttctcccaatggttgctgttcaaaatcgaaattaaatggctcagggcaaactggttcatcagctatgtcgtgtaacctttcaagataaggatgggccaatgcttcttcaacagtaattcttctggttggatcaaatgtcaacattctatcaatcagatcaagagccatccgattaacatgt

SEQ ID NO: 4594 - DNA, 526 bp, Gossypium hirsutum
  Clone ID: LIB3825-031-Q6-N6-B7
aggggcagcaaacatttctatattatatattttcataaaaatgtagcatacccaacaaatgatgttgctctcacaatgatgatggtaaaactatgactacatttaactgccgttaagaaatgaaatacattaaaaaagaagaagaaaaaaacaaccctccccccctacgtgacgactctttgctcatacatatcataaatgaaagaatgaattgtgttttgcctgcccaatcaaaaacaatttcgccaccctacttggaccaagcaactgtatcaatttctgcttgagcactccggtataattccagcctctttgcgagagcactgcgtcgctccatgactgctggatcctcgttcaacaatgccgacaatcgtttttgctccagtttacccaactcagtgtagaataagtcaagcaggcttcttttagcttcacggacttgacagtaaacaatggacttcggaatcgagtggcgcaaagtggcgcaaaccatattaacataggacaaaacagttgttcctattct

SEQ ID NO: 4595 - DNA, 555 bp, Gossypium hirsutum
  unsure (1)..(555): unsure at all n locations; Clone ID: LIB3825-031-Q6-N6-B8
ggagtagagacatgcatataacatttattcaaanacaccacctgaaaataaaggaatctcccaccgtcgaacatacatcaaatagaaaaaccaanaataccagaaaaaatcagactaacctcttcatcaaaaaataatgtcttcatccttctccctggccgcagatagcaaattgtgagctgcatttattgaaatccctttctgcaaggatatcttctcagcaaacttatcctcgacgaactcctttgcggcagctagctgtttctctatttccctcttcttataaccttggatcttctttagcctgaagaaatcctccctttcaagctcatccaactctcccttaatgtaacttatcgtattctccaaccttggcttcacaacattctctaaagcattaaccctacgatttgtggttttgattgcctcatcgagtgttaagaatgaagtctgaagagaagcaagctcaactagaacctcaattgctttcacgtaagcagcacggcactgttggacctgttgtccacctcgggccaaaccagtcaaatcattttt

SEQ ID NO: 4596 - DNA, 559 bp, Gossypium hirsutum
  Clone ID: LIB3825-031-Q6-N6-B9
aataaagcaaagtccaatagctaacaaatcgtgatacaggtttttgttcgtgtaaacatctaaatgcagacaagacaatgaattaaaatgagaaacttacaccttgttttctacaaacaccacgaaacaactcgggcatcggaaacgattacgaaccgtgctacaaagaaacgaattagagaaccttcaattggctccacatcaacaacagctactacatttctgtacatcaacgtatcttgttagagatgagatgagttaaaaaccagccttctacagccactggttgccttctacggccgctggttatgtgggttaggattcgtaagcgctttcgcaaagtaattgcggatctctggaattatacgctggatcagatgtgagtgcccgggtctgtcgctcaattgagagaaatgctccaagataaacaaaatgcaagtgtgcctcaatgatatagcatgaaaagcttcggagagttcgtacatgctagaaacattgtccagtgttacatccttagttttagctcacctgtgcaatggtgtactcacagagtcgctta

SEQ ID NO: 4597 - DNA, 541 bp, Gossypium hirsutum
  Clone ID: LIB3825-031-Q6-N6-C1
ttttttttttttttttttttttttttttttttttttttttttttttttttttttttttttttttttttttttttttttttttttttttttttttttttttttttggggaaaagcccaaacccgggggttcaggggtaaaaagggttccaaaaatttaaatgggggggagggccccccaattggcccttaaagaggttttttaacccaaggcccctaatggggaaaaaaaaaacacccccccctcctttaaaaaaaaaaaaatcccccccttccattaaaaagaaaaaggcccggaaacccatttttttgttaataaacctaaccaaaaaaaacccccaaaagaatggggccaaaggcgggtttttataacccaaaaaaaagccttaaagtttggggggaggggccataaacacattttggaaaaaaaaagggaacgcctacttgtaaaaactttgattaaaaggcttttggttccaatcccaaaattttttttttttttgggcccgggggggccaaaaaaaaaaatttttagggggggggg

SEQ ID NO: 4598 - DNA, 536 bp, Gossypium hirsutum
  Clone ID: LIB3825-031-Q6-N6-C10
attcgtaaatgtgtatacaatgtatttagagaacccattcattgtatgggtttctatttcctacagatacaaacaaataaatgaaggaagctgaaatacagtgtagaggataaacagagatgatgtacagaaagatgctatacaaatgtttgagcatatgaaagtatatacagggaggttctaacttttacctaatggttagttacctgatccactcctaaccgtaaaacttcaattccgccagttctcttcatgtatactgagctttcagtttacgcaagaattctaatgtttctgtgtatgaaggatcggatcggctgagtggtttgcatgaatttatatgatctgttgattctaatacaacgagttcaccaaatccagggtaggctgattcaattggcacaatttccatacggaacgcccatcctccataaccttcaactattggagtgaccttggtctcacagaaactaaggacttggagcatctgtctcttatgaaggcgacgaaggaagtcattaagttgcactagtcgt

SEQ ID NO: 4599 - DNA, 530 bp, Gossypium hirsutum
  unsure (1)..(530): unsure at all n locations; Clone ID: LIB3825-031-Q6-N6-C11
gataaactacaaactattgaatgataacacttatgataattgtagtagcccaatttttcccgggcctccaaaccaaataaacaaaaagagtccatttacaaaattttaacccaatcccgaagtccaattttcaaaaccctagccggcccaattaggcccaaaaattaaacaacatcagggaaccctagagttccctgcttttcctttcgccgctactgcccatgtgcaccttcgacacgtacaacgcccgaggtctgccaccgccagctatgccttgcaccgaaatggcaaaaactcctctcgttgacttcatcttgcctgccaaaaaaacagacaaaaacagaagcaagaaaaaggcgaagataacagaaacaaacaattgcaaaaagcaaatatgtaaacggctataagagcctaatgaaatgtaatcaaagggaggatttttttttaaaaaaatgtggatgaatcaataaaaaatcgaaaatttgaagaaatgggggncttctttcttcttcttcattctggctctt

SEQ ID NO: 4600 - DNA, 530 bp, Gossypium hirsutum
  unsure (1)..(530): unsure at all n locations; Clone ID: LIB3825-031-Q6-N6-C12
attagaaactttaactcttaaataattataagatcatgttaaagcacaagcaaaatctctgctcaatctcaaagtctaacccttgagtcttataggcagtgttttaccaggaaaanagcttttacattgcaaatcatattacattgattgaaacaaaaggacctcaaattcctttatttggcatataagccactgctcagagaagctcggcagtgcaggcttatataggtatgacacaatggaaccaaaaaagaaaaaaagatgaatctcaaaagttcatcaagattagtaacccaccactcactcctttaatagcattgcgctgcattgtgccattatttttgatgccctggtaacagaattagtcatgtaaaaattctcgatagctgctttgaatggtgtcaagtttatctcttgggtacagtctatactcaacgaaggtccaaatgtagctggctctatctcatccacgttcagtaggtttggtgctacggtcctcatcctggagcgtaaggatcctagtgtatcat

SEQ ID NO: 4601 - DNA, 544 bp, Gossypium hirsutum
  Clone ID: LIB3825-031-Q6-N6-C4
gcaaaacaattattaaaaacaagattatcacatacattgtttatgtacatgggagagtaaaaaactaaagatgggtcctcctttctagctcccaacaaatttgtttcgccaaggaaatgatggtaacattttgattcacatccaaactatagctgaattctttgtgaactaaacatggtcctacttcagtcgtctccttctatgtgctcgagagtcaccgctgtcaacatctgaaactctgaaactatcatttctccttctggaagatgaagccgaaagtgatacttcggagtctatttcaacagccgtgtccatttgattctctgagtttattacagcagcaatgcttgagaacgaatctctatcatccacctggggtggctgctcctggtttcttcccatcaggttgctacggagatatgcttcaactatcctttctgttgaattcaatccagatgacagagaagtaaatcttgcaactcttcataattgtgattgtctttgacggaacaaagaatgaactcgggaggacataacatcagta

SEQ ID NO: 4602 - DNA, 523 bp, Gossypium hirsutum
  Clone ID: LIB3825-031-Q6-N6-C5
atctataatgataaattaaataaaaaataaaattcgattcaatttgatcaattatccgttatttgtgatggaacgcaaacaaacataacttagtgaagcataaaacgggcattgggaacaaggataagatcaccgtgattatgagtgccaaaactgatcatatatataaagcaaaggaagaatgtttcaatattgatttcatttccttactgcggataccctccctcttcaatggaaaattgttgcattccacacaatgaatgcaagaatcgagattacaagaaaaacctccttcggctagtgtccatttcaggcttgtgaacccactcaaattctccgccttttgtatcgaatgttccatgctgtagacttaccaactttagtgtaaaccgaggaccacactcctgaagacgagctattactttttctttactaatgctctcacccttggtatcctttgcctttttaccttttgactcactctgtttgatctccttggtttcaaatatatacctatgatgtc

SEQ ID NO: 4603 - DNA, 436 bp, Gossypium hirsutum
  Clone ID: LIB3825-031-Q6-N6-C6
gggtacaaacacttcgattaggtccaatcattctaagggaaataattcatacaaatttacgaaccacaacgaaaaaaacaaaaaaaaaggggccaaaccaaacgattctcacgggcccgacccaatcccttaggcacaacccaatccctggggcaattttacgactccctcggaaaaaacacgacattacggggccgaaaaaacccgggaactaacagattctaaacagaccaaacccaatcctacacttgaatggtttttaggaaggaatagaaaaacgtttttaattaatatttaggggtcagatgaaaatctggattttggttacgaaaccaaactttcataaggcatcgaaatttcaataaagggggaaaaaccttggattcatctcggctggtggttaaagtctccggggctggggctggggctggcactg

SEQ ID NO: 4604 - DNA, 549 bp, Gossypium hirsutum
  unsure (1)..(549): unsure at all n locations; Clone ID: LIB3825-031-Q6-N6-C8
ttttttttttaaaacaccaaatacaataaataaaaataaagtccaagagtcacctagcccaaattactaactacccaaaccccatcagcccactactaaaccaaacccaattaaatacaaaccctaaagcctaagacagcccaaccaactaaaaattttcagcagcaaaaaacctagctgcagactttcagccgctgcctcctctgcgacgtgtgccaccaccaatcggggcaccaaccaccagcctctgacacgacctgcaaaatgaaggtccacacgcaagcaaataccaacagcagagaaacgaacaaagagaaaacaacaagcaaaaaaaaaaacgaaaggaatcaaacaaaatgaaaaaacaaagaacaaatcagtgtaactcggctataaaaagctgaaatcaatccctttcttttttttacggagattagaaagcaaaacgcaaaataaaaattagaaaggtcgntgttttaatattttttggttcttttatcttctcgntttttcattttatttcattttttagatatctattttaagcat

SEQ ID NO: 4605 - DNA, 410 bp, Gossypium hirsutum
  Clone ID: LIB3825-031-Q6-N6-C9
cacaaaagggggacccaagaaatgtccccagtaaaaaagaagaggtcggtctaaggccacgaaggcggcagggggggggaaagaggccggggggggggccaaaaaggcccgtcacagaccaggcagcctgcaccaacggggaggagggggaaaaacggcaggggaaagggctatgatgaagtcgggccccaaaacattgatgggggggcgaccgccgggaagaatgagagaacacagcaaggaaactacaaaagccaaaaagatgctataagcgtgaggaggaggcaaaaaaccgaaccccactgagaggagaccccgcatgccactggggagagcactaagcagcataccaagacccctcgaaacaaccaatacgggcaaactgaccagaagcccctggcctaccccca

SEQ ID NO: 4606 - DNA, 362 bp, Gossypium hirsutum
  Clone ID: LIB3825-031-Q6-N6-D1
aataaatgccgagaaagtttcttttattgggaatggatgcattccatcatataatgtcaagagtagaagaaaacaaggcaaaacaaaaggccattaattattctttgcagttctcggaataacccaattggtgcacaaggaaactgaaatggtcacttggcggttataatatccttcagagggaaccaaagttgataggctcacgcaagaacctctccatctgtcgtgccctagtcttaatggacatgtcaaataccttttgctcaaactctacgacaagcccaccaagaatactaggatcgatcttctgttccagcttaacctgcttcccctgtccaattatttcctgcaacggctccttt

SEQ ID NO: 4607 - DNA, 533 bp, Gossypium hirsutum
  Clone ID: LIB3825-031-Q6-N6-D11
cttggatcaagagaaccagattcaatcatagataaaagagatcacaagttccaggggagagagtcatgaaaacaaaaaaataatatccgttaaaacgtattcattcacccaaaataacatccgaacaaagggggatataattctcccttttttaacttctaccatggagaaaaattcctgtatatcttcatctcacctacctatgctctcatccttctcaccctttgctttgctttgcttgtttcagcaatcaaaatgtcattaccagttttttaaagttcatcatgagaatcatcatcttcttcagttgatccaccacctggggctccaccagatctttggtacacagctgtgatgattgggttgcatactgcctctacctccttgagcttctcctcgtagtcttccttctcggcactctggttgtcatcaagccactcaagtgcctctttcactgcggtttcaactttctccttctcatcagattcaagcttgtcagcgagcttatccttatcattaatctgggttttcat

SEQ ID NO: 4608 - DNA, 527 bp, Gossypium hirsutum
  Clone ID: LIB3825-031-Q6-N6-D12
gaagaaaaaaaaactttttattggtgcaagcggtccaaacaaaaaagtcaaacgactacaattttataagtctaatgacttaaatgaaaactttcaaataatacattataaacccaacatttgaaataaaacataccttattgaaccatttcccgtaaaaaccacaattatgattatttgcttatttagcaatggcactattttttttcactcaaaccccataattctaagctttcatggaagcttcatcaaagcttaaaaaaaacatcctttggatgatgaatgacgatttaattataagcatcaagtgtcaaaaaatcatccaaagttgaagcagtgcattggcgagtaaaaatcttgcatgcttctttatacattcctttcttaaacttctcttttccgacctcacgttcaatccgagccatttttttttcaaccactcgcccaaacacatggttcactcgaaccccaagcccatcaccgtctaattcaacaccatatttcaaccactgccaaatttgaaccct

SEQ ID NO: 4609 - DNA, 345 bp, Gossypium hirsutum
  Clone ID: LIB3825-031-Q6-N6-D6
aaaaaaaaagatataaaattataactttaaaaaaaaaaaacacaaaaaagaatataaaaaaaaaaaaaaaaaaaaaaaaaaaaaaaaaaaaaggttttccccttcaaaaaaaaaaaaaaaaaaaaaatttttttttttaaaaaaaaaaaaaaaaaaaaaaaattataagaaaaaaaaaagaaagtttttttaacaaaaaaaaaaaaaaaaaaattaagcagggaaaaattattttaaaaaaaaaaaaaaatataaaaaattttttctcccccccccccaaaaataaaaaaaaagagaagaagaacctatgtaaattttttttttaaaaaaaaatatataataaaa

SEQ ID NO: 4610 - DNA, 509 bp, Gossypium hirsutum
  Clone ID: LIB3825-031-Q6-N6-D7
aacttattctgtttgattatattagaataagaaatgaaataaatgaaaagtttacaaaccatttcctctatttattacatgaatcttttaccatggtccatatttgccatattgggtcacatctaggaacccgatggctaagggtttatgtagaacaaaagaggagagttaccccttattcttacaaactttggttatcagagaaaaggtagatttgggggtattggagtacctattcatttcttgacaaaggcaacccccttctcaatgctagtttctagttctttctttgccttctccaagccaaccctctcatactcatttagtgggccaagagggtatatttcctcaactccgcaacgaccgagtcttaccttggatgcgaagaagggcaattcagtcacatgagaagccacaaatgcacatcgaacaatgtcagcatcaccttcttagccccgaagacatgcatcggcaaattgaaccgcagcatatgccatcgataatgttgc

SEQ ID NO: 4611 - DNA, 550 bp, Gossypium hirsutum
  Clone ID: LIB3825-031-Q6-N6-D9
aaataaaacatccatcacttcatttcttaaaaccaaaccaaaaatccgagatgggtaaatcaaaatttcacatcccaaatgtaaaaatcgtttagggagtaacttccccccctaaatctgaattattaatgattttttttttgccgaaataaatttctcaatgtgtcgagcttttcatcgccatctttagaacctaaaacataacaaaagaagggagatagtaccaccctatatttaagcaccaccggatccgtacttctttccgaaaacaatgagctgcaacttgtcgtatccagcgagcacaccagcaccggcaatggcacgaaggatgttagctccagcacccttgaatagagacttgccaccttcgtttttcaagatctgagagaaggcatcaagcgagctcttgtatttgacagcttcaccagaagtcatcatcattcttctacgaacagtgtcaattgggtaagatgcaaggccagcaccatttgtgatgagccaaccaagagcaaagctagcgaagaaactatcctgcatgcttccagtcaaa

SEQ ID NO: 4612 - DNA, 471 bp, Gossypium hirsutum
  Clone ID: LIB3825-031-Q6-N6-E10
aaaggtgtcttaaaatctactttatagaaaactatgcacccaatgttcttcacaacccctttcagggccataacatatatacaaaaaaaaaaaagcaaccacagctaaacaaaatggcaccaagaactaaacagacaaataccaaaactaattagtgtccggaaaaaagaaaaaaaaaagcatgctggccttaagcaaaacccagtataagtgtattagttactgatgtgcagcctggaggagtccctcgcgaatctgagtggcgacatcacgaacagctccaggaccatgagggatgaacacagccgaagatttaaaagcagcaccgatttctttcatggtgtcaaagtactgggtgaccaggaccatgtccatgacatcctttgcagtagtcccaggtacgttaacagagaatccaagcacactattctcgtaacccatcaacaatagcttgtcgctggcgagcaatac

SEQ ID NO: 4613 - DNA, 117 bp, Gossypium hirsutum
  Clone ID: LIB3825-031-Q6-N6-E11
gggccccgggggccgcccggggaaatcccggcccgggcccggggggggacccagttttccctaagggggggcgtataaaagcggggggaaaaaaggggaaaaggggttcccggggga

SEQ ID NO: 4614 - DNA, 384 bp, Gossypium hirsutum
  Clone ID: LIB3825-031-Q6-N6-E12
gggggcccaaacaaaaccacaaatgggggccaaaaagggggaaccatgggttttggggggggggggggggggtaaaaaagggtccatttttccccaaaaaaaaaaaagggatcccttccaaaggttccgggggggcagggttttttggggcccctttttaaaaaccttggccccgggcaaaaaaaaaatttttgggggaaaaggggccctttttttcctaaaagaaaaaaaccccgttttgggggaaaccccctaaaagtttggcccaaaaaaaccaataaattttttgggaaatttttttaaaaaaaaccccccgaaaaaggatatttttttaaaaggggtttttaaaagggcccggcggaaaccccccctggggggggggga

SEQ ID NO: 4615 - DNA, 538 bp, Gossypium hirsutum
  unsure (1)..(538): unsure at all n locations; Clone ID: LIB3825-031-Q6-N6-E2
atcaacttccaagtttctgctatggagatttgcttttttgtgttattgaatcggataaaagttcacattacatatgtgtaaaactagaatactaatgaaatagcttttaaaactgtgtaacttcatcaaataaggtataaaattcacataatcaattttagatcgagtccggattaaatgtttggtggataagaagttgagccgcttcaaccagcttctttacaacttgtccggcaggtagaatttccttgatgaggcctacactttggcctgcgtacatcaccatgctttcaatgtcacctgttgttgttgggttcggaactgtaccggcaaaacgccgaatttctctttccacgccgtgtattattgttcgaccaatgataggctgattagtttcattttcttgagcattaaggcatttccaatcacagaagaagggtgtttgaaggacacggtgtggtgcaccaggccaccttgctctgccaaanacatctgtatactcggttttatcgtattcaatcagtttccgcttgtacgt

SEQ ID NO: 4616 - DNA, 450 bp, Gossypium hirsutum
  Clone ID: LIB3825-031-Q6-N6-E4
tttttttttttttttttttttttttttttttttttttttttttttttttttttttttttttttttttttttttttttttttttttttttttttttttttttttttttttttttttttttttttttttttttttttttttttttttttgttttggaaaaaaaaaaaagcggaaggaatccaacccacagccaacaaaaaaagaggggggggggcccaaaaaaaaaaaaaaaaaaaaaaaaaaaaaaaagaaaaaagaaaaaaaaaaaaaaaaaaaaaaaaaaaaaaaaggggaaaaaaaaaaaaaaaaaaacttttggggggggtttttttagaaaaaaagtaaaaaaaaaaaaaaggtggggttttacattaaaaaaaagaaaaaaaccctcccaaatttaaaatttaaaaaggggggggaaaaaaaatgggttccttattggggggggg

SEQ ID NO: 4617 - DNA, 538 bp, Gossypium hirsutum
  Clone ID: LIB3825-031-Q6-N6-E5
ctctaattattcccaacttttattgatttatagaactgccctggctaaccctataacattacaacaggaccaaacttctttttatatggtacaacagtacgatcttgaaaaagaaaaagtagaagcaaacaaacaacaaacacagactcaaggcagtagcagagcacaaaaactcgctcctttcatttaataggatcgataataaggatcatcctgggtacctccgcgggtgttccttctagtcccagcattgttagacgccgcatttgggaagtcttggttccccgttgtaccgtaagcaccctctgtatctccgccaaaccccatactgctgaggtcatcttgcctgcctgtatcatacccactacctgcggtggggtacccacggttgtcatgtccaccggtaccgccatagccaccagtgtcgcctatgttgtacccagctgtggtgtagccagtgccaccaataccaccaccaccagcatggccagctgtggcgttatgatggcgggcctcttgtttcctcagctctgcatct

SEQ ID NO: 4618 - DNA, 387 bp, Gossypium hirsutum
  Clone ID: LIB3825-031-Q6-N6-E6
gggaaaagggggatttaaaaaaaaaaaaagaaaaaaaaaggggggggggggaaaaaaaaaattttcaaaaaaaattttgggggaaaaaaaaaattttttttaaaaaaaaaaagggtcccaaaaaggggggaaaaaaaaaggttaaaaaaaaaaaaaaaaaaaaaatggggggggggggaaaaaaaaaaaggcccaaacgggggggaaacccttgttcccccccaaaaatttggaccggctcaaggggggaaaaaaattttttttttagggggggggtaaaagagggggggaaaaaaaaaaaaaaaaatctttcctgggaaaaaaaatttttccccccccaaatccaaaaaaaaaaaccccggaaaaaaaaaaaaaaaaaaagggggg

SEQ ID NO: 4619 - DNA, 396 bp, Gossypium hirsutum
  Clone ID: LIB3825-031-Q6-N6-E7
aaacccaaagcataatcataatccattaaaaagaaggggagcccaaatttttttaaaaaaaacaaatcctaatagaaatccagttttaaattttcagacccttctaccaactcgtctaggcgtagttttgcttgcagggcctgtcacaaacatagacgagttgtaattattgacagcaaggggaggcttcttaaacttattctcattagccttgctcatgcttcggagcaaatacctgggagtctgactttcattcctttccacggaataagcagcaaacaccgatttcctaaagctctccagcttcttcgactcttttttttttgaggattcaagggttacaccaagtccatgagggggcccactctttgactccgccccggtttcgcctttcct

SEQ ID NO: 4620 - DNA, 161 bp, Gossypium hirsutum
  Clone ID: LIB3825-031-Q6-N6-E8
ggataataaacgcttatatatatatgtattggaagccattgcaaaggagtttctacagaataattcagtgatgattcaacactgattaggtttgccattttcttcaggaaaaaaaatattaaatagcagcaatagaagtgaaaatcaatgcttgtttgatc

SEQ ID NO: 4621 - DNA, 564 bp, Gossypium hirsutum
  Clone ID: LIB3825-031-Q6-N6-E9
gagtaaatcatggctcaaatatttgaccaaaaattagatttaagaggccatgctccaaattcaatataaaagataatataacatgcaactctaaagaattgtgaaaaaacaaatgtccttaaaagggaagttttacctatcgatatagctaaatcctcaattgagtttttataaggctacaatactcttttaagcagcagttcaaaaccacgtgatagtgcatctgccgctccctcccaagcaactgatttaaaaggcgttacacattagtttacaaacagatacacatccgcaaccacactaaccgattcatgatttggggcccgagactggtattgttgaatgaaccttcatttatgatggcatgtacgtagatgtatcaatctgctcaggaagctcctttatattaacctcaaacctctcttggacctgattgagcacatcaaaatctgaagcggatgaaacaaatgtaattgcaagacccttggtgccaaaccgaccagctctaccaaccctgtgcaggtatgtatcaacagaatctggcatgtcatagttgatgacaat

SEQ ID NO: 4622 - DNA, 463 bp, Gossypium hirsutum
  Clone ID: LIB3825-031-Q6-N6-F1
cataatgtatagtgtttcatagggaaaacaataacttcaatccaattgtttgttggaaacacacaacgattataccccaatatgccaatggataaaccacaaatactaattaacaatattcagaagcacaataataaaatgtatttatcacccaatgcagaggaaggatcgcattcactcactgcagcttttcttctatcttctcttttcaggaaaaattatggtgccaagaggaaacgttttcagtaaccgagctgcaaacggcaatctaatccaactggaaactaatggtggggatggttctccactggtggtgatccgtctatagaagaaaacctctggaggtgatgaggcaaaaaaggaggagaattggactgaagggtccccctgttgaaaccagcaatgcccgaagagattgcgaagttgaggttgtagtcactccctagcaccggttgtgctgttg

SEQ ID NO: 4623 - DNA, 318 bp, Gossypium hirsutum
  Clone ID: LIB3825-031-Q6-N6-F10
agaaaaatgaattatttacaggccgaagttcttgcaaggggaagcataacatttgaaacttgaaatggaacaaacgacaacagttcattggtaaactatgatattagataagcctgtctaaatgaacttctcttaaaaagaagcatcttcgacaattccagtatctggaacctctcgaacaagggttttgggggaagggaatccagctaccacatcggattcgataccgcattcatctacaccccttttgatcttgaagtaaccattatcaccccagcctttatttcattggtttgcaaaaaaccaaaaatcctctcc

SEQ ID NO: 4624 - DNA, 415 bp, Gossypium hirsutum
  Clone ID: LIB3825-031-Q6-N6-F11
ggaagggggatcttcattcaattctattggaaaaactgagacatgataggcaacaactgatatggaatcatagctggtggcattggactggtaatttattttactacatttgagattataatgatatatatgcgggacaactgagatgggatcactgctccattttcccttggaaccaaacaataatggaagaagttttctttggttcccttgcttttctttatcactttctttcaatccaaacataaaggataattatgttggccctctgttaatccctggacacaacggggattgatatccctcaaggtgtattgggaggaccttttactgcaacttgaagaggggttttatgaagccaggggcttgttcttgagtttcttggttatttccgcaacatatttaccttggtaaa

SEQ ID NO: 4625 - DNA, 509 bp, Gossypium hirsutum
  Clone ID: LIB3825-031-Q6-N6-F12
atagggaattctttttgttggttcttataaaggaaagggattttactataaaagcaaaatccatgctgaagggaacacaaatccaataacccaaaagaaaaaaacaaagacaaaagaaactggtctaaatggtaaaaactgtagtctcaaatatagctgacaaacaccagactctgcctgcaccctgcacccatataattttttcgaaaattttaatgaaaaaaggagattgaaattgtttttttagaccccaaacttcaggcagtggcagtgaaaaagctaatattggtattctcttctctactcaaatgcatcatcatcatcatctggaaaaggttggctagctgctgctgcaagctcaacttcatgttgttgctgtgcagccaagtcgatgtgtacttcaggaggagcaagagcaggtgactccacaaagtgaagattaggatcacctgcaagcttccgggcaaggtacaagaaaggcttctcaaaaatgtagttgctcttggctg

SEQ ID NO: 4626 - DNA, 157 bp, Gossypium hirsutum
  Clone ID: LIB3825-031-Q6-N6-F2
tcgcgatctagcaggcccctgggctgacgcctgggaatgacccaccgattcctgcacgcgtcctacatgcgtatcaactgagcctatttagagctggattaaagcatggcgatagcatggtcctgggtgaaatctgtgtgcaaatcgcaattccata

SEQ ID NO: 4627 - DNA, 548 bp, Gossypium hirsutum
  Clone ID: LIB3825-031-Q6-N6-F3
gtagcagctagcaagcctgatggtaactatttcaattttcgagcgtgaaaactctcaggctgcaaatttcaaaagtacatatcatattgtattaatctggacactggaataaactcgtgtcgttggttactgctgatgtgatgattatacgcagattgtccctgtgtgtggtgtgtgcgtgtcccaactcatctttcaccttttagctgtgcggaatcagattctatattctagatgacagaagagaatataaactgcaatggaagagatttcttgacctagctgaactgtgatgacagcaccatccaagcacccagtacagggaaggtaatcaatgccgaagccagaaagaatacaaattcatcattgacaaaggctgcagtaaattcatttcttcgcatttcttgtttgatgaaaccttgcaactttgcttttgatcttgcaatgccctcctttgtgcaagttgaagcgcctgctcaagatgttgaatttgaatccattcttctgtaacaacttctgccatcttttcaacttttaaattaacagct

SEQ ID NO: 4628 - DNA, 506 bp, Gossypium hirsutum
  Clone ID: LIB3825-031-Q6-N6-F4
gataatggcaaaataaaaattaatcgaggtattgaaactaaatggactacaaaaatatgtatgaaagaataactatgattcagcaagatggaagtttttttatttgtcatagcatttcagaatatgctatgtatataatcaacgtcgtggtttatgcaaacgaggacggttgcagaaaatcctgccattagccttcacaactgtagcaataccaatgcttatggtagcccacaaagctgagaaaaataagtgtcgaagatcgtatcgagcttgactcagtgacaatattgtgaagaataaccctagtgagaccaaacaaaaagctgctgggaagtgagctacagcctcaaggcctcctttttgtgatggaggtatcatatcccggctgacagaaacaatgtaatgtccttgcaggagatcgatcgcatcctgttttgttccatcagaaaagttattaaaataatatcgaccaaaggcattataaaaatcatttaggatccccttga

SEQ ID NO: 4629 - DNA, 454 bp, Gossypium hirsutum
  Clone ID: LIB3825-031-Q6-N6-F5
atagtaattggatacagttttatcaataatgaatttctattttacaagaatataagtatacaaaaaaattaaatataaaaacaataatcgactctcaagcatcaagactagaaagaataattaatcttccgcttcttttcgattttccaatctgtgcattttatctttagtttctaatcaaaatgagtggcaccgagtcatcagttcttccatcgagtcaacccagatccaccgagttcacgattccaaaactcgcccaaaaaagtcttagccgcatccaaactaggaaaataagcaggctctaagaatacctggctcaacgaatcgaccgagccggagccggccacgactcggttccctttcgcttctaaactccccataaccaccaccaacacctgcttatatccgtaaaagaaccgttttaaagctccttcgatggcttgcaaagcttgta

SEQ ID NO: 4630 - DNA, 387 bp, Gossypium hirsutum
  Clone ID: LIB3825-031-Q6-N6-F6
acttcaagggccattaatatattatagcaaaattctcaatacatttttgcaacacgacactggtccaggacacaaactcagaataaccaaaaaaaaaaaagacaaataaggggggaaaatagaaaaaaaaaaaagataatgaatggggccctatttgaatgagattagaagcattctggggatgaaaatagagtataggggagcagcaaggcaatattattcagtactatggataagcaggcactgaaacaggcagcagggctgaacttaaaattggggcttggcccacttgaggggcttcacaacttcccaggggaagtctgggtcgccccttccaaagggtccgtaagcagctgtcttaaaaaaccgaccattgccacctttttt

SEQ ID NO: 4631 - DNA, 513 bp, Gossypium hirsutum
  Clone ID: LIB3825-031-Q6-N6-F9
aaacgaaatgaattacagaatacaaagatgaaaactgtacataagaatgagaagaaaggggcacaagaaaagatgttttggaatgatttttcaccaactacccctcttaacccaagggtagctgccaaactaaaattgacaaatcattccaaaaacatttacaaccgcatttggctaataatatcctactgctccccactaaactcaacccctacaacaatgtcctcatctatcccacattgcctggaatttcgcaggtctatgcttcaaccattgcaccatctctctgtccagtgaactattgttcaaaactgcatctagcattggactcccaaagattctcggactacctttgaatgtccatattcggtccttcggccatggtctctgagcttgcttctccatccatgacagcataaatttgacagtctttgggccataaacacgatgccttgatggcttctgaaccttggcgtagaagcaaccaatgtcaggtaatgataagcaacccct

SEQ ID NO: 4632 - DNA, 364 bp, Gossypium hirsutum
  Clone ID: LIB3825-031-Q6-N6-G1
gggggaaaaaaaaaccaaggggggggcccccaaaaattcccccttttaaaaaagaaagggggtttgagggaaaggggaaaaggggggggcgggttttaaaaaaggggaaccccaaggggggtttaaaaaaattttttaaaaaaacccccccttaaggggggggggaaaagggggggggaggggaaattggggttgtgggccccaaaaaaaaaaaggggggcccctttttagggggattttcccaaaccgggaaacccttttttggggtaaaacgcagggaaaaagggggggggggaaaaatttcccccgggggccggggggttccccaaaaaaccccagggggggggggaaagggttttttttt

SEQ ID NO: 4633 - DNA, 491 bp, Gossypium hirsutum
  Clone ID: LIB3825-031-Q6-N6-G10
ggggcaaatcaaaggtacttcacctcaattaaacaaggaatgactaaaaacagttatcacatttttttcacttaattctttttttaaatgaaaaaccattgacatgaaaggtaagatggcaacaccatgaatgtcaataacagactaaaacttcaaaactcttttcaagtctaccatacccttaccaaaaggagctcattttttttttttaagctctcaaggcttgagtgccaaagcaagtccgaccttggggctcttatcgatggacttggtatccacctctccagaaatggtaaagagcgatttcgggcgccactcgtgctggatgagtgcacttgccttgccagcattgttcacccgtgccttgattgtggttaatggatccaatgcatgttgtgtacccacggtgatggtgttcacattggtagagaagctatgagtcacctcagcaccaacagcagtgttggttgatggattcacaatatggtagt

SEQ ID NO: 4634 - DNA, 518 bp, Gossypium hirsutum
  Clone ID: LIB3825-031-Q6-N6-G11
tttttttttttttttttttttttttttttttttttttttttttttttttttttttttttttttttttttttttttttttttttttttttttttttttttttttttttttttttttttttttttttttttttttttttttttttttttgggaaaaaaaaaaaaaaaccccccccccttaaaaaaaaaaaaaaaaaacccaaaaacctgggggaaaaatttccccaaaaccctttttccgggccccttaaaccccaaaaaaaggaaaaggggggggttggaaaaaattttggggggggggggtcccaaaagcccacccaaagaaaaacgggggcccgaaaaaccccaggggttttaaaaaaaacaaaaaaaaaatggcctttttgaaaaaaaggaaaaaaaacccttttttttaaaaaaggggggggcccccaaaaaaaaaaaaaaggggggaaaccccccctaaaaaaaaccaaattgccccaaaaaacaccccctaaaaaaaaaaaagggtccccccc

SEQ ID NO: 4635 - DNA, 579 bp, Gossypium hirsutum
  Clone ID: LIB3825-031-Q6-N6-G12
ctgactcactaaaatctatttcattatacatcccaatggatcctaagaatgtatactgcgttcaacttgagtgaagtgaaataacagaaataggcatacacgccttgaaatctctcattattttacgcttaacctcccgcaccaactgcagcacgatttgattgggcgacgtttttgtttcttactttggagttgaagctcttcttttatttcacggctgcagttggattggtgatcaattccatcattttattcaagagagctgaaaaacttggctaatttttctgatacagactgctggttctcatccagtgaatcttcatcgccaccataatcatcatcgttttcataaactagaaaaatcccagctttcttcagctctacgccctgtacgtagggcgggtttcgcctggtcactttaatcttaaaaccgtccttcaatatggaaaccaagggacgatatgcgggatatcgacacaagtgaacattgtcttggttggttctaggtaccccaattaagttcaatgcagtggtcattattgcctgctcgccattgaagatctgtgcttgaatgtccgg

SEQ ID NO: 4636 - DNA, 534 bp, Gossypium hirsutum
  Clone ID: LIB3825-031-Q6-N6-G2
actagtacacataaaacggcatttattaattaggaccataagcgtaaaacttatagtatatgagactttatttcagttatggcacacagatcaaaaggatcaacaataagtttatgcttccgaaacaactagatgatggcctttctacatttcactcctttactcatcctccgcaactccatgtctaaatgctgggtctcacattgaggcgagatgctaacttctgacccagtgatttatcagcctgagaccagtatgagatccatatgctgcgaatttcatgagtcacacgtggatcagacaaggcctcaacccagcggcagatgaatcgctcttgcctgtctgctgcccaggacctgtatctctctccgggctgtttgaagttgttctccttctcaatgatgcacttctcacgccttccagtgcaaacagcaggtgggatagggaacatctctgcatgacgaacaggatcgtaccttgaagggaagtaatttatctcctcatccctgtgcatgaaattcataaaaccttcgt

SEQ ID NO: 4637 - DNA, 542 bp, Gossypium hirsutum
  Clone ID: LIB3825-031-Q6-N6-G5
acggaataagatctggtcttacttgaaaaacacaaacaaaacaactctttctaatctctgcgttcctactaaagttctatgtataactgataacaacataaaaatatgggatgttatttcaataaatgaaaagaacatgatcaaccaaaattgtctgctaccaaaaactgatagcttcccctacaaagagatctttccttagatgtaaggttctcttagtgaagttggcagcaccagttcaggctctaattccccgagtggcgtaaagtagtactcaaccatgtctttactaacctcttccaggcttgcggggtaccacttgggagcaaaatcgttgtccactaacctagcccgaacaccctcagtgaaatcattagagaccgatttggagatccaggcaagggaaatccgatattcacgtgccagacactgatcaagtgattgaaatctaccttctcgtatggatcttagagtaactttcaagctcaacggtgaggcttctttcatttttctcagcactgtcttgcaccaatcatcataag

SEQ ID NO: 4638 - DNA, 577 bp, Gossypium hirsutum
  Clone ID: LIB3825-031-Q6-N6-G6
atctaaatatttctgataatattgttattaatattatcgtcgcttccgcaacatctacaacccatctgctaggtggctacaaccttgtatgtatatgtgggataaaagtgcatctagcagaaaaacctaacatactaaactaactttgaaaacgattcagatttaatggtagtgaatggccttgggcacatggattcctcaatcaagcgctatacccatgatttgaaggatgccattgtgttggatcatggctgctgctgcatgctgcatgctgcaacacaagcttcctccattgcggattgggaaacatcactgttgcaaatgtttgcaaatgcacgcatgtgtttcattccgtactgagttagtgacccgcagtgtgtttcgaacaagcgaaccatggatttcaagcactgccagtcatcaacaaggggcaaaccaggttccctgatggtattgaggatgacagagccttttgctggtccatacaacactgttccaatcaagtcaatgctgccatccaagtggattctatgcctcatagtctcagaaatctgtttcagtatttctttcttcttcg

SEQ ID NO: 4639 - DNA, 430 bp, Gossypium hirsutum
  Clone ID: LIB3825-031-Q6-N6-G7
gggggcaaccacccaaagggaccaaaaaggaccggggacagggttttcggccgcaaacccggttttaacaaggccaaacagcccccaagggaagggaaaacaaggccccaattataaaaaatcgggaaaaaaaccaaaattggccccaaaaccccaaaaaaaaaaaaccctcttcctattttaaaaaaaaaggccaaaaaccggaaacctattccaggctaaaagggaccaaggggaattcgggcaaaaaaataaaaaaggggggccccgcaaaaaaaaaaccccccaaaaaaaaaaaagttgccccctgttttggaccttatggggggggcccccctgttctagctaacaaaaaagaccagggcccccccccgggcaactaaaagccacccatgactttggagccgggatttttggcccattcccgggg

SEQ ID NO: 4640 - DNA, 537 bp, Gossypium hirsutum
  Clone ID: LIB3825-031-Q6-N6-G8
gaaggtaaaagatgttcgttgaagataaatataaatccgagattataacaagacatttcagttctaacaggcaaaactggaacagcttttgtacttaatacataggaaaattgggatcaacatcattggcccatgactccaagcccccgacaatatccttagctaaatcgaatcccttgtttcggaggtaattgacggccctttgagaatcattacctcttctgcatattacatatagattagctcccgatctggtgccttccttctcttgttctttaagtgcggaagatatttcgggcagtcgagtctccaagctcgcgagcggaatgttcaatgagttgggcatagaaactatcttgtagtgaagttctggtcgaacatccaccaaaacatgtggctccccacttatgatcctctctttgtactccttactggttattctagaatccggggcgagtagtttcaactttggcggagaggttgacaatggcgattgagtgaacttctcataatcaagttctttgaattgctgttggt

SEQ ID NO: 4641 - DNA, 450 bp, Gossypium hirsutum
  Clone ID: LIB3825-031-Q6-N6-G9
gaaaaaaatggttttttttttttatttttattaaattggaagtgggggagggttaaaagttaaaaaaataagggaaagggggaaccccccggaaaaaaaagaacgggacgggcgggccggccagcccggacgagggcgagcgggggtgggggtgggaccaaaaagggggaaaaatggagccggggggaaaatgggttccccccacaaccccccccaaaaaaggagccgggaacaaaaagggaaaaaaaagggggcccaagggggggagcaaaaaaacagggggcccaaagggggaactgacccccattaaaaagggaaacctgacgggccaactgccaaaaaaaaaaacccaaagccccgggagagaaaaaaaggggcccgcaccccagggggggccaacttggtaccggggaaaaaggaaaaaactgtttggccccaaaaaacgggccc

SEQ ID NO: 4642 - DNA, 572 bp, Gossypium hirsutum
  unsure (1)..(572): unsure at all n locations; Clone ID: LIB3825-031-Q6-N6-H1
aaatggtgaaatataaattctatatatatataagtacaacagatatctagatcatttttacaacagatttgcagatcataggcattgatcgacaattcgaacaggagtaggtgggatagaatcccaccattctttcactcgcctttcgttttggttatttttcatgtacttccctagctttgacctcattatcatccaatgaaatacagcacttattatcaaatacttcaatggagttactgcaaacaatatcgccaaaccagtgatgccaaccatcatcacatttgcatgcttgggtgcccttgaaaccaggactgaatgcaatttcagaattgtgacatttgcttggtgtattatctggcaaatcgtcatatacatatattgagctgaaactatgttctccctcgtcgaggcagtcggctcaaatgcagtgcacacggntatctccttttgtttgtctttgagcttttcttgtctagcttggatcatttttgccaccaatacaagcaagcctgcagatatcgccttgccaacccactccttgtacacaattactgtaactatggcaatta

SEQ ID NO: 4643 - DNA, 420 bp, Gossypium hirsutum
  Clone ID: LIB3825-031-Q6-N6-H10
aaaaaaaacaagggactcgtaattaaatttaaccaaaatgtctaagtttttgggataaatgaaattacatattccattgcagaagtttttaaaactgcaagaagctgtctcaagtagtcatccattctaaggccgaaaatgctctcttcctttatggacaatacgacaaccattgaacccaagttttaagggagacattaaaataaagcatttcccatgcccctcaatcaacctttcactctaataataattaaaagacaaattacgaaacacagaataacaccccttgacttgctcttttaaggcaactgctgcaatacgatggcgactacagttttatctaacaaaatcagaaatcaaattcgcctgttgccttattaaagagaatggctttattgtttatatgcatgatgccctcct

SEQ ID NO: 4644 - DNA, 358 bp, Gossypium hirsutum
  Clone ID: LIB3825-031-Q6-N6-H11
acccccaaaggaaatttatttaccattttttgaagccctactacataattacaattcgcctaaaaaatatgtcaactcctactattttggggggaaaaaaaaaattacaggtcggaacaaaaacccggtgcctagaaaatcaaatccaatccctgctaaacatttaacttggaaggaaatgggttttttaagccaaatcggaccaatgggggagcattgttttttccgtagctccgggccatcgggtggaagctttacttaaatgctttatcagctgttattccacttcgatctgggatgagtttcttcatgtaaaacttggatttacggggaagggttatctttttcctcctttctt

SEQ ID NO: 4645 - DNA, 96 bp, Gossypium hirsutum
  Clone ID: LIB3825-031-Q6-N6-H12
catagactacaaaagctattttcatagactacaaaagctaaggcattccttgtaattacatttgaaaagctataaaaacataaaaatggttaacac

SEQ ID NO: 4646 - DNA, 541 bp, Gossypium hirsutum
  Clone ID: LIB3825-031-Q6-N6-H3
cttcctcttcgtattcgatgtgggatgaatttacatgctttatataattagagtgaaaattgaactatacggttatacttataagctaccttgtcggacaaaattatctccttggtcaaggcatgagggcaagggcagcctcttgaacgaaaggctcggtgacattaacaaaatgttcagcttccctctccacttgctccaaacaccgacggctgtcttttccttcgttcatcttcttcacgaaagctacaaaccgtctccagttgtccggctgaaagagtgatgggttcatcctcaagtacgtaaacgcacacatctccctgtcatttgaggatccatcaatattcaatgatgatgcttttaagatctgctcatgcgccgattcgtcgtatcggggcaatgcattctccccggcaagtggaacttgtgcttctttggtagctaaacccacttgtcgaactaggttctccggtgcacatagggcatcttgtggctgctcatgatctcgcatttctatacaagtaaaattgaaaacagcacc

SEQ ID NO: 4647 - DNA, 313 bp, Gossypium hirsutum
  Clone ID: LIB3825-031-Q6-N6-H4
aaaataaataaagggttctaataacattactaacgtccataaaaaaacaccaaataaaaatccattataaaaacttttgattgttgcaaaacgacacgaaatgcaagcaataaactaaaagtcaaaatctagttttcattgcctagtagaagctaagggcagttgtaatttcacaagtcttggacgctcaaacctggaggaagagactgcttcaacttgtcggccttctcagcatcagacacgcaaagggtgtacaagtacttggagcagcggaccttgaactttacaacggacgcgtgggcggacgcgtggg

SEQ ID NO: 4648 - DNA, 517 bp, Gossypium hirsutum
  Clone ID: LIB3825-031-Q6-N6-H5
acgtaataagatacacgtgtcattaaaccaaaagaagggaagacagcagtcggaatttagaattcctatttatttaaaaggctagcaaatataaaacacaatatctaagccaatcacatcatatatattggtttgggttccacgttgtatgttgtggcgtgctgggtgcttattaccgtcagtcacgacggttggcgctctgagtattgggtttggtcgtcgggtccgataacaaggtccttggtgttttgggcaatttccactatggtttcagcaatggctcccaatacacctgtttggttttcctcctcctcctcttctctaacgcctgaaccctcaactgttctctctaccccactctccattcttctctctacgccctccatcggcacttttttgattctctcttcttccacctggcttctcttctcagtttcctgtgttaattcaccggttttgttaggctctgatgacccctgaaaggttttcttcggggcatttccaattggctttgcag

SEQ ID NO: 4649 - DNA, 552 bp, Gossypium hirsutum
  Clone ID: LIB3825-031-Q6-N6-H6
cgggtaaataccacaaaggaaacaagcaatttatcaattattgttaaactataagtaacaaatggcaatgtttgcaaaaacaaatgaccacacaccaaaacacttgacgggtaaacatccggactctaaaggggccagcattggtgagactgacaactcaatgatgccatctatgcctgcagttattagcatagataaatataaggagaaactgacagaaaccaaactgaatataatctgcaacttatcgtttaaatataagtcaaaagtcatgaggcataagcttaccttgtttgcaatgttgtatcgaaagccagtccagtccctcatacaagccttgaccagaagtggcacatgtgctctggatgtacctataaaacatattatatagagggttaaaatactgatccacaaatagagaccattagagagagagaccaagagagaattgttcatcttaccagtgccgttggcggagagaatgaaggccaagcttgtcagtaatctcagcagcattcatagcatttggaagatcttgcttgtttgcaaata

SEQ ID NO: 4650 - DNA, 568 bp, Gossypium hirsutum
  Clone ID: LIB3825-031-Q6-N6-H7
aaaatctaatctagtaacgggttaaaggagaaacaaaagaggaatcatgccatgccagccaaaatgaatgctaaaacaaccaaaaagaaaagacctactagtaaagattgacctgacctacggcctaaggttcaaagctgatcaacattattatcaggaactggactagtgttatcgggctctgctttcgctgtttcatctcccctcctaccattattatcatcaacacccaacacatcatccatcatatcatcttccccaacattgatatcttccacatcttcctcatcttcattgttgtttccacctggtatctttctcttctttggaccatgctccagtctatggctatccaattctttgtccattgtttcttgtaggttcatgtcattgtttgctttcctagctttccgagcattttgccacctctccaactccttttccacgttccctacatattcttctcctatctgtttccgatattcagacagttcctccctccttgctgtcttccattccaaatactcttgttctttctgctgctcatatatggctgcatcttcatgca

SEQ ID NO: 4651 - DNA, 520 bp, Gossypium hirsutum
  Clone ID: LIB3825-031-Q6-N6-H9
aaggagataaagggtcaaatctcattaatacaaaatttttggaagaaaaaaaaagagtccataaaatccgtcttttaggagggtgaaccagtttttgtactagttaggctactggctggttctaacattctaaccgaaccgacccgaacatttatggttcaacttttcaaatttagcaagatggtttgaacattattcacctcatttccactaatcaagtaatcatacggctgctacaaaaagcttgtttttgcgccatatccaatagcttgctctcaaagaatccacatgttccaagatgtcacaaattgccattgacaggtccggatctagtgggtcagtgtctgaagtccgaagagcgactacagaatctctgaactcatggcatggctgaaaaccatgacaaagaagatcgagaagcattttcagcgcaaaaacgtagttgtttttcgtgtttataaccttcaaacatactgatgagatctcaggatcattaaccaaagctttaatatcgtctttg

SEQ ID NO: 4652 - DNA, 316 bp, Gossypium hirsutum
  Clone ID: LIB3825-032-Q6-N6-A1
aggagcccaaatttgaccgggctgtaaaccaaataaatattttaaaagtccatttacattggcccaccaaccagtagacccaaaatcaattggcctaaaccttatgcccgggtacaactcagcagacccaaacccggtacattactgggccatttttaaaatcttactcttaagggccattacaacagacctaaatgggcccaagactaaagggggccaactgggccaaaccggttcaccgagggatgaaaccctaggggttttgccttttttttttctcgcgccgcaaggggaagattccagaagccattccaac

SEQ ID NO: 4653 - DNA, 443 bp, Gossypium hirsutum
  Clone ID: LIB3825-032-Q6-N6-A10
cgagagaaaggcaattttattttaagagtaagtagctacaacacagtagaggaccccaattccgtattaccactagactagactagaaagccatgaaatctccctccatacaataatgacttttaatatgatggcctaatataataacctgaagctaaacttagacttgaatttctacgtgccatctgtacatctcctccgatggcactggcaatgtaagtgtcaccaatccggtggctgagtcatagttgaagtgagtgtcgacattgtccacacagcacttcaacggacgctgagatgagtatccaccaaacctcccacagccccggactttaagactgatcgttgctgttggattccggttggtgctgagtgaagttgtcaactccgaggaaacctcgccatcaaagaactgcagtttctcatcggatgtcgtttgtact

SEQ ID NO: 4654 - DNA, 549 bp, Gossypium hirsutum
  unsure (1)..(549): unsure at all n locations; Clone ID: LIB3825-032-Q6-N6-A11
ggaccaatatactgatcaattgttgatccaacccgcccattcatccaaccgaccaatccaatcccaanaacaatcatcaactcttatggaatccaaatacaaaacctaaatgaatctaattgccaaattcagataccaaaatgaataacaaaaatacaagtgaatctagttctcatgttcatgagccaaaatttaaattataccttaagaaaacgatgagtttgaagtaattgtcaagactcttttcattcacaagaacagatgtagatgtttgtagtaagatgaaagttaaagcggggcacaaactggaaagcaaaatgtaaaggttcactcaaaaggcataaaagaaactgattagctcttgaaatgacattacctaccacaaagatctttaaacaactactaattctaatcaaatttgaacaataaattgcagtgaacttcttcgatacttgaactggaagggttttatgatcatcccgacccaaataggattagactcaaactgcaaaacaatcgaagacaactatgattataccaaaaacaaaa

SEQ ID NO: 4655 - DNA, 570 bp, Gossypium hirsutum
  Clone ID: LIB3825-032-Q6-N6-A12
aaatgaatgtatgttatcggattaaccaaaactgtaacaaaaaggaccaaaaacgaaaagaatacacatatgtcatacgtaacttactttacagtaatccaacaacacaacttagatgcaatctgttttccaagcctctcaaatgatgacctaatagcatacaccagaaaagcagctttgcaaggtaatcacgtgaagtgccacaagtttcatcagcagcatcttgaagatttcccgtgtttactatccctgaatctctcatacaggcatccttgaagaacctttgcaatatattctgaacaagctgatggatcatttcctccacttgtaccgatgatggttgggataattctgtcaccatgtcagcatccaaggatcgtaaatactctaacaaaccattcatgttttccctgccacactccattcgcacattttccttcttttgagcactcagttcctcctccatatcagataactcagcttgcagcttctcaatatacttcaaagcctccggcgacaaatcctcaaaaaccctcggacttatcttctctagttcttcatattcaccat

SEQ ID NO: 4656 - DNA, 428 bp, Gossypium hirsutum
  Clone ID: LIB3825-032-Q6-N6-A2
aaaaaaaaaagggaacaacggagggccccaagccccctctctccccctcgaaaaaagggggggggggggggagaaccaaaaaaaaagaaggcaggaaaacccggcaccacctcagaacccttaaaaggcaaaaccccccaaccgcgaaaacggaaaaaaagaaaaaaagtaaaaaacttgaaaacaaaaaaggaaaaccgggaacggggggaaaaaaggtaaaaaggaccaaaggcccaaaaaacaaaaaacaggggctaagggccaaaaccccaaaaaaccaaacaagaaacgggggattggggaaatgcaggaacggaggaaaaaaagccaaaaggccatcccttatttaaaaaaggagaaaaaggggaaaaaggcccagggatccaaaggtcaaaaaggaaaaaaaccccggaaaaacggaaaaa

SEQ ID NO: 4657 - DNA, 550 bp, Gossypium hirsutum
  Clone ID: LIB3825-032-Q6-N6-A3
gatataatattctatcatattacatgactgactttgtcaaagtttacaattgacagaagctaaaacttgtagggcttaaaaactagctctcttcaaggatgtgacggtaacggcagcccccaaagccgacttacccacttcgatatcaaacgagtcgtaacgtctaaacaattccaccaccaaaagcctcgacatcaacaccacgaaatccttccctgcacactgtttgttccccaacgtcggttgctgagtctcgggtccatttgaccatagcacgtgcttcaacaacttctccccctcctctcccatgaacctctcccccacaaactcctccgctctctcgaatattttcgggtctttcgttgcaaatggttggaacccgaacagcatctccccttgtttcacttggaacaccgcgtcgtggctctctatcacgatatctttctttgctctcccgtactgtaacgggaccggtggttcgatccgtaacgcttcgtagacgaccgatttcattaatggcatctgttccatggcggccattgtgagtttc

SEQ ID NO: 4658 - DNA, 534 bp, Gossypium hirsutum
  Clone ID: LIB3825-032-Q6-N6-A4
aacttagccaccttctaattattgatgtttcatacgaatgcaattatttgttgtagtataaacaagcatatcctccaaaatatcacataacagaatccactgctattttctttttattattttgtatctcttgatcagcagttaggaggaatatgtttacacacctcaaattctgtagaccccaccacaaacagtaaaagtatttggaaaagaatttcgttgatgaaacaatgccagatgataaagcctgggtgaagattccaaaatcaaatggaggattatcatcattttcatcagctgggcacttttcattaagaacagaatctcgcatgcccttccatatgttgtaacctttcatttgctgattcccacaatacaagaaatctttattgcagtcactaccaatatccttgcatgcattctgccagcatgtatcatttcgctctacagctaacaagtaccagaatgcccctaatgactgcaaagcatatataatagcaaataatatgcagctccagcccatgcagtttcagc

SEQ ID NO: 4659 - DNA, 445 bp, Gossypium hirsutum
  Clone ID: LIB3825-032-Q6-N6-A5
aaaaaacccggttttaaaaaaaaaaagggttaaaaaaaacccctttttaaaaccaacccaaaaacaaatgggttaaaacggccctaaaaaaaaggggggaaaaaaaccccccaaaaaaacccccaaaaatttccaaaaaaaacccccggccaaaacaaaaaaaatttccggggaaaaggcccccccccccccaaatttaaattttcgaaaaaaaaaaaagggaaaaaaaaaacccccctttggccaaaatatgagaagggggggcttaagtttaaaccccggggaggttttaggggggcaaaaaattttctcaaaaaaaaccctttgggtttttttaaaaaaaaaaaggccccaaagtttcccccctggggggggaaaaaaaaacccggaaaaaaaaaaaaaagggggggggggaaaaaaaaaagggcctttttttttttaaaaa

SEQ ID NO: 4660 - DNA, 571 bp, Gossypium hirsutum
  Clone ID: LIB3825-032-Q6-N6-A6
gacccatatctgatacgtgtgcattaagaaaaagaagaatcgaaacaacataaataccaacaataatgtattttaatgacttctaggggcccaaggagaatgcagtgtaatatgaacaccatcccagcaacttcaatagcaccaggaggattagaccccaccacccaagctgagttgaacccatatcaatcaaccccaactagctttctttcgaaatcagctagcatggagaattctgtatctgatcaaaagaatggtggactagtgttgataaataaggctccaaggtggcatgagcaactccagtgttggtgcttgaacttccatggacgagtcacaattgcttcagtgaaaaactttcagttggtggcttcaccagagaacgaaccggcaggaccagaacatgagaagatcatcctccagtttgggaaagtgggtaaggatttatttaccatggattatcggtatccgatctcggcattccaagcctttgctatctgcctcagcagctttgagactagaattgcttgtgaataaaaattatgtaagatcatgaacagggattgtattt

SEQ ID NO: 4661 - DNA, 440 bp, Gossypium hirsutum
  Clone ID: LIB3825-032-Q6-N6-A7
aacattaaatttgttggacattttatcattccaactgtttataaaacaaaacaacacccaatctaacatgacctcactcttaaatatctgacatgaaaactttgtcccaagtctagtttcagagttaaccagagggccaaaaacatgattggaacatttgagcaacattagcatctcgaatacagcaaaaaaaaattcatgacgccaaatgatgattagtcttcctattcaaagacggtatacagctagactttggtaggttaaatatcatccagtcacaccaaagataacaggccagtcacttcacctatgcttgatttgcagcctaccaagggacccacagatatatagcaaggtcggcgaatcatgattaacttgtgaggatattgtgactttgtcagagatcatcaagttttttgtcaagcataatcatctggaac

SEQ ID NO: 4662 - DNA, 555 bp, Gossypium hirsutum
  Clone ID: LIB3825-032-Q6-N6-A8
agtgctagatgcgacataattaatttattgaaaacaaattttcatattcaacactaaatcaatgcgattaagagttttgtttaccggcaatgagctagaactgaactgatcggcctagcctaggctgcctggccggcccaaaattcgacataaaattaacaagagcagaaagaacttgggaatgtgggagttttcctcttgcttctcgtaggactctaatctaaactacaaacctagacttggtatctaaaggagtttcatcttttacccatcgaaaagcttgtaagatgaaaacttcaatcgaactaccccctttttgacagctgtttatacgctcccgatgttcagctgacgagttttttcaatactgcttcggcccgatgctcaaatttagggagtgcccattcatgttggactatgtcaagaccatctttctcagcagtcaggctctttgatggatcaaagccaaacccacccatctgcatcattcgctgtgtatcatccattgcattttcctctcccagaatcagactaaataaacccctcaaaccaaac

SEQ ID NO: 4663 - DNA, 569 bp, Gossypium hirsutum
  Clone ID: LIB3825-032-Q6-N6-A9
caactaaaaacttaaaacataaatattttgccacttctcttgtagttcagttgagtaaaaaaggaggattgtaacttcgaatgcgtaagcaacttcactaaaaaccgaaggctagaagaggcaaggagaataaaaaaaagagaaatgacaaaaatatttctaacatcaacagtcaataaccggtaggaatttcctccctgaatgaatttagtcggtcaaagatcaggcagtgccttcctttcatctctccaccttacttctcacccatcccatttttacatatttaaggtggtgatgcatagatgaaatcctgaaggagcaaagtcatacagaagagattaggagaaaagaattgaagcaaagattataatacaatggtgctagaaccgtatattaggaaaatatcaaacaagtctgatttccagaaatttcacaatgttctctaccctaatttagacagacacccttagtccgtaacttgaatcggctcattctaacttccaactacaccatacccctaacctcaacaagataataaaaaacaacaagagattcaagctcattttcgc

SEQ ID NO: 4664 - DNA, 504 bp, Gossypium hirsutum
  Clone ID: LIB3825-032-Q6-N6-B1
agcatattacatcccatttttcttaaatgtatgtatctatacatatatttacatacttccccccttacatatttggtagaagataacatatatataaccgaaccgattgcttcgctaccgtatgttgccactgcccagctgagtttatcggcttccaacaataattcctatttacaatcggagtcggcaatggaacaactgtcacgtatatttcttcaagttcctttgagctcgaaactgacctaacttgtctctcaagtcggcggcatccttgtagcgttcctgattgatagccttgtttaaatcacaaacaatgttgaactcctctgtgtcgaggcaatgctgaccgcttggctgatcaagttcggtgaataataaaccgtctgaagctggggactgtgttgacaacttccctggttcgattacgcacataccgtcactgtatgccaaggacttgttaacttgtataggtaccttgcacctcacggcaatgttgatggcatc

SEQ ID NO: 4665 - DNA, 458 bp, Gossypium hirsutum
  Clone ID: LIB3825-032-Q6-N6-B10
aagcacacaaataatttgcgaactttttattaaggaaagtagagaccctagtggttgcttattttatagctataatgctcaaccaccataaggatacatagactgactcatgactcaaacaagacagttaatctgaaacagagtcccaccatggcaatgggggtcactgatctccccaccattgatggacataaacaccagttcctctaagggacttgaagagatccatccaatctctgttcaccgctcggttggaacagtgcaggaataactcatcaatggagcatatggttccactttcaaacaaatctgagagaattttcaactccacttcccctgcattcatcttcagaaccacacagtctgcattttgcaccgtttctttaatccaaagaaggaagacgaatccttcgtcttcaacatacggatcggaatcatcataatccaaggaagcctta

SEQ ID NO: 4666 - DNA, 547 bp, Gossypium hirsutum
  Clone ID: LIB3825-032-Q6-N6-B11
acccaattcaatcaatccttaccggttctccagtcaattgattcaaagccttggtacactggctgattcctgattcaactggctagtctagtccggtcagttcaaataacattgtctaaaagtgaaaatgggtaaaaccccaacttaactccctcacaagacctacacacaggcaacatcatcagaaatcgtaaacgtcgcatgagataaaaaaataacaaaggcctatatcaaacatccaactcagaaagtttaaaccaattaacattaaacctaaaaatttgtagcaagaagtttaaaccaggcctgagctgcaaaaagacctcgtgcatcacaatggagtgagcacggattcaagcctattttcactctataatctttcccagtttatcattttggctattgcttattcgtctgtaacacatcccatggaagccgattgcacattcttgatgtacttatgcaaagttcctctgttagccttgtaaggaggtggagtccatgtctttcttcgctcatttagttcatcatccatcaactgaacatt

SEQ ID NO: 4667 - DNA, 58 bp, Gossypium hirsutum
  Clone ID: LIB3825-032-Q6-N6-B12
gcgatctagacggacgcgtgggcggacgcgtgggcggacgcgtgggcggacgcgtggg

SEQ ID NO: 4668 - DNA, 563 bp, Gossypium hirsutum
  Clone ID: LIB3825-032-Q6-N6-B3
cagtccatgaactgcaatcttattgatttcataaaaccaacattactcaacatagtagatttagtagtacacaattataacaaaatataacatggtaatacagttcgagaacgtagatctcgagtataggactcaatttattatttgtaacattaatttaaaaccaaaaccaaacttttacttgtctatatgagcatgattttaattggaaactggtggtgagaggccagcaaagacatggagcaactccccgttgtcgatgtgccttgcaggatcggaaaaggcataaaggaagaactccatgaaatctaagtccttgaaaagccgaggatgttggtcatctataaactctttgggtgtcttgattatagtaccctcatttggaatgacgaaagctgctatagagtatcgatctttgtctccgctcatcatcactctgtgattcactgatttcaatctcccattgctccaagccttgaggggatctccaaccacaaatacaaaggaagaaggagataaattagttagcttgatccattgaccatcattgacctcaatttcca

SEQ ID NO: 4669 - DNA, 570 bp, Gossypium hirsutum
  Clone ID: LIB3825-032-Q6-N6-B6
gacttcatcaatatttcataagtagataaaaagaaagacatattagatctcttaaaaaaaagccttacaaattgaaattaacttggtttgcaatatgaaaatatttaaaaacaataatcagatcagcaatctttttaaacccaatcacacataaaatatatacactttgaagatcatatatatatatatatcttcttcctctacatcaagagctcattaacccacccgaggtcaagatcatgatccaaaacgacaccgtttccattgtttttctcatcatcaccaccaccattgaaatattcaccagaaccagaaggacttaccattgaaggagctcctttgaatgaaacatcaagccatggaatgtttgtatttggagtagtagccattggtgaaggtacttcggacaaagtcatggttcctaaacaactcatgacttccttcaacaaaacatcatcgtaactggttgtcatttcggttccaaatttactaatacgatcaccgccgtaccttggtgttcgttgctggtgttttaagggagatagaggcggtgacagggatggggatctc

SEQ ID NO: 4670 - DNA, 232 bp, Gossypium hirsutum
  Clone ID: LIB3825-032-Q6-N6-B7
aggaaaaaaagggggactttatcaatattcaaaagttaaaaaggccccaaggaaaagggtcattttagatcccttcaaagaacttacaaactgaaatcaacttggtttgcaataataaaatatttaataacaataatcagatcagcaatcttgtttaaaccccatcccccctaaaatatatcccctttgaagaacatatatatttatcaaatgaacccgcaccccgggggcc

SEQ ID NO: 4671 - DNA, 535 bp, Gossypium hirsutum
  Clone ID: LIB3825-032-Q6-N6-C1
gaagggtgcaattgggtttaaattaaaggtccaatttgcaatgagcaattaaaatccaatttcagcacttgggttttaacgatgcctttaatcatgtcgcttttgcttgagtcctgttaaaggaaaataaccttaatctctcaaatattagcaaattttaaagactttcagcttctttcaataaattttttagacaaatggcatagctaattccttttaggttgcaagttttgttattgaacaaaagggcttataatttggtttttgtttttgttctgaaaggggcttacaaattgttcaaagtccagaagggcatatcgacaacacattagttgtaataacgcatctctgctcaaccccaagggcttcaggtatggaccacaacctggagttgcagcaacatttacctttccttcatttaatattggttaaattatgtagcacttagaattactttgcataacatttttttctcctcattttctaagataatatggacattaagcataactcgattaaaccaaaactcaatgca

SEQ ID NO: 4672 - DNA, 530 bp, Gossypium hirsutum
  Clone ID: LIB3825-032-Q6-N6-C10
cccattctacaagtactgggactcagttattcacatgggagactgatccatatgctatgcatttgcagctcctatattcccatggatccatagatttagaaggagaaagcaaaggactactctgtggcagcaacaactgttggcccttccaccttgaatttagcaccccatatctcctcttcttcagcaggcactgcagtgatcttgttcttaggattctcatagcttcttaatcctcctactgctgtggagtagaaacagccttgaggaaaagaagcaagagatttgccacaggcacctttcagcaattcagcattatcagcaaaggccacatatccgtcggcggtgattccccaatagagaggaaccttaccaaattgatcagaagccacaaacaaagtggaggtggatttgtcaaagacaatgaaagcaaagctcccaattagatggccaaccacatggtttggaggataaggtgctcggtcacgaagggccttgtaagcttcaatgaccaaaatcacttcatttgc

SEQ ID NO: 4673 - DNA, 562 bp, Gossypium hirsutum
  Clone ID: LIB3825-032-Q6-N6-C12
agaaaagtgcaggaaccatatcattaaaatggtcaaatatgtttttaagaacaacattaacttaagaaactatgaaaggaagaaaaaaaaataaagaaagaaacaagaaaagcgcacgttaaaataggacttgcaaaacaacaaaaccctttgcctcaaataatcttccaaaaaaggtaatctcatcaaaggagatcagcgacgtttgacggcagctcctcaatgatcacattgtagaacttctggatgtcatacagcattctctcgtcatcattagtcacaaagttaatggcaacacctttccttccaaaccttccacttcgtccgatacggtggaggtagttttctggttgagtcggcagatcatagtttatgactagagacacttgctgcacatcaataccacgagcaaggagatcagttgtgatgagaacacgagaagaaccggagcggaattcacgcatgatgatgtcacgagtgttctggtccatgtctccatgggtggcagaaactgtgtggtcacggcttcgcatcttgtcagttagccagtcaaccttgcgtt

SEQ ID NO: 4674 - DNA, 433 bp, Gossypium hirsutum
  unsure (1)..(433): unsure at all n locations; Clone ID: LIB3825-032-Q6-N6-C4
ggggaccgcaagaaaaaatatgaatatattatggagaacccaggtttgggttttttatcattccaaaactaaaaaactttaaaccaaaactagacaaaattttagccatttacaccaaaaatgggggcaactttaaacttacaaacactataaaccttgactaggtttggcaaaaaacaattttcccaaaaacataaaaataaaaaccccaaaaaacttgagcttttttaaggttcttctaaaaattctgagcgggttaaaaaatccccttccgctccttgaggttttaaaaacccccctttttttgggggttgcccaactaaagggccttaaaaagccccctttttttacaaaacatcaagaggcttgagggggccccggaactttggttttttaaaaaaagaaaaaaatggtttttaaaaccggnggcccc

SEQ ID NO: 4675 - DNA, 548 bp, Gossypium hirsutum
  unsure (1)..(548): unsure at all n locations; Clone ID: LIB3825-032-Q6-N6-C5
gttaaatgggttgccaaccaaatctatattgtttccactattataaccttgttccaaacagattgagagagagaatacaacangaaatatacagcctcaccagaaataacaaaggaaaaactaagcgtaggaaaaatcaaacctgatgaattaccatttcaatagtttatatagagacatgcctgatgttgacaacagaaaaaggcccaataagttcagcatggcttgatttcaaatccgatactcagtagcgttctagctgattccattgccttctcacctccaaggtctacagcctcaccggtcaattcaccttctgtacccactgaccactttgttgatgtaacttgcttttgctctccatcagctattgcaagttgtaaattgttcatagaagcaggagcagcagcagcaacgagaggagcacttgaagggccatgccgcttttttggtacaggcatgtcatggtcatgaacacctttatatgttataacgacagcatttgtattatctacagctgtctcaatatgcttacgaacaggacaccc

SEQ ID NO: 4676 - DNA, 514 bp, Gossypium hirsutum
  Clone ID: LIB3825-032-Q6-N6-C6
gtgatcaattgcttttttgcactatttgtgtgccattttcgcgcagtaccacactctccttgaatcttatcaaaaagttgttcctaagcgcgcagtataaaggcaacagtaaaccgcagcagtaaggcctctaaaaacagggctgaagcaggggctacagtcggctccctaggtggacccccttgttacgagggcaatcggtgggagtggacgagacattctttatggacacactcaacacgcgggagcgggcgagggaactaagtgctgactgggcacaagtaccagccgtcccggaaatgttccctgcagtcgcacctatcttaatatgaagggctgctctacccaactccgagcagcgccctagaaacatctggggctttaaccatggctgcttaaggggaagactcccccctataaactttgaccctcaaacctcccgatatgcgaaccatggtttgccttctggagactctgccacgcgaaaaaaagaatcattaaacgctcctacctt

SEQ ID NO: 4677 - DNA, 393 bp, Gossypium hirsutum
  Clone ID: LIB3825-032-Q6-N6-C8
aggaacaccagcactacttttattctctgggattagcaatgaccatgaaaaaacataaaagctgaaggcaggcatttagtttggctagaagcaaatagaagagctttgatcagtcgaaaaaaagctgcatgcatccccatattggtaaagggggggaaatcttgaaatccaaattccacaaatcaaacttcccattcacaaaatcgtaatgggcacctttcagggccactgttttcttcaccactggttttttcacaaatggatacctcaatagggtccccaaggaaacattcactggctccttttcgcaagtggggcattgctcccaaaaacctaacccattctggtctgaattcactttgggctttggtgggggacaaaagccaacccatt

SEQ ID NO: 4678 - DNA, 414 bp, Gossypium hirsutum
  Clone ID: LIB3825-032-Q6-N6-D1
gggggaaaaaaaaaaaatttggggtttagctaaaaggcaaacaccccccccttttttgggaaaaaaaccccgcctttaaaaaaaaaaaatttggaccccaaaaccaaaaaaaaaaacagggggccccaaaaattggaaaaaaaaaaggggtttgttttggcagggggaaaaaaaggggggggaagtttttacggggaacaaacccggggaaaaaaaaaaaattccggggggccccccggatttatctaacccccaaaattttcggggggggaaaaccccgaaaaagggggggggccccaaaagaaaaaaaaaacccttggttccaacaaaaaaaaacttttaaagggaattttttgggcaaatttccccaaggccccagggcaaaaaaaaataggcgccattgccgcggggggg

SEQ ID NO: 4679 - DNA, 437 bp, Gossypium hirsutum
  Clone ID: LIB3825-032-Q6-N6-D10
ctattaactatctgacgcaaagaacaaccctatcacttccttccggagaccagattgggtgctatcctgctctctactgtgtctatacacaaaactgacccccaactgttctttaaagcaaactgagaggaaaaagaatgccccaacatgtaacgaacacaattctaccactgggcttttattgtttagcacggtgtcacctaaagaccgagctgctctgacgaggtggtgtcggttcactgggcgacgcctgcctgcaaacacgactgggtcgaaccttttaaggatttcggctacgcgcggatagaggacacactctacaggtggcactttgtatctggtctggtcatacacagaggaatatgccatgtgcttccttctaaagctatgcatcttgcatatttgagaaagggggacacgcgcagaaagctccaaac

SEQ ID NO: 4680 - DNA, 556 bp, Gossypium hirsutum
  Clone ID: LIB3825-032-Q6-N6-D11
agaaaaacattgtctaaataacattatatgaaattgagtttgcaccatcttcctcaaacaagtagaacaatgtaaaccaattttaaccattgaaacaaaattgcacctttgacactagacttgtttttaatcaaaaaaaaaaaacagttttgctttgcaactcagactcctaaataaattctgttgatttttttttctggccaacaaattcctttcaaccctctctatgaacaaaatagagcttgcccataacatgtagaacggcaacaaaagcaatgaaaccaatactcatgacaagcacaacattcggcgagatcttcagacctggtgcatcatccgtgtaaaattgaagcatggtcccagcagcccctcctgaggctgcaccacttgtggttctccgcctacgcatgcttgcggctgctgttttaccttagtgatataatcgttcattgcttcctccttcggtttcccttcaacagccttccatgcatcccacttgtacttttccttcatgttgaacattccaggacggctggtgttcactggtccaacagta

SEQ ID NO: 4681 - DNA, 549 bp, Gossypium hirsutum
  Clone ID: LIB3825-032-Q6-N6-D12
aataaatacttttttttacttatttccaatttagttggtttaaaacaaataatatttctttagttacaactcagaacaaaaattggtgtcaattgcaatctgtgttttgatgggaaggcgtatcatcatcaactcgacccgaattaggttgacgggaagcccgacccgaacccatcatacccatcatgctagccaagctagcaaatgcaaaaaccgattgtgaaaattccaaaccattgatctctccaccctccattcttcgccggccaccatcaccctcaccaccttttatttcagccgtctcaggcggcatcatgaagcgacaaaccgggcataacccatggatcaacaaccacttctcaatacaacccgaatgaaacacatgcttacatggcatctcccttgcttcttcttcaacttcaaactcttccaaacaaatacaacaatctttgccactctcttccacttctatcctttgcattgcttctatggaagctttagaagccggcgccggcccaggtttattatcgctgacggctccaacgccac

SEQ ID NO: 4682 - DNA, 548 bp, Gossypium hirsutum
  Clone ID: LIB3825-032-Q6-N6-D2
agcttaaagttcagcacactacactctttatgcgaaaaaactaccgactattaagataaaagattttgaactcaaaaccaaaacaaaatacaaaggcacccaaacatctgcaaaacattatggctctgctctgctacggtgatcacatgcggtggcaagtttctactgtgatctaaccctgtgattcaacaacatctcccggagctccgccgcatcgatctcagccccacaattctccggccggtaataccccgtaacagggtcaggcgcccaagctgaagaataagcccttgtctccgacgacgacgactctttcatcgcatctcttcgttccactttccccatcgccccaggcctaccaaagctagccgtcactgccgccggcggtgcacccgagtaacctctccttgatatggagacataaagaccatcaaaaatagaagcaccaaggagcttaaaggaagaaacagagcgagccatatttatttttacttgcttatatatggagttgtagggtaaaaaggatgtataaaatttatataatatat

SEQ ID NO: 4683 - DNA, 501 bp, Gossypium hirsutum
  Clone ID: LIB3825-032-Q6-N6-D3
attaaaacattaattttggggggaaatacatggcattgataaaaaagggatacactttggacatttcatcgctccaagaacttaattcgtccactccaaaaaaacccttaaagttaagggggaactaaccactgaagttggtagcaaaaggccccgattgaagttaactgcagtctaagtacaacgctagtaggggtaatatgtccctgataactacccaaaaccaatatggtacagtcgaagtatcctcgcaaaccaaggatgaaagtgcaaataacaacctacctcaagcaaatgtaaaaaaaaataaaggccttatcgactttaatctcacttatctaatgaagggctataaagccatatctatagtcatatggttttaaacaccacaattccagcatggctgttatttcctccgcgggggggatctataacaatttttcaccctttactgatacagggaatgccatcgatatacggttcaacgatgggatggcaact

SEQ ID NO: 4684 - DNA, 562 bp, Gossypium hirsutum
  Clone ID: LIB3825-032-Q6-N6-D4
agacaagcaaagcaaagaactggggatttctataagctaacgaactacattcttatcaccattatcattccacaaatctgaaaattcagtttaggcgaagtgtaacttacagagaccattagttaatatcccctcatagctaacagagtttcagcttacaagaaccaagttatacaatattgaacagaaccgaaagaaatctatacatttctctatttgacaaaaaggagcactccttagcaatacactatgaggtgatatgaagccttagcctactacatagcttttcacttgttcgcaagcagggactttggaagcttatctaaaggggtagattttagcagaaacagacgagcagctcgctcttgcaaagtacccccacattttagcccacgtgactgtagttcagatttcaaccgctccaatccaagaacctttagaaatgataaattagcttgcccaaaaaaataaaagataaattagttaggtctgaatcaacattgggccttataaaggcaacagcatcaccatgtggtccatgacaatttaatgcatatgccat

SEQ ID NO: 4685 - DNA, 523 bp, Gossypium hirsutum
  Clone ID: LIB3825-032-Q6-N6-D5
aggccacaatacttttcatagtttatgatttaatccctcactcaaattaacattgtaatgggccaaatccgctcgggcccaacaaccaaagaataatcccaaaacaaaaaataatatatagtccattaaatgtctatttacagactttggcccaatacatgccctagacccaataactaaaaccccacggcccaaggactgacccaaaacccgaaatgagcccaaatggcccaaaaattttagaaaccctagggttcctttttttttcctgcgccgcaacagcaacctccctatgccttcgcctttgtactcctcacgccaagcgccaacaggacccccatacacgaacgcgcacccgtaccttgcaaatctactattggttcttccttgcctcgtcgaagtcgaaggtggaggaggaatcttgaggtcgaaaatggacttcaaaaggcgaaaatacccctgtggttggggaccatgggggtgagggccaaatgatttggctaaaggtcagctaaaaaaacaa

SEQ ID NO: 4686 - DNA, 531 bp, Gossypium hirsutum
  Clone ID: LIB3825-032-Q6-N6-D7
aaagttaaaaaggataaattttcatttcctttcacagaagctaggaattaccaaacttcccccacccaaattatcattagctaattaattagtctgatagttgtaagaaaaggggtcattacgcaacatgaaagtaatcttcacactgcattgtaccggttacataatttagatcaacaacccactaccctattattacaagttaaaataccttcccacattgtttcattgtcaataccctaaacctacacatacatacacattcgcgcatatgtatgtcaacttcttcctatcctcaacgaaggatcgatccctttattacttgatccagcaaagagcttagcaatttccaattgtgtattggctatgatctctgttcttttaagctccatttccccccttttagtctcagcttcaatcctcattttctctatttcccttagggtttccatccttgattcttctgattttaatactacttcagctagtattcggatactctcccctatttctctatactcatcctttttc

SEQ ID NO: 4687 - DNA, 399 bp, Gossypium hirsutum
  Clone ID: LIB3825-032-Q6-N6-D8
agaggagttggggggggggggggggaggggggggggggggggggggggggggagggggggggtttgggggggggggggggaaaccttgttttttggggggggaggggaggacaaaaaaaaaattaggaaaaaaaaaaaaaaaaaaaccaaaaaaaaaaaaaaaaaaacccaaagaaaaaaagggaaaaagctccccttggaaaaaaataaaacctgggggggcctttgtaagggaatagttgtacaaaaaaggatagaaatgggggggctttattttaaaaagatttaagaggggggttcaaagggggggcctggggtggagcggatgaaaaaggggggggataaaaagtttacggggtgggggggggtggaaaaaaaaggggggaaaaaagggccggg

SEQ ID NO: 4688 - DNA, 581 bp, Gossypium hirsutum
  Clone ID: LIB3825-032-Q6-N6-D9
tcgcgatctagggccgcccttttttttttttttttgatcaattaaaaacatatactgccagtaccataagtcacattaaacaaaatcagaaaaaaactcaatattctaatcatttaccttttgaattgaaacactctcgaaactgtttaattagattaaatatttgaatgcaaaacacaagaaaaacaaagtagtgatgattcaaaaccaagttagtggctactgtgcacgcaattacccggcactgctaatccctgtttttgctgccgctgaaaattacacttttaagcaagacggagaaacgggcaattgtaatcattctttatttgctgcacaaattggcaacatccatgttctaacgacgacacaacatccagctttccttatattcaacggccaaactgaaatgttttcttacacacaattcatccatatcaagttgcattataatttctgactcctagttgtcgtgccaaaatagtaaagcaattttcggtagcaataacctcgcgtcctcagtcccaaatttgaaaacccaagactgggagaacttctgattgtcttttgcattcgtattccac

SEQ ID NO: 4689 - DNA, 583 bp, Gossypium hirsutum
  unsure (1)..(583): unsure at all n locations; Clone ID: LIB3825-032-Q6-N6-E1
ngacgccgctcggttctagnacgcgagcgccgcccttttttttttttttttttcttaatcaagtaaatcttggtaataaaagnaataatacaatttacatgactcaataatttacagtttaataaaagatataatcaagcaagtatgaaatccaaatccagaataaacgcctatttacatctctaactgccatgcattacttctttacatgacacaacaatttacagtttaatggaatcgaatttaatgtttacatgaaaaaaaatctaaaccaaaggacaagttttgagtccagacctctccccgtcctttatgccatcctgatcatcaacccaaaatagatgggaacatgcgtaaatagctctgcactgatcagccttcttcaatagccgagctgaatactgaccaaagtaacacatatttaagttttgtataaacagttcaatgaagtacaatgaatcagagaagaggaagcaatattactcctgtggctttgtgtgtcaaagtatctctgttctcaacaccaaatacattcatcctctaaagagtcccaattatcagatgaattgcagtcacttgggct

SEQ ID NO: 4690 - DNA, 448 bp, Gossypium hirsutum
  Clone ID: LIB3825-032-Q6-N6-E12
aagacgatcaatgttgactcaaatacatttcatcgaaacaataaaaattaacaacacagatggagggcgaagtacattgtaaaaaggcgtctaaaaaagactgaaatgaccttgcatgataagattgtatgggtgaaggcaccccaaaactactaacaaaaacattaagagacagacaccgaaacaaaactaaattgcagcagaaaatatagcggcagaagctgagttattctcaaccttacagcttgtcctcgtactcagaaagtggggtcatctgctccttcaatcccttcctcttacggatctcagcaacatggcctgctgcctgggaacccggttccaatggatctgatgacatcatatcccagtgatcaaacacacattgtgggaaagcctgtccggaggttgcagccctcagagtgctggagaatccaaaagactcaataac

SEQ ID NO: 4691 - DNA, 542 bp, Gossypium hirsutum
  Clone ID: LIB3825-032-Q6-N6-E4
atgggaacctcgattacttaaccaagcgccttctcccatttcaaaactaggaacacatagtttcatgtacaaatagtaagcatctacttgattcctgcctgcactaaagatccttggacacaaggggaaaagtctccaaggaccgtcaaaaaaggtcatttctatagcaaggaatctattcatattgctctcaagcaactgcctagatgctttcaaaagttaaccgggaaacatatccaaagacagacttcaaaagaagaaattacatgtgcaacacaaggaaactgcccatggccgcctcagcccatgggcccagcatttaccttttgtacagaaccctaatgtcttcccttaacaactgactttccaaaaaaaaatcattgcacgcgttcaaattaacagtctccatatcaaaatatcggttaccaacatacttgttccactcaaaccacatttttgcaattaattccttcttgaaacaagtactatagatcctcctcctcagggagaatcccctgcaaccaatctatacgcgtacactt

SEQ ID NO: 4692 - DNA, 544 bp, Gossypium hirsutum
  Clone ID: LIB3825-032-Q6-N6-E5
aaaacaaaattacagaccaaatataagaatcactggaaaaatatcattagtttatatatacaaatccaagaaaaagccacaaagacgtggaaaactacgaaacctgaacatggaccataaaagggacaaaaaaagtatattcacatttggaatggccattaatgttactactacctaagttttatctggtagactctgttataccaaatggaatgaagtgtcatgtggaagagatcgtacctctcaggtttcgcgtgccataggaaatgcctttgaacctttcgaacaccaagttgcaacgcgagatacctctcttgcggtattgacgtaagtatgtctttcaagttagggatgtctttctctgcaagtattatcgagaaagctccccaatcgagaacttcgaaaaacggtggcacaaaattgtcagagatgataacggggacgcattcataaaagatggattcaactactcgtggactgttaacctcgtaacctttgggacatatacagtacttagtgctcttcatgtgttggatataattca

SEQ ID NO: 4693 - DNA, 578 bp, Gossypium hirsutum
  Clone ID: LIB3825-032-Q6-N6-E6
aaaaaaggcaaataaataatctaatgtatatcatccttgcttaaaattggaaagagttggaactatttggtacaaagtaaaatcgaataccaaatcatacaacatgcattttttccctagccactgcataggaaaaaaatgtgaaaggaaaaactatatcatttcagaatccttgaggaactgttattaatacaaactctttactaagctacgctaatgcataagggcaacggcggcctcctgaatgaaaggctgcgtgacatgcacgaattgttcggcttcccgctccacctcttcccaacaccgacgagctccttttccctcattcatcttcttcacgaatgcaacaaaccgtctccaattgcccggatgaaagagcgatgggttcatcctcaagtacgtaaatgcacacatctctctatcaactgctgagccatcgacattcaacgatgaagctcgtaagatctgctcgtgggcgtattcatcataacggggaagtgcattctccccggcaagtggaacttgtgctgctcctgttgctaaagcaacttgcttcactagcttctccggtgcacaca

SEQ ID NO: 4694 - DNA, 550 bp, Gossypium hirsutum
  Clone ID: LIB3825-032-Q6-N6-E8
caacacaaactcataatttcatatagcttaaaataaaattaagtgctaagattttgatttatacttgatatatatagtaatacgtaataataccaattaaaactaacagatatatcgtaaaatctttcataattttagaaattaaactgaaccttgtgaaactttatataccactttgccatcgacgttgcctcttttgtcaccactaactgccacaccaacgccttgatactgagaaggcacgacacccccctgtgcagtatagtaagcctgtctgtcgtacgctgccacgtgtccatatccagcatctgttacaccgctgctcggcggccttaccacctgttgtgccatcgttgatatcggctggtgttgagtgggcggaggttgaggttgggccaccatgttgtaaacgggttgctcccggtaaacttcatgaggcattctctgcacgttggtgtagtagccttgaccggcttgtccggttactggtcgaaccatttgtggtgctgctgatgctgatgcaggtgcaggtgctggagctggaactggt

SEQ ID NO: 4695 - DNA, 194 bp, Gossypium hirsutum
  Clone ID: LIB3825-032-Q6-N6-F1
tcgcgaactacgaaacgcgcgcgtggacccaccaattaatgaccggaccctgcctgcatgccaactatctctatatatagtgagattaataatagctggaagcatggatatagatagctgctgtgtgagagaaatagccattcacaaacacacacacaatacaaaccagccgcatacatagaaaagccagcctg

SEQ ID NO: 4696 - DNA, 519 bp, Gossypium hirsutum
  unsure (1)..(519): unsure at all n locations; Clone ID: LIB3825-032-Q6-N6-F11
aataaacaaaatatattaacagtccaataaaagtccatcagtccaagttacataacctaatttcaaacccaaatacaggcccgataggcccaaaattttttacaactttggaaccctaggtctctctcttcgcgccgccgccctcagtcgccgtacagccccaacgccgctcatgcctccatgtcaacagcccttgcacgccagtacagcttcgtacacatgccacgcatctgtacctgcgaaaagaaacaaaagacagcaacgagaatggcagctaataggaaattattttgtatttttctcttttgggttttctttccggctataaatccaatgattcaatctttgtaatggttactgacgaaggcaacaaaaaacgaatacgaaaaagagaatacaaaaacaatacaaagcaaagaaggtgatttttttcgaacgccttgngctctttcttttttttttcgcatctggttcattttcctttcggggttcatatgttttctgcataatataataaaa

SEQ ID NO: 4697 - DNA, 355 bp, Gossypium hirsutum
  unsure (1)..(355): unsure at all n locations; Clone ID: LIB3825-032-Q6-N6-F12
gggggggggggggggtttttggggaanaaaaaatttttttaaaaaaaaccccggggggtgaaggggcttttttaaaatatttggggggaagagaaaaattttttgggggggaaaaaatgggggggggggggggtaaaacccccaaaaaatttttttcttttgaaattttaaaaagggaaaaaagacccccaaggcctttaaataagggttttaaaaaggggcaaaaaaaaaaaaaggccccttattaaaaaaaaacccccccctgtttttaaaaaagaaagggggccaaagggccaaaaaattttaaaaaccctttatccccgaattccgggggggcaaaaaaccccaaattttt

SEQ ID NO: 4698 - DNA, 454 bp, Gossypium hirsutum
  Clone ID: LIB3825-032-Q6-N6-F2
aaaaacagaaacccaatgtgaattcatagaacataaaaccaagtcctacaggttgattgaatatttcatattaataaaatttgaacggccttttcagaatgcaacctcatgaactgaacttgtatccaagtctctgcaaatatcataacagtacaggaaggttaaagatgtgagtcccaaacttccaacaaagtcatggcaagaggtaagaaatcaggttcacaagagctccaaaaaacatcagtcctctccgcatataaccatcaatggggtaaatttgcatcacttcatctttgccatgaacttctcatactcagtatttgcaccataggttgttttctctccaaaggatgctgccggagtcaaaaaaggatttggagcccaagggacattactaaggctctgagaattatctgtggaaaatgtaggtaccggaagaaggggagggggaggg

SEQ ID NO: 4699 - DNA, 258 bp, Gossypium hirsutum
  Clone ID: LIB3825-032-Q6-N6-F3
aaaaaaaaaaaaaaaagaacttcattataaacaaatagtgacaaatgaactcgtctccgttggcattaggaaagaaatggaggcacttgctaaaaaaattttatgtagccaactaatcattgtctcttcctacaaattcattactaaatcaatcgaagaataagccctcaatttgccagctctttttccttcaatagattctgtctgaaaaagtagccgatatgtatcttatatgaatatatttctatcttttgttcc

SEQ ID NO: 4700 - DNA, 538 bp, Gossypium hirsutum
  Clone ID: LIB3825-032-Q6-N6-F5
aacaagaaagacatgatttcattagtttatatgtcataatccatatgttataaaattttacaacctcaaaaagttacaacattgtaatgacattttatcatgtcattataccatccaaatattacaaacacaaaaagttaccaaaatatcatcaacagaaccatgatatttaatggtcagcaagaaatcttttgacctattccaattgtacagtaaactaaagaaaataagcatttgcgttggataatctaaaattttgatcaatgcgtgatagagctcatcatcagttaaaccttctacttcacataatgttgaatataattttagagcactttcttgaatggtcatttttaacttttgttgaattagcacctcagaggcaatactccgactgatttcaacgccaacaggcttgatcttttcttggtttatagctggttgctgttgtgtgtctgaaagaccacgtcatccaaagaaacatcagcttcgcatccatggaaatcgtttctttcttcatgagtatttgtagtagctgcat

SEQ ID NO: 4701 - DNA, 484 bp, Gossypium hirsutum
  Clone ID: LIB3825-032-Q6-N6-F6
aaaaatcaaggaatttcctccattcgctaaaccaatttgaaagtatcatacatatagtacatactagggaaagaagaatacaaaaatcaccaatcatttgagtaattttattgattttgttccttgacacatcaatttaaggaatcatttaagtccaccgatgaaggcagaggtgatgatagaatattactatcatcattccgatttagtcctagttgccacaagacatatataggaatagatgcctgaaagtgggctaatcacggtgtttagggaagaaaacttatgccacggttttgaggagagcattaacaacagcttctctagtcggcaaagcgggaattgcacctctttctgtcacggtcaatgcaccgcaaacattagaaaacttgagagcatttctcaatcggtcttcgtcctgaatcaaggaaagatcagaagctagttgcgataatgttccagcaacaaaagcatccccggcacc

SEQ ID NO: 4702 - DNA, 462 bp, Gossypium hirsutum
  Clone ID: LIB3825-032-Q6-N6-F7
tctcgatctataaccggtcgcgtggggaattctgatccggaaggaggagctctgatgtaaattataacaaatgttctcttgtaataatatattgcctgcggccttcaagtctaaatgtgtggctagtggtgcatctggctcagcacgaatacagcaagaggcaaattccagtttcatgcagcggctactttaactttcatcacaacggatggttcaacagccttccactgcttctggtcttccttcaactgggtcagccactatcatgcaaactgtaacaccagctgcagtcaatacacaaaccatgggtgcatctttggggccttcctgcgcttctggactcccttgcaataactcaagcactacaactagacctccctgcataagttgcggctctcgcgttacaggtaaactttcaaatgggcagcgaaattcacgctccaacccctcatttacatgcat

SEQ ID NO: 4703 - DNA, 552 bp, Gossypium hirsutum
  Clone ID: LIB3825-032-Q6-N6-F8
aatagaaagtagccatatattatatatattcaactgcataaaacagaaccaagcaaaaagtacacgagcaatgccaaaatacaaatgaaccgggttcggtgatggttaccgggatgttgaagtttgggagatgatcatccgacattgaaccttttatccctgtggatcatcccttgtaaagtagtattaaatatcaatttcttccacagatttgtataaaagcttcatgctatgaacataatggactcaatggaccatgacaatttcagaccagaattgcgcaactctaccataaattctttgcagctatatgtcttcacacttttgattgcctggaacaactgcaccattgcagagaagctctcttccttcatatcacattgcatagactatctccccactactatcaacatcaagctccgattcagaatcaaggtcatccatgtcttcatcatcaaggttgtcgactatgtaatggtttaagccaggggctccagcagctggaatggtggcctcagctattatctgcatgattgtatctgtgctctgcat

SEQ ID NO: 4704 - DNA, 470 bp, Gossypium hirsutum
  Clone ID: LIB3825-032-Q6-N6-F9
ccaaaaaactttataaatccacccaacggggggccaaccccttaaaatcggccaaaaaggctccaaaattttttggggaaaaaaggccacaggatacccggcaaacccgttaacgaggccgaaaaccgccgggtccccgtaaaaaggataataaaaaaaaaaattttaaggggaggtttccaaggggggaaaagggccacaagatacccccattggggggatggcagggtctcccacatttgggggaaacacacgctgaaaaccggaattttggctaaaactaaaagaaattccctaaaaacaaagcttcctttttttcggaggaaaaaaaaaacaggtttggcctgattaacccttaaacttttttttatatggcccaacagaccgggatttctttattcccttctgggggggggggcccctaatcttaatgggggcggaaacagtctttccatttgccgccgttgttt

SEQ ID NO: 4705 - DNA, 521 bp, Gossypium hirsutum
  unsure (1)..(521): unsure at all n locations; Clone ID: LIB3825-032-Q6-N6-G1
aaagaagctccgaattcaatactatcaatttagagaatccgcaaaaagaaatcctgttttaacatcgccaaaaagaagttctttttttaacaaatgttcaatgacccttttttactgtagaaatatgtaactgcaaatacaacaatgtcatctcttgaaatcgatactacccctagatacagagaacacaacaaaaatgaaggcggctatctttaaaatgcaggcaaagtacctgcatttttagatcagtaataattttttgcatttcaaaggagattgagacaggcagcagctgacaaaagcgaaaaccagaatgactaccagtattggttaaacaaatgatgtcaacatcccacagatcaactgcctcccttttgttttagagtaatcttatccccgagactaagagcaataccctgggtcttgctccttatcctgatgtacccactaagtttcccatctgcttgtttctcaacgctcaaatttaccaaggcatcctccccaaacacacttnttcgcgt

SEQ ID NO: 4706 - DNA, 530 bp, Gossypium hirsutum
  Clone ID: LIB3825-032-Q6-N6-G12
attgttggttccaaatatatatatatagtttcaacaaaatctctagtgtgttgatatataaattaagcaggtttggaaagtgagaaaatcccagggaaaaaaagacataaaatggaaaatactatgttttatacaaaaaaagaaatctgtgacttactgatgaatcattcttcagtcttcaagttgcagcaacaaattttgtcatcgattttgcttgaaatatcgatcaaaaggagggaccaaaaatttgagaccttgtgatgattcgttgatttgtgttcatcaagttcataatcctggaaatggataagttcccatgtttggtcccaaattatagaaaggaaccccgccgccgccgccgcctacgccggttccggttgttccacagttgttgttgtttccgccgccactgccggttaatccggatgattgtgaagctgctggttgttgttcgtgaacggttggtgggtcttcttcttcgagaggtaacctatcgtaaactgcattggcgaacgatgcagccattaata

SEQ ID NO: 4707 - DNA, 554 bp, Gossypium hirsutum
  Clone ID: LIB3825-032-Q6-N6-G2
gtcaataatagagattaaaatttaagaggatgggaaataacattaacgcaatgtctcggacaggaccaaaactgatgctactacttctcagttgtaatattctctaattttttaacccaaaacaaaaacagaatggaaaacaaaaaagatattcatgcaaaattacactcaaaaacacgttcatggtttctaacaagggaaatggtgatttgtcttgagagttttttgggggagaggtggggggactcctgactatagaataaaccacaatggattccaagtgaaaaccattgcggagattgtggtggcggacatcacttgccacccaatgaggggaagtgtccaggatctgcaattgagggagcttgcacattgctggctgtgttgcctccatatccacctctgggaccacggccacggcctcgtccacgcccaggtccatagtacttctccccttcagctggcttcaggaactcattgatgctcacagactttttggctttttcttctttatcagcatccttgcgcttgtccttttcagatcccagtttgat

SEQ ID NO: 4708 - DNA, 536 bp, Gossypium hirsutum
  Clone ID: LIB3825-032-Q6-N6-G4
acctgttcaataaataatggcatggtctgtttcatattttgtatatactatatggtattacagtgttctagcctctaaaaccctccactatataaacataataaggacaaaaaagaaaacgcaagaaaaagataaaaaccttttgtaatgtaattccagtagcttctcttctctttcccgttgctttttcagctcaacctctgccttcatttttgctgctgcttcagcagctaagatttgagcttcaatctctgcctttcgtgttatccgagaagcaaccgatatgataagcttcaggggcattagaaccttgatctaatgttgaggaaatagattgagtcgatgattgttttgaaacagaaagagtttgataaggacgatgtacaggaggtaagattaaagctgattgcttgcagactttggtgaataaaatttggtagctgcatattcagtgcaaaagagaatgcaatgctgttttacttctgattccaaggaaatactggagggcagcagtagcgtgctcctggtagcaccat

SEQ ID NO: 4709 - DNA, 560 bp, Gossypium hirsutum
  Clone ID: LIB3825-032-Q6-N6-G6
ggaaagtgtggattagctgctactattgcaaatctgtctttgttcatggatgaacttaattttgtagctaatttcatttaagccacatcacaaattgactggaataatatcatgccatggagcaagttttggcaaaacttgttatgacaaacttggcttatatgagtccattcttatggaatggtgaaccgggaggtgcgatcaaacccaaaccttgcatcactctagttcttcgagcgccagacttgggagattctccgggtgaagatccttcagagctttggtcatcagtctcctctaatagctttttctctttggatgttctgctctttgagtcaatggagttcggcttatttcgcttcggctttttctgttccttgccttgcttcgaagctttgctctttttctgttccttggaagttgaacttttaggctttgccttggcacttcgactatttggctccacagtttggttatttttcttttgtttctttgggggcctctcttgctcatcagcttttttcttaccctgtttattggtattagggctctttcgcttg

SEQ ID NO: 4710 - DNA, 535 bp, Gossypium hirsutum
  Clone ID: LIB3825-032-Q6-N6-G7
gaaaggaacaaagaatttactaatataaattttctgtaaaaacaaaaaactggagaactattaatgcaagggaaaggcctgcagagttctcactccaagacactacacagaattcattcaatatcctgcactccaagcttctctactcttaaatctaatgtctctaacgtcacaaactataaaactataaataaataaagttcgaccaagtacctaaaagcaagtccataatgaaccacattcctatttaactccaactacagatttgagaaacccaagcttcgcatcgacttctgcaggatcacacgtgtccttcaaggatgcagggggctcaattccagtgaacacatacagagctttcaattcttctatgcatgtctctcttcgggcggctttataccccactattgttctcagagcattcatttgttcccaaatcttctcctcacagtgtattgcctcattggatggggcatccgtggcattttctacaggaattttagtgttatctgcttcctgagcttttgtagaaaca

SEQ ID NO: 4711 - DNA, 548 bp, Gossypium hirsutum
  Clone ID: LIB3825-032-Q6-N6-G8
acaatcgtgaacgagcctatcctaccagtggatgtacaaatggaccgacgccggggggaaactgaatactgtcctaccacatacagctgccactaagccactgtcctgcatataaacatgttctaattgcctagcccattattcccccataacaggtatccccaggtgcatctaaggtatatatgtggccttatcaacacgatgactgtggtcaccgtttacgatatctaaccagatccaaacccttcatcgcctctgactgaatatgcgcgtggcaagctccatgctatatgtacctctagatgggtactctgtcctagccaatcgagcgaaacaggaatgacctgaatgcaagtgaccagagctgccatatgctccgtgtctctgaaactcccgagaacctgccattacctgaagggcactaaatccttctaatggcaccttatgagtgcctcgcaaaaactgtagagaccgagctttatcctccttgctgaacccctgtacatcctcccataacctctgtataacaggatgagtgctgcactata

SEQ ID NO: 4712 - DNA, 501 bp, Gossypium hirsutum
  Clone ID: LIB3825-032-Q6-N6-H1
ggctgggaaaaaccactattagctgcattaacatttaacatttgaatgatgttagtccatctaaacaactatgacatttgacgtatatacattcccttcattgctgcctatatttaagaaattagaataatgttacaacaaagatcagcgactaactgacccattacttgatacaaaatcaggtttctcattttgtcttataacaaaatggtcaaccaccctgactgtattcactggatcctgttgccctgctgctgcactccatttgctagggtattttctcctatggctcaactggtggggctgcttctgctccatatcccaatcaggatccaacatccagtcccttggaaccttatcgactgcaagagtgaaaacttcaagatcaccatcacgattgatgtggaatcgggtgaatgacttgtaattagcaattctgagagaagagaacgcctcgtcaaagtgtagatgaaaccagttaatgcagatatacaagtagct

SEQ ID NO: 4713 - DNA, 516 bp, Gossypium hirsutum
  Clone ID: LIB3825-032-Q6-N6-H11
ggaggagaaaacctcgtatattgatgaaggcaactatgatatctgtacatacaaagacagttctttttaaaaaatttaccatccaagacctagtcgacacaatggtcatattggcaaaaatgatcagttctcggcaattagagccgagccatcaccatttgagaaagaaactacattgctttgtgtagtagggatagcagttccagaatttgagtcatttgtttcacattctccctatatcatgaaataaaaggcaaagcaaagccacgtttatgttttacaaagtgcaagggataataatttagatcaagaaacctaacaagtttaggtgctaaggaacacacctgttgaacaggaactagggagagatcctgagttttcttgggaatatccctcaaagttcccttgtttgcccaaaaaagtccacatgcgttgcataaagaccttggaccaaatggaccacgtcgcatcattggagtggactttgagctaatgccacagggtgtacatatgcca

SEQ ID NO: 4714 - DNA, 567 bp, Gossypium hirsutum
  Clone ID: LIB3825-032-Q6-N6-H12
aaaataacctcacgctgattttagggtttagagctgcaaatcctcagtttgaagagcctataaactattacaaagtatggaacctagaatttatgctttacatcctgactacaaagctttctacaaaaaactatggagcctagatctaccaaaaaaaaaaattataattacatgctggaaaatttcttggaactatttgcctactcgggtaaatatgtcttgtaggaaactagtaaatagtccaacatgtccttgttgtggtgaaggagcagaaacaatggaccacctcttttgggattgtccaggatcctcgttgaccagccaacttccctttgcagactgttttgttgtacgttatgtgccatatggggggagagaaatgctctggtcaaatagtaaaaataaactttgacggagcatataatgagcgcatctgacaatcggctttcgggatagtagtcagaaatagcgaaggttttgtcctcctaacatgcacagagattcactacagagttctttccgccttcccagccgaagcactcacttgtagaaaagcgacccaaatag

SEQ ID NO: 4715 - DNA, 559 bp, Gossypium hirsutum
  Clone ID: LIB3825-032-Q6-N6-H3
aggaataaaaggttgactttatcaatattcagaagttaaaaagtacacaagtaaaaggatcatattagatcccttcaaagaacttacaaactgaaatcaacttggtttgcaataataaaatatttaataacaataatcagatcagcaatcttgtttaaacccaatcacacataaaatatatacactttgaagatcatatatatttatcatatgatcttcttcctctacatcaagagctcattaacccacccgaggtcaagatcatgatccaaaacgacaccgtttccattgtttttctcatcatcaccaccaccattgaaatattcaccagaaccagaaggactttccattgaaggagctcctttgaatgaaacatcaagccatggaatgttcgtatttgcagtagtagccattggtgaagatgcttcggacaaattcatggttcctaaacaactcatgacttccttcaacaaaacatcatcgtaactgcttgtcatttcggttccaaatttactaagacgatcaccgccgtaccttggtgttctttgctggtgtccta

SEQ ID NO: 4716 - DNA, 505 bp, Gossypium hirsutum
  Clone ID: LIB3825-032-Q6-N6-H4
ggactaaagtaccacttcatcattcacatagtctttaattaccagaaagtgtcaaattctgtccaagattagagggcaataatgcataacattgttcgaaaaggctcgaagttccatcagaattctctatgtaccgcaaagttgcatgcgtggataaacaaaagacaagactcctatggtaaacgaagatgccgaaacatagcagcagtggacgatatatatgtagatcagcaagagcaacatgggggaaacatctttacatggctgggtatgtatttaaatatatatatatataaacttggaactaaaatcggtttggagtgaatgatttagtaccagggaaggcgaggagctcgtggccgaactggggtctttgatgggctgacccttataggcaatgatcccagaaccacaccacttcagttgagagcagcaatcgcacttttagccattacaaactcgacaaaagcaatgcgagttgaatgctgatagtccccaaacaacc

SEQ ID NO: 4717 - DNA, 539 bp, Gossypium hirsutum
  Clone ID: LIB3825-032-Q6-N6-H7
atgtaattatccacgtgtcattaaaccaaaagagggaaaacagccgtcggaatttagaattcctatttatttaaaagactagcaaataaacacaatatctaagccaatcacatcatatatattggtttgggttccacgttgtatgttgtcgcgtgctgggtgcttattatcgtcagtcacaacggttggcgctctgagtactgggttggtcgtcgggtccgataacaaggtccttggtgttttgggcaatttccactatggtttcagcaatggctcccaatacacctgtttggttttcctcctcctcctcttctctaacgcctgaaccctcaactgttttctctgccccactctccattcttctctctacgccctccatcggcacttttttgattctctcttcttccacctggcttctcttctcagtttcctgtgttaattcaccggttttgttaggctctgatgacccctgaaaggtttgcgtcagggcatttccaattggctttgcagttttctcgaatttctctttgggttttatg

SEQ ID NO: 4718 - DNA, 543 bp, Gossypium hirsutum
  Clone ID: LIB3825-032-Q6-N6-H8
aacctcacagaaacaaaagttctattaagtttaattcatcaaattctgtaaacttttacaataaacaagtaaactatttataatgttcagctaggtagccaaatggcctaagcaaagacttaatatctaagtaattaattaggctaaaaaggctagaaaattctagaaagaaaacactaaattgtcataataaagtttggctgaatggggagctccaatggtcagcttaaggcttaagcaaatgtatttgagaagatgaatgcatgtagtaattgagctgccttggttcagccgaatattcttggtcataatgaggctgcatggaactcttcaatagtcactcggtatgaaggaagaagattgaaaagtcatgcaatgtgaagaacgaaactgaatagcccttagtgtgtgaaagctctcaaccgaatggtcattaaaactggttggagaacgggccggtcattttgggattaggaagcatcagctcctttggtccttgaacttcacgaggagatgcttggaaaatagcaatcagcaacccat

SEQ ID NO: 4719 - DNA, 569 bp, Gossypium hirsutum
  Clone ID: LIB3825-032-Q6-N6-H9
aatgaatccattatcttttcattaaacaatattgtaatacaaacaaattaaaaattaagggtagctaccaaatacatgaaacacccatttaaatatggatgcctttgtgaaaaatgccctgacaaacaatgaggagtgacacagatatactaattatcttttttttttccagcaaaccacggtccatagcacagcaaacccaaggaactggggagaccatctctctgaatcgagaccataacaattttcacattatgagaacatgaacataagttattcctgggaggctcatccaccttatttaatgtttaaacttttgttacagacggctgaacgacaacatgcatggagatgactgtttcaggaagatcaccaaaatgtactctacactggccaacaattttgccgctctccaaaattttcccagcatttatcagtttgatgaaatttgctcccttaggcgcaatttttttatctttaggccattcagcaacaattttttccttgagcataacaatggttgaagcaggcaagtctcgaaatggacccatatctgatccatcgtacaa

SEQ ID NO: 4720 - DNA, 539 bp, Gossypium hirsutum
  Clone ID: LIB3825-033-Q6-N6-A2
agaataaatgattaaatcgtcaagtattaaagatgctcgaattttgaagaagaaaaaaacatgtaatcaactgctcttaactgcctctacaagacaaatatgttacaatgaacaaaacaatgtgtattaacaaatacaaatgcctatcaacaaatacacctgttttctttttcacatcataaaacccggaaccggagaagccgaccagctccatgatttacatgttgggatcttttacactttccaaaatggcatcctcttccagtttctaacaggaatcatatcattcaatgctttccatacatgatcaatgattctgaaacaccattaggtgccatcccttttttaacatttcgattctttaaggtttccaagagtttacttactataccgatcttttcttgtatcggctttgcacaaggcttaacaggaagtccgtaaatatatgttcgtaaccaggcattttcccgtacccgggaaagtagttgatgtcgatgacgtaaaaatgatccctccttccatgttcccggataatatct

SEQ ID NO: 4721 - DNA, 555 bp, Gossypium hirsutum
  Clone ID: LIB3825-033-Q6-N6-A3
aaccaaaaacctaataattcaattacactccaattgcaaaaaataacaaaaactctaaacaaaattgaaacaaaatgtgaaataagttcaaccccttacaaaatgcaactcagttctggacaaaactgcagtcaacagcaatgtataataagaaaagcatgtaataattttagtgctttgaaatgagcattcctacattcaatcctcttcctctgaatcaccagcagcggcattaagggtgtgtaaccgttcaatcaacttagctttcctttcctcgtatgttagcttcttcaagttgaaccttttgtgctgcttaggaggctccttttcagtcttctttgcagttggatcagctcggatagcagcatgaactttcttgtacaaggactcaatgttatcagcctcaattcccctcttaatatactcgctgaagtgagattgatacttctcgggttcatcttccatcaaagtcctcatatatgcagcaacatggccaccatatatgtacttgctgtgaacctcagcatcgagctgcttgttgtccttggagaaccc

SEQ ID NO: 4722 - DNA, 446 bp, Gossypium hirsutum
  Clone ID: LIB3825-033-Q6-N6-A4
aaaccctatttaaactaattaacaaaaaaaagggggggggaaaaagggccaggccaaacaaaaagcaaaagggaattaagcggggggaacaagccttaaacaggcaatcccaaaaccaaagaacagggcctaacaaaaccccacccttaaagggttttttttcccaaggcaagggggggcaaaagccacaagggataacctttcagggaaccagcacaatggacccagggggccgggaaatcccgggggcggaagggccccgcaaggcttcggacaaaggggcctggggattcaccccaacccgcaaaaggcccgaggcaacataagaaaacacttccccgggagtttccagaagctaatcccggggggacgggtatggcatcagggaaggcctagccaaaaacaaagattggggggcaagggcaaacaacggaaccggatcgggg

SEQ ID NO: 4723 - DNA, 539 bp, Gossypium hirsutum
  Clone ID: LIB3825-033-Q6-N6-A5
ataataaatcaaattctattaagtaaatatatcatttctccagcttcgaatgccataggagatctatctttcttgctatgcataatctcaaaaagctgaaggcgtccaactttgtgaccagacgagacttcctcggcctcagctacaaaagcaaaacttctcgaccctgccgtgtgcgtgaatttttgtttttgtctgctgcttgctccaactcgctcatggacatctcctttcttcgaattgcagaatctaaccgcatcttcccattggtacctcaacattcccggcaggacatttctcaattttttcttcaaggcttatgtctttcttcaaatatagttttttcaaagtgcttttatggtctctccaatttttacccaatgccttcttgatatagtcattggagacctctaaagcaaatatctccttaatattatagagagtttgatttttgttgctatcaagcatgtgatgtcatgattcgtagttgatgggcaacatattggcatttcgtgatataatgcccaaatagcctgcta

SEQ ID NO: 4724 - DNA, 555 bp, Gossypium hirsutum
  Clone ID: LIB3825-033-Q6-N6-A8
atcaagggatcaactaaaatttgttcattattacagcaagagtacaaaattttcgaaataaagaacattgaactctcctgtttggcttccgggaaaatgcagggataaacaaaatttgccaactcaaaggtggatcagttattatttacaaaaacagagattaatttcaagttggaaacaaatttctgtcgattttcttcaatcagaaaccaaacagtaaaatcagaggtgaaactcatacctgaaatcacaatccgatgaagaacgggatttcaatatcacgattgatgaccattttctacactttgggagccgaagcgacggcgcgtttgacgctcaccaaacccgaaactcgatctgattgaaacgttcgttctgaaatgattcacccatgaagcaggcgatttcaacatcacaacaaacagaaccggcagagaaaaacttatgggtttctccctctcacgaaaactatcttcccacagtagagtgtctgtgggtacacaaagcctagataattgctcgttcagatggagtggcaaaatttttgtccaaatg

SEQ ID NO: 4725 - DNA, 560 bp, Gossypium hirsutum
  Clone ID: LIB3825-033-Q6-N6-A9
gaggaattaaagacaaagaaggtaaagagacttaggaaaaaaagtggggaatcgggatattccgagaatgggatatacccaggccggtatgggtttcattttagaccataaaaatctattactgaccaatcaaataagctttcatctttccatcgagattagtgttatttcgaacgaattatttttccaaaatatgttgagacctatatattgaaaacaaggtgatttaatttctgatcacatacccataaattttgatttagaaggattgaccatctcagaaatatgcaaaaggaaatgaagacataaagaaagaaatgcagttcccttttcatgaatgtcaagacaatgaaggatataacaaacctggttggcgtaactgatacccatgtttgcccaagcacgcacatagtttggcttcaaagctagtgccatttgtatgattcacaccaagagcaagaagtacttccagattggcaggatcggcctcctgagcatgcatcattgctgcaatagccagtacagagatatctaatcagtgaattacattttttctacaa

SEQ ID NO: 4726 - DNA, 473 bp, Gossypium hirsutum
  Clone ID: LIB3825-033-Q6-N6-B1
caacaatcagcaattacatttaagtgagaaaaaaagtagcttattgcagctaatcactagtccataatttctttttctgctttcctctcacctaacaaacattatctttcgctatcaaccatcccataccccgtttaacaaaattacatgcttcatggcgttgagacataaataaaatatacaaaacattattcgttccccccagataccatctaccagcatggccctagctgcaaactgtcaggggtacatcagcatctacagctttttgaattgatttttgacagtaacattttgcccctgtttcagttagtcatgatacccatcctacttaaaaattcgaaatcatattctattcatagaggaaactccttctgtaaaagctcaagattcctggaatcacaagcttccaccatatcattccgcgagacacagcttaaagatattcttagatattgccatgcattatcagc

SEQ ID NO: 4727 - DNA, 548 bp, Gossypium hirsutum
  Clone ID: LIB3825-033-Q6-N6-B11
agacaagaataaatatactcataagctacgttattcagattcagtggtaagtactagatacaaataatgccttgacttgacataggtgtgttcattttttggggggctgttactttcacacctatatttaacatagtatcgtatatgaatattcaaaaagaattaagaacccgagtgacatagctggtgtctggatactttgttgaccaagatttaagcctttggagtattctcttctttttttgcattcttaaaataaaataaaagatcattatccccacctttgggaacccttgttttattgcctatgttgagctagaaatggttcgaatgtcaacaaaaatccaactgcctcaactatattcaagacgaaaaataccatctgagtacctggcagaaatgaagcgtctaggcgcttttccgaccaagaaaacaatgcaccacctcctgcaggaccaactgctttgaaaagagacattccagtcatggcaatgccattagcagctcctctttggtgctggtccacagctcgattttgcagaatgaat

SEQ ID NO: 4728 - DNA, 559 bp, Gossypium hirsutum
  unsure (1)..(559): unsure at all n locations; Clone ID: LIB3825-033-Q6-N6-B12
cccaaattattttattagaaaaggtcttaaaagctaaatattacccaaattcatatttcatccatgcacaattagggaatttaccttcattcacttggnaaaagcgtttaggcagcaaaagggttnactgaaagatgacttatgctagcgagtcggtagaggagaccatatttctttcaagcagacacagcacagaagattctgtaaattcctctggcggaagatgaacataatgatttttaagtttgacgaggagaatattttggtgaattttcagtcagaagtgcctgtaaactattacaagaggctaatatggatcctattacttatttaatacagaccgaaacaaaaattttctacagaaaactgtggaatttacatctcccaaaaaaaattgccatcactatttggtgtatttcctggaactttattcctgctctaaaaaatctaagattaagaagagtggcttcagatagctcatgtcctcgatgccgaaatacagaagaagacagtaaccatgcttttagacaatgtcttgggttttcaccatgggtaatag

SEQ ID NO: 4729 - DNA, 540 bp, Gossypium hirsutum
  Clone ID: LIB3825-033-Q6-N6-B2
agttcttcaataatattattatatacagacccatctacaggaatttgatactagaacaaatcttgattttccaatgaaagtgttaattagacaataaacagtccaaatacatataatttgtttttgattgcaaagatcaatattctattttatggagaaagtacaaaattcttctaaaaaaagacttgccagttatgtaaaatattaacactaatcaaatttacagtgatatccctaatcaaatcagcagagacaatttagacttaaaacttgaaattataaaaaaagagttggttgggtttttatccaactttgaaacaccattgctcaatccttgaaggcacaaatgagagctctttgtacattgtcggccactattcttaaccttccttgagttgcatctgccggtgaagaaccactaacctccaccgttcgagccaccctctgtttgcacttctcccactcgtcaaggcgcagccagcatgcgcgtcctccatggcttccttccattccaagaaatgacacattgggggttttcac

SEQ ID NO: 4730 - DNA, 489 bp, Gossypium hirsutum
  Clone ID: LIB3825-033-Q6-N6-B3
ccccccccaaagaaaattatccccccccaaaaattatggggggggaacaagaaccaaaacagggcggcaaaacagcggttttcctcccctatcctagaaagggaaacaaaaccccccttcataaaaggcagggggcaaaggggggaaattttttccattccaaatcccttcccctaaaaaaaaagaaaaaaccccgggaaaccgggggggaaaggaaggacaaaaaggaacccccccgctttggggcagccacattaagccaaaccaggcgggaaagggctatttggccaacaaggcggaaggggggggcccatccccccccccagggaaaaagctataacccagccccagccaaaaaggggctcggaccggaaaaagctaactgggaaatacccacccaaaggcccaccccttttcccaaatctaaaaggggaattagcaggccctggcaacacaaagggggggggggccattttaaggggcggaaac

SEQ ID NO: 4731 - DNA, 510 bp, Gossypium hirsutum
  Clone ID: LIB3825-033-Q6-N6-B4
agagcaactcatattcttggtcattgtatttagctataaatgttactgggacatctgttcttctatcagcttacacatcaaagcttcgcaaactaacctaccctctttgaccacgaaggtcaaaccaatcatcattaataaaatttaacactatcccttaaagctaaaagtagatttcattaaagatactatcctcaccatgaaagtcaaacagggctatagtagcctaatcttttacaatgattcaccatgggcagtaagttcaaggatccatccttccagatagccagttcaattcaatgagttccgtcggagccatattaacttgggtaacatagagatcatacatatcagcacaatcagatcatttctcttcatcctcaaaatctgactttgcaaaaacaggttctggctgggtttcagcatatgcaggagcaatgaactttgggtctttttcagcaacatcagcgtacttaagtatagcttctctaggatcttcttccatccatg

SEQ ID NO: 4732 - DNA, 563 bp, Gossypium hirsutum
  unsure (1)..(563): unsure at all n locations; Clone ID: LIB3825-033-Q6-N6-B5
tttttttcttaacaaaggtaacaagtacaaacgtgtttaattgtaaaagacacatgttcttatggaattgcataaacgtcaataatatgatggcaattgcaactttggaaaagttaataagaaaaggggcaaaaaagtgaaaagtaaatatatactcttatttcagtcaaaggactggtaagtaatataatgtagttgcacaagagacaattgagagactcaaatacataaataattcactcatctgagtaataagagatagatgcaatttcctccattatagaccagtaggtgactgttgaaagtcataacattcaactaatgtaatgccaaataatacacctgtcagcctgcaaatgacaatttgtaaagcacctatagatagtttcttcaagaatggacggacaaactaggatacagcttggtgcagctagtaacaatgaatggtttaaatctaatagtaataccttnagagttatctagtgaaaattaatgaggtggaagacaagattataacaaatgaattaaactgcaaagatattccaggcaataactcaatgaag

SEQ ID NO: 4733 - DNA, 559 bp, Gossypium hirsutum
  Clone ID: LIB3825-033-Q6-N6-B6
gtgtaatatttttctctttatcttcaaagtggtaatatttttcttagattgaaagtgatgaagcaacaaactgtaaacagttaaaactacaatcatgaaccaatcaaacaaattccctaagctttgcctgtttcttcaaaaatgattaaaaagagcaccaaacccttagttttttttctttgttttatacagattgagtattgctttttagttgctaaaacatcaacgtttgaaccgcagcaattaggtgacactgcttgaaacaaaagcaaaagaacatttcttcttcttcactcaacatgattggttccataacaataaatcaatgtagcccacgtaaaagtgtttgattgtgaatttttctaaaaccccataattcccctggcaaggaaacgtgatagtatcgcctgtaaggtgctgggaaaaaaagaagaaaatgcctccacaagtctctcatggcggtgcctttcagattggcccttcggttctgttctgtaatggcggaggctcaggttcaagccccgaacatggcggaacagctagaaggatgaaattccat

SEQ ID NO: 4734 - DNA, 529 bp, Gossypium hirsutum
  Clone ID: LIB3825-033-Q6-N6-B7
ccaaattattcaaaattctatgtattccaaatgtatttacacatggtgccgtatcagtaactgatatagtaatctaatggactgtatacaatactatataaacctagctaaatctcattgtctaacagttagttcagccctgagatggaggacaccatttatgaagaaattactatcatcggccatgaatgtcgtccatggtataccgaacaggttacgatagccaatggcctttctgcctgtgaatgtgtagttacctttgtacttacttacgtaatcctcagttggttttgaccttgctgcaaactcatagtcaacggcaaaagtgacggcacccttctcttgcattcccaaaaatagcccaaagcagtggaatgagctttgctggtccatatggcaatgtgcggagaagaaaaacccttgtccaccaagatggaatgcttgtgaataaactttaccacctggaaaacagatgcgcgcattcctcgcgcttcaggtccaggtacacaacgcactgttgttttggctt

SEQ ID NO: 4735 - DNA, 287 bp, Gossypium hirsutum
  Clone ID: LIB3825-033-Q6-N6-B9
catatagaatagaaggggcctgctcatagttacatacatacatactatgaagagagattcagtatacgtaaaagaagaaaacaaaagacgaatacaacataaaattcaaagaccataactgatgaagaaattaagtagaacccaggaagtgaataacatcttgatggccagaccacctccatggataaatcaactggagtcaaaccacaacaccgcggatttaatgaccacccacactactatatattgatagctacactagaatcttgcaggtaagtgtgaaattc

SEQ ID NO: 4736 - DNA, 565 bp, Gossypium hirsutum
  Clone ID: LIB3825-033-Q6-N6-C1
aaatcaaccgcataattgatagtttttcattataagcccacaaaatttcatcaaaacagtagcttagaagttatttcaaaagttcaaacagaaatctataaatattcctcagttaaaaagaaaagaaactaaagtttgaaagttgattgcagcttttacttaaaaagaggaccatttaatctaaacaaaatcgaaaacaaaactgaaagtacaaccggaaggataaaaatggtgatcttttaagtcatcctctgtgcagcttcctttgcaagaagcttctcctttgccttggttcgggcctgtgacttggatcccatgataccacctccccacttcttcctgtactcatcgtacttatcattgaagttcgccttgatcgcctcgaggattttgctgaagtccaacttatcctcattcttgactgtggtcaagcacaggactgaagcagttttcttgtggacaatcgatcccaaacgtgatttccccttgacgatgcaataaggcacttccatttttctgcacaaagcagggagccacaccaccaactctatcggatccacatcat

SEQ ID NO: 4737 - DNA, 560 bp, Gossypium hirsutum
  Clone ID: LIB3825-033-Q6-N6-C10
gttcaacacttcttcctcttcctcgaaacactcccttcttcttcatcatcttcttcctcacaccttgcgcccgatttataaaacgaaaaggaagggatggtttgcaacatcaagcacttcttgttgtgccttgcagaaaacttcttaggttggttccgcttgtagaattcatcattgccatcgcaagcagcatgggcgagcccttccaagttcccttcagattgagcccgacgaaaccctgtaagctcaaaatcagaaaactgatcaacagaaggagataccggggaagagccacaagaaactacagtagataggtggacggagcctggagaagaatgaaacgagagcctgttatggtgggtgtgaccatgaaaagagctcgatgggtaatgcctaaaggggctgctggtttcatagtaatgattgttgttgctaggactatcagcagctatggaagataccagagatccaagaactggtgttgaagaacttctcaaaagcattctctctttcttttttctttggtgatggtgcttctgtggtggttgtttgctgctttg

SEQ ID NO: 4738 - DNA, 502 bp, Gossypium hirsutum
  Clone ID: LIB3825-033-Q6-N6-C11
gataccaaaaaaactcccatttctatataacaatgatgcaaatgagctgtagccaaaattttccttaaaacttcatcttctaaaaaagggaaagttgtagctgcagagcggacatgaatcctcaagttttaacataaaatcctggcattagggatcatggtatcattttacaacgaaaaaccaaactctgctgatgcctatcatcctttaccgccaagagaatttattcctttccacggtacttgaaccttttttcccaacctaccttcttcttctgttatactctacaatttaaccactcgattatgtcgtccgttacaacttctcgttccagttcaaacaggagatcatgtaacagcccttggaataatctgatcgttttgtcggttgaggcagcttctttatacagtttttcagaagcttgaggatctgttacggtatcatcggtaccatgaagaacgaagaaaggaaccgtgaattccctcaggttttgctgcaagta

SEQ ID NO: 4739 - DNA, 577 bp, Gossypium hirsutum
  Clone ID: LIB3825-033-Q6-N6-C12
atgtatatgtgcattgagagatgacaagaaacatacgacccgttctgtagaaacataagaatacatataaaacataatgaggaaggagagcaaaaagatccgtgtctgttctctgcatttcatgttctggaactgctcaaatcatccggaaattcatctgaacaatgatggaaaataagggaaataggaaacttataccagtgtcgagtgatgtggcagctgaaaggaccttgtctttgcaatcgttagcatgacaaatgcacttcaacccaacaccacaattgccattaggcttcttacattcattacacatattaggtacatggtcaggaatgtcgaatgaaatccttgaccccaaatcaactccttcatagtcttcctcacttaaagaccttctataaaccctcctgtaacctgcttaagtctccttttggtaaactatggcatgcttgtgattacaatgggaagaaatggccctttttctttcaccttttattttattttcttttcacatggacctccattttcgtttttcagtcatcttttgtccagtgcttttcctttaaacacccttttt

SEQ ID NO: 4740 - DNA, 522 bp, Gossypium hirsutum
  Clone ID: LIB3825-033-Q6-N6-C2
ttttttttttttttttgggggggggggtttttttttttatgaacagcaggttgttgttgggggggggggggaacaaaaaaaaaacccccccccaacaggagggaggatattattttcctcctttttcaccattttttccatcttaaaggggggggggggaacctcttggggggtggggcaccagcggcggatgatcttatttatcaaaaggagaaaaaaattttggagggggggggttacccccctttttaacaaaaaaaaaaaaggccccgccgcaataatttttttgaaaagaaggaaaccaattattttcttccccaggaggacaacaaaaaaattccccccttttttttttttgggggggcggttttgtattattttttggggcaaacaaaaaaaaaaacccttttttggtgggggggcttccttgtgctccccaacaaggggggcaacaaaaaaaacaattttttttttttttttatcagcaacaaaaagggtgtgtttcttataaaaccggcgaag

SEQ ID NO: 4741 - DNA, 530 bp, Gossypium hirsutum
  Clone ID: LIB3825-033-Q6-N6-C3
acagggaaaggctatagctttcatttcataaccaaacgtagctgatcggcagcgaacatgggcacagataaaggtttaaaaaagaaaaagtttcaaattaaaggaatctagcaaaaataatgataggaggtagcagctattgctaatgcacctcactgtacaagagtgagctaacataatcagtatcaggttcggatgaaattgacaagtaaacttcaaaaattattagagcttcaaagtgagatccaattgagatgatgcatctgctcttggtggtgttgccattgctataaaacctatatttgaactttgagttggattttgacccaattccatagcttggttactcccaactctttcttcattcacctgcctgaaactccctggccaatacaagtctacctcctcatcttccatgaatatcggcatcccaaaacacccttgatcgaaccgtgctccacttcttgtatctacaggtctttgggatgatggcaacattccttggtgcatagcggaatgagctttgatcc

SEQ ID NO: 4742 - DNA, 555 bp, Gossypium hirsutum
  Clone ID: LIB3825-033-Q6-N6-C4
caataatctgaattcatactatttgatccatgcatcactcttaacttcaacaggtttctatgcataataaattctgcgtggatatctgcttgtttgaattggaacagaacggattgcaataatcccaagcttcatccattggaaatcatttatcccaccaccatcgatatctcaaacacttcctaatttgattctgtgcccggaaggcacaaaactgccgtataagacaaaagaagcctttgaaaggaaatgactgtatcttgattagccacatagatatttgaagattcagtaccagatcttcacccaaatatggctatcgagcttgataacattttgccattttgctgctttggaccttacagatacatgtgacctctgttcaaggctgagcaagtttctgtgacggttttctccttccactagatgttcaagttgaggggttatagccttgcgtttatatcataatggcatccggaaaaattgccattcatcaagtatgacttgtatttagatcttctaacttctggggtactcaaaaacgaggccttctgc

SEQ ID NO: 4743 - DNA, 539 bp, Gossypium hirsutum
  Clone ID: LIB3825-033-Q6-N6-C5
ataataaatcaaattttattaagtaaatatatcatttctccagcttcgaatgtcataggagatctatctttcttgctatgcataatctcaaaaagctgaaggcgtccaactttgtgaccagacgagacttcctcggcctcagctacaaaagcaaaacttctcgaccctgccgtgtgcgtgaatttttgtttttgtctgctgcttgttccaactcgctcatggtcatctcctttcttcgaattgcagaatctaaccgcatcttcccattggtacctcaacattcccggcaggacatttctcaattttttcttcaaggcttatgtctttcttcaaatatagttttttcaaagtgcttttatggtctctccaatttttacccaatgccttcttgatatagtcattggagacctctaaagcaaatatctccttaatattatagagagtttgatttttgttgctatcaagcatgtgatgtcatgattcgtagttgatgggcaacatattggcatttcgtgatataatgcccaaatagcctgcta

SEQ ID NO: 4744 - DNA, 510 bp, Gossypium hirsutum
  Clone ID: LIB3825-033-Q6-N6-C8
aagttaaaaacctgtgtttttttgttgcaggaacttgggtgactgcaagtgcacatataataacagcagtcataggctcaggggtcttatctctttcatgggccattgctcagttagggtggattgctggtcccattgcccttggaatcttctctatcatcacttggtttacatccacgctactggctgattgttgcagggaccctgtttcaggaaaaagatgtagctgttacatggatgctgtaaaatctaacttaggtgactaaaatccactctactaccttgaacctaccttactccatttggggtgtgactgtcagatgttagattttttttatgtatttagaggatttttgaaaatcatatctccatatccaagtgtccgacatgaatgactactggttctttcaaggacatggaaccccaatgctaatgatttctaggtttttttctttctaacaggaggaatcaataacaagttttggggattagcacaatatatgaatcttg

SEQ ID NO: 4745 - DNA, 567 bp, Gossypium hirsutum
  unsure (1)..(567): unsure at all n locations; Clone ID: LIB3825-033-Q6-N6-C9
ctcaaagacaaaagaagatttcgatcaacatattatgatattcaacattaaaataagaaaattacaaaacaaagcaaaaataagatatacaccaacataccactttcttatgttaaaatcccatagggggatggatgtatattgtaaagcaaaaaaanactacagcagcattgcagccatatgcatgcctgtatatattcacctttcttcctttcattcatcgtcgtggagacgagggtatacaaaccagcagccaactaataaactccatttgattggggatccatggtaaaagaaggcatgagaaaggaggactggtttatcctagtacttcttcagttgatgcttcattaaacattaagaggacccgaattcactggcttctggaagactcgggttactggcattccgtcctcatcatcattcccaactctccatgaccgatccttcttccgctggggctttttgtggtgcttacgggattcattcgacttcttaactgttgccttcttggaaacaagtccattggcaaggtcaaaggagctaagatcatctagtacatgctcg

SEQ ID NO: 4746 - DNA, 53 bp, Gossypium hirsutum
  Clone ID: LIB3825-033-Q6-N6-D1
ggctaggaacttagggaattcttagggaattctaaaaaaagtccatgatgggc

SEQ ID NO: 4747 - DNA, 541 bp, Gossypium hirsutum
  Clone ID: LIB3825-033-Q6-N6-D10
gaacaagtacaaatttcagctatgccattttattgaacaaacactatgtacaatcctaactggccacttccattatagtggggatgattacagcaaataacatggaactatttctgaggagctggattatggtttatttagcattttaatgtcataagatgatctccacaaaggcttatatatgtcgaagttgacaccactactcgaaaactttcttttcttagcattgcatcattcaatctagctacttcattcctgttttacttgggacttgcttgattaatcaacagctattgcctctttgagttgttggattcttcagtcttcgcaaaccttccacggatcctcggttgacagtcagcaagagccttcctgcatgcatacttgattttccttccaaagatcctcttcgtcttcttattcctgtatctagagaggttttcccttcggtccttggtagaacagctgctgacgattatcagttgctcaagaggagaatggatgacactcacattaccattgccaagagtcttcatatctc

SEQ ID NO: 4748 - DNA, 531 bp, Gossypium hirsutum
  unsure (1)..(531): unsure at all n locations; Clone ID: LIB3825-033-Q6-N6-D12
atgagcaaccaaaactgtttccaacaaaatgcattataaagtagaaaaatccacaatgaaccaaacccttcaaaanatttcaagtaaaaacatacttgaacatacttggtctatgggcaattatactaagcattaaacaaaacaaaggttctttcaacaaaaagagtgaataagataactatcaagacagccaactagttgaggatttagagtatcgtcagatcttaaacggcagcatggaggaatgctcttcctggctcccgattagctagaggtccatgacatccaagaagcttagcattaacaccatcagggacaatgtgattctctgacttatatttcaaataatcagttcggctgaactttgtgaaaccccacttcctgctgacaataatcttttggcgaccagggaacttgaacttagcacgtcggagggcctcttgagcatgatgactgttgctgtccttgcaacgaactgaaaggaggacctgaccaatggctactctagcacatgttccctgaggcttgcca

SEQ ID NO: 4749 - DNA, 556 bp, Gossypium hirsutum
  Clone ID: LIB3825-033-Q6-N6-D2
aaaaaaaccaagcttttctcattgccattttaaaactattacagaaaccagtttcatcttttaacataagcaaaagagatctaaaaaagaaggaaaaaaaaaaagaaacactagaattgggtgatgctccaatagaatgatccaatttccaatcagcttagcttcatcctacatccttgccttagcaaccaccatattgccttcatttgcaacctccatggctcctggccttgtccatgtttccttgaattgctcctctgtcactcctttgcccatggctgcagtcgatgatatgcctccctggactgtcttgagatatctatcataaaagttggcacctgaccatttttgatgggctaatgtgtccaccccattgttcctctcttccctctggatcttctcaacataagctagcattcccctcctcgcgaaatctctggcgaatgtgtcggtcacgagtgcatcagcatggaaaccagctagtgttatgaactgccaacagaaaccaagcttggctatccttgggatgaagtctctcatctgttcatcactcatt

SEQ ID NO: 4750 - DNA, 530 bp, Gossypium hirsutum
  Clone ID: LIB3825-033-Q6-N6-D3
gcacatcaaacaggatataaacactttccttttaaactatacaatgttgaagtatgtatacatatcaaagggctttgcccccattgagtgtgagaattaaaatggcaaagtaactaaatttgtatagtttttgggaagcaaaaacaggcaccttgtgtactattccctatatcccactgccaccattaacagagccttaaacggatgtttctatgatccaattcggttcatatactatgcctttccccttccgatcaacgacccactattcattttaacttgacaatttgatttcgttcaaatctggattatgtgactcttgatctttggaactaccctcatctttgttctgcccgctgtttccggccattgacaactcctgagaagttgacaagtccagtgacagtaatgggaactggcaatatgctgtacgtaacagcttatatatctcctctgccctaccccaattctcatcttgtttatccatctctataagaacctgtgcaggactcctcttgaaaacgggggaa

SEQ ID NO: 4751 - DNA, 514 bp, Gossypium hirsutum
  Clone ID: LIB3825-033-Q6-N6-D5
gccccaataataaaggatatataatatatcatggggttgttttgttaaaatagttcggtaacttaggagggtatgtatgaaaaacacaaggtggtgcaaatagaaagaccacaatttttcatgattacaataagatatagtatatatataatttatggattccttgcaatcacgtggcttctttagccattttatttagcatatccagggattttaaaatccaaaattataatacaactaaaatctgggcacacttatggatgatctaacaaagcctcagttggctttaggttccaaattttacaacccacaaaccatatttgctggcactgcaacatcaatcattttaagatatgccaagttaaaaatttccatgaagtttttaaaagtctcctcatcctttgtcaagcggggattatataacatctcctctcccacaggggttacttgggaaccattgctgctactctctggtactctggtacctcacacgatttgtaattgaaggccttgt

SEQ ID NO: 4752 - DNA, 558 bp, Gossypium hirsutum
  Clone ID: LIB3825-033-Q6-N6-D6
aacactccgaaacaataaacaagggtcaatattcaaagaaaattaaaaaaaaaaaaacttgaaaacgaactaaatgtgtcgtctaaccctcacaaacagttgcatttagcgttgaaagagataaagactacacaaaggcactcaacacataggttctatagataacaaatcacatatacccgaaactacgggtttatcatcatcgagactgataaaagtcttatggcataactcggaaatcccgagtttgccgtttcgaaacctataaacatttcacttaagtaaagacatactgtaggtaggaaggaaggaagcttcccggttgcagatgcctaaaagaaccgtattcagttagcacggcttttgaacacatcgagacccatctcagttggatctgttgcttgcaattccacctgaattccgtccagttctcgcttgaatctgtctttggagctggcgtaaatcatcttgctcctgatccttgacgtgtcgggagaccatgcgatgaaaaagatctgctcttcgggacgttctcggccgttagaaaatcaaaatcgt

SEQ ID NO: 4753 - DNA, 521 bp, Gossypium hirsutum
  unsure (1)..(521): unsure at all n locations; Clone ID: LIB3825-033-Q6-N6-D7
aaacagtaaacatataaatatagtttttgatccatcatatcatacaacagcttggaatcatcatgttctttaactaaaccctaaaccagcaatcaacctgttctgttgactgggaagaaatataaattaaatccaggcaccttagcttcacaaagctacaatacagatgatgactaaacgcaaataaattactccatcgagcgcagcattgtgcacaaacttatcttatttatgaacatgaattggggggggggggncgaatttctgcccctagaactaccaaatgccctcctttgacattttcaggaaattggacaaggtgatattagggagctcaaccacccctgtcttcttcttctttatcctcgtcacctttagtgactccgcaccctttgactgtgtaactgttaccgagaccacgttgtagaactgtttaacgaatgttagggaagaaattattacactttcaccgtgtaagatattcatcaatattcaatattaaatccaacactggttgcagc

SEQ ID NO: 4754 - DNA, 441 bp, Gossypium hirsutum
  Clone ID: LIB3825-033-Q6-N6-D8
gttggccccggaatttccgggggggggcggggggggagacgggggggggggggggggggggggggttagcggggggaaagggggggccggggggggtgccgggggaaaatggggtcggccccgaaaagagaaaacctggggggcctaaagagaaaagggaaaaacagggggggcaaagggaaaaaggaagggagagcaaagggggaagccgccaaggcaggggaaaaaaagaaaaaacccacccggggagaggggaaaaaaaaggggccagcgcccggggggaagcgcttccccccagggagaagggggagagctgattggcccccaaggggggggccaaaaagaagagggacaagaggaacaggccggtgagccccaccacgagaaaaccccggggggggggccaaaacgggggaaaaaaaagaacagcggggggcaaaa

SEQ ID NO: 4755 - DNA, 558 bp, Gossypium hirsutum
  Clone ID: LIB3825-033-Q6-N6-E1
aactcctcttcaaatttcaatctattgcattaaatagcaaatttacatattttccgataaattgtataaattactttcatcattgcacaattcatgcccaagggaatgtcaaatatataaaatcataatatgatccaagcaaaacatttacaagaatctgtcggtcggcgccgggcaactgacgtgtttaatctgctctacttatctgacggctattacaagaatttgttggttggcacctggcttgcttgcaactccggctgacatgtttaatgtgctctgctctacttattcgacggctaccaaagcccctgcttcttggatctctcaacttcaagcaatttgatagtactgagcacattttttctttcatcagttaaggcctagcttcagaatttgattaaatccttcaatctctaagctgtgccattttacctgatggcttaaaaactgatagtgcagccatcaccagaccatcgaggataacaagctctgaaggaactgatctcttacgccacagatatagtgtgtagacgagatatcagttaaaataatatg

SEQ ID NO: 4756 - DNA, 562 bp, Gossypium hirsutum
  Clone ID: LIB3825-033-Q6-N6-E10
gaaatcagaaaaaatatatatatatatattatcatttcaagggttctctcttcaatgcactcaaagtacacaaaagacatgattccaacgcaagaaaaatgaaacaataattagaattattatgtagctaaacagaatcacctttctattctttcatggcccatgctagcgctgctgcaaaccaacccgcactgcaatttacttagaaaaataatataattttacttggggaaaaaaattttcatctcgcatgatccaaccttagctaagcaaacatttctctctccctcgggaacttgaaaaatgatgaatcaattgaaatgttgttgctgttcaagccatggccaaaacccggtttgttcctcgatggtgcagaacatgttggtgatgaggctctcttctttaaccatttgaggaggttgatgatgatcatcgtggcttgaatttgacgacgccgcttggaacagtcctgttggaaacagggttcttgctggtctgctaatcgtagccgccgggggcggcggcctgtcgttatccagcttcacatccgagctgttttcac

SEQ ID NO: 4757 - DNA, 385 bp, Gossypium hirsutum
  Clone ID: LIB3825-033-Q6-N6-E12
ggagaaggcggcctgggtgggggggggggggggggggtgccggggggggggggggggggggccgccccgaaattaaggggcgggcccaaggggggcccccccctttcccttaagaaaaaacaaaaaaaaggggaaaaaaaaaagaaaaaagggggctctggggggaaaaaagctacctctcaagaaaaacaaaaaaaaaacccccggaaaaaaaaaaaaaaaaccgggggggcgaaaaaaggggaacaaaaaaaaaaaaaagggggggggggaaagccccgtttccagggggaaaaaactgggggcccgctggttcaaaaaaagcacaaacccccgggggaaaggggtttttttaaaggggaccaccagggcttttttttttttt

SEQ ID NO: 4758 - DNA, 502 bp, Gossypium hirsutum
  Clone ID: LIB3825-033-Q6-N6-E2
aaattggatcaaaattttaagctcaccagctctcaaactgtgaaaccatacatcaattacagcatgatcccctatgttaccatgactgcacaaaaagcgggggggaggtccgaatccgggatacattcggatatcaggcccgaaacatgattacctaacgacccttcaaatacctgaagaaacctagttctcaaacataaacgggtcccaactttcacacccgagtccaattaacaaaaccattcacgttaattctcaaacataccctcatctgatatgccagaagattcagtcccattaacaaaaagttgatttgggaacccaaaactggaatcacttaaaatgctgaaatcaaaatcatcatccgaatcataatcagaatcacttacttgatctatcttctcatcttcatcagcttccatttgcattgttccttttgaaccgggttctcttttcattaactgcttattgatatgcttaaactcagcggggaatcccgccc

SEQ ID NO: 4759 - DNA, 582 bp, Gossypium hirsutum
  Clone ID: LIB3825-033-Q6-N6-E3
ccaataaaatcaagtagtaatagaacaaagagttaaattattgtttagccaacccataaaaatagaaaccattccatgataaaacaacaaacaattaaaacaaaaacatcaaaaaccacaaataatttatgtctttagcagagtactgaaaacaagagacaaaagcaataataaaaaggactaaattcttcagcaaccactttttttttctttgcttcaaacctcagcacttgacctccttcaatgcatatgcaaagtacaaaaatgttgggtcaacagcaccatccttgtagtaagcaaacaccaagcatccatcatcatgcatgctctctcctacgaaaaattgaaggtccttcaattttgaaagcaaaaacttggttgctccctcaatgtttttcttgaaggactcttgcttttccgcatccagttttggtgtcaagttcttgatgaacttcttgatgaacacgacaaactgcttcttgtcgaaagggggttgctcctgaagcctgaaagtgtcaacaatgtcaacaaccttcacagcttggtcatcaacaccttcatcctcatcagcaccttcggctg

SEQ ID NO: 4760 - DNA, 505 bp, Gossypium hirsutum
  Clone ID: LIB3825-033-Q6-N6-E4
gaaatgaaaaaccactgcaatacccaaatcaatgcaaaatactaaatgctacccatattacatatgacaaagaagatacacacaagccagatactatttaagagtcaactaaatagaagacaaaatctcatcagccatggatatatatacacatacatatataagcatttaaaaggtggcctaaccttttatttaagtaataaaccctaaactaaaacacacaatctagtttgttcttggtgtagcccattcaactctcaggatgagattatcataaccatagccattgagtttgtttatagctctctgcgcatcatccttgttcacaaagttaacgaaaccaaaaccccgactcatgccagtcttctggtcaatggcaacataaactcgacttactgcaccaaatggccggaaaagctcgtgcaagtcagcttcccgggtgtcctccgaaagatagtgacccggacagagttctcgtcgtttctgcgtctcatatcagttccgc

SEQ ID NO: 4761 - DNA, 515 bp, Gossypium hirsutum
  Clone ID: LIB3825-033-Q6-N6-E5
caaataaaggggggtagaaggggaacataatcacattaaaacgtttttcaatataattcaaaacaatatatccgaacagtttattgttaagttaaattctaaaccaacactaccagcattttttttgccccttccaattaagcaggcgattttaagggtcaaaaatacaccttcaatgccaaccggcaagctagcgatgactttaaaatcaacggccaagtagtcctttcaatgaaaacggaaaggtaaaaatagcatatatccaaaaaagactatttggttacacaactgaaattggatcgcccaatgactcaggagtaccgctgctaccattgaaaaccgtaacatttccatcggagtcaacatcaacgattactgaatcaccctccttgatgtccctggcaagcattttctaagccatgctgtcctcaaaaagtctcataatggctcttctaaaaggccttgcaccatagctgggatggtatccttcttccaccaccctttccctaaacctt

SEQ ID NO: 4762 - DNA, 223 bp, Gossypium hirsutum
  Clone ID: LIB3825-033-Q6-N6-E7
gcatcctaaccaggagcaatttatttataatagaaaacaaaaacataaaaccactaaaaggagattttcaactactcttcttcctcttcttcctctttccagcagcatttcaaaggtgatcttggggatccacagccaccagggctcttaaatttctgggacatcatggaacctccacttgcaagcccttcaatgcccatttttccgcaacagtattctttta

SEQ ID NO: 4763 - DNA, 441 bp, Gossypium hirsutum
  Clone ID: LIB3825-033-Q6-N6-F1
ttttttttttttttttttttttttttttttttttttttttttttttttttttttttttttttattttatttttttttatttttttttttttttttttttttttttttttttttttttttttttttttttttttttttttttttttaaaaaaaaaaaaggggggggaaaaaacccccccccccccccgggggggtttggaaaaaaaaaccccccttttttgaaaaaaaaaaaggggcgggggtttttttaaaaccccccaaaaaaaatttttccccaaaaaaaggggggggggggggcccctttttttaaaaaaaaaaaacccgggggggaaaaaaaaaaaaagtttttttttcgcaaaaaaaaaaaccccccctccgggagagggggggaaaaaaaaaaaagggggccaaaaagggggaaaaagggttttttttccccccg

SEQ ID NO: 4764 - DNA, 518 bp, Gossypium hirsutum
  Clone ID: LIB3825-033-Q6-N6-F10
atagtaaacagtaaatagcatatcttgatagcttggcagctcatgaagttgtttaattccatgacgggaactatgaaaaacaagagaggttgaaacattctcccgcaggctacatagtttataacaaaccgataaaagatttgatcggtctctattgaccgactctccaacatacacgatttataacaatcaaaaacagattgaactggtctcggttgactcggactctgctacatacaagagcataggcattataaaagcatatgcccaagcaacgatacttcctcaataacgaaagaggactactggaaatggcaagttcaggatagatcagatctaacggagatacctttcaagcttctgcagcttaaggggaatgttcaggtgtcttcagaacagtagctgtgttacctttgtgtgccattacagcaacacggaactcttcgactatggaagcgtccttgaacttcaaagccaatgtagacagaccctctttgtcttcaccagtactattcatg

SEQ ID NO: 4765 - DNA, 397 bp, Gossypium hirsutum
  Clone ID: LIB3825-033-Q6-N6-F2
accttgtaaatttaaacggtaccgtagtgtacagttttcttataggagcgggggagaacccggaaaaaccaaaccaaaccggaaccgggcaaaaggctaacggaaacaattccaaaaacaacgaaccggaagcaaaaaggtaaaggggggaaaccgaagagtgaacaaacccaaaaaaaaaacaaggcggaaacaaaaagttaaaaagccgggaaacctaaagagcaagctaaataaaaaaaaaggcaaaggcccaacgacaggctgtcaaagtaaaaaaacaaaaggggcagtttcattaaaaaaaagaaccaggcaacaggaaagggggcttgaccttcgggccccgagagaggtttatttttcaccacaaaaaggggaaacacaaaaagggaaa

SEQ ID NO: 4766 - DNA, 513 bp, Gossypium hirsutum
  Clone ID: LIB3825-033-Q6-N6-F3
aaacggaatcaaagctgttgatatagactagatttccacgcctttgttttggcttgaaatataacagacactaatggtatgtagtactttatcaccctaatccctttaacaagctctttaagttaatacactcgtacgggtacaacacaaaccactgtaaaataatattacaaaccttttcttgtatcataacaggacttggctagcaacaaggatagatagattctcaggttggcttttgcttctcccggttagcatcgatttgctggcttgttctttagtcagtatttcatctggtcgtcaatgaaggatgacttcaatcatggtttctctgttaaaattcttcttgcggtgtctgtaactgtaaaacgaaccccttcataggaagtaagatagttgctccttttttcttgaacccccttctccgtacaagtcattccactgttttaactcattcattccagctccctcagatgcgaagctagccgccacctgattctttgcttgcctgaa

SEQ ID NO: 4767 - DNA, 430 bp, Gossypium hirsutum
  Clone ID: LIB3825-033-Q6-N6-F4
ggaagggtaacccctcattggggggttcatcttaaaaaaaagctaacagaagtctatttctcattagctttattttgggggaagagaggtggcctttggatttatttcccccccgggttttgatataaatcattcccatcatacaaatataactggttcacccaaaagggagcatccatttttggttgattttgaaaagcatctggaaatgctctttattctctcaaaaataaaccgctttcatgcattaagggctgcttgaatttgttccaagggtttcccttttgtttcagggcccaatgggaccccaaacaatatagcccctgcattaattgccgcataaaaaaagaagggcccctaggcgccccacctcataaggaaattgaaagtgtaaaaaactgcccatgcaccaaaccagttaaccaccgtt

SEQ ID NO: 4768 - DNA, 452 bp, Gossypium hirsutum
  Clone ID: LIB3825-033-Q6-N6-F5
tcgcgatctagaatcttgtactagtttataagcactttggactgagtattcaccaatggttctcctttccacacttggatgtcgttttgacctacttccgctagaagaatctgtaaaattttctaagctatatccgcttgaaaggtattgtttattggatccaccttcgaagtaaaaaaaaaaaaaaaaaaaaaaaaaaaaaaaaaaaaaaaaaaaaaaaaaaaaaaaaaaaaaaaaaaaaaaaaaaaaaaaaaaaaaaaaaaaaaaaaaaaaaaaaaaaaaaaaaaaaaaaaaaaaaaaaaaaaaaaaaaaaaaaaaaaaaaaaaaaaaaaaaaagggggggggcccccccttttttttttttttttaaaaaaaagattttttttaaactccacattttaaaatgggggttgaaaaaaaaattttttttttttttttttgggccccccccc

SEQ ID NO: 4769 - DNA, 574 bp, Gossypium hirsutum
  Clone ID: LIB3825-033-Q6-N6-F6
ataaaactgcttttacttttctataatattttaaaccatacaatatgaaccatatattttactttcacataagtggtttatccttaaaaatgacaaccaccataacatacacataaagctagttgctcttcaaacatgcttcaatcaagcaggctgggatccccaaaaaataaatccaatagcctgcaactccaaaaggaagacgatacctaatggcttcacctctactatgttgttcatttcttacatgaacatatattagaacatgaaaaccgaacatggagatagtactatagtaactgtacagtgggaacggggttggcaaaaactatccctgacgatcatctccccacaccaatcaaggtcttctcctcgctttcttttagcttgaaggatgaaccggatggaacttctttcagcaccggaatttcttccggtgcaggatgaactggtttcggtgtgtagttgaaggaaaggtctttgttggcagctaatgccaaaagctccttctcctcgagaccttttgtcggcccaaggctgcatcggtctggtgagtgcttggccaatgcatctt

SEQ ID NO: 4770 - DNA, 460 bp, Gossypium hirsutum
  Clone ID: LIB3825-033-Q6-N6-F7
acaatataatttttataattcgtataaatataattttttacaattagatttaactgctattaccctaaaaataaaaaagtgataaaacccaccaattataattgttacccaaacatatcatcgttgtttataattacactagtgactttccaaagaaacagatatcagttgattcattgcaattaattctgtattaatatacatctcaataatccgaatatagacccttattgttctcacttgccatcttcaattcattgtaaaagaaaacaaaaagaggagcattcttgagttaattttggtaggccgtatataccgtgccctctgtagctcacatcacctgttaatgaaatactgggaccttatgaccatccatttattttctctagtgtttttaaacaagcattaactttaatgttcatattagctaaatacatgaatagcttccctcaaagtggac

SEQ ID NO: 4771 - DNA, 414 bp, Gossypium hirsutum
  Clone ID: LIB3825-033-Q6-N6-F9
aaaaaaaaaaattggggggggccccggggtaaaaaaaaaaaaccgggggaaaaaaaaaggggggtgggaaaatgggccccaaaaaaaaaaaatgggggaaaaaggcccttttgcccgggccttttattttttttcaaaaaaaaaaaaaaaccccaaaaaaaaaaaaattttggcccaaaaccaaaaaaaaaaaaccccaaaggttttattttgccccaaaattttaacccaaataaaacccccccccaaggggccaaattttggggtggggggaaaaaaacccgggaaaaaaattggccccccccaaaaagggggttttaaggccaaaaaacccaaaaccttcttaaagaaaaccccaaagggggtttccccgggaaaaaggaggtggggaaaaaaaaaaaaaaggtttaaccc

SEQ ID NO: 4772 - DNA, 188 bp, Gossypium hirsutum
  Clone ID: LIB3825-033-Q6-N6-G10
aatacaatcccatcatagtatatatttatatcaaccctttttgcgaaaatagttgctctctgtcttgcattatagatgaacaacatatctatacctactatatgatatacgtgccatagaagaagcgctgcaaatcacacgatggaaggaaatttgacaaacttagaagctttgtgcccacgcgtccg

SEQ ID NO: 4773 - DNA, 553 bp, Gossypium hirsutum
  Clone ID: LIB3825-033-Q6-N6-G11
atctcaaatcagacttgagttatatagaagtgaaattccgtcaagctcaagcttcttcactaaaccctaacccctgaacaagtaaggttcggaaacataaatccacgtaacaacattttgaagataagatccaaaacgtcaacacattttaaatggactagaaaaatgattctgatcactaaacataatattatccctcctaagtatatcaatttcaaaccataatgtgaactggttctttaaaagcataaatatagcatgtaattaaaactttactactccaacccatatccaggggtccatcaatcaaagcgcaagaagctggttccaacagtgtcttcccttaggccacaagtgtgctggcagtagtcgactcgtatttccagacgggtggaagcttctttgtcttcttataatagcgggcaaggcgatggattctgctctcaaccaggatcaaccggaacttggaatccttgtctttgcggttcctctcaagatgctttctgatggcaacagctttcttaatcaggtggtacaaatcttcgggaatttc

SEQ ID NO: 4774 - DNA, 72 bp, Gossypium hirsutum
  unsure (1)..(72): unsure at all n locations; Clone ID: LIB3825-033-Q6-N6-G2
ggcaacaaggcttgctccataaattacttaatagcagtgatatacaacanatatgggtngaaataagtttaa

SEQ ID NO: 4775 - DNA, 521 bp, Gossypium hirsutum
  unsure (1)..(521): unsure at all n locations; Clone ID: LIB3825-033-Q6-N6-G4
aaacaaaatanaagattgtaaatgatatgtatgtatttgtgtcttgcaatgatgtttctttcatcgtggtataacaaaaaaacacagaacatgttcttaactgacacacacatacagcatcctcaaacatcaatgccccgttttgatgccccgttttgacttctcattcaatcatccattggcacagaagttggatcttgaaacattcgtatcaagaatatgacctgatgagtttgtgtttaatcaactgctcttggaagccatggcttttctggcagccatagtattcctagcagcccttgcattatcatactcaaacttcaacacatctgatatgtgagaagtatccttaacataaaaaaacctcccaaagggactctcttcaatcaaagggaaataacagaagagcatagaattcaccacccaaaaccagagcccaccaagcaaaatccccaatgaagctccagcaagaacctgggccaccgtatggtaacctaaataaaccctagaatacatagtca

SEQ ID NO: 4776 - DNA, 436 bp, Gossypium hirsutum
  Clone ID: LIB3825-033-Q6-N6-G5
gaaaaaaaaaaaaaaagggaaaatttgcccccccccaaaaaaaaggggtccaaaaaaaaaaaaaaaaaaaaagggggggaaaaaaaaaaccccaaaaaattgttaaaggccaaaaaaaaaaaacaagggcccaaaaaaaaaaaaaaccccacggaaaaccccaaagggaaaaaaaggggggggcaaaaaaaagggaaaaaaattttttacccccccccccaaattggggggcccccccccgcccccaggggggggggttttttttcccccccccccggggaaaccccccccccggggaaaatttgggaaaagggggggagaaaaatccccccaaaatccttttttttttttaaaaaaattccccccccgaaaaggggggggggaaaaaaacaggggggggccccaaaaaaagaacaaaaaaattttttttaaaggg

SEQ ID NO: 4777 - DNA, 486 bp, Gossypium hirsutum
  Clone ID: LIB3825-033-Q6-N6-G6
gaaatcaaaattgtttttaagataatatgaatacaacaaagataaaggcagtacactatcatttaactattttatccccccacccccccaactcctcgcccgaccaaaaaaaacccactatcatttaaatcagatattatagccaactaaaccaaaactgtttaaatgattaaccatctttcccaagtaaaatggatatatttgctcatatcaatacaaactgctcagcgctttgacttgtgatgtcgctccttcttgtaccgagactgatcaggatcaaatccaccttcctcagctccatagacggcccatgacggagtgagagccatataatcctcactgtcaaaaggtcttcctaaagccaccaggtcatgaaacttttcatagtcaatccatgtatgccattgaccattgaccttgaacttttcagtttttgccaagaggacacaacatgagtgtgcatgttcacatgcacccacgcgtccg

SEQ ID NO: 4778 - DNA, 510 bp, Gossypium hirsutum
  unsure (1)..(510): unsure at all n locations; Clone ID: LIB3825-033-Q6-N6-G7
gtataatgaattgttactttattatctttnttaaaaggaacattattnaaatttnaccccgggggggggggtttttnnnnngggggggggggggggcccaaaaacccccattaccnaaaaaatattcccaaaaaaaatttttttttttgggggaataattttaacccccctttttttaaagggaaagggaaaggnaaaanaaaaaaaacccccccccccccttttggggaaccctctaaaaaacccccttttaaaacccttttnnnnttttttatttggggggtttccaaaaaaaaccccccccnnnncccccccccctttttccccctttttttttttttaaaaaaaaaaagggggggggggtttttgggggtttttttggggggaagaaaaaaaaaggggggggcccgccgcccctctttggggggggggggaaaaaanaaaaagagggggttttattaaaacccccccccccccccgggggggggggggggaacccccccccccccc

SEQ ID NO: 4779 - DNA, 566 bp, Gossypium hirsutum
  Clone ID: LIB3825-033-Q6-N6-G9
aaacattaagaatggatgtaacctggattatctataaaatttgcacattttttccccaaaagtttaggaatgttcaacagttagtacaatggagtattacagaaagtacatattaaataccttttcttcttccttgtcatcctaaatgcaagaaccgatgaaacaccggtagctagtcttgcctcgacggaaatcagagttgcctttacagccattgtcatctcttcacatattcaaagtcccaaaccaattgaattaggattatcactctggtacttgaaattcttagtcccataaattaaagaatgagcttcagaaccagaatcgactaacttcatcgatcatgatcagtcacagcattctaatgttagcctggctggatgaagatggtgcttttagtttaacgatactatcatcctgttcggaatcgaaaagaacgttgctccagtttgttgatgtctcgataattctcgaaggaactcgatcactgtcttccccacctgatgcttcatacccgtcactagtagaccttgataaaggaaatccctttggaacagccatattga

SEQ ID NO: 4780 - DNA, 427 bp, Gossypium hirsutum
  Clone ID: LIB3825-033-Q6-N6-H1
gggggggaagccttgaatttcatttcacgggaatcattagcattttaaggggtaggtaataagaaaaaaaagccgggcgggttgaaaaatcttcaaattctggttcatacccaatcattttacactgaatttcaaatcaacttcaccaaaatgggccccctaccaagcgggaaacaaaaacaaattcaaatctaaacatacttttctctccaaggggaaacccaaaagaataccccagaaaaagcccacaatttgtcaccaacccgttgggggggcccatcccaaaccaaaacctttactttttttttgaaccaaaaatttcacaccgccaccgaaccatgcaaaaacgggccccctttgggaaaaaaagattggaaccctttgttttttacaaatgggaccctgaaaaggaagaacccccccggga

SEQ ID NO: 4781 - DNA, 521 bp, Gossypium hirsutum
  Clone ID: LIB3825-033-Q6-N6-H10
aaatagcagtacttcaagggcatgaattaactgtcaaatgtaactgcgaactacttttcaatatcataattttttttctacaaaaagactcttctgagcatctcctaattattcaaccaggtttgaacagcatgaggtcatcaatgcaattttgtctcatcagatatattgcattctcattaaagataaggcaaacatctactaatcattgcccaggattgtgatagaaacaacagattagttcttccctcttcccatttttttcctgctattgggacaacatgaaaatatctaaatgcttggattgctaaaaaaaacttgtgttcgggggaaaaaattatggatccatgcctcaggcaatgtgccctgccaaagtgaggatcttgacatgctttttctgcctcagctcatgcggaactggcccaaaaactctggtccctattggttggccttgcttgtcaacaagaacaactgcattgtcatcgaacttgacctcactcccgtcacaacgaccccgctgc

SEQ ID NO: 4782 - DNA, 460 bp, Gossypium hirsutum
  Clone ID: LIB3825-033-Q6-N6-H11
aaaaggggaaaaaaacattttaaaaaagggggaaaaacagggccaaagggaggcaaaaacaaaaccccgccccaaaacttagggaatcggaatttcaagctaaagggggaataaaaaccaaccctcctaaaaaaaagaaaaactgggaaaaacccccaaccccccccccctttaaaaaaccctaggaacgggagttggaaaaacgtacatgctaggacccggccttggggggggtgccccggaaccgaaaccaaaaccaccaaagcctggggggggaaaaaaacccccattccacggggttcaaaaaaaaaccccccggtggtgggttccaaaacttcccccccaaaaaaagtggacgggcggcttgccaaagggggccccccccaaactttggattgcttcctaaagggccttcctggttggaaaaaggcaaaaccccccttcttttccaggggggttt

SEQ ID NO: 4783 - DNA, 557 bp, Gossypium hirsutum
  Clone ID: LIB3825-033-Q6-N6-H12
agacgtaaaagctggaaatttatatttagcatacatcaaaactgctgaaatatcaaggtttcttatttacatattcgaacaccaaattttaacatgtattccattgttttagcatattagcttccaaatactgtttccaagtcttcagtgggcgtatgtcacttgtgtctgaatacttttccttggatctgcagttcattagcaagcctctcgctgcgaatcccatcaattcagttggatccatataactgcgaatccttgaaccaatcccgccttcacaagaatatcccattctcgtataaacatctgcagtggcttcttcgggactcatatcattctgcttcgtttgggtttcttctaccaaggattcatacctaatatattcatggcttcctaacccaaatggatccaaatctacctggtgcaagatattggctgctcgttctgcaccatctttgttatggttttctaatcggatagattgctcgagcgctaatttgtcgacttttactttcaaattctgcagttgatgcccaattctggatgcgacagcatcg

SEQ ID NO: 4784 - DNA, 77 bp, Gossypium hirsutum
  Clone ID: LIB3825-033-Q6-N6-H2
tttttttttttttttttttttttttttttttttttttttttttttttttttttttttttttttttttttattttttt

SEQ ID NO: 4785 - DNA, 558 bp, Gossypium hirsutum
  Clone ID: LIB3825-033-Q6-N6-H3
gcaaacaaaacattgtttttttatagaaataattaattaaaaacatgaaaatttaaaccaggcttaatgacggtttaagataacataaaaaagaaaaagaaaactattgagaaataaaacagtaaactcagttaacacattaggggaataaacaatgaccagttcacaccataataaaccacagaacagcagagagcacgtacgggatgtagctcactgtcttttattctaggaaacacgacacaggaaagccaaacaccaacatataatagaagacgacgctaatatttattgcactagaagtagaggcttaacatggtaaagacaccatacggagagcttagggattcactcgtcttccgattcagactcggcagtctggagccactcgatgaagggcttgaggttcttccatatctgagaacccttattgctaccagctatacccttctggtaccactccatgataaactcttcttccaaaatatcatcgtcatacagcactttaagaaccaatgccacctccttcgccgcctcagggctagccttgctgcaaaa

SEQ ID NO: 4786 - DNA, 547 bp, Gossypium hirsutum
  unsure (1)..(547): unsure at all n locations; Clone ID: LIB3825-033-Q6-N6-H4
gaaaacaaatatcggagncatgtcatacaaatatttaaaattttgcaacaggctaaaaataaaagaactagttgacaaaagattgacatacttggaatgtaagagcccatttttgcccgggcccaaatattaaaaattacagtccattaacaaaaatagacccaatccaaaagcccaaaactaataacagcccaatagcccacaagacttaaaaattttcagccaaaccctaagttccctagcgccgcaagcttccatgcgtggcctcctcatctgccacacctccaacgcacgcctctgccactgcgtctgacacctcagccgcctctaccactgctacctgcaaggaaaggtgaacacgcaacaaccaagaagccaagcacaagcacacaacagaaacaaacaaaaatagtagaatagagagttgttcaaatcggctataaaggcctagatcagatccttgtatttttttacgcacaccagttaatcgaaaacagaacaaagattcgaaaaggttgaaccatcttttttttttctctctggtttc

SEQ ID NO: 4787 - DNA, 551 bp, Gossypium hirsutum
  Clone ID: LIB3825-033-Q6-N6-H5
ggacggttaaacatacacaaatcataacaagcaaattcccacattattttcacaatttatatatgtgtttttttggagggttcttctagaaaagcatcgaggaaaggaaaatgaatcaaacatgggtttggcttctgaatgaaccaagagccttagcagctcctgccctcaagatgaattggtggtagaatgctgctatggctgctccaatcatgggaccaacccagaaaatccaatggtcatcccaagctttcttgctgttgaagataacagcagctccaatacttctagcagggttgatgccagtgccggtgattgggatggtagccaagtgaaccatgaatacagcaaatccaattgggaggggagccaatacagggacatgggagtctctagccttcctcttaggatcagtagcagaaaaaacagtgtaaaccaacacaaaggttccaataatttctgcacccaaaccagttcctgtgctgtaaccatctgctagagtgttggctccacctccatacctgttgtagtatgctgattggaatgcctta

SEQ ID NO: 4788 - DNA, 575 bp, Gossypium hirsutum
  Clone ID: LIB3825-033-Q6-N6-H6
tttctttattactgtgatcataatgcattcaaacttcaaagctgttttaacaagcaagtgttaacagcgaagcttcgcatttgcatcctacaaaacgggcataactactatttttctgaaagaggacatcacacgacatacgaattatcagaaagtgaactcactacaccaaaagacatgtttcactacaatcttacaacatgcagcgtagacttaagtctcaacatttctttacacaaattcacacgtgcatacccgctctatgtgcatgaccggtaatcatggagaagctaacttagatgcatatcttttctagaggcttaaagatgtaaaaatacagatcatcaggctgacacatttgttcattgcttgtatgcttcgcacaataatgtgctgtttatagtttcattttctatgattagctattactatggaagtttattttgacttactttggttcattggctaaaagaaccaaagcctaaaaccatgctgagaatggatggcattatgcatgaacagtatgtgaggaaccaccttgattagccaagaaacggacgacaacacaggtgata

SEQ ID NO: 4789 - DNA, 526 bp, Gossypium hirsutum
  Clone ID: LIB3825-033-Q6-N6-H7
gagacagtactgatatcttttgttttcagttaaaaaaaatatgcagacatttagctgatgattttgtatggtatttgctacctaagggtgataaaaaaatataagattatcatcttaccattagcaatgcaattaacagtaattgtctaaacctttattcaaaccatgtaaccattttcatggaacttattatgtttgaggatggtttcatcatcttcacatcataacttagccatttgctgttcaaaggttgaatcgatgcaaaccaccaccttgccactacttttacccgaatgaagatgctcaacagcatctggaacagaatgcaagcctaaaaatctttttggatctattgcaaccttaagcttccccgaagagtaaagatcaaattgtctagccaggtgttctttccataaatagctatattggggcaggaaaaagccagccacagattggcttttggttaaaagcttctcgacaagaccaggataattttttggcttccacccatgctccccttgatact

SEQ ID NO: 4790 - DNA, 557 bp, Gossypium hirsutum
  Clone ID: LIB3825-033-Q6-N6-H8
gattcagaatagagataatcatgcaagaatcccaaaagagaaagtgaaattggatacacatcaaggagttgcataaaaattaagaacaatgattgtctgacagatcttctttcctagcaatcaccatttagttggttcaacatgaaacatgcacatagctcaccctctgatcgaagctcgttgtaacacacataagctttgccatcttttaaatccagaatatcagctgggaaccatgctacttttaagccatctccatctctcagtacctcaacatgggaaccctcccttaaattgttattttttgaagtttcccctgctttcccatgttcactctgagtgatcacggaaggcagtccaaacccaatttcggattcagaagtgactcctttagttttggcaatttctgaagctttgtggccttttggtccctttttatcctttctgcttgctgcagtaggacccaaaatgccacctgttaatctagaatgatcctctagagactctctagctatctctctaagagttggtgacattccatattcaacactttgctt

SEQ ID NO: 4791 - DNA, 541 bp, Gossypium hirsutum
  Clone ID: LIB3825-033-Q6-N6-H9
gccggtggacacatataaattcattgaacaaaattattttaactgcctatgatgctggaaaaaaaatcttacaatactaaaaaggaatactcaaactgtccttcattttcttgaacgcttctttgcctgtccaccacctgaatggttctcaacagcttcccttccccgcttaccaggaggagctgattgggtggcaggcactcttttaggcggtcttcctgtactcctctttgccggactcgttctttttccgccagaacgtgtccgtggagtcggagttcgatccttctgttgatcacctttgctgctggcgctgcttttcttatgctcacctgcatctcctcctcctttacccttatcagaactaatcacacccttcagtgtctctgtcaatggctcattaccggataaagagctcctcattctattcaagaaattcgctgcacttggcttctttgaactcgcagttttgctgttgctcttctccttctcaccacccttggattccgagttatcatttgaggatccacctttgcttgaa

SEQ ID NO: 4792 - DNA, 476 bp, Gossypium hirsutum
  Clone ID: LIB3825-034-Q6-N6-A1
aaggcgtcaatggctcagctttcgtattcacaaggtcttgggcaaatgaaacttccaggttttaactcactttgaactaactagtatttgagtttagttcagctccaaattgagacaattaaactattccaacttctacccctcaggcttcccacaaaagcattaatcatacatatatgatgatcaaggaaaccatagcagcgatatgcaccatgtcaaacacaaaacactccgttttttaacggacccgtctttaaatcagtccttgccgctgcaaatcggtataagtcttcttgttataaatgttgccctctttatcttcggattcttcttcaaaatctggaccccacttgttcactccttgccgttctcttatcttctcccacagttcttgggcttcccgaatattggttatttcattgaagttcttagtgttagggataccaaggcatcgcatgccatgttgatgccgccat

SEQ ID NO: 4793 - DNA, 569 bp, Gossypium hirsutum
  Clone ID: LIB3825-034-Q6-N6-A10
cttctaaacagctagaaatatacttcatttatattgtagacatagttacaacctaacttacaaaatgacagatctatgccattgcactctaccttaacaaaccaactgcaacatttcatagtaggctacaacagtgacatttaaaacagaagcgccattgttcaagaccagattcctttgaaaagtgtagtagtagatgcagtgtccccaaaagtcctcaccaaatctgaacaagaaggatctgcttccccttcagtctccagttccaaccccagttctttatcaatagcatcggatgccgatatgagtagaaactcacatccttcgtagttcaaaaagtcgggtggatcagccggatggtatcgggttttccccaactggccttgcaggtgagcagggaaggctgcctttcgtttgtttccaactcccctaaactgggaattgctagcttgtgatgggttcttgatttgtatcaaaaaggagccttctggctcgatgttaagtgattcttggggttcattctcttcttttggtggtgggaattcaagtttatatatcaaatgagtgtg

SEQ ID NO: 4794 - DNA, 340 bp, Gossypium hirsutum
  Clone ID: LIB3825-034-Q6-N6-A2
gttgaaaacaacattttttttttaaatattatcatatcatatgacctgagaataaaagatgaagtggaaaccatgatcaggtctaacaacaactaaaagagtccacatatgcaacataaaattacattcattcctaccaaccttatttcaacattttcactacacagtaatgaaccgtagatttgcaagtttgcttgccaggggctcttcatcgtcaacccaatttccccgtgggattcaggttcacaattgcattgcagcaaccgatttgaacctgagaatgctgttttataaaatttcatcaggcattggggacaacagcagcccttgaacaaactcg

SEQ ID NO: 4795 - DNA, 247 bp, Gossypium hirsutum
  Clone ID: LIB3825-034-Q6-N6-A3
tcgcgaactagcaggcccctgggttgaaccggggaatttccgacacgggacctggaaggcgaccaagttttccttatagggggtggattaaaagttgggggaattaagggcattagtggttcctgggggaaaatggtattccgttaaaatttcaaaaaacaatacaacccgaaggcttaaagggaaaagccgggggggctaaaggggggacttaattaaaataaatggggtggggttaatggccggt

SEQ ID NO: 4796 - DNA, 514 bp, Gossypium hirsutum
  unsure (1)..(514): unsure at all n locations; Clone ID: LIB3825-034-Q6-N6-A6
gaaaaaacaaggtcagtatatttaaatatgtacacacgggttgcctgtccatacaattttaacacccactaatacctcccttatanacagtaaggaatgcacatttatctatatctaccatcattattcaagacctatagccatttttcccatccttagtgaaaccactcgctcatgaagggacaaatgccattgaagttttcaaattatccgctgccgttggagggaactcatgaaccccaccgacgttccatggctggaagttcattggaggaaacatagcgccagggtcagcaaggctgccttggacatccaccccgattgaaagtaccaaagacaaagaaatggatgctaaccaccacatgagttgcttcactgacatatactaggtacatgagggggcatttgggtcctctaatttacatacacgagaatcgctggaccttgaccctggaaaagagctatgtgaccaaacatataatctttcctagaaaacgtgatgccgcacaaacat

SEQ ID NO: 4797 - DNA, 559 bp, Gossypium hirsutum
  Clone ID: LIB3825-034-Q6-N6-A7
gaaattaacttggtttgcaatatgaaaatatttaaaaacaataatcagatcagcaatctttttaaacccaatcacacataaaatatatacactttgaagatcatatatatatatatatcttcttcctctacatcaagagctcattaacccacccgaggtcaagatcatgatccaaaacgacaccgtttccattgtttttctcatcatcaccaccaccattgaaatattcaccagaaccagaaggacttaccattgaaggagctcctttgaatgaaacatcaagccatggaatgtttgtatttggagtagtagccattggtgaaggtacttcggacaaagtcatggttcctaaacaactcatgacttccttcaacaaaacatcatcgtaactggttgtcatttcggttccaaatttactaatacgatcaccgccgtaccttggtgttcgttgctggtgttttaagggagatagaggcggtgacagggatggggatctcgagaattgagataaacccaagagagtacttgttggggacaacgacgacgacgatgtaaccga

SEQ ID NO: 4798 - DNA, 401 bp, Gossypium hirsutum
  Clone ID: LIB3825-034-Q6-N6-A8
ggggggggtttttttttttttttttttttttttttttgaaaaaaaaaaaacccccccccccttttaggggttaaaaaaaaaaaaaaccccccttgaaaaaaaaaagggaccccccccccaaccggggggggaaaaaaaaaaaataacaaaacccaaaaccccaaccaccccccaaaaaaatggggcccccccccccttttaaaaaaaaaaaaaaaaaaccccgggggccttaaaaaacccccccccttttagaaaaaaaaaaacccccccaaaaaaatttttttttaggggggaaacctgtggcacaaccaaaaaaaaaaccccacaaaattgggggaccacccaaagggggggcccccccaaatattctttggggaaaaaaaaaaaaccccccccccccc

SEQ ID NO: 4799 - DNA, 411 bp, Gossypium hirsutum
  Clone ID: LIB3825-034-Q6-N6-A9
gtcttaactgtaagtatatttccatgcaaaattgaaccagtgaataatcagtttcaaatatacattgtcaaatatcaaacaatgatttcaaactttaacttcaaatttccactgcatgttgatttctggcatcctcattataaatttgctgcatataatttcagattcagatggcagagtatggattctcaacttggttcatcatcggtttttcttctcgtaaatatcgattatgctcgagagtcatccaatatttactgaacacatgactacaaatcctacagaagctcggcctcttcttgttctgcatctgcatcatcaacctcattttcttcttcttcaggcgcatccggatccacccccttcatctgcttttccaggcgttctagcccctttttggcagcttcattt

SEQ ID NO: 4800 - DNA, 543 bp, Gossypium hirsutum
  Clone ID: LIB3825-034-Q6-N6-B10
gtaaaagcatctgtaaatgctacataatatcgaaacccattcgatgttaccggtgctgaaccctagacatctgctgctacaagttgtaaaggtgcaacatattgagtctctgaggagggtaagggctgtttatgctctttacctaagtgacacgcaacacatgcaaacatatctttattgtcataaaaaaccatattacaacactgtaatgctttgatcagtacatttctgcaaggatgacttagcctagcatgccacagacttagagggactgaagcatgagtttgaaaacaactagttgcctgactaggctgatcattcttaagagtgttgttgaaacgaagcttatacaggccatgctgcactgaaccttgaagaagcacctcattggtctttaagtctcgaacttgacattgtgaaggaaagattttaaacatcacttgattgtttctggtgaactggtccatgacgagacgtgttatcaccaagagattcaactgagtgagtgagatgatgcgttaccccagaatcgggataccatgc

SEQ ID NO: 4801 - DNA, 415 bp, Gossypium hirsutum
  Clone ID: LIB3825-034-Q6-N6-B11
agaacaaaaaacaaaccctcttaaaggattgctatcatatatgggtggatttcaaattagaccaacttagacctatgaactcttgggttttgaacaaggggaagaatgattaagggctaaatcaattttaggatcaaaacatgtttttgtaacaaaagaccaaaaattatcttcgtcttgggtaattcaatggggattccagccaacctacaaaatacacaagggtgaagggttgggactttttgatgaaggggggactcaagagggccaaagatgatgctctcttttcagggctcgtctgtaggcaggctgagacaaatgaacagaactctgaagagaactcatttgggggagcatttggctttaaaagctcatcaatgctaggccaagtttgcggatcttcccattgcttata

SEQ ID NO: 4802 - DNA, 563 bp, Gossypium hirsutum
  unsure (1)..(563): unsure at all n locations; Clone ID: LIB3825-034-Q6-N6-B12
aaaacaaactttngaaaaacttttatatcactgttgtagactcaatttttagcccgagcccatacattatacagaaaaaataaaacaaaaaaaacaatcccaaatatagttacactaggcccaaaactttgcaatggcccaatacttgattacacaagcccaatgccccaaatcgttttcagaaatagcaagctctagggttctatttgccttgcgccgcagccaccagcagccaccaacgcacgccccacacacgaccccttgactcgcgtattgcccgccccacatccttgcacttcgaaccacgttcgccatacctgcaactagtggagaagaaacagatgtaaaaatggctataaaaggccacgaattttcatttgttttttttgacggacgagtgataatacaaaatacatatgaaaattagtagaaaagcaaccaagaatacttctaaggtgattatttactgcaattttattctatttttcctcttttttctttttttcatttggatccacaacacatgcgaaggatcagagagaggagaataaacttatcgcgcg

SEQ ID NO: 4803 - DNA, 549 bp, Gossypium hirsutum
  Clone ID: LIB3825-034-Q6-N6-B2
aaagttgcaatgttaaaaatattctcttttacaattatagtattagttaatgttaaaaaactaactaatacaataatgctttaaaaaactaactaatacaataatgctttgatatgcataacatacaaaagtaaatagatatatcaacctattggcactaattcagcaataatatttcctctctagaacgacattcctgccttttggtccaagagtgactccaaccaaaacagcaagcttgttcacaccagtttgtaatttccttatggctgacccatccttattgaaatgtagctcttttacagcagaaatcttgggcagacgagatcttctacaacaacatttcgtctactaagaaatgaagatgaagaaatggatgctaaagatgacaatctgttggaagaagatgaaagcttcttatccatgaccagaccattaggtgcaacgaatgagccaactgatgacatggctgtgaaagtggatgccatcttactcttttaataagcttaaatttgctcaaattcgaagcaaaattctcaacattgccct

SEQ ID NO: 4804 - DNA, 382 bp, Gossypium hirsutum
  Clone ID: LIB3825-034-Q6-N6-B3
acaaaaaaaaaaagagggggtttttatctgggggggggggggaagtgatcactggtccaaaaaaaaaaaggggggggggggggggccccaaaaaaaggggggggggggggtttttttttgggaggccaaagagccgccctttacatttaagggaaaaaagggaacacctgggggccccgcttcttatcctacggggggaaaaaaaaaatttcccaaacatgggggaagagaggaaaaaactcttttaaaaaaaaaaaaagggggcccccccttaaaaagttttggtggcccaaaaaaagggggaaggggggggttttatgagaaaaaacaaacttttttattgtttttacaaaagcggcagacacctttttttttggggggg

SEQ ID NO: 4805 - DNA, 555 bp, Gossypium hirsutum
  Clone ID: LIB3825-034-Q6-N6-B4
aaaacaagtatacattttgtatttgctgcttagcccagagaaagtgcaaatgttcaactgcacacagacaagacaaacaatagcaggaaacaagcctggcaagtcacgtaattattcaatctctcttctttcctctcatatttcccaaccacaagtattaaatttgtcaatgtgaggacagactattcctcatatatttaactccacatagtgactacatcagaaaccagcccacccagcaggctgggaaactggattactctcctttatttttgattcgcgttgggaactacttccttcatttatcattgattttaatctctgggagctggccgtaggggcagctgtaaagttatctgcaccaaaaccccatgtttccataccaaaagttgcttgagcagcatgcatgtttgagtgaccatttctagttctaactgactggacattatcctttgaaagaggttgctgctgctgcggtttggcatcctctggaaaagcctgccatggctttgcttctgggctagcagttttccagttaccagctttttcttgtgc

SEQ ID NO: 4806 - DNA, 543 bp, Gossypium hirsutum
  unsure (1)..(543): unsure at all n locations; Clone ID: LIB3825-034-Q6-N6-B5
acttcctatctatataaaagatgcgttcgttatctactgcaacacaccaaaatcagggnaaacttcggctggcagacgggcctctctcagatgtcttcggggccattaatttccttgttctcaattacagctccatcgggaatctccaacttcaccccgggttttgcagcgatactcactttccccttgagcacaatgccagcaccaaaccaaacatcaccagtcaccttaaggctatcaagctcaatgatgctcgggattgacttgaatcgacttaagaagttaccaaccttcttgaattcaggccccaattctatggatgggtttgtaggattcgctctatctttattccggataacaaatccatcaactaaggtgtaaaggtcagactgaacaagaagcaaatctgaagttgccttcactggaaggaatcgcgatcgaggtacgttgataccaatagcatgatcaaagaacctaattgctgcaccagctgcagtttccagttgaagaaccttgattccattgacctcctttgggtttgga

SEQ ID NO: 4807 - DNA, 525 bp, Gossypium hirsutum
  Clone ID: LIB3825-034-Q6-N6-B6
cagtaaaaatctctccctattatatatttatagaatgacaaaatggacaaaaggggaagttgaaaaaaaaacctaaacaaatctcagatgcactcctctgccaagcagtcagttctttccactaaatgctacgcaacaatttgatacatcactactacaaacaaactgcatgctatcttttgactactcccctctggattactttcttcaagcaggggcagataccctaggtgccacattctttgttgatgcattaaaagttgcttcaccagagcggctcacacggccaccgttaccccccatgtgctcacccctctgatatccatcacctccacggctggaatatcctggctcttaactgcagacttcacaggggattgtgtaggtgctgatacagggactgcattctctttcaaaacctttaaaatagacgcatatgacttctttggcagttcctccatttcgggcttagaatcagaaaccatctttgaatcatcaggaatctcatcaacaacctcagccact

SEQ ID NO: 4808 - DNA, 517 bp, Gossypium hirsutum
  Clone ID: LIB3825-034-Q6-N6-B8
ccagaaagccgcattataaccaaaatgttaatgtcattaactaaaactttctcaaacaaaatccgagaagagttaaaaccatgtccacctacagaatccaaaacattgaaaacttacgtacgaaggaccctaaaaagccttgatatttgctttgcttgcttaatcgaagaggctgaaacccatatcatcgtcggattcttccttctcctggaccttcttttttttcttggcctcggctgcaggtgcagcaccaccaccaccacctgcaggagcggcaaccgcaacagcaccaccaccagaaggaacggaagccaacttctcccttccactagcaattagctcggtaatatctttgcctttaacttcggataatagcaactctatcctatcatcatcagcctcagcaccaactgatccgagaataaccttcaagtcatcggcggaaggggaagcgtttcctccgagtacggcgagcaagtaagcggcgaccaccttcatttttaccggacccgtgggt

SEQ ID NO: 4809 - DNA, 571 bp, Gossypium hirsutum
  Clone ID: LIB3825-034-Q6-N6-B9
tcgcgatcttttttttttttttttaccagaagctgaagccattacactttttaccaagccaccatacaaattgtagatccagaaatatgcaccaactaaaacaagtccatttttgagaaataacttacgaaagcagccatgtggaagtgttatttttggtttattgtgtaccttccatcaaggataagaggatctaagtgtcaccggtgatcttggtatcaagctgagagaattctttgaaaaaggccttgaaatgctcatatgaatgcttcacatcatcaacagcacacatttctcgtatgctatgcattgataattggggagcaccgacatctactgtgcggatccccacaccactagctaggataggaccaatggttgagccacaaggtgtatcgttccgcaccacaaaatcctgaataggaaggttatgcttcatagctatttcccggaatatgaaagacgtgactgcattggtcgcataacgttggtttgcattgtgtttgataacaaggcccccgtgcaacttaggctgatggttctcctcatgtttgtccatgtaatttgggtg

SEQ ID NO: 4810 - DNA, 576 bp, Gossypium hirsutum
  Clone ID: LIB3825-034-Q6-N6-C1
ggaataaattgtatattatttattacgaaagagctttttagttagtccatcgaaatctcccacaaactcaattcaacatgttcaacaaaataaaactgcaaatacccatattcatcaagcaacaactgcctataaactactaagagacgacaaaacccaatacattcattttgtggaggcaaatgttgttggcttcattctattccgcaaccatcagcttatgcatcagcaaatcctagctcagagagcttcaggtgagcttcggtgtagtcagcaaagaaggcatcctcatcggcagcatatttttcaaccaatggacggaaaacaggatctgacaggagaactttgtcagttggtagctgaagaaggccttccttctctcccgacaaaagctccttgaagtaagagttgtcaaagatgagagggttggtagtccatggtccctcaaacccggacctctccttgtggcaccttcccagagtgtggccaccagaaagagcaacaatgtcctggtcactgagacccatttgagcactaaacacctgcctcaagtgatcagaacccttggtagcatca

SEQ ID NO: 4811 - DNA, 499 bp, Gossypium hirsutum
  Clone ID: LIB3825-034-Q6-N6-C10
aattaagcggccttattacatttaaaaaaaacccaaaacttcaaacgtaaataaaaggatgtccagttcaccagaaaaaaaatcaaattttcagagccactccgaattccctcacagctccaagctcactatgattggggatttcctgtttgcgactatatgctgacgagatccacacacgaactgccgctcatatgtaccccgtgtgatgaacttccattcatacgtacgatctaacaagaatacgggagtggggcagaatatacaaggaatacaagcgtgctgggctaagattctggttgctcggattttaaaggtgcaccggatgaggatgcacagctcccattttgcaggtaaaggctatttgcaaccatagaatcactaaccaaaccgacatcaacatcgtcgaagttgagcgcccctctgatctttctgccaccattcaggtgattgttgatagcagttaggtctttcgaagggctctgataggcacgagtac

SEQ ID NO: 4812 - DNA, 538 bp, Gossypium hirsutum
  Clone ID: LIB3825-034-Q6-N6-C11
caagaaaaaaatcgtttgattagaagaaaaaatgatactaaaaaagggtacaaatacaataatggagacttggaagattgtttgggttatttcttttctacccactaagcacaaaatatttacctaatgctagagtttatgcttaatatatctaaacatgggtcataaaaaggagaagtagatagtgaataaggtgaagcaggaggagaacgagagtaattagaagatgaagaagacgaagaaatggaggaaatattattgttatgtgaaggattccttatcacccaaggcaccacatcttcgagcagcccttgttggctaaaccctgcttccaaactcatttctggagggcaaccctcaatggagcttggcagtggctcgatgttggtataatttgctatagtttccggaacttgtgattcagcttcggaaatgccttgcttggccttcttggttggtgaaatggtatcatctggagaaggctggtggtggttatcgagtgggagatatggataggcaaagtgcaggtgaaatcctt

SEQ ID NO: 4813 - DNA, 566 bp, Gossypium hirsutum
  Clone ID: LIB3825-034-Q6-N6-C12
aaaaaaacagcattaatttaaaaaaacagcattaaattatcttttccaggtttttgttacatcacataagaccgaggtttggtcataaaaaggaggggaaagcaactatatgtgaatttaactatcataaaaacaaaaggaaagcatttaaagattgaagatggatccagcttggtctcccatcaatggcatctggtgaaaagccttctcatttgcctcaccgaaaaatttgaacagtcatccttggaaacaaattctctctatttccttccactcctggctgatgggggaattaggcctcttttctctaagcttttaaatctatctcttgcaagtgtagcacaaccctttagcttacggagagatccagtaagttcttcggataagaggacttgtgggggagcagcctggaatttgtatttccccaaccgtggtggacaagccttaagtctttcttgcttagctatggcctttcgaagatgccagaactccacatatccacccccatcaccagccacacaatgcagctcccccactcaacatctcagcactgattttgctgcctt

SEQ ID NO: 4814 - DNA, 541 bp, Gossypium hirsutum
  Clone ID: LIB3825-034-Q6-N6-C2
aaaattaattggttccatttcttgcaaggagatataagccaagacgtgcagcacatttttcacacgtttcttccaagtccttgtcctaacttatatgtaaagaatcaaatcacacatgaaattatttggtcagacatggaataggtaggtattagattagccgcttaaaaggaaatctctccattgttcacattgatcttgaatactacaggaattcctctctaacaaagttggtgctttaaaagctgcccaagtatgtgttttaagtgtgtatgagtctttgaccacactttggcaactattgctgctcctccactattcgggtcacgatgcccacagcaaccgttcttcctaatgtcctaagaaacacccttccaaggactttgcatttcgaaaactcttccacgcaaaccgcttcctgcaaaatcacctcaacaactgcactctgcttagcaagaatgcagcggggtgctttcttcacaactttcccagtctttgaatcaagtaaaaatgatatccttgcaactcttgcagcctcctt

SEQ ID NO: 4815 - DNA, 486 bp, Gossypium hirsutum
  Clone ID: LIB3825-034-Q6-N6-C3
cgaaagaaaaactccaaatttgggttaacatacgataaagagacagtttgggacctagctggcatcaaaattggggaaatctatcagctaaaaaatagcagcagttcatgcccatgttaaaaaactgactgggaaaggcagagccgccaccacccaattccctattttgggtcttaggctttaccattgggggcgtccatttgctaaaaccaagcgctccacctcttggttaaggttccccatttactttgccaaaaccaccgttaacattaggagtggcaaatagccacttggagtgcatgtaggaagcggccctccatggtggaacatgcaaccctgcctatctaaacgactgtttgggagccgagcaaaccacggatataatctccctcactttttcttcacttcctataaagatggatggccgatcatctgccaactccttgtaggttggtgaacgccttgcaagttcaaattggcacttga

SEQ ID NO: 4816 - DNA, 542 bp, Gossypium hirsutum
  Clone ID: LIB3825-034-Q6-N6-C4
aagcaaaagccaaatagagctttccttcattcattcatcagttatataacatggcagtaacacaacaaagctagttaaaatactttcatttcactatacataccaagcaaccatggatacaagaagcaaaacacctaatgaaccatggctgctttattctaataataaaaacccaaatacatcatatattatttagatcagcttccataatatgcttcggttttttttttcccctcatttacaattgcaagggttgcaagtgcagttatctccacatttgcagccattttcagccccagtttccatttcagctccatcaaagttcactttccggggtgccacgccaagaacaagtgtctcagttgtggtttgctcagcaaagttcatctcagggtacatcttgcaaccgccgcagccgcagccgccgccgccgccgaacttgcaaccggagccgcaaccgcagtttccaccacagcaagacatttttcttcacctcactgattgaattagaaaaacaccaaagggcgactcttaatacaaaa

SEQ ID NO: 4817 - DNA, 516 bp, Gossypium hirsutum
  Clone ID: LIB3825-034-Q6-N6-C5
aagggataactttgtaaaaactcacaatagaagctacaacaagcacgatccaaaaggcatttttgacaaaactatctccatttattcgacattacatataagaaagaccagaaattcaatattctcatgctctgttttttttttaactagaaaactctaccaattgataactgcaatgtacagtttgatgtgaaaaccatgtaggatgatcgaaagaccggagctggtcactctctgttgataattagtccaccgcaagaagctggggtgggagcggtctttgcagcctgttcagaagcattggctaaagcctgcaacattctcaaaatctcgcttcggtcttccacgtagtatttggctttgctcggtttctggccgacagtgcaagcaaacacctcggcaaccggggagagacggggactggtctttgcacgcatgatgacctcgaacatgtcctcgtctgaccggtcgtctccgatacaaagaacgaaatccggaagctttcctttttgtctc

SEQ ID NO: 4818 - DNA, 578 bp, Gossypium hirsutum
  Clone ID: LIB3825-034-Q6-N6-C6
cttatgtcaccgttgctgaaaatttaagactacaatgacattttatcagcaagactttttgccagagccacacaataaacaaacacccactttgaccccacactcgaccttcatcaccattcatcaagtaaaaacaacgccctaaatagtttttaaaccccctaaaagcgtttcaccaattccccaacccttgtttaaaaccacctttgttttccacataggatcgcccctttctcgattcttacaatatttctttacacctatgaactggtatttatcgtcgttacacaacatatttacgccgcagatggggcggccacgaaatggactgcaccaacttcagagagtgccaccaggaacggttgcaggttcacggtctctgtccctccttcagccgcgctggtacggtaatcaagtgactcgtcgttgtaaatgtcccaccatttctgaacaagcatcttaatgtcttctctttgcatgttagcctccttccctgtgtacctccaaggcttagatcccgcagcacagtagtgaacaactttcactttttcaagctccacattctcgggatgacgcca

SEQ ID NO: 4819 - DNA, 481 bp, Gossypium hirsutum
  Clone ID: LIB3825-034-Q6-N6-D1
ggaaaaattctctttttttttcttaaaaatcaaaaaaaaaagataaaaaaccccaaaaaaacaaaaaaaaaagggcaaaaaacacccaaaaaccaacaaaaaaaaaaaaaaaccaaaaaaaaaaaaaaaaaacacaaaaaaaagggcggggaaagttgcggagaggaacacaaggggggggacccggggggaaacccgaaaaaccccccgggggcccccggggggcaccccccggcaaaagagggggacccaaaagggggcgggaaaaaacgggaaaaaggggggcccagggaaaaagcctgcccgacccaaaaacccccccaccagggccaccagagggaacaacccaaaaaacccggggccaaaccagggggacaaaaaaaaaaaaaaagggggggcgaaaaggggggcctcaaaaaaaaaaaaaacaccgggcaaacacggtaaaaaaaaaggcaaaaaacccggggaaaagcgctga

SEQ ID NO: 4820 - DNA, 287 bp, Gossypium hirsutum
  Clone ID: LIB3825-034-Q6-N6-D10
gcgcgccacttttggctatccagagttgcattaaaggtgggggtttacagggtgatagatgcatgctgagagaagattgcctgtgggtaacagttatacacatacataactacccacaagattcaagcgggaagcctgaggtgcctagagagggaggtcacttaagtgaattgacttacattaactgcccggtgctcactggccaaacctgaggcgccaaatgtgttaatgaatctgccaaaacgaatcgagaggcgcgctgcgagaggcgcgccacggagggtgcg

SEQ ID NO: 4821 - DNA, 490 bp, Gossypium hirsutum
  Clone ID: LIB3825-034-Q6-N6-D12
agcaaaattaaaattttactttaaatttatatctatcaaacccaactcttttagtcatatcaaggaattacaaagacttctatttaaaatatgccaaattgggtttggttgggataatctcaaacctgaaataacaattatggggggtgacaaagggtacatactttaaggggctcattcctctaggattgcacgtccaagattcgggccaaggagctagtctaacagagttcaaggcctgggggggtaactcagattcaataaagtccggccgaagccttgccatggacaattcttggagtttatttaatagaagatttgtctgagacacattcaacaaaggacgttccttccaattaagcagcttcaacgaatcataaagaagtggcagccaaaagcgttgaggcgtaaaagggtttttcataagtgatatgagagattccacagcttgccgagcaggatctgtagcctttccgtcatgaatctgccg

SEQ ID NO: 4822 - DNA, 584 bp, Gossypium hirsutum
  unsure (1)..(584): unsure at all n locations; Clone ID: LIB3825-034-Q6-N6-D3
tcgccggtcgcgtgggtgagaagcttgatgaacacgggggacgtncttatgaaacaaaggataatagtgatatgtacttggacaaagatnngggaaagatcgtgaaataaatattcgcatggaaactagatctagggttaaggattctattcctgcttggatcagaggtctctgttcaagcacctggtgaaatcccatacagtggaatatactatgatccaccagaagaggaaaagtacgtattcaaacacccccatacaaaaagaccaaaatcacttagaatttatgaatcacatgctggaatgattagcatggatgctgctacaggcagtgttaataggaatctagataatccattgttagttgtgcctcttaaaccctctgttgcggagtttccattcgccaagaaggaagagcaaagtgatcgattgagtaatttggctggagctggttaccaagcttttgaagatgctattttaaataaactgacaaagactgccgaaaaacaacaaaaatgatgacaaaaaggtcttaggagcagattgcaaatgcatcagtggcattttatccacagatgttttgca

SEQ ID NO: 4823 - DNA, 315 bp, Gossypium hirsutum
  Clone ID: LIB3825-034-Q6-N6-D4
gaagggattctttggttttaatgttttaaaaagattcatatacaaacacccgcttcaacaagaaagctttggcaaagaagataaaaagcagcagaaagatcattttttggtttaaaataacacatttttgagaaaaattcggggcaacgagaaccaccgactaactgaccagcaagtaccgggatagaaaaaagccattaagtcagccttaatgccattttttgaaaaaaagctcgcttctgagatgcgttaattacatgatttgtttcaacactctcgagcacatcagttattatggcagctgcatgacctaac

SEQ ID NO: 4824 - DNA, 368 bp, Gossypium hirsutum
  Clone ID: LIB3825-034-Q6-N6-D5
ggggggggggggggggggggccccgggggatttggggggggggtcgggggggggccccattttttttttggggggggtttttaggggggggggaaaaaggggggaaagggtttttcggggggaaaatttttttgggaaaaaaattcccaaaaaaaaaaggggggaaaaaaaaaggggaaaacgggggggggccaagggggggggcaccccaaaaaaaggggggggggggaaatgggccttttccgggggggaaaaagtggggggccgttgtttttaaaaaagcccccaaccggggggggaggggggttttttttgggggcgccgggggggtttttttttttgcgcgggggggggggaaaaaggggggg

SEQ ID NO: 4825 - DNA, 528 bp, Gossypium hirsutum
  Clone ID: LIB3825-034-Q6-N6-D6
cacctcaaattagcaacagcttcatcaaaatcgtggtccatacaatattggttcccagaaaccaccaatttaaagaaagtcctattttctaaaagtttatgctttcataaacctgaattcggattgggaagcatacatttcaaaacctttcgatggaaagcaaaccctacttatccattaaaagaggatgaagttccccttttaaaaaccccaaaagccaaaaaaggctgcagcagatggctctcattgcaatcttacacaactaaaagaagggtctggatctttgcttctgaacatgatcgaatccaaatgttaatggggtaggggggttgggatcagttggttccaacaaggagttgcatgatatgctgcatggggataggagtgtttcaaaaacatacagcagggagcaaaaccatcaggctgctgtcaatgtattcgatcagttcaccagcccatcaatgttcttcttactttgcccacaagctgatttcgagctcgacagcttgttaatgggaattcatggct

SEQ ID NO: 4826 - DNA, 464 bp, Gossypium hirsutum
  Clone ID: LIB3825-034-Q6-N6-D7
ggggaaagaaaccctatcatatgggtatttggattttatatatatatgaagaacatagaacaacccataattgtcaggacagaaggggtagaaaccatgtaaggatttacagaaaattggcgggggggggggggttatgctatttgaaagggtcaacaggggccgatttttcaagaataactggagcctcaaagcattgggctggttcacatagggaagacggggaattttcatttttgggaaggggacccagagtataccatgctgacggattcattttatcaactcggagagcattcatcagcaagcttttcaccactgcatcaaattggccgccaagttgtctcaacacaaccgctgcagatatcaagctcagggcatgattcgggtccatgcccaaagcattccagtaagccttcagagctttttttaataagccttttccctcgaaaagaacaccaggg

SEQ ID NO: 4827 - DNA, 542 bp, Gossypium hirsutum
  Clone ID: LIB3825-034-Q6-N6-D8
ataaaaattagtttgttatttttcaagtaaaatagacaaaatacaatctgactcttaatacaaaaacctccacgatacttttactaacatccaaagattgctagtgattgtggcagaaaaacatttaaaattagacaaattcaatccatctgcaagcttataattgtcaggtaccagatgctgaagccattacataacactttttaccaagccaccatataaattgtatatccagaaatatgcaccaactaagccggaaacttgtttgcggtccatttttgagaaataacttacgaaagcagccattgagaagtgttatttttggtttattgggtatcttcccatcaaggataagaggatctaagtgtcaagtgtcaacggtgatcttggcatcaagctgagagaattcttggaaaaaggccttgaaatgctcatatgaatgcttcacatcatcaacagcacacatttctcgtatgctatgcattgataattggggagcaccgacatctattgtgcggatccccacaccactagctaggata

SEQ ID NO: 4828 - DNA, 502 bp, Gossypium hirsutum
  Clone ID: LIB3825-034-Q6-N6-D9
aaaaaaaaccaaagcattttctcattgcccttttaaaactattacagaacccagtttcatcttttaacataagcaaaagagatctaaaaaagaaggaaaaaaaaaaagacccctagaattgggggaggccccaataaaaggacccaatttccaatcagcttagcttcatcctacatccttgccttaacaaccaccatattgccttcatttgcaacccccatggctcctggccttgcccatgtttccttgaattgctcctctggcactcctttgcccatggctgcagtcgatgatatgcccccctggactgtcttgaaatatctatcataaaagttggcccctgaccatttttgatgggctaatgggccccccccattggtcctctcttccctctggatcttctcaacaaaagctagcattcccctcctcgcaaaatctctggcaaatgtgtcggtcaccagtgcctcagcatggaaaccagctagggttataaaccgccaac

SEQ ID NO: 4829 - DNA, 390 bp, Gossypium hirsutum
  Clone ID: LIB3825-034-Q6-N6-E10
gtcacaaatcaatatatatatatataacacagcagttccacgtgacgagaattatacatatagcacaaaactacaacagtagtaaaaattgatctaaggaagaaataaagaaagaatcttaagcctgtcaaacaattaacataatcgaattctgcgttacttactagcatcgtatcggttcaatatggttgaaacgagtcaaagaagattcattcccggaattaatatcatcgtgtccatgatacgctatcaatctcatccctcgccgccttatataattcaagccttttagcacactgttgtctcctctccatcaatgctggatcctcgtctaacatttgagaaagctgcttcccctctttctttcctagctgcgtgtaaaagcgggct

SEQ ID NO: 4830 - DNA, 552 bp, Gossypium hirsutum
  Clone ID: LIB3825-034-Q6-N6-E11
actataaacaagaaatttctattaacaaatcttttaattttgttttttcaaaacaagaaaagagaaatgccaaattcagcaaccacgcatttacaatcacttcagtccataaaattagcacaattgtcccttcatcccattagaaagcagcttttcacgtttcaatatacacttatttagctgttgagatagctatccccagctgatagcagctatttacaattacagcatatgttgcagttgtccccaagcatttattctggtcgaaagctaaccaggttggggagggcagtcgactgaagcttcttaatttcagccgcagttaccttgcaggactccaaagacagtgaccgtaaattcttcagaggctttagatacggcaaaccatcattagttatgttggaatttgaaacattcaacgacaccaatgcattcagtcctgaaatcaactccaaggatttgtttgtcaggttgcagttttgtgaaaggttcagtagcgttaaggaggggagatctttgatatttttcacaccagcatcagtcaaaccccct

SEQ ID NO: 4831 - DNA, 565 bp, Gossypium hirsutum
  Clone ID: LIB3825-034-Q6-N6-E3
ctaaacagacttaattttgagtcatatatttagataaccatataatccagaacaagtgtaacactgacaactcaagcaaccaaaacttatgtctgaaaatactgttctaatcagataccaaaatctgagtggtgtttttgcagtaaaaggacatgtttttcaaaggaaaaaaaaaaaggtctcctccaaacgcatgtaagcattaacatctacttcaaaagaacaataaaattatgagctactcagaaagatgcattaaacttaaacccagatgaatcaatactcgattggagaaataacttccaactgcgtgccaagcttctcctcggccaccttctcggctttaaccctgagcttagtgagttgcttccttctctcgtatgccacttgagctctttccttcctcttcctttcaagctccttgatagtgtcatagtggttccatccgacctctgacgagagcttgcctaacaaacaatacttgtgtcctttctgaagcctcaaaaccttgagagcatcgggaataaccatcctctttatcttatcatacggagctggaatccct

SEQ ID NO: 4832 - DNA, 531 bp, Gossypium hirsutum
  Clone ID: LIB3825-034-Q6-N6-E4
attctctcccaaatttcgatttatatatatatatctaaataacattttatgttacatgttagggccacgtgtatgccacatagcacatatttaacagacactagcaaacattgttaacagttgttttttaaaatacagaaataaacaaaattaggactaaattgcaacattttaatagtacaaggacttgggagatatttttaagacatcctaatggccgctataaacatttaacatggggaacacatcaaaaggaaactggtggagataacatgtagggaacctcccccttttttccctaggaaaattggcaccaccattgataccccatttcatgatacagtcctcccatagcatagacaagcaagatagagattttttgcccatttttccttaacatgtgtgctggggaattgagatgttcgtaaagtttcttgagtttcatcaccgggcttgcgcttaggaatgctcaagattagtgcagattgatctgaagttgcagctgttgaagtgattctataaccattatcc

SEQ ID NO: 4833 - DNA, 546 bp, Gossypium hirsutum
  Clone ID: LIB3825-034-Q6-N6-E5
gacaaaaaagaacgcaaatctcaccttcaagaaagtaatgagtatacactatacataggtaaaagtaaatatatattatgtaatcatgcaaatatactttaagagacaaaaatgccattcaacatatgcctcgatatgctaggtttgctcaaaatcaaatatttgacaaagatcccaatctccaattataaggggtagctgaaccttctatgatctcttgtaaaaaatggatgtcttagtgcttctctagctttaagtctgtcaattggatcgtactgtagtagcccttgcaagagatcaatcaaatcaccagcagaatgatcgacatgctgcattattaagttcggcaggcgaggcagtttcccaactgccttcaggctttctcttgaagtagcaccatcaggccaatccaaccgtgtgcccctccgaaaatatttctcagcacgactgcaacaatatcaggcacaatgtaagaacttcctcagcaacagattcacaactagaataagcagcataatcactcttactcggctctaagcaccatat

SEQ ID NO: 4834 - DNA, 571 bp, Gossypium hirsutum
  Clone ID: LIB3825-034-Q6-N6-E6
aagagaagtcaaaattgtattaaacaaaggaagaaaataattcatgtctaagagacgatacaaaatataataattaaaatgataaaaatcctaaaataaaataaaacaaaagataataataacctaattaacgaaatcacctaatataataaaataaaaaaacccaatacaaaataactactaatcttatgacatccatctttcttcaagtgcgccagccaacttgtgctccataccaagttgaatattatttcccatgcagttgcacaaaattggctcaagttctaacatcttcgtgacataaattaaacctgcactcagcaaaccttattcttcccagccttgttcattttggcaacatactcgaacaaactcccatcaaaacatcccctgacagcttcttttgatagataaccattttcatccgttgcaagcagatacaaaagcatccattctgcctttgtcattagccagccaatgaaatcatacgagtttcgattagcctcagtcatgtgccacacttctccgaatgataacttgtcgggctcagttcgagcatatttactgaatg

SEQ ID NO: 4835 - DNA, 526 bp, Gossypium hirsutum
  Clone ID: LIB3825-034-Q6-N6-E7
ttttttttttttttttttttttttttttttttttttttattttttttttttaaaatttttttttttattttaactgttgtttctccaaatctgcccgggcccgggagaatttaaaggccaggtaaaaaaaacaacccaaaggcctaaacccacccaatagacccatttacaccctcgacccagaagcccacaaaacccaatacaaaaaaaaaggcggcccaaacaaatcagacccaaaaaaccatggggcccgaggggccaaaacggctttaaaaaaggggaaccccaggggtttccgcaccttttagcgccgcaaaagaaagggtccagaattcacacaggaaccatcccaaacgacgcgccttttaaaaacgcgccattccaggagcccccaacagcgccaagactctaggtctgaaacgcccccaaaatggcgcacgtatcaaaggcagaggactcgccatcattctcaccaacacctgcaaaaggagaaagaaaagccccgaaaccaaacaaacatagcaag

SEQ ID NO: 4836 - DNA, 575 bp, Gossypium hirsutum
  Clone ID: LIB3825-034-Q6-N6-E9
ggatgctaagctaataatgcattttattgatttggaatttagttcaaacacatctaatcgttcgatgttttgttctcagtagataagaattgttctatctattttcaccaaggctacaacgagggagaaagaggccaatattatgttcaattataccacgctctgcacagccagcctgctactactgtttgttcttttaaaagtttttggggactagtctatgattaaatctgttgccttgcctttgcttctgctgctactgccggtttctatgagataacagaccatggaatctacgtcatccccaaatatgctataagcttcatttgcctgcaaataactgaatcccattgacagtagtaattgcatgccactgctgagaacactatcctgcaaaccatgctcttttgagccctccagtttggtttcactgcctgcaggccctgtcctagctccagacgatgatggttcagcagttgaagtagacgattctttatggcccacttgtggcttaaacttgtcactggcaaggtattcagctcgagatgcttccataaccattcgctcaatttcct

SEQ ID NO: 4837 - DNA, 515 bp, Gossypium hirsutum
  Clone ID: LIB3825-034-Q6-N6-F1
gctatattcaaccttcaaccaccatacgcattggccaaaacagggccaaaaaaaaatattgaacatgttatcaaaacaataaataaataggggaaaacattactcaccaacaaaaccctcaccactttctacttttcttttaccttctattatataaaatccataattgatttttttttttttaattggagaaggctaagaatacaggaatcagaagctttcctcatcaatgacaccataactaggatgatagaattgattgcaaagcaagctgctgctgtggctgcaaggatgaccaggttgatgccagtgtaaatgcaggtaatgattgctggaagtgccttatcagatttatcattctactagcagtttgctctgttgccaaatctttaccagcacataaaacctttgcaaaaacaaaaactattttaggaagatattgattgttgggccctaaaagttcctgatctgacctttcaaccatagaacatagctgttcgtgaacaatcttggcc

SEQ ID NO: 4838 - DNA, 522 bp, Gossypium hirsutum
  Clone ID: LIB3825-034-Q6-N6-F10
aaaagggaaaaataaattttttattattaaaaaaaaagctgaaacaacaaagtaagacaatgctcataacaacgaagcgtttgcaaccgtacgttatctaaaaccactcacgtacaaattgcaactggtattaatatcttaactctacatgctaccctaatccttcctagtaatagtagccggataattatgttcatcctcatcggcatccgccattccaaagggatgtttcaccgcatcagtcgcaccttgggccgggttcctcactttttcccccgcctggtgcagtatccctccgcttggctccgtctccttagtttcctccgccttccctttagcagctcccgccgtctgttttgtcttggcgttggttggctcgggggctcctctgggcttctgcttcgctgcttctggtggctccattggcttctgcttcgctgcttctgcgggctccattggcttctgcttcgctgcttctgcgggctccattggcttctgcttcgctgcttctgctttctcctt

SEQ ID NO: 4839 - DNA, 552 bp, Gossypium hirsutum
  Clone ID: LIB3825-034-Q6-N6-F2
cagcaaatacggtatataatctaacgaaaatataagatacgaggaacatgcattggtacttcaacttacacagaaaagttcaagtaggcagcattttagtttctgaaacgttcatatgatatgcaacatgtttacgatctaaaagagttccggctactagccacagcaattgttcttctgttcgatcggttgtcccttcatttgaacagttccggcagacttgttcccagttggctggttacccatttttttcttaatctcggcagccatggttaagaaagcctgctctacattgattgaatctttagcacttgtctccaggaaaggaatcccaatttcatctgcaaatgccttcgctgtctgcgtgtcgacaaccttgttctcaactaaatcacatttgttcccaaccagaagcttacatacactgtcattagcatatctgtcaatctcgttcaaccactgcttgacattgttgaagctctccatctcggtaacatcatagacgactattatcccatgagctcctcggtagtagctgctagtaatagtccg

SEQ ID NO: 4840 - DNA, 458 bp, Gossypium hirsutum
  Clone ID: LIB3825-034-Q6-N6-F5
attcaagaaaaaacatgacacatttgacaaagcccttgcattgacgaaaattacagggtacttaaaagcttgttttatttaacgactttatggtaatggcggcccccaacgtcgatgtcccaacttcaatctcaaacgtatcgtaacgtcggaaaagttccaccacaaacaacctagaaatcaacaccacaaattccttaccggcacactgtttattctccaccgtcggatgctccgtttccggtccgttcgaccaaaacacatgtttcaacaatttctccccttcaacacccataaacctttccggtacaaactcttcagctttttcaaatattatcggatctttggtcgcaaacggttggtacccgaataacatctccccttttttcacttcaaaaacggggtcgtgactttcaatcaacaaatcctcctttgcttttgcatattgcgccggcacc

SEQ ID NO: 4841 - DNA, 545 bp, Gossypium hirsutum
  Clone ID: LIB3825-034-Q6-N6-F7
gaaagactacgtaaattttctttttatcctagtttcagacttgaaaatgcatgtttcagttcaatcgtgaatgtctacagagggtaaaacaaactcaaagagtatatatccccgaggtttcaggcaatatatccccgaggtttcaggcaatctacaactcatctttgcctgcactttcttttgtctccgactctatctcggtttcttctacatcatcatcgtcttcaattgttgcatcaggactgatattaaggctagatttcactgagctgtagatgcgtgaagcaaagtccttgggatcgggtagattgaaaccactctccattacagctgtctggtaaataagcagagccgtttgcttcacaccctcatcctcagagtccttggcaactctctcacgaagctccttgatgattgggtgtcttgggttaatctctaggatcctcttgccacgcatgtaagcttgcttgctagaatcagatagggtttgagattgcatgattctctccatattagcactccatccgtattttgatgtaacgacc

SEQ ID NO: 4842 - DNA, 279 bp, Gossypium hirsutum
  Clone ID: LIB3825-034-Q6-N6-F8
agaaaaaaaaccgtcatacagatctgtatacagcacaaaagcttagcaaatcttaagctgtcaaaggaaccctagagaccaatacttgcaacagattcatccccacactactatcactaatttagtcctctctctatactttgtacagattcaaaaccatgacacactcaacacgcacaaaccagaatattatctcagtaatattatattctatataaacagattaagtagataaatacacccacataagataccattaggagttaaaaacactaattg

SEQ ID NO: 4843 - DNA, 533 bp, Gossypium hirsutum
  Clone ID: LIB3825-034-Q6-N6-F9
ggccttcgaaaaaaaaaatatacatctcgagaaaaattacatctgtccttggcacctgccactttatcaaataatgcaagtccttgccgatacacaacaacgatcatcagttgcctgcataacttacaatacattgtgccaggcctggccctgggcggctgatgcatggagcaggccttgcccagatggattcaagctattgggctgagatgctgcttctaatacagctggctgatataggacatcctccatttccttaaggattgccttaaccactttaaaacttactgccccagcccaaaagagtctcccgtttattttttcaaaactattgggtgctttcgggaagacaatggcaatgttatacaacatggcaaccgcttaggaggcttcctgccccaatggctgttgcattaaaaactttctttgtaaacaagtattacagaaagttccacactggctcgacacactgtgggctgttgtccaaggcaagggaaattgcttatttcacaacctcagggagatgacatgga

SEQ ID NO: 4844 - DNA, 546 bp, Gossypium hirsutum
  Clone ID: LIB3825-034-Q6-N6-G1
attaacgggtcaaaattttataaatatataacatcttacacacaaatcacaatacaaactccaagacaagagacttccgggtaaagccaactctaaaatgttgaagtctgtgtacttcgtggactagtatttttacaacagatggcatttactgaaggaaacaagctatgaatcaaaaacaagagagctttacagacactatccctccaaaggtataaataaaaactatagcttcctatttctcatggggcaaagagaggagtttcatgggccaagttggtcgtaccgttgacctcaaggttgtaatacaacatatatgccattgaaatactggcaatgttgtgggatgacaggtcaacgtcttttactcctagatttggtgatcctagttttgcttgattcatttggtggtttccatattatctcctcgaggttgctataaaatgcctggtaaaactttaggtattctccggcatcaccagctgctttttccatatctaccattaaaaatgtgggagcgacctcgaaaacttcgaggataactga

SEQ ID NO: 4845 - DNA, 476 bp, Gossypium hirsutum
  Clone ID: LIB3825-034-Q6-N6-G10
aaaagaatgatacacaatcttcatagatattgtcattttgttttcccaaacattaacagaactgcaaaaaccaatattccccaactcaatttaagcaaaatgaagtgggagaaaatttattgcatgcgcatttctatgaagtgtcaagggtgcctcaagatgtgtccatttgacagcctgttcgtttaaaggcacacaaatcctagtcatgtatgtatttatgtcacctggtagccacttacattgcatgctttctacttttggatttgcatttttttgttaagcgacttagtccgagtccgacagtggcgtctggtatgaatcctttggctcaaaatcagttattgaaggaggtaagttgcgtttcgatgcattcctttcccggcgtctctctcttggtttcagtttatcctacatcattatctgcttggctcggttggcttgactgaaccgaacgattttgttgagtcctcatc

SEQ ID NO: 4846 - DNA, 555 bp, Gossypium hirsutum
  Clone ID: LIB3825-034-Q6-N6-G11
ttttttttttttttttttttttttttttttttttttttttttttttttttttttttttttttttttttttttttttttttttttttttttttttttttttttttttttttttttttttttttttgggcccaaaaaaatttgggaggggggcaatttgggcccgccccatttaaaaaaaaaagggaaaaaaaaaaacaaaaaaaaaagccccaggggccccgcccttttaaaaaaaactaaaacaaaaggggccaccccaatcccggccaaaaattaaaaaccttggggggccaaaaaccccaaagcctaaaaaaatttttacccaaaaaaaggaaaaggggaaaacccttccccgaaaacccccttttcgggaccgggggggccccccggaaattcgggaccgggcccggggggggacccaattttccctaaaggggggggtaaaaaaagggggggaaaaaagggaaaaaggggttcccggggaaaaaagttatcccccaaaaaatccaaaaaaaaaaaaaggggaaaaaaaaaagagaaaagccgggggggccc

SEQ ID NO: 4847 - DNA, 519 bp, Gossypium hirsutum
  Clone ID: LIB3825-034-Q6-N6-G2
gcagtaatgaaatatgctccacagatttatgcgaggatgatggcaaatagagttttggctttggtcatcttcagatgacaaagcagttactaactacggcagatcaaaacctttacagcgaaataccataaattctaactaccaccaccatatcatactccccagtatctatacagtacactttctaactcatttttacctacttttctttctggctaccaaaaatagcctctcttgttataagctttattcctctcacccatagctttgccatttcggacccgccttcgcacatgaaatgaacctctttgttcttggtagtcaccactcgaaatactccgggtttgttagcatcacccttgctctgccggttcttctcaaaggctgcacttggtcccaattctgcctctctgcatataacatttcttcgacttgatttcccccaatgcagcagtccggaactctgcaccattttcatgtctttcgagtgaggatttccctttcctccctttgtatgct

SEQ ID NO: 4848 - DNA, 485 bp, Gossypium hirsutum
  Clone ID: LIB3825-034-Q6-N6-G3
aacaaagggctaaatttattattggcttcaaaaaattattgttcctttatcacaggggggggatctataggggaattggtaaataaattcaattgtctacattcacacaaatgctttaagggtccaaatttgagtcccttcgtaacaaataacacattgacatccccatgcaaaaataataatttaaggaaaaaaaaaaacccccatattccatgcatgaattcctatgagctttgcattagctggtgattcatttgttcccagcaaggagccaaaaaaaacactttttttttcaaaaaccattggaggggaaagtgctctgtatatttgaaggcattaaaatgttgaaaccatccccggcagttgacacaatcattccaagaatctgaccatgccaatgaagttctttcaagtccttttgtccctgataaacaaaaaaaattgcggaggtaaattttgcggggcatttacaagctcctttgttt

SEQ ID NO: 4849 - DNA, 546 bp, Gossypium hirsutum
  Clone ID: LIB3825-034-Q6-N6-G4
gaaaaataatgaactaggaatttctaataaataattaactaagacattatctattcactaattcacatagctctcaaagatccctttttttttcccccttttttgaaactatacccacacagatgcaacaatgcaaaagagagaaaaagcctatactcagatgttgctttttacaaactttgaacaaaatttacactggaaagctaagcatcacagccagaaccatggaagaagatgatggtggaaagctaagcatcacagctagaaccatggaagaagatgatggagtgcagtcagtcttcactttaaattcaagcagtaggctcatgagcccaaaaagcatctggatccggacagaagagggagaaatcttggacttctaggtttgcaatgtgccaatcaacaaatcgagcttgtattgacttgaatatcagaaggatggttggcaaaagccaccatttgttgtcttcgcttctagtattccaagtatttcccttgtcaggtggcaggaaggaggaaaatccataatgaataatgccccaaatg

SEQ ID NO: 4850 - DNA, 494 bp, Gossypium hirsutum
  Clone ID: LIB3825-034-Q6-N6-G5
ggggctgaaccactgatctggttttaaaaaacttgggcaataattgcaatatgaagaatctcagaaaactcccagagggcaagtaacaaaagttaaacattttcacaatcccacttacccatcaaagggggggtaacagagagattaatgggacaacctgacagtccctttcaaatttgacaatacaagggcagttttttgaccaacaagctatgatagttcctgaatatgaaaaaaggagtttccaggggctaaaagagttttagaacaccaccgggtcgagcatagttcccaatgtctgaactatgtttgacgacatcaagttcgagacatgttcctctaagggctttttggcattttgccggccgacatttgcgatcgccagcttttcaggagggaattcaccttcctcctgcactgccttattggattttatagctaaattcagcatttcctgaataggctgctcattagttttggaatgagtatcgaaa

SEQ ID NO: 4851 - DNA, 544 bp, Gossypium hirsutum
  unsure (1)..(544): unsure at all n locations; Clone ID: LIB3825-034-Q6-N6-G6
agaaaacgaaaacaaaagccacagnaaatgtttcattagnaaaagaccagaaacattacaaaccagatcagctgcaaatccctgtatcatcttcacatacatcaaaggaagatgaaaagatcacccccaactatacttacattaactaaatttagaaaaaggaacgagctgattattactcgctatcaacaacaaaaccaaattacatattttagctagttttaaactatagtccctttcagaccctagatccagttacagcggtgctggtcttgtgccctggttcatcccccggtgcatgcatcccatagtcggaatctcgataccctggtccgtaccgactgctgaacacaccggcatggatcaacaacacatacaaaagttgagtgaatgtaaggattattatgaatgcttcaagtatcctcaacctccatcctctccatcctcctatatttatatgcttacaagcaaacccaaaggctaatgcagttagagcccaagcaataagtgcagaagaaccagctgcagccaaactatcacttct

SEQ ID NO: 4852 - DNA, 571 bp, Gossypium hirsutum
  Clone ID: LIB3825-034-Q6-N6-G7
acctcacaactcatctaatctatattaactcggccaattataaaagaagttacaaaacacataataattaacaatcatggttaaaaaagttagtacacaaggtagctacaaaacactgtttcaataacaccaaattcaagttctgactaggataagcgaccatggaatgcaacattaaataacattccacttgaagaagtgctaagccttggcttttccagcttgaagagattgaatcctctgctacaccttcaatatcttctgggagttcaggctgttcgaatggggtacaaagagacttagctgctcccatctcaccccttgttcgagctttcacatctttctcccacctccgttcgagtgctatatgcccaggaattctgccagaccatagacttttcccctttttcattttcaaagtttatctcaaacatttttgcaaagttttggcccaaacaaggggaggttgcaccttgaataccgcgcccagtgtttggaataaatgcctttaaatttttcattattgttgcaaatagaagcacagtcactgaaatgagaatctcgacatgct

SEQ ID NO: 4853 - DNA, 554 bp, Gossypium hirsutum
  unsure (1)..(554): unsure at all n locations; Clone ID: LIB3825-034-Q6-N6-G8
gcagtaaatataactnaactaattggaaatgccacctatccaagtcacttccaaattcagaaatctagtcgggagtagagtatagcatcatgccatggattacttccgattttaaattacacactttaatcaacataagcaaatgacattcaaagcccacctcctccggaagaagactaggaccaacacgggtaacaccaccttctatggctcgtctaactggtcctgaacatccgaagtccagagagtaaggttatcccttaggagttgcataatgagagtgctgtccttgtaagactcttctcccagcgtgtcaagctcagcaatggcttcctcaaacgcctgtttagccatgctacaagccttatcggactgattcagaatctcatagtagaacaccgagtaatttagcgcaagtcccagcctgatcgggtgcgttggtgctagatccgtcagtgcgatatcctgagcagccttgtaagacagcatagtatcctcagcagcagctttcctctcatcaccaaccttaaactctgctaaataccgatgataat

SEQ ID NO: 4854 - DNA, 531 bp, Gossypium hirsutum
  Clone ID: LIB3825-034-Q6-N6-G9
ataagctaatatgatcataactactttaatgtgttaaatttaaaaatgtaagaatgctcaaactcaaaaattgttcaagcttgggcgcacttatcggaaccatggtaccgtacaatgggcgaacggaagccatgtgtcttttgaagtttaacaagagccaagtagccattgcgaaggttcaattaaagcacctatgccttaagtcacataccccgaccctgaactgttaaaacggatatgagaggcacagaagaaaaccccaaggctctgctaaactgatacacaaaccctgaggccatatgcagagaatcagcaatgacggaaaactgggaccgaaattgggaacattctaagctgccagaaagatacattgaactctctttcacaagcaagcaatatttcaagggagctaaggaacccttggctcattgaagcaatgggaaaacttgtaatacctatgaacattcgacaggcattaaaaatactgaaaaaatgcaaaacccctaagctgggatgttttgttcaaatata

SEQ ID NO: 4855 - DNA, 383 bp, Gossypium hirsutum
  Clone ID: LIB3825-034-Q6-N6-H1
ggggcaggaggaaggaatccgggggccttaacatgtggggggaccccaaacgtcagggggtacaggtgcaaacggggaaaaatccccttttcgcggggggctgaagggccgctttagagctctgcctatattgaacggctgccaaacagggggcacactatttttatgggacgggggttctcaagctcgtaaaggggctttacggccactcgggcagggggggccaaatttttattcccgccactcccggagggataaacgtggcgccccacccaaattccctaagccgggcgattaggatgaacccccttgccgggaagatgggccaaaaaaattggaccggtttaaaccgttttgtaaaccccccaccagggggggttgcc

SEQ ID NO: 4856 - DNA, 128 bp, Gossypium hirsutum
  Clone ID: LIB3825-034-Q6-N6-H10
ttttttttttttagatgaagcaatttagttattgataattgtcaaaaagagacctaacatagtagatggaaaaataacattaccacattggatactaagcgataaattatgacagcatatggcactgc

SEQ ID NO: 4857 - DNA, 557 bp, Gossypium hirsutum
  Clone ID: LIB3825-034-Q6-N6-H12
aaacttctaatctatgggttacctcatatgttccttttcctttaaccacaaacgttcacaaaacaatttttttgctttatattagtcatccctataaaaattgtgcacactagctatgatgaggaaagtaaactacaatcttttctaactattaacaaacccactgcatgattgttgctggaccacgccatcacatggagtatggctttgtcaatgctgcatttggtaccccataaacatacttacgactgctaccatacacacaaataggagaggaaatcccacttgaactcttcttacatcactctttttcctcaacagcgccagttcctcttgtaaggtcttcctctcttgaaccgttaacctcctctcctctgtcagttttgaaatggttgcttcagccttgcctagctttgattcaaggtcacttaattttgatttcatttcctccatatctttggcaaagttaaggtcctcagcagtcttcaatgttttcaccttgtaatccttcaatgttttcaccttgtaatccttcaatacattgaactccttttcct

SEQ ID NO: 4858 - DNA, 495 bp, Gossypium hirsutum
  Clone ID: LIB3825-034-Q6-N6-H2
aggctaaatacctttcttgacaatatatattcacccttctcgggatctggggcatgatcatacacaataaacaatttagttcagtttggagcaaaactaatgcaccaaaacataatctaaacctaggtttttctgcagctctccaatatgtcaattgggagatgaaaccatctacatatgcaaagtcagttgcttaaaaatgttcaacaatggcatgcaagacaacgtggttgaaaaacgtggttgaaagcaaggcagcgatcctaacatcctccgaactgtaagcattgcatttagggatcaaaagcaggggcaacatttccttccaagcctttccgtttttttttcccttccccatgccttgacctcctgggggcctcatcctcactttcactggcatcatttctgaagctgttccctgcagcaaactgatcttcatggggagccttttggccttcttgctgatactggggctcatcttccaacccaccccct

SEQ ID NO: 4859 - DNA, 540 bp, Gossypium hirsutum
  Clone ID: LIB3825-034-Q6-N6-H3
acgtaaagatcaaaatcttattaaggttgagctaactaagtttacaatattctcactatctattacaaaccaaaacccagaaaaattgaaaaacaagagctttgttcttaacagcaatgttcactgtcacatcactgatcaagaataataacgttcataatactgagaagaacctgcttaaataaagcaaaatagatcctctatgcagtaagaattgacacaaagtactttaccatgaaataagagtttaacaagaagggacattaagaaatgacagaacttccccagggctagtggcagcagttccagtggcaatgactgaaaaagcttttccaatttgcttcaaccgttgagaatgcttattccatctagccattgaagatgtcttcacacgtcgtgtctggccatcattattgcccgtgatttttgctcataggacgccgtcgatggagctttttaccaggagtttggtgatcatccttatacagcgatgctgctgactcagactgtactgtctgtacaggcatatgcccctgtgac

SEQ ID NO: 4860 - DNA, 440 bp, Gossypium hirsutum
  Clone ID: LIB3825-034-Q6-N6-H4
gggaaattaacagagagccttaaaaagggtgaattaaaacataaataatattatcatacatggaattcaggcctggtcttcatctgaaaaggaaaaacacaaatttgatataattcaaaataaaacataaacctttcccttgggggggacctgaaaatcaaaagaaaaaaaaaagggaccttaatcttctggcattctataaagggaggagggtctaaccctccctatgaaaaaagaaaaaaatgccctgccttaacatcatcaccgggaaattggcatgctagggcccagttctgctgctttccccatttctaaacgggtaaaaataaggatgagcccttgcttcttttgcaagtagcctttccaaatgatcatatcgaaacaacttatcgaggaaatcaaaggcctcagggaatgccaaatgttgattctcaacatta

SEQ ID NO: 4861 - DNA, 332 bp, Gossypium hirsutum
  Clone ID: LIB3825-034-Q6-N6-H5
aggaagggggaacattttatcttatttcacattggtcacaactcaaaaaactccccaggagaaaccggttctcctttaaggtcttgacaacattactaacacccattagcgggtaaaaccagggatttaaataaaactatctccgggcttttcactctcaaaaaagcaccactggcttcacggatgggagatcagtttggtttccgccgggcaagccaatagcttttgggaggagacagggacttggacttgggtggctaaaaaaaagggtaccaaactttatccaaaggggccctctgattatgcccagggggggggaacattttccctgg

SEQ ID NO: 4862 - DNA, 517 bp, Gossypium hirsutum
  Clone ID: LIB3825-034-Q6-N6-H7
aagcaaacacacaatccgtatgcagatgacagtctcaaccaaatgaacacacatcaaaattggtctaaaaaactgcaagtaccaaactacaaagataaccaaaatcaaaaggctctgatactatcaaatgcaatctcatttcttcttggcagcagatttggtgaccttagcacccgttgggtccttcttctcaacgctcttgatgacaccaacagccacagtctgacgcatgtccctgacagcaaaccgtccaagtggtgggtactcagagaaagtctccacaaccataggcttggtgggaaccatctttatcatccctgcatcaccattcttcaagaacttgggctccttctcaagctcctttccagatcgcctgtcgatcttggtcagcaattcggaaaatttcacagcaatgtgggaggtatggcagtcaaggactggggcatatccgtttccaatctgcccagggtggttcatgatgatgacctgagaggtgaagctggcagcctcctttgca

SEQ ID NO: 4863 - DNA, 332 bp, Gossypium hirsutum
  Clone ID: LIB3825-034-Q6-N6-H8
gaaataaattacattttaaaaattattagttgaaaaaattttctttttacagggaatttgcttccttttttaacaccattttttcactagaaagagaggtaaggacaacaccacactgataaagcctgattggagagcccggggaaaaacagatcattacaacagggccactctgttcctttaggggaaaaaagattcccggcttcagaaagacaaaggtaaaaatggctaaacgccaccctctgactttggggaaccctagaacgaaaaaagagaccggacccgggggggggccctgcaattacccccgggtacctgaaggggtgccaggt

SEQ ID NO: 4864 - DNA, 539 bp, Gossypium hirsutum
  Clone ID: LIB3825-034-Q6-N6-H9
cagtagtacggggaatatatattaattatataacacaatctgatacatttcctgtaaaacttaaaaaggacccaaaaaaaataggatagctgcctgaagaaatgactggaattcaaccaaccctcaacccttgttagcaatgttgttggaaagccagtccagtccctcatacagcccttcgccagagggggcacaagtactctggatataccagtggcgctgacaaagggagtgaaggccaagcttatcagtaatctcagcagcattcatagcattcggcaaatcttgcttgtttgcaaacacaagaagcacagcatccctcagctcgtcctcatttagcatacgatgaagctcatccctggcctcaaccacacggtcacggtcattgctatcaacaacaaagattagcccctgagtgttttggaaatagtgcctccacaaaggtcgaatcttgtcctgaccaccaacatcccaaacagggaagctaatgttcttatattctacggtctccacattaaagccaatggtgggaatggtag

SEQ ID NO: 4865 - DNA, 123 bp, Gossypium hirsutum
  Clone ID: LIB3826-001-Q1-K6-A1
taaaaaaaaaaaaaaaaaaaaaaaaaaaaaaaaaaaaaaaaaaaaaaaaaaaaaaaaaaaaaaaaaaaaaaaaaaaaaaaaaaaaaaaaaaaaaaaaaaaaaaaagggggggcccgttttaaa

SEQ ID NO: 4866 - DNA, 619 bp, Gossypium hirsutum
  Clone ID: LIB3826-001-Q1-K6-A10
atttaaacatgtataatttaatgcttattaaacatacgaacttacctcattcgctgaaacgacaaattaggtcgactaatccgatattttgttttccctcgttctaaatccaaatcttgtttatctcaatctaattgaagggattaaggttgctgaattttgaacataaaaatggcttcttcctctttaagttttggctgaaaaggtgaaaagatgatggcgttttgtttttattttatttaacttattattaattacttatttacacttttaccctttaaaaacattaataataacaccaatttccactccactatcatccactatctcataaatgagatatttactacataaggaccttcacttttaagttctatagctatttgatacctttagcttatagaacacaacttttacgctttacgcgatttagtcctttttaccgaattaaacacttaaacggtaaaattcctttacaaaaatttcacacaataattatatcatgatataaaccataataaaataataaaataaatattttgacttcaaatttgtggtctcaaaaccactgttccgatttagctaaaattgggttgttacaacttcttctcccagttag

SEQ ID NO: 4867 - DNA, 526 bp, Gossypium hirsutum
  unsure (1)..(526): unsure at all n locations; Clone ID: LIB3826-001-Q1-K6-A11
cttcaaaaagctttccccanaggtggaaggaacaaaaatcttctactcaaagaaaaggaaagagagaaagacttccttagcgaaactatttgcagngaaaatcaccatagaaaaacgatgagttattacaaccaacaacagcctccagttggtgttcctcctcctcaaggttatccaccggaaggatatccgaaggatgcttatccaccaccgggatatcctccacaaggatatcctcaaggttatcctcctcaaggatatcctcctccttacgcccctcaatatcctgctcagcctcctcctcagcaacagcaaagtactggtttcttagaaggctgtttggctgctctgtgctgttgttgcctgctggatgcttgcttttgagaatccaactctgccaaaagcctcaaatgttgaaaaatcaaatgttcttaccgtctcgccttttttttttgtttattttctttaaataattgaattggacctttgtttggaattaaactaaactattgtgctattttatatt

SEQ ID NO: 4868 - DNA, 523 bp, Gossypium hirsutum
  Clone ID: LIB3826-001-Q1-K6-A12
ggcgtcagcagagtgcaagcgataatgctcggtcgcagctttgagaggttctcaataaccctcttaagcatgcgtatttgagatgggaagcttgcaactgttgggcgacagagggatactgcgagctagccattgtagatacttaaaagcctggatcgggccacattgggtgtgtgtatctataagaagtgagtagacctaagtgttatgtcgcagtgagagtttttgacaatgcatctctagcaagtcacactaagctcgtttcagctcaaacagaaagacagatgctgcaatcagcttgagtcatccttccttcctacgctgcacccccattgggcatcgaaaatacctcgaccgtgggcatggcgctctctcccgggcgaatatttccacacccttatgcaaaggcaacatgctatcattttgcgaacacaagcaggaaaagtttaatgtagcaaatgtcttgcttagtactttaatatcgttacattctcaggggttatctatcggtggccttcaaccc

SEQ ID NO: 4869 - DNA, 295 bp, Gossypium hirsutum
  unsure (1)..(295): unsure at all n locations; Clone ID: LIB3826-001-Q1-K6-A3
ctcaanattggaactgagggatacaaactattgcgttttgaggaatttttgaggctgaggctcatgttattactagttctgttgactcccaaattgaagaaaattttgttataatgtaaataagtccccgtataatgcaaatctattaagatttgaatgttgttattgcacattaacttttcattttttaatgcaagtttactgtcataaactaaaaaaaaaaaaaaaaaaaaaaaaaaaaaaaaaaaaaaacaatataaaaaaaaaaaagcttacataactctagcatgcaaaa

SEQ ID NO: 4870 - DNA, 351 bp, Gossypium hirsutum
  unsure (1)..(351): unsure at all n locations; Clone ID: LIB3826-001-Q1-K6-A6
ggcatgacagtggnaaaaagccattgatttagttgataaatgcataatggagatcagatctagactggttgtggcaccaccaaactttgtcatcaagattgtcgataaagatggagcaagagaatatgcctggcgtgaatccgtcaaggatgctgcagttccttcggcctgagattttatcacgtacttgctctcccgttctggatgttttaatttgcatttaccgataggaaacaatgtgtgacggcagtgaaaattagtatatgaaaaactatttactttgatttgattatgttctgaagtggaaatttgatgatattttatcttggaatggaaacctttttatgtgcc

SEQ ID NO: 4871 - DNA, 480 bp, Gossypium hirsutum
  Clone ID: LIB3826-001-Q1-K6-A9
accggtccggtacttttggttttgtcccagcgtccgtgacaatgtggtttgataccacaccaaccaatcaaagcaagcttcatgactatgccaacaagttttggagtggactgctggaagggtactatttgccacgagcttcaagctattttagctatttgttcaaaagcttagagaaaaatgagagtttcaaattggtggaatggaggaaacaatggatatcattctcaaataagtggcaagcaggccttgagctgtacccagtgaaggcccaaggaaatttccttactatagccaaggctttatttgacaaatacctaagttaatcatagtattaagatggaattaaaaatcctgggtttttctttttaagtacaattagaatacagcatgtgatttctttctttttcattttgctttatctatcatttctcacaactgatacaatatggattgcggagccgtggaacttcccacttt

SEQ ID NO: 4872 - DNA, 625 bp, Gossypium hirsutum
  unsure (1)..(625): unsure at all n locations; Clone ID: LIB3826-001-Q1-K6-B1
ccgtccgaagnaaactcggnaaaaaccctaactttgcttctctcacgctctccatggagttttggggtgctgaagttaaaagtggacagaactttgaggttgaactagaggatgatggcaataggattttgcatctttcacaggttgcccttggtgaggggactggtgataacaagaaagaaaaaggaaaggaaaccatttgtctctatctgaaattcaaaaatgagaagtttgtggttggaacactttcccaagagaaatgcccccagatagcattggatttggtattgcatgacaaatttgagctgtcccatacagggaagaatggcagcgtatatgtcactggctattatgttgatacatctcaaggtagtgatactgagtctgaagaggatctccttgaacctacaatgaatcttgtaaagtcagagcctccagcatctgatcctactacaacaaagcaggttaagattgttgaacctaaaaaagacgacgatagtagtgatgaggatgaagaggatagttctgctgaggatgaagagtccagtgaggagcaggaacctcgcatgctggttaatggtgagaatgatagtgatgatgctgacagtgatgaggatgatagtga

SEQ ID NO: 4873 - DNA, 626 bp, Gossypium hirsutum
  unsure (1)..(626): unsure at all n locations; Clone ID: LIB3826-001-Q1-K6-B10
cggccgcgtgggcgtttcttaaaaacgctgcaaaataccgtcgtttttataaaaaacgccacaaacatcttttaatagaatgaaaacgacttcgttttttggagccccaaatttcctttactttctccaattcagattacccctgaacgtctagttccccaaaccttgaatctccaaatcccataaaacttcccccaattcgatatcctcaaatcagtttccccaaatccccaaatcaaaatacctttgattttcgccgaagtccctttgattctcttttttttttcattttcattttcacagtacactccatcactcgcatccactgattctcactgcttttgcagtacccatatctcaaaatcaattctacgcagtgttttagttacccactgaacgttgactgcaactctctattttgtatttccaatatatcgatctgtgtttgaagatatggtggaagcgactgtgtaaggcccaaattttgcccggggcccaaaaaccaaataaaacaattacaaaacccattacccagttgcaagcccaataagcccaataaacataaaaacttagcccacaaaatnattttctgctaaacaagtaaaaaaccctagccccaagcatgt

SEQ ID NO: 4874 - DNA, 508 bp, Gossypium hirsutum
  Clone ID: LIB3826-001-Q1-K6-B12
aaaaaaaaaaaaaaaaaaaaaaaaaaaaaaaaaaaaaaaaaaaaaaaaaaaaaaaaaaaaaaaaaaaaaaaaaaaaaaaaaagaaagaagaaaaaagaaaaaaaagaaaaaaaaaaaaaaaaaaaacaaaaaacaaaacaaaaaaaaaaaaaaaacaaaaacaaaaaaaaaaacaacaaagaagaaaaacaaaaaaacaaaaaaaaaaaaacaaacacaaaaaaaaaaaaaaacaaaaaaaaaaaaacaaaaaaaaacaaaagaaaaaaagaaagaaaaaacaaaaaaaaaaaaaaaaaaaaagaaaaaaaaaaaaaaagaaaaaaaaaaacagaaaaaaaaaaaaaaaaaaaaaaaaaaaaaaagaaaaaacaaaaaaaacaaagaaaaacaaaggaaaagaaaaaaaaaacaaaacagaaaacaaaaaacaaaaaaaaaaaaaagaaagaacagaaaaaaacagaaaaaaaaaaaaaaaagaaaaaaaaaaaaaaaaaataaaaaa

SEQ ID NO: 4875 - DNA, 607 bp, Gossypium hirsutum
  Clone ID: LIB3826-001-Q1-K6-B2
ggttgctccccatctctgagtggagcaattcgagtaaatccgtggaacattgatgctgtagcagatgcaatggactgtgccctcgctatggcagaagcagaaaacagcttaggcatgaaaagcattacagatatgtgagtacacatcatgttggttactgggctcatagtttccttcaggatttggagaggacttgtcgagaacattctagacggagatgctggggtattggttttgggctaagttttcgagttgtggctcttgatccgaacttcagaaagctctcaatggagcacattgtatcagcttacaagaggactacgactagggcgattcttctagactatgatggcactttaatgccacaggcttcgattgataagagcccatcatccaaatcccttgacatcctaaatagcctgtgcagagatagaaacaacatggttttcattgttagtgctaaaagccgaaagacactcactgaatggttttctccatgtgagaaactaggaattgctgctgagcatggctacttcttgaggctcaagggagacgtggaatgggagacatgtgtaccatccgtggactgtgcatggaaaccagatgc

SEQ ID NO: 4876 - DNA, 633 bp, Gossypium hirsutum
  Clone ID: LIB3826-001-Q1-K6-B3
atccttgcagcctggactggagaattgagtccatcaagtcttccaacagatcataggagagtgagattcaacatattatcagggacttcaatgtcatgccctcatgttagtggaattgctgccttgatcaaggccagacacccagattggagtcctgcagcagttaaatctgctctaatgacaaccgcttatgttcatgataacatccataatccactccaagactcttccactgcagcagcttccactccctatgatcatggagctggtcatatcaaccctttgaaagctctagacccaggtttgatctatgacatttcagcccaggattactttgaattcctctgcacacagaaattgactgcaatgcagctaaaagcttttagcaagcattccaacatgtcttgccatcacaatacccttgccactccaggagatttgaactacccagcaatctcagttgtcttcccagaagatacagccatttcaactttgactctccatagaacagtcacaaatgttggtcctcctgcttcacattaccatgttgtagtttcaccatttaaaggcgtcaccattaaagttgagcccaaaactctaaatttcactagaagaaaccagaaactgtcttac

SEQ ID NO: 4877 - DNA, 647 bp, Gossypium hirsutum
  unsure (1)..(647): unsure at all n locations; Clone ID: LIB3826-001-Q1-K6-B4
ggttgccaaaatcaagtgccattaaggtaatagattttggtagcactacttatgagcgtcaagatcagtcttacattgtgtcaacacgacattatcgtgctccagaggttattcttggactgggatggagttacccttgtgacatatggagtgttggctgcatcttagttgaattatgcacgggtgaggcattgtttcaaacacatgagaatctggagcaccttgccatgatggagcgggtgttgggtccactacatcagcacatgttgaagagagtagatcgacatgcggagaagtatgttagaagtggtagactggattggccagatggtgctgcatcaagggagagtatgagagctgttcttaagctacctcgtcttcagaacttgataatgcagcatgtggaccattcggctggggatctaatccatctattgcaggggttgcttaggtatgaccctattgataggctcactgctcgtgaagctctaaggcatccgttttttagcggggacaagtttaggcgatgagcgtgcgatatgcttcactttgtaaattgtatcaaacattcagttacatgaaaaattgtatcattagttggnattgatatacctttttataaattatactgcccatgtcgttttttc

SEQ ID NO: 4878 - DNA, 600 bp, Gossypium hirsutum
  Clone ID: LIB3826-001-Q1-K6-B5
gtgtagagatcagtgatcgggatagatgcccacagtgcaaagggaacaaggttactcaggaaaagaagtgctggaagtacatattgagaaaggaatgagagatggtcagaaaattacatttgagggacaagctgatgaggctccagatacaataactggagacattgtttttgtattgggaacagaaagaaacaccccaaatttgataggaaatttggggacgacctttatgttgaccacaatctcagtttgacagaggctctatgtgggtttcagtttgccctgactcaccttgatggcaggcagctcttaattaaatcgaaccctggcgaggtcattaagcctggtcaatacaaggctatcaatgatgaaggtatgcctcaccatcagagacctttcatgaagggcaagctagtcatccagttccatgttattttcccagaatctggggtattttcacctgagcaatgccggaagatcgagagtatattgcccatgaggcctagtaagcatttgacagacatggagcttgatgactgtgaagagactactttgcatgatgtcagtgcttgagaggtaaagaggcggaaggaacgacag

SEQ ID NO: 4879 - DNA, 530 bp, Gossypium hirsutum
  Clone ID: LIB3826-001-Q1-K6-B6
ccttgcagcattagtgtatgaattctaatgtgaaaagttccaaccaggagaacttgttggaggaagcaatggtgtgcatgggcagggactgctatcagcagacattcatctggtggggctgcatttctctcttaggcctaatctccagtttgctgctgttctttaggacccgacttgcttattatggctaccaaaggaacaggagtcgaacacaggtttcgtagattatatagctatgttgctcggatttgaagatgagtatcagattcggttctgctcatttttattaagtttatatatatatatatgtcatacacatgtttgagtgccatacacaagtatgagctaagatgtttgggagaaaatgagaagtcctagttccacactcccctcgattttcatgtaataagatctcttatttgtaatgcacttaaaagggtatcagccgtctaaacaaacttgagaaaatcaaaaaggacaaatgatgtactgaattatatatataatacaatttgtaaaatgttttaggg

SEQ ID NO: 4880 - DNA, 618 bp, Gossypium hirsutum
  unsure (1)..(618): unsure at all n locations; Clone ID: LIB3826-001-Q1-K6-B7
aaaagggggctctagaggcggggagggggggtcctagtcccgaacccgatggtgccgctgcactgctagagctgcttccctggagagagcagggcggcttgtgccggacgagggacggactgggaacggatcctttgggggccttatctgggcgaccaacaggctactcacaactggttcggacgaagggaatccgactagagcaatttaaaacacaaccataagtagaagacgcaccgtgtcggcatagcacacggcacatcgcgatatcactgcctcgagagcttctgcgatgtagaaagagagagacaatgaaccatgggccattcaacagtgaaagtaactatgactatcttaatgcagacaaatgccatccacatctaacttgtgacccgcctgaatggtttaacgagtaacacactgtctcgtgtcactgtccatgcgaaaccacaaactacgaaacgggtcttgatgtgaataagctgggataatacaagaaccctgtntgatgcttgaactctagtatcacctttgataaaatgactggagaggcgtaggataagtgggagctctcgggcgaaattgaaaaccactgctgtcaacgttatggtacttatt

SEQ ID NO: 4881 - DNA, 369 bp, Gossypium hirsutum
  Clone ID: LIB3826-001-Q1-K6-B8
ttttttttcttttttttcccagcgcccgacgaaactggatttgtgagcctgatggtaggttgcactcacaagtgggttttggatgtcaatgttgatgttttgaaaaggctgagcaatggattgaggcagtggaatgaggaagaactggctatagctttgctcggacttggcggtgccactgctgccggcacagctgctgagttgattgtcgaaatcggagcttaaattttcaaatacccttatttctacttattcacttcatgtagatgcatttcattactttctaagaattttgaaacagggaattgatgaaaactaatctgaagtacatttctgtaaatatagtccaagcaattctttttgttttgt

SEQ ID NO: 4882 - DNA, 650 bp, Gossypium hirsutum
  unsure (1)..(650): unsure at all n locations; Clone ID: LIB3826-001-Q1-K6-B9
ccggngtcgacccacgccgtccgnngtccaaacataaccctgaagtgattcacaatttttggaggatgagagcaccaagatattcgctcggaaagtgccgatcattatagtgcaagaacaaatcaaactttggaagaacgagaagcaagtccgatcattcacttaaagaagttaaataactggataaaagtgtcttgattcagctttatgctcgtcggggtgatgctgttcttgatcttgcctgtggcaagggtggtgatctcatcaaatgggataaagcaaaagttggatattatgttggcattgacatagcagacggctcgatagaagattgccgtacgcgatataatggtgatgcagaccatcatcaacgtcgcaaaaagttcacgtttcctgcccatctcatatgcggggattgttttgaggtgcgcttggatagagttttggcagatgatgctcctttcgatatctgcagttgccagtttgccatgcattattcctggtctacagaggcacgtgcacgtcgggcgctggccaatgtttcagctttacttcgtccaggaggcaccttcattgggacaatgccagatgccaatgtcatggtcaaaaaacttanagaagctgaaggattggcctttggcaacagcgtc

SEQ ID NO: 4883 - DNA, 244 bp, Gossypium hirsutum
  unsure (1)..(244): unsure at all n locations; Clone ID: LIB3826-001-Q1-K6-C1
ctgtatagaaaaaaacacctttggtggcaatgtatgctgtggtcttgttcattgttatatgtaagtcaaaaactggtgattggtgaaatattaaaatactatagtcccctttgtacggctnaaaaaaaaaaaaaaaaaaaaaaaaaaaaaaaaaaaaaaaaaaaaaaaaaaaaaaaaaaaaaaaaaaaaaaaaaaaaaaaaaaaaaaaaaaaaaaaaaaatcgcacaacccaacagtatgcgca

SEQ ID NO: 4884 - DNA, 645 bp, Gossypium hirsutum
  Clone ID: LIB3826-001-Q1-K6-C10
gtcgacccagcgtccgcttgcacctgttttaagggcagtgatagagaaacaaatttgaatcctagtgaagttggggatattgttgtgggaacggtcttggcaccaggatctcaacgagctagcgaatgtcggatggctgcattctatgctggcttccctgaaactgtgcctgttagaactgtgaacaggcaatgctcatccgggcttcaggcagttgctgatgtagccgcagcgataaaagcagggttttatgaaattggcattggagctgggttggaatctatgaccactaatccaatggcatgggaaggttcagttaacccaagggtgaagcaaatggagcaagctcagaattgtctccttcctatgggtattacgtcagagaacgttgctcatcgctttggtgtgacaaggcaggagcaggatcaggctgcggttgaatctcacaggaaagcagctgctgctacagcttctggtaaattcaaagatgaaatagtccctgtggccaccaagattgttgatccaaagactggtgatgagaaacctgtcacaatctctgttgatgatgggatccgagctaacacatcagtgtcagatctgggaaaattgaaacctgtattcaagaaaaagggaccactactgctg

SEQ ID NO: 4885 - DNA, 664 bp, Gossypium hirsutum
  unsure (1)..(664): unsure at all n locations; Clone ID: LIB3826-001-Q1-K6-C11
gtcgacccacgccgtccggtaagctcctcggcgaggaagctcgtctccggcagtccaaaaccggggnattccaagggtcttttgatctgaaaatgaaggggagattaccatanggtaccttggtctgagttcatagacttggcgatgacatggaaagccgcgtgccgagaatacgctcacggcgtataaatctgctcaggaaattgcaacttcggagctggctccaactcatcctattcgattagggttggctctgaacttctctgtcttctactacgagatcttgaattctcctgaccgtgcttgcagtcttgccaaacaggcttttgatgaagccatctccgagctggatactcttggagaggattcatacaaggacagcactttgataatgcaactccttcgtgataatctcaccttatgggcttcagatatgcaggacaatgcaaccaacgagatcaaagaagctcccaaacgcgaggaagagaaacaagagtgaaatcgccaatcttcacggtacgattttacttctctggttatttttgtttggaaaagttgctcgggtccgctatccccttgattccctccagttacttgttcttagatcatgcctctcggttttgaacccatcgaacattgctaaaagtttcttaagtatttcact

SEQ ID NO: 4886 - DNA, 622 bp, Gossypium hirsutum
  unsure (1)..(622): unsure at all n locations; Clone ID: LIB3826-001-Q1-K6-C12
ggttgacccagcgtccggctcgatccaatcgaatgagaagaccaaacaagcttcaaccgaccaagttgctccttcaggggggcgtaaagatgaggagaacctgtcttccacgctgagacgaattgctaagtgatccgaaaagacacgaagatcatgcccggcctccttaccggcaagaacacaagcaacgactgtcctaccaaaatactgctgcaatcgagttgatcaatagtgacactggtactgatgaggacggcaggtgtcgcctacggatgattgtttatgcttgcaggaggtatgctactcgcactggagagaaacccacaagattatgatgctctctccaattgggcattggtccttcaggaaagtgcagataatgttcgtccagattctacttcaccttctaaagatgccttgctagacgaggcttgtcaaaagtctgacgaggctactcgtctttgcccaacacttgatgatgcttcctacaactgggctatagcaatctctgatcgagcaaaaaaggcgtggtcngaccaaagaagcttgaataactatgggagcaggcaaccaaaaaatatgaaaaaagctgtccagctcaactggaattacccccagcctc

SEQ ID NO: 4887 - DNA, 650 bp, Gossypium hirsutum
  Clone ID: LIB3826-001-Q1-K6-C4
gggttctgcaagtctgggaatttggacgaggccaatttgattgtagtggaaatgaaggagaagaatgttatcctgataaagtgacatatactattctcattatcgggcattgtatgaaaggaagaatgcttgaagcaattggcattttcgataaaatgttatcagttggttgtgtacctgatgatttcgccgtgcattctttggtatcttgccttttcaaggctgggatgcctaatgaagcctcccgtgtttcaacaatatcatctttggataacaatattcctttgaggataaacagagttgtgcctgttgctgcttaagagaaaagctccgcatcattgaactcagtctggtccagagatgttgaaaagggcctacagcatgcatcaagtatccaattaagcatatccagcttgaagcacaaatgaccttccattaagataacaagagaccatcaccaatgaatatttttctttggcttcaaatgctggataatgctatagaaaacaggcatgatgctagatgagtggcacgtaccacggaggttggccctttgtcccttcacttctgtatgtcaaatgagaaaacaagcaatttcgtgttttcagtaaggaacatggaaaaaggatggatcaaaatcatgttttttc

SEQ ID NO: 4888 - DNA, 645 bp, Gossypium hirsutum
  Clone ID: LIB3826-001-Q1-K6-C5
atttagtggaagtataaatggtatataagtatatacatgtataaattattggattaattaaagatatgtataagatatatgtatatatataaggttcgaatgattatataagtatatatatatgtataaactcatggatttgatttgtgatatgtttgttataattgtatatatagattcgaataagcatgcaaatatacatgtatgtgttgtgtattgaatttagatatgtcattatataagtatatgaggatcgattatgcatatatatatgtataagttcttgttttgaaattgagtatgaatttatacatttatatggtagatttgaatatgtataaatgtacatgtataatttcttgaattgaaattaggtatggaattatatatgtatacatgaggtcgaatgtgaatgcatatgcatatgtataagttttgtattgaattaatggtatgaaattattagcttagattattttaatatgttcgaatgttaaatgtatattatttaagtatattataagctaatagtatgataatagtagtaggatccaaaattaaggttatgtataaatatgtttggtggaatcattgagttatgaagctggaattgataatacaaattatatatatatccatgtgttc

SEQ ID NO: 4889 - DNA, 661 bp, Gossypium hirsutum
  Clone ID: LIB3826-001-Q1-K6-C6
cggacgcgtgggcggacgcgtggggaagtttcgagccgattggaacgccattaaggctgttaaaaacgagcttagaatcccggttcttgccaatgggaacattaggcatatggatgatgttcgaaactgtctggaagaaacgggtgccgatggtgtgctttcggctgagacccttcttgagaaccctgctctttttgctggattccgaacttccaattgggttgcggataacgagaaagactctattgatggaaaactagatcaagccgatcttgtcgttcagtacttgaagctctgtgaaaaataccctgtcccatggaggatgatccggtctcacgttcacaaaatgctaggagactggtttagggttcaaccgcaggttagagaggaactaaacgcgcagtccaggctaacgttcgaatttctttatggtctggtggatcagttacgagaattgggtgtacaagttccacttcatcaaaaggatggtgcttcggcaaccggaaacttggccgaggtaattggtatttgattagccggaccaaagttaattgagttgtaggtgcttagaataggggaaaatcagacgctaatgaatttttgagctaaaaagaaagatacccttatgaatttttttatgtgtaagaatataaatttactc

SEQ ID NO: 4890 - DNA, 628 bp, Gossypium hirsutum
  Clone ID: LIB3826-001-Q1-K6-C7
ccccgggtcgtcccagcgttcggcgaaaccctagccactctctgctcaatcgccatgggggcttataagtacgtgtcggagctatggaggaagaagcagtcggatgtgatgaggtttttacagagggtgaggtgctgggaataccgccagcatccgtcaattgttagggtcaaccatcctactcgccctgacaaggcacgccgcttgggttataaggccaaacaaggttatgtggtttaccgtgtccgtgttaggaggggtggtcgcaagaggcctgttcctaagggtatcgtgtatggtaagcccacaaaccagggtgtcacccaattgaagttccagcgcagcaagcggtctgttgctgaggagcgtgctggccgaaagttgggaggtctcagagttgttaactcgtactggatcaatgaggactctacttacaagtactttgaggttatcctggtggatgttgcacacaatgctatccgcaatgacccaagaattaactggatctgcaatccggttcacaagcacagggaacttcgaggacttacatctgctggtaagaaaaacaggggtctccatggaaagggtcatttgcaccacaagaaccgttcttctcgcagggcaacct

SEQ ID NO: 4891 - DNA, 647 bp, Gossypium hirsutum
  Clone ID: LIB3826-001-Q1-K6-C8
cgatcattgggtaaggctttgaagctttcgatagagcttgcgatggtaatacgatggtatgaacctctgacacatcagcgatttcattttggcccatgtactaattggttgttctctattcctcctacggcttgtggttaattgatcccaccatatcatcgtgtaattcgaaaactctattgcggccaacttaacctttttggcttcagagttattgtagcactcaaacaccaattctatcttttacgcccactagagataagcctccggatctgatcagccttgaaatggtggaattgaaagcttgatctttttaaggtcgtcgtcaatctgtccacattctctttagccatgatttcttattcctctccgtcgatcacttaggttggacctttggtcattctcggcatcactagggccatacaactcgtcttcgttgattcttgccggcttaggtttcattggagactttggggcgccctctccgattgggctctctcctcgacttaatctagcctttcttggataggctcaagttttcgatcaaacaggcgttctgcttcgcgcaatagggcttagatatttaaattcggtactcctcctctggccgctacatttcgaattggttgtcgttgggggtcttttcg

SEQ ID NO: 4892 - DNA, 614 bp, Gossypium hirsutum
  unsure (1)..(614): unsure at all n locations; Clone ID: LIB3826-001-Q1-K6-C9
ccagcgtccgcgnaggtagccccttggtgagagaccgatgacaccacagatgagtcgttcgagtctctatgataacgatagtagcacttttgagccacatgaccgaaccgactgcagatctggcattgaatgcgagatcggaaagttctgccactgccacgaacaggcgcacggcctccatgactgactccttcaaccgacgacgcatcctcaaccagattcacgttcaaacttacatcctgcaacactcgagcttgacggctctcacaattgaccaacgcatctaccaaacgttgtaacggtaaaactccaggtgacaaccgagcagaggaaataaccgcctcaaagtccgacggcaaccccgccagcaccacttcgatcttctcttcgtcggagatacgagatccagacgcatctaacaaagcacacaaatctttaatctggttaacatacgccttaatagaaagattacctttcttcaatgagtgaagctcatgccgaatccttgactgcttggcacccgtatcagctgcaaaaagattaacagtcatactccatatgttgcacgctgtgcaagcatcatcaaaggaggattgatgagaagaattaccgta

SEQ ID NO: 4893 - DNA, 586 bp, Gossypium hirsutum
  Clone ID: LIB3826-001-Q1-K6-D1
atataataaaaaaaagaaccaaacaatatagaaagtacacaaacaaacacaaaaaaaaaataaaaagaggcatagaatcttatatataaaaaaaagaaaaaaacaaagaaacataatgcaaaatacaaacgaggtcatctttagaaaacaactaatcataacctactctctgtcagggggcgcgcatgcctggtttatggccatctggtgctcttaaccaattggcgggctgcttttgttcttaaccatctgcttgggcgaaactggtgtggcaaaatctgactctccctgtattggataaaaatattcgttcattgtgcttaatactctacagcgggctccacttctcttatcttcgtgctacactgcggtgctgtcagctttatgatgacttctctttctaatcgttaatgctgtattcctgttaggttctttatctgaggctgcctttatggttccggtttagtgctggaccccccctctaccgctccaaactttactttgcggacggctacgttgttgccctctccctgataaataggggggcgcccttgggcgttccagtccacggtttttattggggact

SEQ ID NO: 4894 - DNA, 630 bp, Gossypium hirsutum
  unsure (1)..(630): unsure at all n locations; Clone ID: LIB3826-001-Q1-K6-D10
gngaaagtcgatcgggcgagnaagnaaatagagtttatgaaaaacaatggatgcagccctaatttattcaactactctgctttgatgaatggcttatgcaaggagggaagttgggaagaagccaaacaactttttgttgagatgaagagcacagagaaagtaggttccatgaggcgcttcagatgctcgagaagctgccatatgaaggtgtttacttgaacaaagcaagttacagaattgtattgaatgcattatggcagaaagatgaaatggaaaaggcagcgaagctgttgggtctgatgttggataggggggtttttccacattatgcaacatcgaatgaggtgttgattcagctttgtaaagctggaatgttagatgatgcagttacagcattgtttggattggctgaaacggggtttaaaccagaaccacattgttgggagtttctgattgaaatgaattgcaaagataggaaattgctgcctgtttttgaactacttgatgagttagtaataaaagaatgtactcataatcttcatgttggtgctacttttgcttagcctcctatgcatgtaaaactatcattgttgagcatttgatttagtgatacgtccatgtattttctcg

SEQ ID NO: 4895 - DNA, 298 bp, Gossypium hirsutum
  unsure (1)..(298): unsure at all n locations; Clone ID: LIB3826-001-Q1-K6-D11
cttggctagtcattgggtggtaaatttctttgttggtctgtngnttttgcggttactggaaacagataggaccattagtcctgaatgcnatnttcgccaccttctgtttnctggcagtnatttttgtgaagagaaacgtgttgngaactaaaggaaatcacttcaagagatcgaattgaccccttcttccacccnaagtagaggttatcagcttcatctaatnctnntgaccattgtgaacataccattttaaggtgaatattnccctaacagaactttgctttaaattatttagcct

SEQ ID NO: 4896 - DNA, 454 bp, Gossypium hirsutum
  Clone ID: LIB3826-001-Q1-K6-D2
ttccgaaaaaaaaaaaaaaaaaaaaaaacaaaaaaaaaaaacaccaatataaaaaaaaaaaaaaaaaaaaaaaaaaaaaaaaaaaaaaaaaggaaaaaaaattgtaaaaaaatgaaggataaaaaaaaaaaaaatagggacctaataaatggtaaataaaaaaaaaaataaataaaataaaataaagggaccattttaagggggaaaaaaaataaaaaaaaaaataaaaatagggggggctcttttttaggggttccagttttcctttttggtcattgggagtttttgttttttttttggggccccttaatttaatttaatgggccgcgtttttaaatggtgggtgtttggaaaacctttggtttcccctaatttattgggtttgtggaaattccccttttggcgacttgtttttttgcaaaaaggcctggacccgttcctttttccaaaattt

SEQ ID NO: 4897 - DNA, 668 bp, Gossypium hirsutum
  unsure (1)..(668): unsure at all n locations; Clone ID: LIB3826-001-Q1-K6-D3
gaaaaagggacttaatcgtgggaagtgcaatggcgtattggacgactctggcgcccaatgttgaagactataacgggtctatagcaaaggcaatagcatcggggtcagggtacgttgtgaaggggattttgtggtgcggcgatgtcactgttgataggttgaaatggggcaatgatttcttgagtaagaggataaagtcaggttcaacctctgagatctctccagaggccttgagaaggatgaaaagggttaagaagttaacaaagatgtcagagaaagtggccactggaattctttcaggtgtggttaaagtgtctggattcttcacaggttcaattgttaactccaaagttggtaagaaatttttcaacctgctgcctggagaaatcgttcttgcttccttggatggatttaataaggtttgcgatgcagttgaagtagcaggaaggaatgtcatgtctaccacatctgttgtgacaacaggacttgtttcacaaaggtatggagaaaaggcaggaaaggttacaaatgaagggcttgatgcggcaggacatgcaattgggacagcttgngctgtgtttaagattagaaaggctcttaatcccaagagtgtcttcaaacccacaactcttgcaaaagctgctgcacaggctaatgctgctgaattg

SEQ ID NO: 4898 - DNA, 650 bp, Gossypium hirsutum
  unsure (1)..(650): unsure at all n locations; Clone ID: LIB3826-001-Q1-K6-D4
atcgtgaaccaaaacccctctgccctctctataattatcaaaatcaaatcaaaatcactcaaagaaataaaagtttcgaagtttgatttacaacccaaaaggagatggctcttttaagaagattcaatactattcgttctctttatcaaacccttgagatgcatcaatcttcttcattcctaagctcaagaagctattccagtgggttttcaaatgtatctcaattctacggccaaggtgtaacttcttgcttatataagacacaaactaatgctcttccttggacatgtagaaacacaccgacacttcgttcaaccacggtaacattctgaagctgctgaattgttgatctttttgaatgacaaaaagtccttatccacacaagcgcctacacaaacacggaaagtgggagctcaaatttctatgactagccctggatttgtgtatgaaccttatgcacttcgtgaaccgatcccgttttggaagaggtattttacaagaaccggttggagacaaacaaaagaagatatcaagtctgagctcaagagtgcctatgcaattgctaagttaaggaaaacggngtactcaaaacagaaagtctataaggaagccgtagaattatacaaagagataagtactctagtagcaaa

SEQ ID NO: 4899 - DNA, 675 bp, Gossypium hirsutum
  unsure (1)..(675): unsure at all n locations; Clone ID: LIB3826-001-Q1-K6-D5
gtcgaccccgcgtccgcggccgcgtgggcggacgcgtgggttcgaattttacgttgttgcgttacgcgtcatccaactgtcccctctcaactttccaggttccctgctttacatctcctggagaacacagtcctcaataacactatgtcctcctctttttcttctttcgctcattcaaatagaagtggaggcagaggtcaagatatgaaacatgatcgagaaagatccagaggctgtggcggcggcggcagcaaagacaaaattgatgctcttggtcgactcttgacacgaattctgcgacatatggctactgaactgaatttgaatatgcgaagtgatggttatgtcaaagttgaagatttgctgaagctgaatatgaaaacatttgctaatatccctttaaggtcacacactgttgatgatatcaaagaggccgtcagaaaagataataagcaacggtttagccttcttgaggaaaatggggagcttttgatacgtgcaaaccaaggccacaccgtcacgacagttgagtccgaaagattattgaaacaaatcctttcagctgatgaagtgcaattttgcgtgcatggaacctataagaggaatttggaatcaattttggagtcgggtttgaagcgcatgaaaagattgcatngtcacttctcaagtggcttg

SEQ ID NO: 4900 - DNA, 627 bp, Gossypium hirsutum
  Clone ID: LIB3826-001-Q1-K6-D6
ggtgattgaaggatgaatagtggcggtggtggaggtggtgggggggctgagagtggcggtgtagggatggtagcaatgaggtcgtcatcatcatcatcatcaccatttacagtgtcacagtggcaggagctggaacatcaagctttgatctttaagtatatgatggcaggtttgccagtaccacctgatcttgtgctccctattcagaagagctttgagtccatatctcataggttctttcaccaccctaccatggggtattgttccttttatgggaagaaggtggatccggagccaggacgatgtaggaggaccgatggcaagaaatggcggtgttccaaagatgcgtatccggactcaaagtattgcgagcgccatatgcaccgtggccgtaaccgttcaagaaagcctgtggaatcacaaactatggcacagtcattatctactgtgacatcattgactgtttctggtagtactaccggtggtggtgggactgggacggcaagcttccagagccttccattacatgcctttggtggtacgcaagtcactgctttggcaaccggccagtctaattatcatgtggagtcaatcccctatggaatcccgaggaaagatataggtctc

SEQ ID NO: 4901 - DNA, 585 bp, Gossypium hirsutum
  Clone ID: LIB3826-001-Q1-K6-D8
aaaaaaaaaaaaaaaaaaaaaaaaaaaaaaaaaaaaaaaaaaaaaaaaaaaaaaaaaaaaaaaaaaaaaaaaaaaaaaaaaaaaaaaaaaaaaaaaaaaaaaaaagggaggccttttttaaaggaaacggggctgtcctttcttagtggctcccaggtttacacccctttttttggggccaccctatgttttgttggggggccccctattttcaatcacgtgcccgggtttacacaccgtgtgcccgggaaaaaccctggggtgcccaaccttttttccctggcggcctttccccttttggggggggggcgttttgcccttgggccccaacccgttccccttttgaaaattgggcccccccttcttgggaactggccccccccctggggggggcttttacccccggggggggtgggtgttttcgccaggggggaccgttccccttgttaggctcttatcccccgcttttttgcctggttccccttcttttctcgccaggttctcggtctttccccgcttttttttaatcggggggctccttttggggccccgtttctgggtttaacggctccgggccccgaaaaa

SEQ ID NO: 4902 - DNA, 601 bp, Gossypium hirsutum
  unsure (1)..(601): unsure at all n locations; Clone ID: LIB3826-001-Q1-K6-D9
ccggngtcgacccacgccgtccggtcagctgtgcgcactgatcccataatgtctccgagtttcccctcggtcgtgactttgggaaaaccactagtacatctgtgcggaagaaatcttgctggggtcttacacatgctcttattctaatatcatgatgggttctctcatcaccgatagatcagcattgatccttcttccgtaaagctgcactgggcagatgatgatatcctactggnccaagcgggcagcacctggctttaatgagaagcgcggcatagaggatcgaataaccagtgctaagagctttggccgaggtgccccaaatgctgcaggtgcacctgtagctgctggcagaggagccagagctgccgctccacctactgctgtcgaaaagctgaagaactcggtgaagagagtctgacaatctgggattcagtttgatggaatcagtgagtagtggacagtgactacgtacttaccatgaaggtagttacgctattggagttgaatggctatggggatgaggatgatgattataaatggtacgcatgggaactatggaatgtgacactaagtagctctgaactaagagatctgtgtt

SEQ ID NO: 4903 - DNA, 592 bp, Gossypium hirsutum
  unsure (1)..(592): unsure at all n locations; Clone ID: LIB3826-001-Q1-K6-E11
gttagaaaggnanagaggagttaaagtccaaataacttgccttggctcaaattgaggaggaacgatgctccaaggaagcagctgaggcaagcaataaaaggaagcttgaagcattgcgcttgaagatagagattgactttcagcgtcatagggatgatcaccaacgtcttgagcaagagctatcccgtctgaaactatctgctcaatctactgagttgaatcatcagtccgataatttactcacaggaagatcagaaggtacaaaaccccagggagaaacaattgctaagttgcttaatgaattagataagctagaggattcttctgagaaagaagttaacggtgatagagaatgcataatatgttcaaaagatgaagtctttattgtattcctgccttgtgcgcaccaggttctatgtgctaattgcaatgacagttatgggaagaaaggtaaagctacttgtccatgctgncaggtgccgattgaacagaggattcgagtttttggtgctagttcatagtctcatttttcggtttaggaaaatcctatccaaccaaaagcttctacttggtttgccatttttcttatcct

SEQ ID NO: 4904 - DNA, 615 bp, Gossypium hirsutum
  unsure (1)..(615): unsure at all n locations; Clone ID: LIB3826-001-Q1-K6-E12
ggnaaacagnaaagcagagccgcatcactttttgctagctaagctactgtgggagttattgttcttcagaacagcttctgcagtagctaataataacgttatatattatataaattttatacatcctttttaccctacgactccatatataagcaagtaaaaataaatatggctcgctctgtttcttcctttaagttccttggtgcttctgtttttgatgctctttatgtctccatatcaaggtgcaccgccggcggcagtgacggctagctttggtaggcctggagcgatggggaaagtggaacgaagatatgcgatgaaagagtcgtcgtcgtcggagacaagggcttattcttcagcttgggcgcctgaccctgttacggggtattaccggccggagaactgtggggctgagatcgatgcggcggatctccgggagatgatgttgaatcacagggttagatcacagtagaaacttgccaccgcatgtgatcaccgtagcagagcagagccagaatgttttgcagatgtttgggtgcctttgtattttgtttttgtttttgagttcaaaatcttttatcttaaaaaaaaaaaaaaaaaaaaaaaggcggccgc

SEQ ID NO: 4905 - DNA, 519 bp, Gossypium hirsutum
  Clone ID: LIB3826-001-Q1-K6-E2
cgaggatgctcgtggcgccctccttctttcgccatcgtatgagccgctttgttggcctccctagagttcagtttacgtattatggttaacgcatccccttcaatgcaaacttcctggaaccccatatcttcagccaaaataacggcttgcagacacgccctcgcctcagccatcactggatctgcaatattttcccatggttgggactgccattcccaaaccccgcaagacttgctgcgtgaataagcaacgtctaaaaaggtgatccgccgattcctcttcagtttgacacatcggacaccaagtgttgacaaccaaatttcgggcttttagattatgtagagtaggtagaaagtcattagcaattctccatagaaaaattcgtattttgcttggaattttgagctcccaaagccttgtaaagaaagtagtagggatttcattatttaatcttgtacccccatctgtaatgagccatctatagccacttttagctgtatatatcacagtattgtcgcc

SEQ ID NO: 4906 - DNA, 623 bp, Gossypium hirsutum
  unsure (1)..(623): unsure at all n locations; Clone ID: LIB3826-001-Q1-K6-E4
cttgcagtggctcctaggagtgagccagaccacaccgtagcacccggcgngaaaatctgaacaccaacatattcgctaccaggagcaacaaccagtggtgggcggtgtaatgggatcattgcgtctcatcgaactccaactagtagctttcattatggttttctctatcagtggtctagtgccacttctggatttagtcttcccggctttcacctccgcttacctcatcgccctttcacgcttcgccttcccgtcccgtggcagtcgagtatcctccggtggctcggaagagattttccgaggcagcagactgtttaatctatactaacggagaatgtaataagtgggctgtcattgttttcgccgccggtgagagcattggtgccattgctatatacagttaggagggtgttcgttatacttgattgggtgcatgatacttgggtgaacaaaactctgccttataatgcaccatcgaaggacatagcatgggattggttcgggaaggggctgtcagctgcaaatctaatgtatttcgcaatcaacctgttatgctttttgatcccgcggttcctccctcgagcatttgagaggtattttagggaaaactgagagtttcatca

SEQ ID NO: 4907 - DNA, 142 bp, Gossypium hirsutum
  unsure (1)..(142): unsure at all n locations; Clone ID: LIB3826-001-Q1-K6-E5
gggtcgnacccacgccgtccgttttaaaaaaaaaaaaaaaaaaaaaaaaaaaaaaaaaaaaaaaaaaaaaaaaaaaaaaaaaaaaaaaaaaaaaaaaaaaaaaaaacacatacaattcaaaaaaatccaatcttatataaaa

SEQ ID NO: 4908 - DNA, 196 bp, Gossypium hirsutum
  Clone ID: LIB3826-001-Q1-K6-E6
gattggaactattgctgaggttagagattatacattcgaatgcaaaaaaaaaaaaaaaaaaaaaaaaaaaaaaaaaaaaaaaaaaaaaaaaaaaaaaaaaaaaaaaaaaaaaaaaaaaaaaaaaaaaaaaaaaaacaaaacaaaaaaaaaaaactcttttatagagacaacataaataaaaggggattggcccgtc

SEQ ID NO: 4909 - DNA, 632 bp, Gossypium hirsutum
  Clone ID: LIB3826-001-Q1-K6-E7
ggtatggagacactatatggatgtgggtggggagaatttcttaagaccgtgtaatcttggtgatgttgatatggtggaagaaaggaaataagagaaaggagaggaaggagagatggaagagggagaaggaggaaatgtagaggaacaagaggatcacgaggaacaggaggtacaagatgaacaagaggagcagcatgaagaaggctttactacttccccaaaaggtgacaatttggaggctgtgcactcggcaaatcttcttgaaggaatggaaactgccgatgtcccttttacaactggcttgcacattcgcgataactcatcaggggaattccttgtctccagggttgatgctcggacagttcctgctgtctcatcatttctgagtaatggtaacaagagagagattggtcatgagaatgatatatctcataattccttgaatcttagcaataagaggttgagaactgatgagcaatgggataagtcatctgattttgatacgtgcatggaacaaatgcagcattggatggacaaagcaagaatgttgtacgctgcgaaagaccaggcttgtggagattcgagtatgcaccaacaagtgttgctccatgagttgcaacggagggataccc

SEQ ID NO: 4910 - DNA, 722 bp, Gossypium hirsutum
  unsure (1)..(722): unsure at all n locations; Clone ID: LIB3826-001-Q1-K6-E8
ccgggttcgtacccacgtccgttccgcaaggaatgcaaatnnctttgttaaaaacccctcactggggcaagnaaccatcacnncctcgnagggtggnagaaggttcagnacccaccattgatnnaatgtgaaggggctaagaatccaagnnataagggaaggggatnncccaccggnnatcagcagnnaggctttanntctttgnnctggcaannacaacttgnaggnnatggccnnngcacgcttagnnccgacttanccaacatnntcagnaaagaaatnnccaccctttcactttnnggttcttcgnactttnncgtggnncggcatgccccaaatctnnttgtcaagaactncnntcactggnnaaagnaacaattnnaccttggnaggggttgaannagctctgacnnacaatagnnataatgtaaannggcaaagaatcctaagacaagngaagnnggatcccnnaccagannncagcagaggcttttatctnnttgctgnngaaagcagnncttgaagaatnnggtcgcnnaccttagnnctgattacaatanntccaaaaagaaagtccacccttccacnnctagtannnttcgtcttcgaggggtggcatgggcaaatcnnnttgtcaaaacttctcnaactggaaagaacaattacnncttggaggggtggagagttcnnggataccatnntgataatgtnnngaaagccaa

SEQ ID NO: 4911 - DNA, 603 bp, Gossypium hirsutum
  unsure (1)..(603): unsure at all n locations; Clone ID: LIB3826-001-Q1-K6-E9
tggngcttcgaaactgttgacaaatctggtcctaatatgaaaccaccgattcccaagccaaagcttatacccaattcaaagctggagaggatgaataatacatcagtaactgaaaggaagatcaatcatccccaaatagcgtcacctgccctctatgctactcctgaggcaactccactacctgattcaccatcttcttttcccccttcaccttacatcaggggtagagttttttgatgcttgggacgaattatcctctgagagtggatcacagtccattcatcgtgacactgaagctgaagcatgtgaaataagactcagcttactcatggaaatagagaagaggaagcaggcagaagaagctctaaataagatgctacatatgtggaaaacaatcagccaagggttagctgttgtgggattgtcactgcctgcagatcctattgatgtgacagatgatgagctggtgaatcaagctgaagaattgaggcagcaagcagatgttgcacgatttgtatcattaaccgttggaaggggaattgcaagggcagagatggagatggagatggaagctcaaattgactcaaaaaatttgaaatcgcc

SEQ ID NO: 4912 - DNA, 302 bp, Gossypium hirsutum
  Clone ID: LIB3826-001-Q1-K6-F1
cggacgcgtgggttccgaaggaaatggtatttacatggatgaccagagtgggaattaaagcatgaatcttttgcggttaaaccagcaagggggatatatgctttaatctcccaacaaagaacctacaagcaaaaatcaataaacattcatggggctgagctgatatttagtagatttagggatattttgtcttttctcatgtctttgttatctttatttatagtttttattcaggttcagctctcatcgttttcttgaaaggtacaataatgtatagttttgtctcttaaatcgtttggttt

SEQ ID NO: 4913 - DNA, 622 bp, Gossypium hirsutum
  unsure (1)..(622): unsure at all n locations; Clone ID: LIB3826-001-Q1-K6-F10
ccaccaccaccacagggaacccgcaaagcagatcaacaagaatcaagccagggtggataagagcgagaacttgaccctcgaggcagtgaggtactcgttaattcgacaagaggacagcattatatttagccttctagagagagctcaatattgttataataaggatacatatgaccctgatgccttttcaatggatgggttccatggctccttagttgagtatatgcttagagaaagcgaaaagcttcatgccaaggttggcaggtacaggagcccggatgagcatcctttcttccctgatgaattacctgagcccttgttgccacctttgcaatatccacaggtactacatcctgctgctgattcaataaatataaatccaaaagtgtggcaaatgtacttcagaaatcttattcccagattagtaaaggcaggagatgatgggaattgtggatctactgccgtttgtgacactgtgtgtttgcaggctctttcgaagagaatgcattacggaaaatttgtggcagaatgtaaataccaggcatatccggatgcttatcgagctgcaataagagaacaggacaggnattggctgatgaagttgctcacatatccgtctgtg

SEQ ID NO: 4914 - DNA, 388 bp, Gossypium hirsutum
  unsure (1)..(388): unsure at all n locations; Clone ID: LIB3826-001-Q1-K6-F11
aaaaaaaaaaaaaaaaaaaaaaaaagaaaaagaagaaaaaaaaaaaaaaaaaaaaaaaaaanaaaaaaaaaaaaaaaaaaaaaaaganggggaagcagaaaagacaaaaaacgaaagaaagaaaaaaaacagaaaaagaaaaaaacgaaaaaagagaaaaaaaaaagaaagaaaaaaaaaaaaaaaaaaaaaaagaagaaaaaaagaagaaaaagagaaaaaaaaaaaaaaaaaaaaaagaaaaaaagaagagaaaagaaaaaaagaaaaaaagaaagaagaaaaagaaagagaaagaaaaaaagcagaaaaaaaaagagaaaaaaaaaaaaaagaagaaggaaaaaaaagagaaaaaaaagaaaagaaaagaggaaggtgggagggg

SEQ ID NO: 4915 - DNA, 404 bp, Gossypium hirsutum
  unsure (1)..(404): unsure at all n locations; Clone ID: LIB3826-001-Q1-K6-F2
aatcctcaataatcttccctcggccaagcacaggtacgctataatttcgactgcccattaggtcgtaacctaaatttccttactgggttttcgttttcaagatggggactggagatgaagtagtggaaatcgagagcttagagagaagtttgttaccggaatccgttaccggagaacaggagtccgaggcagtcgatgagccagttctttacgcggcgtcgtttggagagatggaagaagaattcgttaaataccaaacggctcaatgggttttatactcgttggttttagtgttagcttggggtattgggttgttcatgctcttatacattcctgtcagnagatacatcctgcgtaaagatattcgatcccgaagagtttatctaactcccaattcaatcgtt

SEQ ID NO: 4916 - DNA, 619 bp, Gossypium hirsutum
  Clone ID: LIB3826-001-Q1-K6-F3
ttcaagataagcgctacaagaatagggagttgcagattatgcaaatgctggatcatcctaatattgtgtcccttaagcattattttttctcaaaaacagacaaggacgaactctacctcaatcttgttcttgactatgtaccagaaactgttcatcgtacagccagaagctacagcaggatgaacacacgaatgcctttaatatatgttaaactctatacgtatcagatatgcagagcacttgcctatatacacaactgtattggtatatgtcaccgtgacatcaaacctcagaatttacttgtgaatccacatacgcatcagttgaaactttgtgattttgggagtgcaaaagtgctggtgaagggagaacccaatgtttcttacatctgctcaagatattatcgtgctccagaactcatttttggtgctactgaatacacaactgctatagatatatggtctactggctgtgtgatggctgaattgcttcttggacagccactttttcctggtgaaagtggggtcgaccaacttgttgaaatcattaagttttggggactccaacaagggaagagatcaagtgcatgaacccaaactacaccgaattcaagtttccc

SEQ ID NO: 4917 - DNA, 636 bp, Gossypium hirsutum
  Clone ID: LIB3826-001-Q1-K6-F4
tccgtttaaaaaaaaaaaaaaaaaaaaaaaaaaaaaaaaaaaaaaaaaaaaaaaaaaaaaaaaaaaaaaaagaaaaaaaaatataaaaaaaaaaaaaaaaaaaaaaaaaaaaaaataaaaaaaatttttaaaaataaaataaaaaaaaaaaaaaaaaaaaaaaaaaaaaagggggggggccttttttggggagctgggtttttgggtgcgggttttccggcttttttttttttttttttttggggcccttttttttttttttgggggggggttttttcccgcgcgggtgggggtaacccctgggtgtccccctttttttgggtttgggacacttccttttttttcccttttggttttttgggagggggggttccgcgctgttttttcaataattttgccacctttgtgggggagggggctcccccttttttgggtttttttggggggggggggggggtttttccgccggggtgttttttttttttttccgttccttttccccccggttttttttttttttcctttttttttttcacctttttgggggttttttcctcaggttgttttttaggggggttttttttgggggttccgtttttgttttttgggccccttttccccaaaaattttttttgg

SEQ ID NO: 4918 - DNA, 560 bp, Gossypium hirsutum
  unsure (1)..(560): unsure at all n locations; Clone ID: LIB3826-001-Q1-K6-F5
gtcgacccacgccgtccggtgtgctctgtggtctcattcactgcccactagacctttaaagccaggtataacatgattcttccttttgaaaaaatgactacatggcttctctattgggtactaaaatctgtagtgggcaagcactggcatgagtgtcaatgatatgtgcccttaacaaactctattcgttgtatagcaaattactactgcaaggaaactangaaaccctacctttccagagcacacaatcccaccagacactgaaccacctgcatattagccccatgtgtcaacatactaaactgaggaagttttgtgaggctaaatgcatcactgctgaggcctattctccttacactgccaaatgagctggtgccgaacaacttaactgatggagtgtcatgtactcaaagaaattgcccaatacaggcaaaatcaattacttaagtttgcttgagatgggcatgtaaacaaagagtgcgtgcgataccgaagagctccaacactgaacggatgaaacaaatcctagacatctttcattgaaggctcaccgatgatga

SEQ ID NO: 4919 - DNA, 168 bp, Gossypium hirsutum
  unsure (1)..(168): unsure at all n locations; Clone ID: LIB3826-001-Q1-K6-F6
ctccacgccgtccgggtagtaggaagaccgggatgngnacagaggagccaggaggggcgggttcgtgggagaagttccgncagttttttattcatttttgaatatcccctgctcgttntctggtgtgatcatagtgatctagtgttgtntctctcttttttttttttt

SEQ ID NO: 4920 - DNA, 641 bp, Gossypium hirsutum
  unsure (1)..(641): unsure at all n locations; Clone ID: LIB3826-001-Q1-K6-F9
ccggtcgacccagcgtccgtaactgtataaaanaaatcctaaggaactagctgactcaaacgtgcattccaatggttactacaaaaattttttggactggccaattatagccatggttatccgaactgtagtgtttggtttggttttaattcaggttttattatattacgactagactggcgtaatttgaaaacttcttattaagataaccaaataaggctagccgaaccgatgtttgttttctggtgacttgattagttgagtgaaaggatccaacaatagtgatgtcatttatacgtattttaagcattttcctccattgtaacatgactgacttcggttttgtcttctgatttgtaatagcagggacatactaaactgatccattctgtatgctgggacccttcaggtgagcttctagcatccgttagtgaggactctgttcgagtttggtcctttgcgtcaggcagtgaaggggaatgtgttcacgaattgagctgtaatggcaacaagttccactcttgtgttttccatccttcgtttcaatcactgctcgttattggctgttaccaggcaagtaactttacttttaatcttgtatttgctgttatatatactaccttgtcaatgacatgctccct

SEQ ID NO: 4921 - DNA, 622 bp, Gossypium hirsutum
  Clone ID: LIB3826-001-Q1-K6-G1
cctttccactcttctaaattagaaattagctagaattctcggccttttctcatctccgccgccgctgctataggggaaaatgcaacaagctccatttgcattgggtgaatgacaaagataattgtgggatatgggaggctgctgctgttcttccaggaaacctcttctgcatgggacacctgtgtattactattgtccaccagctttggaagagaatgagtctgtaacacctcatgatggatcagcctctgcaatggctgcaagattcctggttaatttggatttagaagtacctgacacctttagaccacctcctgcaccattgccatatgatgtggtcttgggatgtccacaatcaaccaattcggagtccttcagagaaactcttagtagaggtagtttcgagactctgccaacatgtgaagatcttgaggaatcagactgtaaaacacagtctggtttgcttctttcgccaaggaaatcagaagtctcaaaattaaccgagtctaaggaatcaatggcagaagaagaggatgcttgtcctatttgtcttgaagagtatggcacagagattccaaaacttatcactaaatgtgaacaccattttcatctctcatgcatt

SEQ ID NO: 4922 - DNA, 395 bp, Gossypium hirsutum
  Clone ID: LIB3826-001-Q1-K6-G10
atatgggggggccgttcttacggacccatgcttgcgaccgcgtgcctgctatgtcgtgcctcttatattgagttccctggcttcattttattaaccttggtgttgggacgaaccctctggtaaccccctgaatttccttagcttaattccctttttggccagccgcctttctccgggtggggccctgaccaatcggccttccaaaatggtccttcccaatggtggcgaatgctacacgccatgtggcgccccctttgtcgcggcgctttgtgcgcttccgctctgggggtctcgctcagttggcccgttcctctggcccgctccttgtggttccttcctttccttttttgccctttctgcctggtctccccggcgggctttccctggggggcttt

SEQ ID NO: 4923 - DNA, 487 bp, Gossypium hirsutum
  unsure (1)..(487): unsure at all n locations; Clone ID: LIB3826-001-Q1-K6-G11
cgggttcgacccacgccgtccggtgtagtggcangnagcagcatatgtagnaggcagtatcaagcagtcgatgtggagccgactgaaagctcagtgtagcagactttagtatgtagtattcaatacagcctcactaaagctgaacgatattgagaatgggtaaggcctatccaagacgtgttaggggcaagaagcatgggtattcttcgtgtttaaggccattcttcagattacctaagagnaaggttatgtgttgttgcgcgacatttgggtaagtgtcctattctactcagtagtttgagctggtaacttannagtgttatttttcgcaaatgaaacagttatgggtacaanaagcatcttttcagccaaggtgctgtaacaaagccttgctttcaaagccttcaaaaacagtaaagtagtagaatactntgcaaatcctcttttgaatcacttccgcttccctttcccttacccgcttcttaca

SEQ ID NO: 4924 - DNA, 654 bp, Gossypium hirsutum
  unsure (1)..(654): unsure at all n locations; Clone ID: LIB3826-001-Q1-K6-G12
acgcgtccgaacaacccaaaanaaaggaagagngggnnaaataccatgtggtgcggcgtaccagtgggagaaggtgacccttgcataacgtgctagttgcgacaagaaaatacaagactggtgtaccatatacatttaatatactctattatcactggttctcatgctcaaacagggtgaacagatatatgcctgcactctgtatcttgatgcagattaatcgcccctatttcatccgatgatatgaggcattactgatcataaggacatattattatgacttaactcctagatgaagttgtttcctggagcaatgctgacataggtggtaacgtacatatgctatgaaagagtcaaagttcattttatacaagggattatgatggaatctaggtctcactagacccgtcatcgagttgtttcattcgttagaaataatgttgcttgagcatggattccagaagcatctcactctagtatgatacatgaatgtccaagttttagaatacatttctacatctgccatcccttattatcacacatggcgatcttaaccgatatcatttgcccatgaattctaccctaaaagtcttgtttgaataagatgcaaaatcctaaataataacagataaactgtgtatcaaacgctcacaa

SEQ ID NO: 4925 - DNA, 315 bp, Gossypium hirsutum
  Clone ID: LIB3826-001-Q1-K6-G2
tgcaatgctaagtggtggtgatgattttaagatttaagagtagatgagtttttatatgctttgtttcggtggttgtataaatatgtttggttttgaaacttcggtcgacaataatggatgattgctttccaaaaaaaaaaaaaaaaaaaaaaaaaaaaaaaaaaaaaaaaaaaaaaaaaaaaaaaaaaaaggaaaaacaatctaaaaaaaacaaaacttacataacacaataatagcaacctaaaaactttttctatagcggcaccctaaacacaattcactaggccgaaaaatctacaactttaccaaccttta

SEQ ID NO: 4926 - DNA, 440 bp, Gossypium hirsutum
  Clone ID: LIB3826-001-Q1-K6-G3
agcacttggatctgcactcaagcgcccaatgggagctatattggcaccatttgtggtgattttgggtggtggttttccatttctggtgtttggggtatgtggattgattggaggaatgcttgcatcttacttaccagagacattaaacaagccattgtatgacacaatgacaggattggaagagggagaacttgcttgaaagttgaatatataaagggtgtcaattatttgtcacacagagcagcttcatttcatcattgagcattttaagctggcaaaattggattttcgctgcaacagaatcagaaaaatcaggattttcagtaagggaacaagggctaacaagtgttatatggtttaagattgttgatgaacgaaatgtaggagaaccaagttgaataagctttgatgaacaatatacatattgaataattttatct

SEQ ID NO: 4927 - DNA, 658 bp, Gossypium hirsutum
  Clone ID: LIB3826-001-Q1-K6-G4
gccatcaggaattgaagctctgcctccggtctgatttaagacacagaaacaggttgaaaagcctgaagctggtgatagaccttccaatcaatctatgacaccctccacgggagctgaagaaattgcacagaatgctgtggcactgttgctgaagcacactagagggtaccatgcggacgaagaggaattgtatgaaacccctgatatgtcggccagaaatcaatctaagaagaaagagaaaaagctgaaacgagtgcttggtcctgaaaagccttcatttcttgatagcaatccagatccacagtacgaaacgtgggttcctcctgaagggcaatccggtgatgggagaacaacgttgaatgatcgatatgggtactgactctcatgcttatcctataatgttagagttggaggtgcaacattgttgcttgagtcattcatggcattgaaattatggttggcattacccagcacctctgcatgtgggattctgttgacttgaacaggatgattttgatgttcatggaagaaccttgagttattggtgggaactctctatagggaaaatgagtagcatagcaccgaaattggagcgacagttggttcaaaagtaaagagagagaatcacataaaagtagtataagtttaatgtttgtac

SEQ ID NO: 4928 - DNA, 134 bp, Gossypium hirsutum
  Clone ID: LIB3826-001-Q1-K6-G5
tgggggttttgccttcctccccagttttatttcttatgttttgctagaaatgtaagaaaaatacatttaatatgtaatccttgcctgcgaccaaaacattagcaggagaaaagaattataaaaaatatttaagc

SEQ ID NO: 4929 - DNA, 629 bp, Gossypium hirsutum
  unsure (1)..(629): unsure at all n locations; Clone ID: LIB3826-001-Q1-K6-G6
gttagtaatgagatatggaatattcaatttggaagttactcaagcagctataagatttgccaaacaagagggtctgtctgtctccatcgatttggccagttttgagatggttcggaattttagagaacctcttctaaagttactggagtcgggagatatcgacctctgctttgccaacgaggatgaagcaacagaactactaaggggtgaagcaaatgctagtcctgaagctgcactggaatacctgtccaaatattgccgatgggctgtggttacattgggggtcaacggatgcatcgcaaaacacgcacaagaggttgtccgagttccggctataggggagacaaaagcggttgatgccacaggagctggggacctcttcgctggtggtttcttatatggattggtcaagggattatcactagaggaatgttgcaaagtgggctcatgtagtggtggtgcagtgattcgttcacttgggggtgaggtaacacctgagaattggcaatggatgtataagcagatgcagataaagggcctaccacttcctgatatttcggaattaatgtctccacgatcaaacaagcattgattntcacttctattgctgctatttaataatttttttt

SEQ ID NO: 4930 - DNA, 563 bp, Gossypium hirsutum
  unsure (1)..(563): unsure at all n locations; Clone ID: LIB3826-001-Q1-K6-G9
gttgtaatccggttccatccattgtccacaggtaagtgcttcgtaactttgtgtatttgctctttggtggtggatctacatttgtgctatttaggttggctctttttatgggtgctgtatgttaagtgtaacgtccaaagtactgcgtttatgttgggcgaggagttagggaatcatttgtaggatgtgtgtatcttgatatgtgacgatattgtctatatttacccatttgacctgtctctacctccatgtaagatgagtagggtcctatggaagactcgctgtgggtcggacctttagccgtgttaattcctttacttatagatccatctgttggaccatgtgtgcttaaaaggatgtgttggcgctcgcgactggattgtggtgcttgtgtattcatattttattatttaatattcaagggttttgagaacattaatgctcatagctattattgaacgagattatttttgaaaagttaaagtcagtttgctgataaacttctacggtaattgtttttaatacctggtcttggntaaaattttagagagccctatagggcg

SEQ ID NO: 4931 - DNA, 627 bp, Gossypium hirsutum
  unsure (1)..(627): unsure at all n locations; Clone ID: LIB3826-001-Q1-K6-H1
atatgaagtgtaactctatttctgatgttgttccttctggttgttcatcttcggattcaagcctcagcagaaggaaancacagtaaaaaagagaaatgcggatggagaaggtagttcttcaactaagggaaagaagttgagtgggtcatctttggagggacggagcaatgtttctagtcacagtgtctccatttctgattcaaggcgagctagaaattggtccccgaatagtgatagcagtgttgcttcttcaattaggactcgaagatcaagcagtagttatggtagagggagactccctaaccaggacaatgggagtatattaactttgaatgagccccctgtggtcatgccgcaagtgcctcaagctgctgtaaccatcgatttgaatgcacctgtttccacagaaactggctcaacttgtgctatttcttacggtcgagcaggtagaataagtgagagtttacacagtatcataccgtctattccttctgaagctggcatcaacctctcttcaatgaccggggatagttttcggcgctacaatatggatggcattgcagaggtgttattagctcttgagaggatcgaacaagatgaagagttgacgtatgagcaattacttgt

SEQ ID NO: 4932 - DNA, 641 bp, Gossypium hirsutum
  Clone ID: LIB3826-001-Q1-K6-H10
cgggtcgcccagcgtcctaaaaaaacccttgcacctggctggctcaccagcattgcgccgactgtgacatgaagaattcttcatgaaaatggaccctcaacatcaaaagttcttatggttgccaccctccttcctgttggtggcatcctcctcttgcttgctggtttgagccttattggatccctcataggtcttgctattgccgccccacttttccttattttcagccctgttttggtacctgctgcttttctcattgcgggttccatagccggattcttgacctccggagcatttgggatcactggactgtcatcgctgtcgtggattgctacttatattcgtggaagcaggggctctatgtctcaggggctagacccagtgaagtggcccttgccggacacggcagtgagtatggagcagaagatccagaataggagccaaggaggaggaaggatctctgagggaggcagagaacaggaaggtggcaagagtaagacacaagaaggtggcaagagtaagacacaagaaggtggcaagagtaagacacaagaaggtggaaacaagactgtgggttgaagtttcctattgtagcagtcggctgatatgctagaaagtaatctatcaattttgatgctctg

SEQ ID NO: 4933 - DNA, 495 bp, Gossypium hirsutum
  Clone ID: LIB3826-001-Q1-K6-H2
cggacgcgtgggatcaaaacatccttgatcctgcaatcaacaggggatgctacgttttggtggtgtggtgggatcactggactcatcgaaacctacgagaaggctatcgctggagggtccaattatggtgggcaagtagatctccgcagctcgaaacaattggttatcgccagcgtgccatcggttttcgattatgaaggtaaagtcggatgagaagtaagcagaagtaaagtcgtaaatcatagagaagatgtagtttgtcatcctttcagggagcatttcatttaagatggttcggattaacatagccatggttgaaatagaagcataagcggagagaatagtagacaaagaaggtaactctttcaacattgtacccaattttgtattcttcctttgttttgcttcttctgtgtggaaaacacaaaaaaaaaacaaattcaatggagcagttgagtgaagggtgaggaacactcagtacatttgcattccctt

SEQ ID NO: 4934 - DNA, 468 bp, Gossypium hirsutum
  unsure (1)..(468): unsure at all n locations; Clone ID: LIB3826-001-Q1-K6-H3
gtcgacccagcgtccggtaaataaacaatgtcaggggcacaagnagcattgcccaaggagtcgaagacggcaacgatatatgaatcagtacaaggaggagagaataagagcaaaacggagctgaggtccaaggaggatgagggtggcattcaggttgataggctggaggacaaggtgaaagatcctactggcgaaggtggccctatctttggctttccctctcccaacaacgatgacaaccaagacttgggcgttactggcacagcctaggcctaccttgcttcatttagctacccttccctacctaccaacctactgctatctccttttacatgtcttatatagtaagatgtaatagatatatacacacacgtatgctcctacatgtaataacacaaagatgctgtttttcttactttcttttttaaataaatgtatacaccagtgctggtatggtgtgttttgttg

SEQ ID NO: 4935 - DNA, 589 bp, Gossypium hirsutum
  Clone ID: LIB3826-001-Q1-K6-H4
gtgcaatggaatcaaagagctgccaaaaccagttacccttctttgtgagcctaaactgattgtagatgtcgatccaaaagcacaaaagcctatggttattgataaaccagttgctcatctagcacacagctctctttggctctgggatagctgagaagtgcacacgacatgacaaaactcttaaagtttcttgtgtctggatcaaaggatgtggataaaggggaacttgatttatcattgctatcagatttgattgaaccgttgatgtttggtgtgcatcagcagccttatgcttctctaatttatccaagtagtgagtttgatgaccagaagccgcttccagacattgtaggagagatggtacaagattcaaaacttattgttaattcagatggtctagttgtacttacaagtagtgggaccgagatgaaagacattctttcgatcgttgccgaatttcacttatcaagcaactcaactaaatggagaaggcagtcgggacttgtcccattcttcaacagccacttgacttcaaagctaggtctgttataactgtcttgtcattcatcttggtccttgtgaatttact

SEQ ID NO: 4936 - DNA, 615 bp, Gossypium hirsutum
  Clone ID: LIB3826-001-Q1-K6-H5
ccttacttccccccaggttccctgttggaacaatgtcaacatcaatgacgggtggtggctttggagaaagaaaacagcgaggaagccagcacaagcaagctcgagaaagggtgcatgagaggaaaggtggtccagaaaacgctctctgcacttacaaaggtgtgaggcagagaacttggggtaaatgggttgctgaaattcgtgaaccgaatcgtggtgctcgtctttggcttggaactttcgacacttctcatgaagcagcaatggcttacgatgctgccgcacgcaaactctatggctcggatgccaagctcaatttgcctgaattatgtgccaacaaccctcagtctcaaccttcttcagcagctaatcctcagatggctccgatggtgaattaccaaccccaaaacgtgagcaattcagtaacgccttctttccccatcgagaacattgatcttcaagggaacgtggacgcaaagtttggacagattacagaagatggaattgaggggttctgggaaaattgaacgccaacttgcctcttttagacgactccatttgggctgaaactgctatgtcttttggaatttccaatgatggggtgatccaagccag

SEQ ID NO: 4937 - DNA, 583 bp, Gossypium hirsutum
  unsure (1)..(583): unsure at all n locations; Clone ID: LIB3826-001-Q1-K6-H6
tggtacgcgtggngctattattctgcatgaaacaaanattcctctttcgaaaaaaaaaaaaaaaaaaaaaaaaaaaaaaaaaaaaaaaaaaaaaaaaaaagaagggggatataaaaggataaaagattaaataaaaaaaaaatgacgagggggttgtgcttttttttagtttcccgcttactttatttggggggggcgggggttttatattttgtttactgggtaaaatactaggggttgcggatcttaatctttcttgcttgggatactccttttcgcttgtctggctttaatagcttttgaggccttgtaccgtttttccctttttggcagttttggcttattgggttgggggactggtgacctttcctgtttttggggcattaatcccttgcggatggggtgggttcgcctgcagcgtgacctttacatttgccagcggggtggttcccggtcctttgacttttttcctttcctttttcctaaggtcggacggttttcctttttaagttttatttttggggcttctttcaggttttccctttaccgctttaagttttttggtccgttttaaatttggttt

SEQ ID NO: 4938 - DNA, 337 bp, Gossypium hirsutum
  Clone ID: LIB3826-001-Q1-K6-H9
aaaggaaatagctgttgtgtggggggttctaggttcagttgtctggccgtggttttccctcgttttggtttggtttcccctggctttacttggcgggggggggttgccccacttccggctttggcctgctgtggctttggcgatttggcttgtttcggttcgtcttcccttttgttgcgctgcctgtttggcggctgggccgggccctgttgccgttcctttttcccgcctggtgtggtgttttctgcagcttgcccggtcctttgcctttgccctggcggctgttgctgtttctttcttccgttcctttttcgtttgctttgccggctttccccgt

SEQ ID NO: 4939 - DNA, 547 bp, Gossypium hirsutum
  unsure (1)..(547): unsure at all n locations; Clone ID: LIB3826-001-Q1-N6-A12
ccatcaagaagaaactttcagcctcggattactgacaaccattgagatgttcataataattgttcctgtttaaaagaaacaaattcggttctgcgatttaataccaacaaccgctaaaagaaatcaaactcgagataattgtctgaacctttctgattataagcagctgcattgacagcaaccttttcacttgttgatgccggtgaagctggaactcgttcaagctcgactggctttggaatctcgggtggagtagcacaacgaatcaatgcccaattcacaccttcgaagaaaggatgttgtttaatctcggatgcacctcgcttataagccaatctatgtttggggttcctttacaagtagaccctctatgaggtcccttgctgcgaaactcacaatgggggattctggaaaccgaaaaggntgtcctacgacattgaaacaatgttgctcggttcccggatcccttggaaggagttttcccaaacaagagttcatggaggaagaatccaaaagtcccaccatataacagcacttccatggcctt

SEQ ID NO: 4940 - DNA, 403 bp, Gossypium hirsutum
  Clone ID: LIB3826-001-Q1-N6-A2
aataattcttcttttgccttttatgtgatcattttttattaatttcttaaaccctatttaaattttttgagtttgccacccaaggaacaaataaaaggttgttcccaggaaacaaccccacccaaaggaaaaagggccaattagtttggacttgacaagcaaatgtggatggcagaagggcaagatcaaccggcaccacctgcggaaaaattaaaaactctgacaaacaaaagctcaaaatggggggccaacacaactactcgttcctgaagggccctataaaaaccatgtgacccttggtccattgtctaaaagataaggtacaacggacttcatgggaggtctcagagaagcaaccggcccacaacatcccattgcaagctttaacgcgagcactaaaccg

SEQ ID NO: 4941 - DNA, 172 bp, Gossypium hirsutum
  Clone ID: LIB3826-001-Q1-N6-A3
acaacattcaagttttaatagatttgcatttttcggggacttatatacattataacaaaaggcacataaatacgggagccaacagaactagtaaaaacaggagcccaaacctcaaaaaaaccccagaccccaaaacaaagaaacccccaaacccaatcttgagcggacccca

SEQ ID NO: 4942 - DNA, 350 bp, Gossypium hirsutum
  Clone ID: LIB3826-001-Q1-N6-A6
ggcacataaaaaggtttccattccaagataaaatatcatcaaatttccacttcagaacataatcaaatcaaagtaaatagtttttcatatactaattttcactgccgtcacacattgtttcctatcggtaaatgcaaattaaaacatccagaacgggagagcaagtacgtgataaaatctcaggccgaaggaactgcagcatccttgacggattcacgccaggcatattctcttgctccatctttatcgacaatcttgatgacaaagtttggtggtgccacaaccagtctagatctgatctccattatgcatttatcaactaaatcaatggcttcttccactgtcatgcc

SEQ ID NO: 4943 - DNA, 444 bp, Gossypium hirsutum
  Clone ID: LIB3826-001-Q1-N6-A9
aaagtgggaagttccacggctccgcaatccatattgtatcagttgtgagaaatgatagataaagcaaaatgaaaaagaaagaaatcacatgctgtattctaattgtacttaaaaagaaaaacccaggatttttaattccatcttaatactatgattaacttaggtatttgtcaaataaagccttggctatagtaaggaaatttccttgggccttcactgggtacagctcaaggcctgcttgccacttatttgagaatgatatccattgtttcctccattccaccaatttgaaactctcatttttctctaagcttttgaacaaatagctaaaatagcttgaagctcgtggcaaatagtacccttccagcagtccactccaaaacttgttggcatagtcatgaagcttgctttgattggttggtgtggtatcaaaccacattgtca

SEQ ID NO: 4944 - DNA, 505 bp, Gossypium hirsutum
  Clone ID: LIB3826-001-Q1-N6-B1
agctggcaatttcaaacaagatcttataaacctgttaatttgcaaaggaccatcttcaaacataaggcaattatgtactactacattaactacattcaactagtcacgtccatttgtccattctagaaacaaacaaaattcaaacaacgaccctaaaccggttcactttttacgcttgagtgccatgctttgctttggaatgagattgtaaagcattttcagagccaaatgatctgccacaggacttgcaagggaatgaaccaccggactttggagtctgcttcacctgtgcagcagcagcagcagcagcagcagctgatgttttcccagcctttttggaagtgtgaggggttgcagtatgtccacccgctttcttgctatctgcaccaaaatgaactgtcttttggggagtgaccagctttgccttcttttcgggagcaggggtcttcttagatgactcagcaggtctcttcttgcttggtccagccttctcaggagtcttttg

SEQ ID NO: 4945 - DNA, 439 bp, Gossypium hirsutum
  Clone ID: LIB3826-001-Q1-N6-B10
aaaataaaaaattcaattttactttattggaattgaaggggaaccaacaaacccccaaactaacaacaaaaacaaggggggcttattacagccaattacatgggagtttttaacaaaaacaaacatccttcaacaaaacattgggacgggagcttaaaaacaactagccccattggacttttaaaactctggagtcttaaattttggggggagtcctaaatcagggaccaactcaaatccttggcataaatcccgcgaggggaaacaacattccccattgctctgagtttttcttccaaccatttgtatcgatcttcgaaaagccttgggagtaaaacctttgctttttctattccttccatttcggctcgaacaggaacttaaagaatgggtggaccgttccttggattgaaacccgaccccgtcgggtaattcatgg

SEQ ID NO: 4946 - DNA, 499 bp, Gossypium hirsutum
  Clone ID: LIB3826-001-Q1-N6-B11
gaacggaactgcttaaatgcttagcaactctgtaaaaaaacaatatgttttagtgattctttttatttccgaatttcttctgcaaacctaaagtaggcaactagacaacacaagttaccataactaaaaaaagggctttgggtccaaaaactatacctggctaactaatttaaaccagagttctgttaggtacatattcaccttaatatgctatgttcacaatggttcagagaattagatgaaactgataaacctctactctggtggaagaagggtcatttccatctcttgaagtgattttcctttagtttccaacacgtttctcttcacaaaaattactgccagcaaacagaaggtggcgaaaattgcattcaggactaatggtcctatctgttccagtaaccgcaaaacaacagaccaacaaagaaatttaccacccaatgactagccaagcaaactgacattgccttcgaccttatccggcctggaaacatttctg

SEQ ID NO: 4947 - DNA, 109 bp, Gossypium hirsutum
  unsure (1)..(109): unsure at all n locations; Clone ID: LIB3826-001-Q1-N6-B12
aaaaaaaaananaaaaaaaanagaaaaaaaaaaaaaaanaaaaaacccaaacatttttatttgttttttttttttttttattctcgtcctccccctccccccaccaccc

SEQ ID NO: 4948 - DNA, 390 bp, Gossypium hirsutum
  Clone ID: LIB3826-001-Q1-N6-B2
aggggcaaaaactggggaaactggatttcatcacccaagcccatttttacagcttaagaaaaaacaaagaacccagagaaaaaaagtttccgcttgcaagcagtttcttttagtaacactaaaatgatgtacattgcaaaacaaggggagcaaattttagagttccaaacacaaagaaaagcagggcacctttcgttttttcccttcgctagctaaaccaacaccgaatgcatttgatctgaaacaaaaaccaaaccctgcattaacctacaaatttccaccgtatcggccagggagtacttaaccttacttggttttttacccacagtacatgcaaacacttttgctttgggatcgatcaacggccccaatactgaacttatgattacc

SEQ ID NO: 4949 - DNA, 429 bp, Gossypium hirsutum
  Clone ID: LIB3826-001-Q1-N6-B3
gagttaaaaacaaagcgttggtgggggaaaataggggacaaaaaggcgggtacaaaaggggggcaacggggggataaaaatggggctctttactttgggcaaccaggccttcaaaaccaggccttgaaagtgggggtttgtttggggggattttcttggaaaacagatcttggaaaacagtttcgggatttttagagggaaactcaaagtttagggccacaccttaaagggggcccccttaaacggggaaactccaaccagggagaccaaaactgggggcccaactttggggactgaaatttggaaaggcaaaatttaaagggaagacacctgggggaagacaactgaaaaaactggctagatcaaaaatcctgtaggggcaagggtatatggagggaaacacatttaaaaatgcttgctaaaagcttt

SEQ ID NO: 4950 - DNA, 635 bp, Gossypium hirsutum
  unsure (1)..(635): unsure at all n locations; Clone ID: LIB3826-001-Q1-N6-B4
gaaaaacgacatgggcagtataatttataaaaaggtatattcaatccaactaatgatacaatttttcatgtaactgaatgtttgatacaatttacaaagtgaagcatatcgcacgctcatcgcctaaacttgtccccgctaaaaaacggatgccttagagcttcacgagcagtgagcctatcaatagggtcatacctaagcaacccctgcaatagatggattagatccccagccgaatggtccacatgctgcattatcaagttctgaagacgaggtagcttaagaacagctctcatactctcccttgatgcagcaccatctggccaatccagtctaccacttctaacatacttctccgcatgtcgatctactctcttcaacatgtgctgatgtagtggacccaacacccgctccatcatggcaaggtgctccagattctcatgtgtttgaaacaatgcctcacccgtgcataattcaactaagatgcagccaacactccatatgtncacaagggtaactccatcccagtccaagaataacctctggagcacgataatggtcgtgttgacacaatgtaagaactgatcttgacgctcatnaagtagtgctaccaaaatctattaccttaatggcac

SEQ ID NO: 4951 - DNA, 515 bp, Gossypium hirsutum
  Clone ID: LIB3826-001-Q1-N6-B5
aaaaataaagagacaaaacaccaatttaatgtgctggttgcagacaaaaccgcatacaagttctgggctatgtagttatctaagctagctgctgctataaaataagaggggcaaaacattgaacgcaaacattttttactggtgggcacattgcacttttggggctgactcatcgtcatcgtcatctttatcataagcttcacggggcctatgctggcgttccttccgcctttttacctcctcagcactgacatcatgcaaagtagttttttcacagttatcaagctccatgtttgtcaaatgcttactaggcctcatgggcaatatactcttgatcttccggcattgctcaggtgaaaataccccaaattctgggaaaataacatggaactggatgactagcttgcccttcatgaaaggtctctgatggtgaggcataccttcatcattgatagccttggattgaccaggcttaatgacctcgccagggttcgatttaattaagagctgcctgc

SEQ ID NO: 4952 - DNA, 529 bp, Gossypium hirsutum
  Clone ID: LIB3826-001-Q1-N6-B6
ccctaaaacattttacaaattgtattatatatataattcagtacatcatttgtcctttttgattttctcaagtttgtttagacggctgatacccttttaagtgcattacaaataagagatcttattacatgaaaatcgaggggagtgtggaactaggacttctcattttctcccaaacatcttagctcatacttgtgtatggcactcaaacatgtgtatgacatatatatatatataaacttaataaaaatgagcagaaccgaatctgatactcatcttcaaatccgagcaacatagctatataatctacgaaacctgtgttcgactcctgttcctttggtagccataataagcaagtcgggtcctaaagaacagcagcaaactggagattaggcctaagagagaaatgcagccccaccagatgaatgtctgctgatagcagtccctgcccatgcacaccattgcttcctccaacaagttctcctggttggaacttttcacattagaatcatacactaatgctgcaagg

SEQ ID NO: 4953 - DNA, 341 bp, Gossypium hirsutum
  Clone ID: LIB3826-001-Q1-N6-B8
acaaaacaaaaagaattgcttggactatatttacagaaatgtacttcagattagttttcatcaattccctgtttcaaaattcttagaaagtaatgaaatgcatctacatgaagtgaataagtagaaataagggtatttgaaaatttaagctccgatttcgacaatcaactcagcagctgtgccggcagcagtggcaccgccaagtccgagcaaagctatagccagttcttcctcattccactgcctcaatccattgctcagccttttcaaaacatcaacattgacatccaaaacccacttgtgagtgcaacctaccatcaggctcacaaaaccagttacgt

SEQ ID NO: 4954 - DNA, 553 bp, Gossypium hirsutum
  Clone ID: LIB3826-001-Q1-N6-B9
gaagtggcaatttcttagaaacttcatgctgaaagcaatggcttacaaaaacaatgtcaacctacaaaaccgaaagagccccaaaaaatccggttcataggcattgcttcagccacttagccaccctccgttattttgtctcgctcgaacttacgaataaatctatggaattcgtggtgttttcctgttaatcatcactattaatatacaggatgtcctcctttgctatttgcatctgtcctttatcttttctgctatttgcttgtgtccgatctggttgtccacgcttctttaaaacaaatgcaaggtataaataagctgcctcccattcatccggagataatgtgctctggtcttggttaccatcacctagtgcaccgagcctcctcataagctctatatattccggttttttcatgtactcgtgaacaaattcatgagagtttttgacgaaaacaagttctcttctgctaatgacttgaagacatgaaacggaacgatccattcagggcagtcaacagcatcctctaaatgaaacttgtacttgatacca

SEQ ID NO: 4955 - DNA, 631 bp, Gossypium hirsutum
  Clone ID: LIB3826-001-Q1-N6-C1
ttttttttttttttttttttttttttttttttttttttttttttttttttttttttttatttttttatttttttatttttttaattttttttttttttaatggggaatttaaaaaaattttttttaaaaaaaaactttttttaaaaaaaaaaggattaaaaaaaaaaaggtgaagaaaaaaagattttttcccccggcaaaggggggcccgggcctaaaaaaagaggccaaaaaaggaaaggggggggggggggggggagagaaaaaaaaggagggggaaggggggggaaaaaaaagttggggggggtgcggggcggggggggggccgcgcggggttgggcggcgggggggggggggggaaaaaaaatgggggggggggaggggggaaaaaaaaggaggggcgcaaggaggaaagggcccgccggggggaaaagggggaaaccgcccaacccccccaaagaaacaggggggggaattagaggaaaaaaaggggggggggccggggggggaggacaaagaaaaaagggggggcgggaaaagggccgtttttcgcgggggaaaaacggggagccgcccggggctataaaaccgcccccgcgggggaaaagaaggtgttccagggggggaaggc

SEQ ID NO: 4956 - DNA, 594 bp, Gossypium hirsutum
  Clone ID: LIB3826-001-Q1-N6-C10
gaaagctaataccagtaaaagtttataatatctgtaagctgaatgcaagtaacttgataaatactgaagtcaataaaaataattaaagcgattaagacagatcatctctataaagttaaaaagttcaaacaactcattttgacatataaaatggtaataatcttcttgaggttttgctaagcataacagctacacaattgtggttacaaaaaaaataacccaccgcttacgaaaacgaatcatttcgagatcaacatcagttgcactgctaacgaaatctacttccattatggggctgaagaaacacagaagttttgacacttattatatagctgagataattttatgaaagataatagccagaacgtatgaatactactcttttcaggggtaacatgatctgtgacttattacattgctttattaaattttccaacccgatttaggatatttttaacaagaaaactagggtatcctatcgggcatccttagataagaggctgttagtttcaacttttcgggcattgcacagctcatcaacacaatcacccctttcgaagaccgctgccgcccccattcctgtgcctatgcaca

SEQ ID NO: 4957 - DNA, 368 bp, Gossypium hirsutum
  Clone ID: LIB3826-001-Q1-N6-C11
gaagcttagaaaacatctccatcatgcaactcccttactgttgacaaaaacatttgagaaagtagtgcatatagcctcattagccattagaaaagcttgaacttcaaaaattaatgaccagggcaatacttaaaaaacttttagcgatgctaagctggttcataaaccgagaggcatgatctaagaacaagtaactggggggaatcaaggggatagcagatccgaccaacttctccattcaaaaataaccagagaagttaaatcctaccgtgaagattggcgatttcactcttgtttctcttcctcgcgtttgggagcttttttgatctccgtacttggatttgacctcgatatctggaagtcctaag

SEQ ID NO: 4958 - DNA, 563 bp, Gossypium hirsutum
  unsure (1)..(563): unsure at all n locations; Clone ID: LIB3826-001-Q1-N6-C12
gataataacaggagtaaaattagatccgaggaaatctgaaagtaatgcaaataacctaaaaaaaaaaatgcaaggtccttacataaagcaacaattngcccgtaatgatacccgccagaatatcactcttacctcgtgcataaattgtgtaaacccaagcggatggcgtcaagccattcgtctactgattccaactagtcatcaaccaagaaaactggacccgaggtggtattccatacagagacctgcacctggtggtaaagtcagatcagtacatgctgatacagaaacaatatcgggaatatctactcttatagcccttttgttcattatctgttacatttgaagttcttccagagaggntcccggtaatttgtctcttgatcaactttgttgacttgtttaagtgcttcatgattcaaaaagaactctgttctcttcccagcaccatgaggagccattgaatttcctactggtggcgccagtaagatacccatccttaatatggcgtaaaggtcacattgaacgaacaaccctcaaggacttgctttaaaccgaataat

SEQ ID NO: 4959 - DNA, 427 bp, Gossypium hirsutum
  Clone ID: LIB3826-001-Q1-N6-C3
gaaaacagcgatctatcaataaaacctgacatgcaaaaaggtaccataaatatgaaaaagtaaaatccagaacatattctatcacttaaagcacttggcatgcaaaagaggctcttcctcaaatggctcggaggctttaatcatctgatttacccgttccttgtggactgcatctgacactgtaaccttcttccactcctagaggcccatgtcatatcactcttgcaatcacaaatatgaggaatgtcttgcccacctaaaatccataaaactttcaccttgaatggatggttagcaccaatacaccaacatgttcccaaaaacatacttgcggtccaaattcattctctgcaggaatacttcaaccttgtttattgccacaaatgaaactgtattctgctcattgtacttgtagacacaaaaccac

SEQ ID NO: 4960 - DNA, 403 bp, Gossypium hirsutum
  Clone ID: LIB3826-001-Q1-N6-C4
gggggggccaaaaaaaaagggttttgaattgccccaaataaataaggaaaaaaaatgaatttggccccccctttttccatgttccttacagaaaacacaaaaatgctttgttttcccatttgacaaacaaaagggaagggacaaagggcccacccccgggggaccggccactcaattaaaaaaaagcctgttttttatagcattatcccccatttgaagccaaaaaaaaaattcattggggaagggcttttgttattttaaaggaagggcatttgggcttcaaaccggatatgcttaaatggatacttgaagcatgcgggaggcccttttaaacatttttggaccaaactgagttaaaagatgcggagctttttttttaaaaaaaaacaggcacaaatttttt

SEQ ID NO: 4961 - DNA, 607 bp, Gossypium hirsutum
  unsure (1)..(607): unsure at all n locations; Clone ID: LIB3826-001-Q1-N6-C5
aaggaaataaaccatttccgtatggctattaaattaatatacaatataataaagtatgaccttcaaaacatttatctagtctatacatgtcatagttaaaatttaaaacattttaataccgagagagtagatagagtgatgatcttgctgacgatcctcaagcttgaagcttgatctttaaatctgattcagtatactggcttttagcctgctagacttaaagtccgaaatgtttcatcggcatccagcctgctagacatagagtctgaattgtttcaccggcatccagcttgctagacatagagtctgaattatctcactggcaataagccttctaggcactgagcttgaaatctcaattcacataagttgtatctcgtattcgaactatttatggatataaatccatacgtaaaattcagctcaaaacttataatctttctctttgaacacatggatatatatataatttgtattatcaattccagcttcataactcaatgattccaccaaacatatttatacataanccttatattttggatcctactactattatcatactattagcttataatatacttaaataatatacatttaacattcg

SEQ ID NO: 4962 - DNA, 531 bp, Gossypium hirsutum
  Clone ID: LIB3826-001-Q1-N6-C6
agtgtacaatagcaatttcaatatataaattgttcttcaatgttatataggaaacaacaatgccttacaaacaaggattatatcccattgaatgaagggacgaaattgtaaaaagagtaaatttataatcttacacataaaaaaatcataagggtattctttctttttagctcaaaaattcattagcgtctgattttcccctattctaagcacctacaactcaattaactttggtccggctaatcaaataccaattacctcggccaagtttccggttgccgaagcaccatccttttgatgaagtggaacttgtacacccaattctcgtaactgatccaccagaccataaagaaattcgaacgttagcctggactgcgcgtttagttcctctctaacctgcggttgaaccctaaaccagtctcctagcattttgtgaacgtgagaccggatcatcctccatgggacagggtatttttcacagagcttcaagtactgaacgacaagatcggcttgatctagttttccatcaat

SEQ ID NO: 4963 - DNA, 394 bp, Gossypium hirsutum
  Clone ID: LIB3826-001-Q1-N6-C7
ggggcaaagggggggcaaggggtttttctgaaaagcaaggggcaataacttcagaaattcatagcccccaaaacaaaaaaaaatggccgggaaaatcaaaggggcagttttttaaaacctccaaaaatttcaaacccaaaacaaggacttttaaaaacaactaggaaaaaaaggctaaggaacacaataacccaacggtagcggcaaagggaaaaagggttttttcttttccaggttgccccgcaaaaaggacggtttttggggggcaaaaaaccctttccaaggaaacccctgttttttttaccaacaaaaggaagtccccaaaattccctgggcttgggaaccggattgcaaaaccagttaatttttggggcattggggatagcattggggg

SEQ ID NO: 4964 - DNA, 552 bp, Gossypium hirsutum
  Clone ID: LIB3826-001-Q1-N6-C8
acaaacatacatatacagagcaaatttattgcaaagatatccgacaacatatgttttagagagacttagaagtccctgtctgggaagagaataggagcaaggagagaccacatatagagagctgcagtcacccaggctgttagaatccgtacccacacagatggccaccctacatctaaaaatcaatacctttgcaaaccatttgaaactgacctttagaatatgattaagtctaaagagagtctcctatgaagtcacgagagaagaaaagagtggaaaaaggcacgagtttgtgagcacattagagagaaaaaaagccttttaacgagtgtaaacacgagagtgagtgtcatctattctatcttttgaacgtgaggttttgttgtgaggtttttctttttctatgtctagaactcctgaatgaaatatggcgaaaagaccccaacgacaaccaattcgaaatgtagcggccagaggaggagtaccgaatttaaatatctaagccctattgcgcgaagcagaacgcctgtttgatcgaaaacttgagcctat

SEQ ID NO: 4965 - DNA, 573 bp, Gossypium hirsutum
  Clone ID: LIB3826-001-Q1-N6-C9
gaatacaaagaaaagaatttattttctattctctctatttctcattctatttggctagatatttttcaatcgttttattaagttctttcatggtatcattcaccaattgattctggtgattgcttctcatggcttccgctgattccgcatctggtgaacctagctctggtgtgtttactgccgatcgagtcacaaccgttcttcctcgacatgaagtggtcaaactcgatgaaggtacttaccttcaatagcgtaaacaggtaaaactgattgttaatggctatggactcacaggtttcttagatggcactgttgctccgccatcccgatttgttattctacccgatggttctcgtgctccaaatctggcggctcaggtgtttacacagcaagatcagctgttgatgtcctggcttttgtctacggtaacttcttctcatcaatcctcctttgatgatgcttgcacagcgtgcaacatatggagtatgactgttaatctttttgcagctgatacgggtgccaagcagtcaaagattcggcatgagcttcactcattgaagaaagtaatctttc

SEQ ID NO: 4966 - DNA, 394 bp, Gossypium hirsutum
  Clone ID: LIB3826-001-Q1-N6-D1
agatcgggtttgtgttggttttttattgttgggggggggggggggggcccggggaagggggggggggggccgggggggggccaaggggcccccggggagggggggacaagggcgggggggaaaaaaagcgaaaccggaaaggggggggaaaggggaacggagaaaaaaacaaaaaaaaaaaaaaggggggaagaaaaaagggcaaacccggggggccaaaaaaagggggggaaaaaaaaaaaaagaaaacggggggggccccggggggggaaaaaaaaaaaaaggcggggggggggcataaagaaaggccacaacgaaggaaaagggggggctgcccaatgaaaccgaagggggggttttcctgggaaaaaggggaacgggaccagggggcggg

SEQ ID NO: 4967 - DNA, 596 bp, Gossypium hirsutum
  Clone ID: LIB3826-001-Q1-N6-D10
aaaaaaaatataattcggtaatattcaagtatcaccgagaaaatcatggacgtatcactaaatcaaatgctcaacaatgatagttttacatgcataggaggctaagcaaaagtagcaccaacatgaagattatgagtacattcttttattactaactcatcaagtagttcaaaaacaggcagcaatttcctatctttgcaattcatttcaatcagaaactcccaacaatgtggttctggtttaaaccccgtttcagccaatccaaacaatgctgtaactgcatcatctaacattccagctttacaaagctgaatcaacacctcattcgatgttgcataatgtggaaaaacccccctatccaacatcagacccaacagcttcgctgccttttccatttcatctttctgccataatgcattcaatacaattctgtaacttgctttgttcaagtaaacaccttcatatggcagcttctcgagcatctgaagcgcctcatggaacctactttctctgtgctcttcatctcaacaaaaagttgtttggcttcttcccaacttccctccttgcataagccattcatcaaagcagagtagttg

SEQ ID NO: 4968 - DNA, 501 bp, Gossypium hirsutum
  unsure (1)..(501): unsure at all n locations; Clone ID: LIB3826-001-Q1-N6-D11
gaacggaactgcttaaatgcttagcaactctgaaaaataacaatatgttttagtgatttttttcatttccgaatttcttctgcaaacctaaagtaggcaactagacaacacaagttaccataactaaaaaaagggctttgggtccaaaaactatacctggctaactaatttaaaccagagttctgttaggtacatattcaccttaatatgctatgttcacaatggttcagagaattagatgaaactgataaacctctactctggtggaagaagggtcatttcgatctcttgaagtgattttcctttagtttccaacacgtttctcttcacaaaaattactgccagcaaacagaaggtggcgaaaattgcattcaggactaaatggtcctatctgttccagtaacccgcaaaacaacagaccaacaaaaaaatttaccacccaatgactanccaagcaaactgacattgccttcgcccttatccggcctggaaacatttctt

SEQ ID NO: 4969 - DNA, 335 bp, Gossypium hirsutum
  Clone ID: LIB3826-001-Q1-N6-D2
aattccttccttttttttcttttttttctattttttttttttttttgtttttttaaattttttttttattatggtaaggggggttttttttgggaaatttttattcttttaaaattccaaacaccggggaacccccaaaaaaaagggaaaaccccgggaggcaaaaaaattaccaaaaaaaaaaataaaaaaccctgagaaacaagggaaaaaagggaaaccggggaaaaatgtttacaaaaaaattcaaaaaaaaaaaaaaagggaaaaaaaaataaaaaccggggggcctaagagtaaaaaaaaaaaaaaaaggggtgacccacctcccccct

SEQ ID NO: 4970 - DNA, 518 bp, Gossypium hirsutum
  Clone ID: LIB3826-001-Q1-N6-D3
agtacaattatcctttcatttaaattttgccaatatcaaaggagtggagattttcttcaaacctaaaaccattctttcccaaaacccattctatactagctaacagtttttagcttaataatatactcgggtacaagtaatctgattttgtatagggggaattgagtttcttaagatgcatagtaattcacaataattgtaaagtacaaatacaatccacttgagaattctcaacctttgaaaaactgcagtcctacaagcatctctgtttttgtcttcctgttcaaactaaaaagcaactctgtttacttgttatttttggacttcaattcaacagcattagcctgtgcagcagcttttgcaagagttgtgggtttgaagacactcttgggattaagagcctttctaatcttaaacacagcccaagctgtcccaattgcatgtcctgccgcatcaagcccttcatttgtaacctttcctgccttttctccatacctttgtgaaacaagtcctgttgt

SEQ ID NO: 4971 - DNA, 605 bp, Gossypium hirsutum
  Clone ID: LIB3826-001-Q1-N6-D4
aagaaatcactccatggattgaatctatcaatatgcatagagttaatgtacaagaagctcggcaaacaaaatcgggtaagcgtaaattattcgttattgccatcagaactatcagtttgaactttgcagtaaataatagttggctcatactttaattcgtccgcagagacgccagtgagccccagaatgaaagagagacttctcgaatacccagatggaacggacaagaacctccttcattttatccccagcaacaacagcgcctttagaatcatatgcttcgaatttctccttagtcaggaactcgagagtaagttggatgaaagctttattaaggtcattcttatcaacaccaatcaatcgggctcgcaaagttcgtattttaacaataggttcgaccaactcccagtaaaccttactccatatagattccctttgcttaatttcattcttgagtgcagagaacatattttccgtaactgctttccgtaatgatgttttgtcaccatttgctactagagtacttatctctttgtataattctacggcttccttatagaacttctgttttgagtaccccgttttcctttacttagcaattgcat

SEQ ID NO: 4972 - DNA, 427 bp, Gossypium hirsutum
  Clone ID: LIB3826-001-Q1-N6-D5
ggggaagggggaaaaaaaaaaagggggttttttttccccaaattaaaaaaataaaaaaaggggggggggtttttttgggggcaaaattttttttttaaaaagggggggggggggcccccccaaaaaaaacccaaaaaaaaaaaaattttttgggaaaaaaaaaaaaattttttcctttttcaaaagggttttttaaaaaaaaaaaaaaaaaaaagggaaaacccggggtaaaaaaaaataaaaaatacccccccctgggggagcccctggaaaaaaaaaaaaaaaaattttttgggggccccaaacccccccccaaaaaaggaacaaaaatcccttttagggggccgcggccccaaaaaagcccctttaaaggggaaaagggggggttaaaaaaattttggggaaaaaaaggggaggaggggggggc

SEQ ID NO: 4973 - DNA, 452 bp, Gossypium hirsutum
  unsure (1)..(452): unsure at all n locations; Clone ID: LIB3826-001-Q1-N6-D8
ggtcgcgtgggtgggccgggttggggccgggggggccccccggggggggggggcccggttccgggggggggcccggtttcccgttggggggggggctaaagcggggggcggggtgaggggcataggggttcccggggggaaattgattccggccgggggcccaaaaaaaaaaggaggggggggctaaagggggaacgccgggggggcctttggggggggccaaccaaccgtattggggggggggaaacggccgggttccccgggggaaaaaatggcccaacccccgggtaaaggaaggggccaattcgcggggaaggggggtttttattttggcccccggggggggttttttttnttcgcctgaaacggccaaaaccggtttggctttaacccagggggcccctgaggtttgcccccgcgggccaaaacttgttttgcccgggggggaaaaa

SEQ ID NO: 4974 - DNA, 586 bp, Gossypium hirsutum
  Clone ID: LIB3826-001-Q1-N6-D9
ggtctataatctattattcttttatttataggaagactcaaaaaaacgttcacaaggacaagactacttaacgttaactgtcattcaacaaaaacgttgtttttctcatcaacatgcaggtaccaatagctttacaactctaaaagcgttactaccttcatgtgatgtaactagtaattgaccaaaacacacctaatcaaacaaactgaatcccatatcgtcatcactctattcctccggttcttccttcttttcctaagcaggaggtggagcatcagcaccggctcctacaccatcagcaacaggtgcaagtgcaggtactggggcaccaccaccaccagctacaacattggttatgagatcctcaatgttgcacttctaaaaaagcttatccatacaatcttggccagttggattcaacagagacatttgcagctttaactagtgttaaaatcttctcaacggtgatggcgatgccatcgtcataaagaataaaaacattgttagagcacccatctacaacgacagcggacatcgtttcactattaaacactgagagaaatcctaggatgatgggttcttgggg

SEQ ID NO: 4975 - DNA, 531 bp, Gossypium hirsutum
  Clone ID: LIB3826-001-Q1-N6-E10
gtcttcttgtttttgttttgtttgttctttataattttacttttttgtctagtctgttagccatgtgagtaagtttttttcttttcctgtgaaagcatatgggcggcaaagggcctctaactatcggaattgtgctggagggtggggaatggccatgacattcgttttgaagaagaagtttaggtcccaaatgtgccaagtcttttcggaagttgatgttccaaagattctgcaaatacctttggcccagcgtggacaaaatgaacttttgatatggaggggtgaagcatcgggtaaatatactgggcgtagtggttacaaactactattacaaggcaatgattacaatattaatggttacagcccgcccgaaattacaaaatgttacaagaaactgtggaactgtaatctcccctcaaaggtactttttacagtttggagagccactcttaactacctccctaccctcgtgaatttaagaatgaaaagattaacgaataacgccatctgcccgagatgtaagcaagggct

SEQ ID NO: 4976 - DNA, 554 bp, Gossypium hirsutum
  Clone ID: LIB3826-001-Q1-N6-E11
ggcaacaaaacaagcacgggtttcaacttattttaaggcttaaagcataagccgaagagaacatcggtaattatttacatacaaactcatcatgctgaagtagtatcagcatgtttaggtatatgcaaaagccagcagtctcactggcgctaggataagaaaactgcataccaagtatgaagctttggttgcatagtattttcttaaaccgaaaatgcgactatgaactagcaccaaaaacacgaatcctctgttcaatcggcacctgacagcatggacaagtagctttacccttcttcccataactgtcattgcaattagcacatagaacctggtgcgcacaaggcaggaatacaatagagacttcatcttttgaacatattatgcatttctttattaccgttaacttctttctcagaagaattctctagcttatctaattcattaatgaacttagcaattgtttctcccttggggttttgtaccctttctgacttttctgggagtaaattatcggcctgatgatttaactcattttattgagcaaatagttt

SEQ ID NO: 4977 - DNA, 582 bp, Gossypium hirsutum
  Clone ID: LIB3826-001-Q1-N6-E12
aagataaaagattttgaactcaaaaccaaaacaaaatacaaaggcacccaaacatctgcaaaacattctggctctgctctgctacggtgatcacatgcggtggcaagtttctactgtgatctaaccctgtgattcaacatcatctcccggagatccgccgcatcgatctcagccccacagttctccggccggtaataccccgtaacagggtcaggcgcccaagctgaagaataagcccttgtctccgacgacgacgactctttcatcgcatatcttcgttccactttccccatcgctccaggcctaccaaagctagccgtcactgccgccggcggtgcaccttgatatggagacataaagagcatcaaaaacagaagcaccaaggaacttaaaggaagaaacagagcgagccatatttatttttacttgcttatatatggagtcgtagggtaaaaaggatgtataaaatttatataatatataacgttattattagctactgcagaagctgttctgaagaaaataactcccacagtagcttagctagcaaaaatgatgcggctctgcttttcttgttttccc

SEQ ID NO: 4978 - DNA, 488 bp, Gossypium hirsutum
  Clone ID: LIB3826-001-Q1-N6-E2
ggcgacaatactgtgatatatacagctaaaagtggctatagatggctcattacagatgggggtacaagattaaataatgaaatccctactactttctttacaaggctttgggagctcaaaattccaagcaaaatacgaatttttctatggagaattgctaatgactttctacctactctacataatctaaaagcccgaaatttggttgtcaacacttggtgtccgatgtgtcaaactgaagaggaatcggcggatcacctttttagacgttgcttattcacgcagcaagtcttgcggggtttgggaatggcagtcccaaccatgggaaaatattgcagatccagtgatggctgaggcgagggcgtgtctgcaagccgttattttggctgaagatatggggttccaggaagtttgcattgaaggggatgcgttaaccataatacgtaaactgaactctagggaggccaacaaagcggctcatacgatgg

SEQ ID NO: 4979 - DNA, 536 bp, Gossypium hirsutum
  Clone ID: LIB3826-001-Q1-N6-E3
aaacatgcccagttcttacatataaactggtttagtcctcatttaaaacactaaaacaaacagtaaaaaactaagctccagcttagattacagacaccaagctaagctttaaacatgtccagtttttacatgtaaactggtttagtcctaataacactaaaacaaaccgtcaacagggctatagcttagattacagacaccaagctaaagcttaaacatgtccagcgttttgttacatataaactggttcagttcttcctaaaacctaaaacaaacatacattattagggtttatatataaaaagagtagctagggttctgtcgtgggagatgatatttagtttttggttctgaacttggattcatcgatggtgacaccttcatcagctgcacgttcaccgccagacatatcagagttgctcagaccacctttgcgtcccatttcttggtacccttctgttcctagttgttgcttccttgtttcccctcctttgtgcctcccttcagctaggttaatttgagcatccaagcttttc

SEQ ID NO: 4980 - DNA, 517 bp, Gossypium hirsutum
  Clone ID: LIB3826-001-Q1-N6-E4
cagttacagcaccaacagttttcattaccaactgtactgtttaatgacacataggaaccactcaacacataggaaccactcaacacaggagagggtgaagagagttcaattcaatccattttcctatctgtgggtcgagacttatttggtggtgtattagatttaccacgcttatcctccgacatcttttgatgaaactcctcagtttccctaaaatacctctcaaatgctcgagggaggaaccgcgggatcaaaaagcataacaggttgattgcgaaatacattagatttgcagctgacagccccttcccgaaccaatcccatgctatgtccttcgatggtgcattataaggcagagttttgttcacccaagtatcatgcacccaatcaagtataacgaacaccctcctaactgtatatagcaatggcaccaatgctctcaccggcggcgaaaacaatgacagcccacttattacattctccgttagtatagattaaacagtctgctgcctcggaa

SEQ ID NO: 4981 - DNA, 460 bp, Gossypium hirsutum
  Clone ID: LIB3826-001-Q1-N6-E5
gggggcccgggggccgccccggaaattcggggccggggccggggggggacccactttcccatttgggggggggataaaaagcgggggcaaaaaaaggaaaaagcggttcccgggggaaaaaggttaaccgctaaaaatgccaaaaaaaaaaagggccggaaaaaaaaagggaaaacccggggggccctaaggggggggcaaaccaaaataaatgggggggggctaattgcccgttttccaaagggaaaacctggggggccacctgtataaaaaaaaacgccaacccccggggaaagggggtttccttatagggccccaggggggttttttttttgcccagggaaaagggaaaaaagtggttgcccttaacccccgggccctgaaaaaatacaaaaaggggcccaccctggtttgcccaaaagggaaaaacctgttgggggggggtaaacggggggaaaaa

SEQ ID NO: 4982 - DNA, 598 bp, Gossypium hirsutum
  Clone ID: LIB3826-001-Q1-N6-E7
gaagcatccatttcggttctcagcattttccagtgaagtccttaagtaaaacaggtaaatcagaatgaagtatggacctcttaatatgaaacacaaaaaatttcgagaacctaaactacctgctgctactaactttgcatatcaaatctgccatatagtgagccaactagaacaaaagcctccattcgtagatgccgcgcatgatgcatattgtttgacatataaataagagtagttctgcactacataaaaacttactagacataccttactaactagacattccagattcatttggaacacattctggagtacctgctgaaacctttaggttgcaaagctctttgagaagtttaacttcattctctgcgttagtcaatttgtcactcagaagagaaactgcatccttgtgtgcatcgaatttccttatccacccagcttcaaaatcctttatcttattctcaattaacagtctattaagcctgtcctcttcttcttgtttcagacgcagcttttctatttccctggtgctcagtactaagcccccagacccagtgacatctttgtaaagtggttcatccggcagggaacaacgtgc

SEQ ID NO: 4983 - DNA, 566 bp, Gossypium hirsutum
  unsure (1)..(566): unsure at all n locations; Clone ID: LIB3826-001-Q1-N6-E8
gaacatcgaagttgacgattcataatagcgtccaaagacaaacttaaaatattaaaacaaagatctaatagcagtaacccatgaaagttcgaaaaccacatagctaataataatcccaaataagcttccacacacattatttaaagccaaaaaaggccaccaacaacggcaaacaatccttacttagaaaccaccgcgaaggcgaaggacaagatgcagagtagactccttttggatattataatcagccaatgtcctgccatcttcaagttgcttgccagcaaatatgagcctttgctggtctggtgggatcccttccttgtcttgaatctttgccttaacattgtcaatggtgtctgaactttcaacctctagagtgatagtctttccagtaagagtcttaacaaagatctgcatcccaccacgcagccgcaacaccaagtgaagggtagactccttttggatattgnagtcggccaatgtcctaccatcttcgagctgcttgccagcaaagatgagcctttgctggtctggggggataccctccttgtcttggatctttgcct

SEQ ID NO: 4984 - DNA, 574 bp, Gossypium hirsutum
  Clone ID: LIB3826-001-Q1-N6-E9
gcacagaaaaattctgcctgaaacgattaaagacctaaaagcaaatccatgaaggttttatgtgcgtaacgcacacaataggccaaaattgggttaaacaaagaccacatgaaaattcatcgacccacagattgccaaggaacggaacaattagtagtactcaaaaactattattgatggtactgcacatcctccgatgactcatggcagtttggactgctattcacaggaatgaatctaagcatatcttattttctttccaacgatgacatgttctcgtagctccagtgattgaatagtaatcacttagctgcatcatcaggattagaggcctgaggaacattactcgaagatgatcctttacctgttgggaggtaagaccaagccaaggctgctgtcccaagggtaattgcagtggcaattgaaccccatatccatctctgacttcttttcttcctttgtctctctcgccgtgccatctctacagcctcctggttcctctgagacatttcctgattaacagcctcatagtagtgtagtcggtccaacaatcgggcgatttcaaagttttttg

SEQ ID NO: 4985 - DNA, 303 bp, Gossypium hirsutum
  Clone ID: LIB3826-001-Q1-N6-F1
aaaccaaacgatttaagagacaaaactatacattattgtacctttcaaaaaaacgatgagagctgaacctgaataaaaactataaataaagataacaaagacatgagaaaagacaaaatatccctaaatctactaaatatcagctcagccccatgaatgtttattgatttttgcttgtaggttctttgttgggagattaaagcatatatcccccttgctggtttaaccgcaaaagattcatgctttaattcccactctggtcatccatgtaaataccaatttccttcggaacccacgcgtccg

SEQ ID NO: 4986 - DNA, 584 bp, Gossypium hirsutum
  unsure (1)..(584): unsure at all n locations; Clone ID: LIB3826-001-Q1-N6-F10
agcaagaaatgaaaagatttttattttttatttctttcttttgactaagttgcaaaagaaaaaaaatctcaaatgactatgaaattaatgtggtaaatcttaaaaataatgttgtagttcatattagtgccttcaacaatttacaacatcaacaaacagctaatgaaaagttgatcccttacgacttttatctctgtttcatcataaactgcttatattattcattcggatccgtctaaccttctcaacaggtactccacttggacttccttcgtcaatggcatgatccagtccccgtacaagtcggctaccaagcttgggtttattttgtaaaccggatcaccatccttcatgttcatattatccggcactacttgtccgtaacttctagctttcatttctactcttttcttgatcgattcttccacagacggatatgtgagcaacttcatcagccaatccctgtcctgttctcttattgcagctcgataagcatccggatatgcctggtatttaacttctgccacaaattntccgtaatgcattctcttcgaaagagcctgcaaacacacagtgtcacaaac

SEQ ID NO: 4987 - DNA, 541 bp, Gossypium hirsutum
  Clone ID: LIB3826-001-Q1-N6-F2
aatgtcaaaaataacattaacacgacagaaatacatgaatacatcaaaatcttcacaaaattcaaatgactgccctgtaaaatgacaaaactaacctctccagttttggttaaacctatccattgcaatgaaatgaagtaaagactgaccacaataaatggagaaatgttattacaagaaaaaatataaataaaatctcactaaaaaccttgacgccatccacattagtagggcttaatgcagtaaatgggaacaaaggtacaaatggcgtcattaaaaaatgcatgactccttaaggctgcttagtttggtcttgcggcctgctctgctgttttctcaagcagcagtttccgatgcttgaccatgctgttcctcaatcaatgattgaactctcttcacagaactcccaacctcctctagtttctgtagtaaagcaagatcccctgaaggaggaacaacatcatgcttacgtggagaatgccaagcagatggtgaaagaatctttgaatttggagcatcttcaattgcagaaacttgtcgg

SEQ ID NO: 4988 - DNA, 568 bp, Gossypium hirsutum
  unsure (1)..(568): unsure at all n locations; Clone ID: LIB3826-001-Q1-N6-F3
aaggaaaattataattgttaaaatttgaatcctgaatttaaagacgatgacatgaacttagtaaagcatctcacaaataagtatacataaaaggttatagtaattaagacgattgtcttcaaaggaaaaaaagaagaaaaaaaaaaacaaaaacaaaacaggttcataggcactccaagccttggatctcctttgttctaatgacttggttttcaaacacactattcgtactagaacgatgaagaagacacgggtatggtacttttttttttttttttggctttttacatatgatgataacatatatgatgatacaaatgaaaatggcgtggcaaaagaaacctgggaaaggtagctaagcatgcagcgccatgaataaattctgcttacgagcatgttccggaataagtttcttcacaacgtcaggggggacacccgagagctcttgaggcttaaaattgaagaaggggtggaagtggacggccatttggaagtcgagtgtttgggtccctcaattcatcaaagaatgggtgaatgcaagcctncaaagcagtgcatcgcaaattgg

SEQ ID NO: 4989 - DNA, 379 bp, Gossypium hirsutum
  Clone ID: LIB3826-001-Q1-N6-F4
ggggggggggggggggcccggggttttcgggggggggcccggggggggcccccatttttttttgggggggggtaaaaaggggggggggaaagggggggcaaacgccttttggggggaaaaatttttccccccccattccccccaaaaaaactgggggggaaaaaaaaaaaaaaaaccggggggggcccgggggggggcccccccccatttggggggggggggggccccccccttttccagggggaaaaaccccgggggcccgccctttaaaaaaaggccccccccggggggggggggggggttctttttggggcccccggggggttttttttttccccgggggggggggcaacgggggtttccccctcccccccccccc

SEQ ID NO: 4990 - DNA, 545 bp, Gossypium hirsutum
  Clone ID: LIB3826-001-Q1-N6-F5
aaataaactggttaatgtgaagtttgccacacataaacaaacctttgttcatatctatatgtctatatctatatttggtatagagaacacaaatctccccatcccaaagctcttgaagagactcgacaggaccatcatccgatccaaatgccagtgctggatatactttgcactgcgtggagttggcttattttaagcaactcatcattactgagcccccaatcaaagatgtcaaggttttgctacatcctttccttgctgaagctcttaagtatcacacacactccttgctcacatgcccatctgaagcaaacctgaacaactgattgttccttggcttgggcaattcttttgagtacatcacactccatcacctgatccgatccccaccatctcctttggcacccaaaggagaataagcctccacaactatgcctttctcctcacaaaacttcctgagcttcttttgatgccacattgggctgatctccacttggttcactgctggtgggattctggcactggaaaggtaggcttctagtttc

SEQ ID NO: 4991 - DNA, 443 bp, Gossypium hirsutum
  unsure (1)..(443): unsure at all n locations; Clone ID: LIB3826-001-Q1-N6-F6
gaaaaaaaaaacttcattccatttttatgattttaagagaacagtaacaacatcgatcaaaaaagagagaacccaaaccaaacagtaatagagaaacttaaaattactaactactaaacccaaaccaaacccataacaatataggcccaagcccactttgaaacctaaacttaagacctccagctgccttcagatgcaccgccgccttttgagtaacgagatccgccgtcaccatatcctccttcacggggtccacctccgtacccaccaccaccattatcaccaccgccatcatcaccggggaggaggaagaaagggntganacanaggagccggagggcgggttcatggagaagttccgcaagtttttttttcatttttgaatatcccctgcacgttttttaaactggttcttggggtctcgtgggggctctctctttttg

SEQ ID NO: 4992 - DNA, 291 bp, Gossypium hirsutum
  Clone ID: LIB3826-001-Q1-N6-F9
cgaacatgcatacatgcattgatttcattaacaaaaattccgcaaaaactatcaaagatgttaccatccatggcttcaaatcttcaacctcaaggaatatgcaccttatccaatccatgaacagtcatctccgacttcgaaaaaaaaacaaaaacaaaacagatgtaccaacaaaacatcaaaaacacaacgtgaatgaacagcaagaatgtccgagttaaagatacaagggttacataaacatgcatgcaacaacagcagggttagtttttactagggttacacagggag

SEQ ID NO: 4993 - DNA, 563 bp, Gossypium hirsutum
  unsure (1)..(563): unsure at all n locations; Clone ID: LIB3826-001-Q1-N6-G1
aaagcagacgactatagacaattagattgatctaaaattcataccatatgacatggtaagaaataaacaaaaggtaaatgttaaggaaacctgtacaagtaaaactctgattatcattacttgaagcaaggcaggctgacgactctcattcccttccacaaaataaagctcatttcgatctgaacctgatccctccattgaccttgtagtttacgccatcctccccaataatctttttatataactagatatctgataaaattcaatcttgggggcacaccatcagacctgctgcagaaccaaaaacaaatatgtatctgcagcataccaagcgtcattgatcaaaagtctggtttaatatcatttcctgatcgcagatagggcaggagtcacttctttccatccactccaaaatgcatgagagatgaaaatggtgttcacatttagtgataagttttggaatctctgtgccatactcttcaagacaataggacaagcatcctcttcttctgccattgattncttagactcggttaattttgagacttctgatttccttggcg

SEQ ID NO: 4994 - DNA, 483 bp, Gossypium hirsutum
  Clone ID: LIB3826-001-Q1-N6-G10
cgggcgcgtgggtccggcccggggggccggcccggggcctgccggcccgccccctgccggggtaccgggtttccctagaggggggcgtattgagggggggggcagccgcggggatgaaagggtcctgggggaaaaagtccacacaccaaacggccccgaaacataaaagcccaagccgggggggccaaaggagggggcccccaaaaagggagggaactgaaataaatggccgtttgccaacgggcaaacctgccgggcggaaacctgtaatgaaacggccaacaaggaaagagagaccgcccggggaagggccgccagggtgtttttcccccgggcgggtgtgcctgccaccagttaaacggccaaaaccggctggccctaaaagggttgcccctggggagacccgctggtgcgccccacccgggaaaacccccggcggcgagaaaccaacgggggggtataaaacgggcgggattaacgtgg

SEQ ID NO: 4995 - DNA, 533 bp, Gossypium hirsutum
  unsure (1)..(533): unsure at all n locations; Clone ID: LIB3826-001-Q1-N6-G11
ccatcaagaagaaactttcagcctcggattactgacaaccattgagatgttcataataattcttcctgttaaaaagaaacaaattcggttctgcgatttaataccaacaaccgctaaaagaaatcaaactcgagataattgtctgaacctttctgattataagcagctgcattgacagcaaccttttcacttgttgatgccggtgaagctggaactcgttcaagctcgactggctttggaatctcgggtggagtagcacaacgaattcaatgcccaatttcacacccttcgaagaaaggatgttgtttaatctcggttgcacctcgcttttaagccaatcttatgtngtggttcctttacaagtagaccctcgtatgaggtcccttgctggaaaactcacaatgggggattctggaaaccgagaaggttgcctacgacattgaacaatggtggttcggttccccgtatcccttgaaagggattttaccaaacaagagtttataggaggaagattcacaaggcccaccaatcaa

SEQ ID NO: 4996 - DNA, 495 bp, Gossypium hirsutum
  Clone ID: LIB3826-001-Q1-N6-G12
agaaaccacaacatagggttcccttactaattatgttagatttcgaagggaaaaaggacattcatgcctttcggtccaaggagtgcctccaaccaaatcagcaagcttgttaacaccagtctacaacaacatgaagtaagctagagcaaacatacaaaggctttgaagttcagttgaatacttaaccagttaggcaactttttagcatttgaaacacaaactaacttggaatttctttatgggtgacccatccttattgaaatgtagcttttttgctgtaaaaatcttgggcaaatgaaatcttttaaaaacaccatttcgtttaataagaaatgaagatgaaaaaatggatgctaaagatgacaatctgttggaagaagatgaaagctttttatccatgaccaaaacatttgatgcaacgaatgagccaactaatgacatggctgggaaagtggatgccatcttactctcttaaaaaactgaactttgcttcat

SEQ ID NO: 4997 - DNA, 445 bp, Gossypium hirsutum
  Clone ID: LIB3826-001-Q1-N6-G2
aatccaaattggttaccgaagtttcaaaaccaaacattttaaaccaccaccggtaacaaaacctaaaaaaacccaacaaccttaaaaactgaaaaacctcaacaccaccaaccactgaacgggccccggggacgacccgggaaaaccggacccgaaccagaaggcccaccaagcttgcctaaaacgaggacaaagaaaactcgggggaaaaaagggcaaaaggggaaaatgggggaaattggaaaacccggaaaaatacacaaaaaaaacaaaccggaagaaaaaaggggaaaacccggagagcccaaagagcgaacaaacccacattaaaaggggggaacccactggccccattccaaggaggaaacccggcaaaccacggggaaaaaaaaaacggccaaagcgccgggagaggggggttgggcaaagggggcaaagggggaac

SEQ ID NO: 4998 - DNA, 443 bp, Gossypium hirsutum
  Clone ID: LIB3826-001-Q1-N6-G3
agataaaattattcaatatgtatattgttcatcaaagcttattcaacttggttctcctacatttcgttcatcaacaatcttaaaccatataacacttgttagcccttgttcccttactgaaaatcctgatttttctgattctgttgcagcgaaaatccaattttgccagcttaaaatgctcaatgatgaaatgaagctgctctgtgtgacaaataattgacaccctttatatattcaactttcaagcaagttctccctcttccaatcctgtcattgtgtcatacaatggcttgtttaatgtctctggtaagtaagatgcaagcattcctccaatcaatccacataccccaaacaccagaaatggaaaaccaccacccaaaatcaccacaaatggtgccaatatagctcccatttgggctgcttgagttgcagatccaagtgct

SEQ ID NO: 4999 - DNA, 552 bp, Gossypium hirsutum
  Clone ID: LIB3826-001-Q1-N6-G4
ggagaataatgagccattgttattcaggggcagaatttcaactacaaacgcctatcacgaactttctattggacaatgttggcacatattacatctttctgtacatacattaaacttatactacttttatgtgattctctctcctttcttttgtaccaactgtaggtccaatttcggttctttgctactcatttcccctatagagagttcccaccaataactcaaggttcttccatggacatcaaaatcatcctgttcaagtcaacataatcccacatgcagaggtgctgggtaatgccaaccataatttcaatgccatgaatgactcaagcaacaatgttgcacctccaactctaacattataggataagcatgagagtcagtacccatatcgatcattcaacgttgttctcccattaccggattgcccttcaggaggaacccacgtttcgtactctggatctggattgctatcaagaaatgaaggcttttcaggaccaagcactcggttcaactttttctctttcttcttagattgaattctggccgaca

SEQ ID NO: 5000 - DNA, 135 bp, Gossypium hirsutum
  Clone ID: LIB3826-001-Q1-N6-G5
gcttaaatattttttataattcttttctcctgctaatgtttttggtcgcaggcaaggattacatattaaatgtatttttcttacatttctagcaaaacataagaaataaaactggggaggaaggcaaaaccccca

SEQ ID NO: 5001 - DNA, 470 bp, Gossypium hirsutum
  Clone ID: LIB3826-001-Q1-N6-G6
aatgattcgtgcataaaatgacaaatttaagagggcatttagtacatcgaaggaaaagaagatgtaacataaggcctttgcatctgataaaaaacgcttaatggaagtccttgcaaaggagtttctacagaataattcagggatgattcaacactgattagggttgccattttcttcaggaaaaaaattattaaatagcagcaatagaagggaaaatcaatgcttgtttgatcggggagacattaattccgaaatatcaggaagggggaggccctttatctgcatctgcttatacaaccattgccaattctcaggggttacctcacccccaagtgaacaaatcactgcaccaccactacatgagcccactttgcaacattcctctagggataatcccttgaccaatccctataaaaaaccaccagcgaagagggccccagctcctgtggcatcaaccgcttttgtctccc

SEQ ID NO: 5002 - DNA, 490 bp, Gossypium hirsutum
  Clone ID: LIB3826-001-Q1-N6-G9
ccaaaaccagtttttatattttaattttccgttgaatttgaccgcaaactgactttaatttttcaaaaaaaattttgttcaataatagctgtgaacattaatgttctcaaaacccttgattattaaataataaaataaaataaaaaagcaccacaatccagtctccagctccaaacatccttttaagcaacatggttcaaagatggattataaggaaggaattaagcaccaattgtccgcccaccgccatctccataggacccatcatcttaatggtggtgatacggtgaaaggctaaaataataatacgtcaatatcaagtacaccatcctacaatgatccctaactctccccacataaaccagactttggacttcacttaacatcgcacacaaaaaaagccaactaagtgcaaaatgtggatcaccatcaaaagcaattacaaaacttacaagcacttcctgtggacaatggatggaccggattcatc

SEQ ID NO: 5003 - DNA, 562 bp, Gossypium hirsutum
  Clone ID: LIB3826-001-Q1-N6-H1
gattcacatttgtttttattaccagtgaattgagtgttccttccagtgcagagtcagtccaagcgcatctgctttatttgtttggatttgatatttacatgtgatccataaaattaaaatttaaaaatgctgaagagaaaagccatcaattttgtacaaaatgaaactcagtctgttgctttcttctattcaaattccaactcagttctgaggtgaacaagaagactgcatcgcttctgctgatgctttgcaaatagggcaccaattcttcacctgcagccactgccgtatgcacccaacatggtacctatgttcacacagcaacctccctacttcatctccaacaacatactcttcctggcatatactgcatttcacatcatccttttcaacctcacagctgacctttgcaacatcctccatagatattgcctcgtagatgctttttttaaggcattttgacattgcttcttcggatagtgcagtgctcacattacccatcctctcttctagagctagtaattcctcgtatgacatattgtctatatccaatctcatgtct

SEQ ID NO: 5004 - DNA, 515 bp, Gossypium hirsutum
  Clone ID: LIB3826-001-Q1-N6-H10
gaaaacgaaaagaaatgaccaggaatttatttgaatacagagagctgcttacaagttacaatttacaaccacatagagcagcacaagggcataagcttagaagcagaacagagcaacaaaattgatagattactttctagcatatcagccgactgctacaataggaaacttcaacccacagtcttgtttccacctttttgggtcttactcttgccacctttttgggtcttactcttgccacctttttgggtcttactcttgccaccttcctgttttttgcctccctaaaagatccttcctcctccttggctcctattctggatcttttgctccatactcactgccgggtccggcaagggccacttcactgggtctagcccctgaaaataaagcccctgcttccacgaatataagtagcaatccacgacagcgatgacagtccagtgatcccaaatgctccggaggtcaagaatccggctatggaacccgcaatgagaaaagcagcaggtaccaaa

SEQ ID NO: 5005 - DNA, 99 bp, Gossypium hirsutum
  unsure (1)..(99): unsure at all n locations; Clone ID: LIB3826-001-Q1-N6-H12
aaaaaaaaaaaaaanagaagggnngannaaanaaaaaagaaacccaaaaaaaaaaaaaaaacccaaagagggggaggggggtgtttttttttttttttt

SEQ ID NO: 5006 - DNA, 495 bp, Gossypium hirsutum
  Clone ID: LIB3826-001-Q1-N6-H2
aagggaatgcaaatgtactgagtgttcctcacccttcactcaactgctccattgaatttgttttttttttgtgttttccacacagaagaagcaaaacaaaggaagaatacaaaattgggtacaatgttgaaagagttaccttctttgtctactattctctccgcttatgcttctatttcaaccatggctatgttaatccgaaccatcttaaatgaaatgctccctgaaaggatgacaaactacatcttctctatgatttacgactttacttctgcttacttctcatccgactttaccttcataatcgaaaaccgatggcacgctggcgataaccaattgtttcgagctgcggagatctacttgcccaccataattggaccctccagcgatagccttctcgtaggtttcgatgagtccagtgatcccaccacaccaccaaaacgtagcatccctgttgattgcaggatcaaggatgattttgatcccacgcgtccg

SEQ ID NO: 5007 - DNA, 408 bp, Gossypium hirsutum
  Clone ID: LIB3826-001-Q1-N6-H3
aaaaattaagttttaaaaaaaggaacgttggggaaaaacaggggggggcgaaagggggggggtgaaaaaaaaaaaaaaaaaaaaaaaaaaaagggaaagggaaagaggggggggaggagagggagggagggggggggaaaggaaggagggggggcaaaggggggggggggaaggggggaggggggggggacggaaggggggggaaagggaaagggaaagaaggggaacctgtgggggggggaccttgaacgggggggggaaacccatcaacgggggggccaaccccaaagaaggtggacctaaaccccggggggcgggaaagcgctaccgcgggggcgggcccatgagggggggggggattaaaggcctggggaaatggtacttggggccaggcaattgttccccccc

SEQ ID NO: 5008 - DNA, 260 bp, Gossypium hirsutum
  Clone ID: LIB3826-001-Q1-N6-H4
gctccaagggggctaaggggttactggcaaaataaaaccgggcgaaagcggaggcccggggggggggggccaaaggtcttcggaggcccctgggggggaaatgttcggggggggaaaaaccccccccggcccggggggttttcaaccggagtaaattgtttaggtttaacacagccctaattttgggggcgcccgtcaaccgggccgcttgggggggggggctttaaaaaggtggggggggtttttgacttttttttttt

SEQ ID NO: 5009 - DNA, 88 bp, Gossypium hirsutum
  Clone ID: LIB3826-001-Q1-N6-H5
tttttttttttttttttttctcataacttgtcccaagtttaaattgcttgggaaaattcaaaatattggttgatctttacgtttattt

SEQ ID NO: 5010 - DNA, 489 bp, Gossypium hirsutum
  Clone ID: LIB3826-001-Q1-N6-H6
cgtgggggggggggggggtccggggtttctgggccggtccctccgggggtccgggggggggggggggggcgcgggacgggggccggggggccggcggggcttcccggtttccgggggggggggggtttgggggcacaagggcccaaggggtacaggggggaagcgggggagttggtcccggggggcctaacgagcgagcgggcggccttaaatggaaaggcgggggcggccggggggccagcggggaaacctgtcgggcctgggggcttggggcctcggcccacccggggagggggggagcctgggtgtcgggcggcaggggggaatcccccttgaccggggggggggggaatgggggatgggggggctcggggtgtccccggtggagcggggaaaaggggtccagcctggtccgccccaccccgcgaaaattcggaatgggggggcaggcgggccggcctcaccgggcgaaaacgcgggtttgggggg

SEQ ID NO: 5011 - DNA, 326 bp, Gossypium hirsutum
  Clone ID: LIB3826-002-Q1-K6-A1
gcaacaactatcacaaggtccctggttggcgaggtcccaagttaccctctcacggccaccgtttcctgttcaggctatttgctttggatgatgagttgaatgttggcaacaaagtgacgaaggagaaggttcttgaagctatcgaaggacatgtggtcggggaagcagaattgacgactaagttttaagagaaagttgttgtattagtattttagtactttgttgaacatcgattaatgaaaatttagggaactttggctttttcaatcttcttattttgctcaaagttgaaagcataagtaattttcctcgcaagccttggaatg

SEQ ID NO: 5012 - DNA, 802 bp, Gossypium hirsutum
  Clone ID: LIB3826-002-Q1-K6-A12
caaatataccctgaaaaccctttcactaaatattgaagatgcagtcaatgaaggatgctgctgcctctgctaaggccggcatggagaaggccaaggcctccatgcaggaaaaggtggaccaaatgaagacaagagaccctaatgagaaagagatggcgagggaaaggaaagaagagagacaagaagatgcagagctgaggaaacaagaggcccgccatcataacgccacagctggccatgctggtggtggtggtattggtggcactggctacaccacagctgggtacaacataggcgacactggtggctatggcggtaccggtggacatgacaaccgtgggtaccccaccgcaggtagtgggtatgatacaggcaggcaagatgacctcagcagtatggggtttggcggagatacagagggtgcttacggtacaacggggaaccaagacttcccaaatgcggcgtctaacaatgctgggactagaaggaacacccgcggaggtacccaggatgatccttattatcgatcctattaaatgaaaggagcgagtttttgtgctctgctactgccttgagtctgtgtttgttgtttgtttgcttctacttttttctttttcaagatcgtactgttgtaccatataaaaagaagtttggtcctgttgtaatgttatagggttagccagggcagttcataaataataaaagttgggaaaattagagaaaataagaatgtgtcatcagtaaaaccttttatttaagacatctgggagaaaagacgaacactatctcggactatacctat

SEQ ID NO: 5013 - DNA, 351 bp, Gossypium hirsutum
  unsure (1)..(351): unsure at all n locations; Clone ID: LIB3826-002-Q1-K6-A2
ctcagtttttcaaaaagaggtagaacaacaacagcctccgtctcatttgttgatccaaatgacgaaaaatctaattccggggaacatggtccaaagccttccgaggtttatggctttgttggttccattacaacagttgttgctacagctatttacttagcatgggcatatattcctgaaccttggttacattcaatncggatcttctattatcctagcagatattgggctttggcagttccaagttatgctatggtaataatagtattagctgntatattntatatcgggctcaacttcatgtcaccccaccaccaacttcattaaaccacatgtttgatgaatttagta

SEQ ID NO: 5014 - DNA, 492 bp, Gossypium hirsutum
  unsure (1)..(492): unsure at all n locations; Clone ID: LIB3826-002-Q1-K6-A3
acctaatggaagatgctgcgacagccgagatcagtagggttcaaatctggcagtggttgaaatatggtgttgaattagacggtgatggacttggggttcgagtgaaccatgtgttcgggcgagtggttgaagaagaaatggctcggatcgaacgtgaggtcggaaaagagaagtttaagaaaggaatgtataaagaagcatgcaagatttttactcgccaatgcactgcttcaactttggatgagtttttgacacttgatgcttataattacattgtcattcatcatccaaaggatgtttcttctaagctttgatgaagcttccatgaaatcttagaactatggggtttgagtgaaaaaaaaaaaactaaaaagataatataagaaggaaatgaacagnccattnaacccatatttgatcttgggatcgaccaggttaacgttctcatgttcgatgatgctaaatgattcatccactctgggtgtccattta

SEQ ID NO: 5015 - DNA, 523 bp, Gossypium hirsutum
  Clone ID: LIB3826-002-Q1-K6-A4
ctgagccactctcacattactttttgtgtgttctctttgtctccccaatttcttaccttcctaacatcaaccttagatcttttcttttttcctcattaattcgcttccatggcttcaaccatatcttaggggttctcttgattgctgtttctttttaagttaagaaaaaaagaagaaaaaaagctgaagttttcagtgtcatctcttaaacgttaacaatggcaaccaagaaccctttcgatctcttggatgatgatactgaagacccaagtttgcttattgctgctgttgagcagcaaaagcttgaaaagcctaagaaagctcctgcttcgactccagctgcggctcagcctgctaagtctgccaagcttcccaccaagccactacctccttctcaagctgtgagagaggctaagaatgagcttggacgcggaggtggccgtggtagtggaagaggccgtggccgtggaggcagtgggttcaaccgtgattccagagtcagcgataactccaatgggtattc

SEQ ID NO: 5016 - DNA, 562 bp, Gossypium hirsutum
  Clone ID: LIB3826-002-Q1-K6-A5
acaaattaccctgaaaaccctttcactaaatattgaagatgcagtcaatgaaggatgctgctgcctctgctaaggccggcatggagaaggccaaggcctccatgcaggaaaaggtggaccaaatgaagacaagagaccctaatgagaaagagatggcgagggaaaggaaagaagagagacaagaagatgcagagctgaggaaacaagaggcccgccatcataacgccacagctggccatgctggtggtggtggtattggtggcactggctacaccacagctgggtacaacataggcgacactggtggctatggcggtaccggtggacatgacaaccgtgggtaccccaccgcaggtagtgggtatgatacaggcaggcaagatgacctcagcagtatggggtttggcggagatacagagggtgcttacggtacaacggggaaccaagacttcccaaatgcggcgtctaacaatgctgggactagaaggaacacccggggaggtacccaggatgatccttattatcgatcctattaaatgaaaggagcgaatttttgtgctct

SEQ ID NO: 5017 - DNA, 138 bp, Gossypium hirsutum
  Clone ID: LIB3826-002-Q1-K6-A6
gtgaacgtctgtcagtttgttgattggatattgtttttcatttgagaagcctaggccacatctgactggttgaagttgaattttctttaatttactatcacattttgtttacttcgatgagctggtttgcaatgtttg

SEQ ID NO: 5018 - DNA, 614 bp, Gossypium hirsutum
  unsure (1)..(614): unsure at all n locations; Clone ID: LIB3826-002-Q1-K6-A7
caaatataccctgaaaaccctttcactaaatattgaagatgcagtcaatgaaggatgctgctgcctctgctaaggccggcatggagaaggccaaggcctccatgcaggaaaaggtggaccaaatgaagacaagagaccctaatgagaaagagatggcgagggaaaggaaagaagagagacaagaagatgcagagctgaggaaacaagaggcccgccatcataacgccacagctggccatgctggtggtggtggtattggtggcactggctacaccacagctgggtacaacataggcgacactggtggctatggcggtaccggtggacatgacaaccgtgggtaccccactgcaggtagtgggtatgatacaggcaggcaagatgacctcagcagtatggggtttggcggagatacagagggtgcttacggtacaacggggaaccaagacttcccaaatgcggcgtctaacaatgctgggactagaaggaacacccgcggaggtacccaggatgatccttattatcgatcctattaaatgaaaggagcgagtttttgtgctctgctactgncttgagtctgngtttggtggttggttgcttctacttttttcttt

SEQ ID NO: 5019 - DNA, 440 bp, Gossypium hirsutum
  Clone ID: LIB3826-002-Q1-K6-A8
ggataaggagatctgttttgtgacgatatagagcacaagtggaaactgttgcgaagaatcgtattactaagaaaggatgaggggaagatctgatggaggccaaaagaagcgattaatcgcctctctctgtgctgcggtgatctttcttggttttctttatgtatattatggatggccaagccgtggtgctgcagatctaggatatggcagcaaatctttgataaaacttggatcatcttacttgggtggagatgatgacactgatgggaagcaatatgaatcttcaacaaaattcggacaggatgaatgagaagacatcgtaccaaaaactttccctgtttgtgacgatcgtcattcagaattgattccctgcttagacagacatttaatataccaaatgagattaaagctggacttgtctgtgatggagcactacgaac

SEQ ID NO: 5020 - DNA, 506 bp, Gossypium hirsutum
  Clone ID: LIB3826-002-Q1-K6-A9
cccacgcgtccgcccacgcgtccgcacattcatattttacactgtgcttacaagcatcatatcattggatagagtttctctgaaacaaaaggtggttgatgctcctgaaatcttgactgtgattggaaaaattccacatctttcggaatttttaaattctctttacaattgtcagtacaaatcattcttcttagcattcgctggcctgacagagcagataaaattggaccgctatttgcatctacatttccggttttacatgagagaggtcaggactgttgtttactctcaatttttggaatcctacaagagtgttactattgaagccatggcaaaggcttttggggtgacagtagagttcattgatcagtaactaattacgtctgattaacacctctctctatatagggagctatctcgttttatcgcagcagggaagcttcattgcaagattgacaaggttgcttgtgtccttcaaactaaccggcctgatgcgaagaatgctc

SEQ ID NO: 5021 - DNA, 488 bp, Gossypium hirsutum
  Clone ID: LIB3826-002-Q1-K6-B1
aaaaaaattttaaaagagaaaaaaaaacggaaaaaagaaaaaaaaaaaaaaaaaaaaaaaaaaaaagaaaaaaaaaaaaaaaaaaaaaaaaaaaaaaaaaaaaaaaaaaaaaaaaaaaaaaaaaaaaaaggggggggcggcccaaggggaccaaggctaacgcccgggggtttttaacgaaaggggtgttttatggggccccctaaataaaattaaggggcgggggtttaaaaaggggggggggggaaaaccccgggggtccccaaattaaatggcttggaagaaaatccccttttggccggggggggtaatacgaaaggggcccgccccgatggcctttccaaaaaggggcccaccctgaatggaaaaggggcccccccttgtaggggccattaaggcggggggggggggggggttccccccagggtgaccgttacattgggcggggccttagggcccggtcttttggtttttttcctttctttttt

SEQ ID NO: 5022 - DNA, 215 bp, Gossypium hirsutum
  Clone ID: LIB3826-002-Q1-K6-B10
cggacgcgtgggtaggatactatgttgttttgattaaactcagggcttatttggaagtccccgctcgcaccaacacatgtattagtatctgaatttgagggaaatggtgtagtgtatacatatacatatatatatcacgaagaagaaaaggaaatattaaatgaaaatgtattctggtgcagtgtatacatatgtaatatatcatgatttgggtc

SEQ ID NO: 5023 - DNA, 657 bp, Gossypium hirsutum
  Clone ID: LIB3826-002-Q1-K6-B11
cgagagttcaattaattcgattttttttaagaggtgaggggaaaaaatggaagattcatcatcaaagtcgttcttgagaaagcaatgggatgaatacaaagaattatgggccgatcgatttccgttcactaatgtctattcaagatacatcggccgtgaacagtcccttccttcatggtctgaatccgatgttaacgagttcatcgcttctgatccggtgcatggacccatcttgaagactgccagggaagcagccaacatcgccttatacggaagtgcaatcggagctatcacaactgcaggttttgcctggaaatactcgaagagtttacatggtgctggactgtctttcgtaggaggagccgtttttggttggacatttggacaagaaatcgcaaatcacgcatatcaactctacaggttggacacaatggctgcacaagccaaatttatggattggtgggaaaacaagtgccggaggtgatctttaaaaagaactttttgtgatgtcgaaagcagcacctggactcgcttttcatttggttaaataatggcggcatgtcgaaaacataacgtttggtccaatgctttggccttttgtataaactttcgcatctggatttgaaggatttggagtttacttttttttcccttttg

SEQ ID NO: 5024 - DNA, 368 bp, Gossypium hirsutum
  unsure (1)..(368): unsure at all n locations; Clone ID: LIB3826-002-Q1-K6-B12
gtcaattgaaacatcctgaattgttgtagcattatttagcagggagctgaatttagtttgaactttttactgagctatgtacttcttggacagtctattatcattcctttagttaaaaaaaaaaaaaaaaaaaaaaaaaaaaaaaaaaaaaaaaaaaaaaaaaaaaaaaaaaaaaaaaaaaaaaaaaaaaaaaaaaaaaaaaaaaaaaaaaaaaaaaaaaaaaaaaaaaaaaaaaaaaaaaaataaaaaaaaaaaaaatataaaataaaaaaaaaaaaaataaaataaataaaaaaattttttnnannttttttaaaaaaaaaaaattataattaaaaaatttaaaaaatttaaattttttttaattt

SEQ ID NO: 5025 - DNA, 570 bp, Gossypium hirsutum
  unsure (1)..(570): unsure at all n locations; Clone ID: LIB3826-002-Q1-K6-B2
gcaggagttcaatctgccatgggggcttacaagtacgtgtcagagctatggaggaagaagcaatccgatgtgatgaggttcttgcagagggtgaggtgctgggagtaccgtcagcacccttccatcgtgcgagttaaccacccaactcgccccgacaaggctcgtcgattggggtacaaagccaagcagggttatgtcgtctatcgtgtccgtgtaaggcgtggtgggaggaagagaccagttcctaagggtattgtatatggaaagcccacaaaccagggtgttacccagctgaaattccaacgtagcaaacgatcagttgcagaggaacgagctggccggaagcttggtggtcttagggtcgtgaactcttattggatcaatgaggattcaacttacaaatactttgaagtcatcttagtcgatcctgcccacaacgctatccgcaatgacccaagaatcaactggatctgcaatccggttcacaagcacagggaactncgaggactgacctttgctggcaagaatacaggggtcttcgtggcaaggggcacttgcaccacaggctcg

SEQ ID NO: 5026 - DNA, 471 bp, Gossypium hirsutum
  unsure (1)..(471): unsure at all n locations; Clone ID: LIB3826-002-Q1-K6-B3
ccgggtcgaccttgcgtccggggtgcttttccacatgggggaatcgcatatggtttggatagattggttatgttgttagcggatgcaaattcaatcagagatgtcattgctttcccaaagacgagtactgctcagtgtgctctcactcgagcaccatcaaaagtggatatccaacagttgaaagatctgtcactgcagcaagcccagtagtttcttcttgatttgcctgtctcaatgcgaacccaactaggctggccattaattagccttttcttaatcaccattgtttatgcccctttaaagttagaaaacatacagcaatcgtccccgttcccccttcttcccctgttttatattttaactgtgctttacggatggctgattttaggaatgatttgattctttttacctaaataaactattggctgtttatggtatgctagcaagttcggtttanaaaaaaaaaaanaa

SEQ ID NO: 5027 - DNA, 733 bp, Gossypium hirsutum
  unsure (1)..(733): unsure at all n locations; Clone ID: LIB3826-002-Q1-K6-B4
ctaacatgaaatgtctggaaaaattcactcagttttcttgccgattgaacagattagccaaggaattcaatctgataaactcatctttcatcggtatggactgtgagagtttgaaaatcattgcaagacttgcacttagttgttcattattggcctttagtgctggattccctcatttctttcccaatcttcctgcttataaatatttaagaacttgtgaacgagagcactcacagcagagtaatttaagttcaatgttactgcaagatttgcttggccgtttattgcacattgaccaggaggtcagcatggatctctgtaaacttttagataatggaggatgtcccagaaaatgttcgcacctgcagtccggaaattatatattaaaaagtggacatgaggtaaagggtatactagatataataaggtatgcagtttccactgtgatgcatttgcaaattgagacaaacaggatacagaatgaggcaatcatatcccatgttacaaagaatggggtagaacttctattggaaattattaggaaatggcttcaaattccattccagatgccaaagcagttttttaatacaaggcctataattggttcagagctctntgtctacagtacagatagcagaaatcaaagtcagattactgtttcatcaggccttcacctctcattaaatctctgtcttaactgagaatgcctacctgaattgcacttggattgcta

SEQ ID NO: 5028 - DNA, 548 bp, Gossypium hirsutum
  unsure (1)..(548): unsure at all n locations; Clone ID: LIB3826-002-Q1-K6-B5
cggacgcgtgggcggacgcgtggggttttggacagagaaactggagctttatgtgcaatgaaggaagttgagatatgtccggatgacccaaaatctgcagagtgtataaagcaattagagcaggagattaaggttcttagccacctcaagcatccaaacatagttcagtattatggtagtgaaatagctgaagacaagttctatatatatttggagtatgttcatcctggttcaattaataaatatgttcgtgatcactacggtgccataactgaatctgttattcgcaattttactcgccatattctttccgggttggcttacctgcacagcacaaagacgatccacagggatattaaaggtgctaatttgcttgttgatgcttcgggagttgtcaagcttgctgactttgggatgtccaaacatcttagtggacaaagagctgatctatctttgaagggaagcccatattggatggctccagagctcttgccagccgtgatgcaganaagataatcgtctgaacttgctctagctgttgatatttg

SEQ ID NO: 5029 - DNA, 277 bp, Gossypium hirsutum
  unsure (1)..(277): unsure at all n locations; Clone ID: LIB3826-002-Q1-K6-B6
cgggncgaccatgcgtncgcccacgcgttcgcccatcgcgtccgnaaaaataaaaaactagaagaataaaataaaaaataaaaaaaaaaatataataatcaacattgaaagagtaaaaagataaattaaaaaaaaaaacaagaaaaacttaattgaaaattaaaaaaaaaaaagataaaaataaaactaagataaaaatagagtaaaaaacacaaagattaaacaaaaaaaaaattaagaaaataaaaaaaaaaataaaaatagaaatgaagaatac

SEQ ID NO: 5030 - DNA, 501 bp, Gossypium hirsutum
  Clone ID: LIB3826-002-Q1-K6-B7
cggacgcgtgggcttcaatcggggtacctttctccagatttctcgctcctctctctacgatatgtcaaaggtggcgctaacggaaagtctacccataaacggtaccgttttcgacagttccctggtcttcgctttgcaaactatggttgtcgagaccgccattgttgccacaaagtctttcgcttggtcgctcatgatgatgggaactctgcctaatggaattgatgtcttcatcaaagagcctgaggcatatgcagggtttccacttgctcaacttattgcgatgactaaacctggtcctgagaacaaggatgccagcgacactgatgatgacgacgacgatgaagatgaagcagtggatgatgaagatggaggtgaggaggaagatggatctggcgaagaagatgaagaggaaggtgatccagaggatgaacccgatgccaatggagacggtggcactggagacgaggatgatgatgatgacgacgatgacgacgatga

SEQ ID NO: 5031 - DNA, 534 bp, Gossypium hirsutum
  Clone ID: LIB3826-002-Q1-K6-B8
tggattcatacacactctacgcaatcatgtttcatgtcatcaattgatctccatactcactactcataccagattatgttgccggaatctgtagcaatcgtaatggcaccaagagatgcttcgagaaaacatggaatttttcgtttgactactccgggtgggatgtccgtcattagacagtgccagaaacgtggctttcatccacacattcaacctccagatggtggccccctttacagtacatgtacagatgtgtatatgaatccgaatctgaactttgacgtcatcgatcttcgatgatctcacaatcatagccatcatatgtgcaaatggttgattgaccatcagtaagtgtaaaaagtgcctgtttgtttaaaaggaaaagagacatttgagaaacaagactgtataccatagtatttgcatgtttaggaaaatacggatttgaggggggggggaacaaaacatcaagtggctttggattccattcttttgttgtattaaacaagagaaattctaattcatttgaagttg

SEQ ID NO: 5032 - DNA, 565 bp, Gossypium hirsutum
  Clone ID: LIB3826-002-Q1-K6-B9
tgcaattaccataggggaccaaattatttggaaattgatgtcgatatctccagttcggcgattgctaacgcgattttgcacctcgctttgggatacgtgacaagtgtgacaatcgatatgggatttctggtggaagcgcagacggagaatgagttgccggaaaagttgatcggtgcggttagggtttgccagatggagatgtcctctgcgactgtggttgacgcacttactccacagattcaaccggcggcggcgcgtgtaatgggttgttcgaaggtaaatcaccataagtccggtgatgacgaggatgatgataaatgataactcttttttccccttaattttaaatttaatattttcagtatgtcaaatggttgtcccttttttagaggggattgatgggtatagaaaataaaaattagataacaaataacaaatgtgctctgattttccatatcctgtcatttattttttctttcggtttcttggggctttttgagtttgaaggaagtgggggaaagcaaaaagacagggaaagaaatgaatgaagtgatggttggttgga

SEQ ID NO: 5033 - DNA, 433 bp, Gossypium hirsutum
  Clone ID: LIB3826-002-Q1-K6-C1
taacatactgccaacgttgaagggtctcccagagggattttctgggaaagaagaggaagtgggtggagattatgctagcatcaaagaaggcaacaacgatcacaaggtccctggttggcgaggtcccaagttaccctctcacggccaccgtttcctgttcaggctatttgctttggatgatgagttgaatgttggcaacaaagtgacgaaggagaaggttcttgaagctatcgaaggacatgtggtcggggaagcagaattgacgactaagttttaagagaaagttgttgtattagtattttagtactttgttgaacatcgattaatgaaaatttagggaactttggctttttcaatcttcttattttgctcaaagttgaaagcataagtaattttcctcgcaagccttggaatgaaaatttgttccgtcttg

SEQ ID NO: 5034 - DNA, 364 bp, Gossypium hirsutum
  Clone ID: LIB3826-002-Q1-K6-C10
gtgactctaactgggaagattcttccgattggaggggtgaaggagaaaacaatagcagcaaggaggagcgaagtgaagaccatcatattcccgtctgctaacaaacgtgattatgatgagcttgcaccaaatgtaagagaaggtcttgatgtgcactttgtagatgactacagtcagatattcaatttagcatttgataataacacaggaaattagtttcttatggttttaaataacaccattttcctgggtttctgcctgaatattccttgtaattgatttgggaacgaaaacccaattttgtattgtggtacaccaacattttaaatcaagaaattacagagtggagcacaaatttgtgatc

SEQ ID NO: 5035 - DNA, 376 bp, Gossypium hirsutum
  Clone ID: LIB3826-002-Q1-K6-C11
attattattaaatatattttaattaaaatatataatttaataaaattcttaataatcaatattcttatatgaatttactaaaatcataatatatgatgctataaaatataatttgaaataattattattgaatatattttaattaaaatatatgatttaataaaattcttaataatcaatattcttatatgaatttactaaaatcataatatatgatactttataaaattaaaattaagttcaatatcatgaatcaaaagctcaacattgtataaaattattattaaatataaatgaaaagaaattaaattataattcaacaagtttagcactatacaaaaaataattcaaacaccaccaaacaaataacaataag

SEQ ID NO: 5036 - DNA, 659 bp, Gossypium hirsutum
  Clone ID: LIB3826-002-Q1-K6-C12
caagggccttaaagacttcgatctcagggtctcctatgtcaacatcaccaagggatgtatgtcagccccattctacaactcaagggcaataaagatagccattgttgtgaaaggtgaaggatactttgaaatggtatcacctcctgtttcccccaagtccagtcaggaggattcagcaggaagaaagagtgggtctcgttatcaaaagataagctcacgtttgagatccgacacggtgttcgttgttccagcagggcatcctttcgttacagttgcttcaagaaacaataatctagagattctatgctttgaggtcaacatagaaaacaacgttaggtaccttcttgcaggggaggggaattatgttcagcaattcgagaaggaagcaaaggaactggcattcaagagcaaggaagaagatgtggataggatctttggtaaccaagatgaggagttctttttccctggaccaaggcaacaaagaggccgatattatgaatgaagattgggagttgtggggtttaagctttgaggggttatgtgtgtgtgttaagatgaggagctccatggctgagagcttagccgagtagtttctgtaaatgccgaagttgtgaatgttgtgaaatgggaaaaaactgatgcgagaacgatgtaattag

SEQ ID NO: 5037 - DNA, 545 bp, Gossypium hirsutum
  Clone ID: LIB3826-002-Q1-K6-C2
cccacgcgtccgcagaactttgcgtgaattgaagcttctcaggcatcttagacatgggaatgtgattgctttgaaagatgtcatgatgccgactcataggagaagcttcaaggatgtttatctggtttacgaacttatggataccgatttgcatcaaatcattaagtcttctcaagtgcttaccaatgatcactgtcagtatttcctcttccagttgctccgaggcctgaaatatcttcactcggcaaatattcttcacagagatctgaagcctggaaaccttcttatcaatgcaaattgtgaccttaaaatttgtgactttggactggcacgcactagcaatgccaagggtcaattcatgacagagtatgttgtcactcgttggtacagggcccctgagcttctcctctgctgtgacaactatggaacgtctattgatgtttggtctgttggatgcatctttgcggagcttcttggccggaaacccatcttccctggtacagaatgtctcaatcaacttaagctgatcatcaacatccttggca

SEQ ID NO: 5038 - DNA, 614 bp, Gossypium hirsutum
  Clone ID: LIB3826-002-Q1-K6-C3
cttttggttaatactgaatgcatttgtaggcatgcttaaggtgatactaagtgttactcctttttttggtaacagttctttgacagcctcattgcgcagccatgcacgaaaaaaggaatccgattacaaaactgaaggcaattatttgtctcagcaactcaaagccaaacccggttccccttcaaaagaaaacagctcaagttatattcagacacaagaagatatcttccaccttcggcatggcttactggtgctgcatattttggctacactaatgtttgttccctctctggtgtcttggttgcagagaatagggatgcatcagagcttcccaaggttcctagattcgttcctttgcatttgtttgattcttcacggtatcttcagttcggagtcattgttaaattctgaagtgccccttccacgcatcatggtattgtacgccatgggtgccatcgggatcatttcctttgcattgagtatcttacaagcatggacaggagcaacttcggttggaagaacaaggcattggcacaggtacattcaatccctcatccattttgcaaatgagcttttggcggggaagaagggactcttttgttggaatattaaaa

SEQ ID NO: 5039 - DNA, 87 bp, Gossypium hirsutum
  Clone ID: LIB3826-002-Q1-K6-C4
aaaaaaaatttaaaaaaaaaaaaaaaacaaaaaaaaaaaaaaaaaaaaaaaaaaaaaaaaaaaaaaaaaaaaaaaaaaaaaaaaaaa

SEQ ID NO: 5040 - DNA, 504 bp, Gossypium hirsutum
  Clone ID: LIB3826-002-Q1-K6-C5
gcttataaaaaatttgacatagatctataaggccagttgttgaagaagaagcagatcaatggcgaaggagttggaaggattcaatttcgagcaaaggcatggaaaggcgagggtgagagtgggtagagtttggaggagcaaagatggatgccgccacttcatggtcgaatggaatgttaacatcagcttgctttccaattgcgttgccgcttatgtccgcgatgacaactctgacatcgtcgctactgacaccatgaaaaactctgtttatgtcaaagcaaaggaatgttcagaacaactttcggcagaggaatttgctattctacttggcaagcacttcacatcattttatccacaggtttttactgcaatagtaaagatagtggaaaagccatgggaacgcatttctgtcaatggccaaccacatgaacatggctttaaactgggatctgaaaagcatacaactgaagcgattgtacagaagtctggtgttttacagctgac

SEQ ID NO: 5041 - DNA, 518 bp, Gossypium hirsutum
  Clone ID: LIB3826-002-Q1-K6-C6
gggaagaatcgcacgttaaatcacgtgatggcgagtgctgacgtggaggccgtggatttcgagccggaggacgacgacctcatggacgaggacgccgccgctggtgacgcatcacctcaagtctccatgcctaagctcaagtctgccatcactggcggcgcttccgtttctctttctggccctaagaagactaaaggccgtggcttccgccaggacgacgccgaccgtcactcccatctcgcttcccgcgactttgactctctcggctctgacggcggccccggtccacagagatctattgaaggatggataattttggtcactggtgtacatgaggaagcacaagaggatgatttgcacaatacatttggtgaatttggtgagatcaagaatttgcatttaaatcttgatcgtcgcactggatttgtcaagggatatgcactgattgaatatgaaaaggttgaagaagccaagaatgccatatctgcaatggatggagcagaacttcttacgcagac

SEQ ID NO: 5042 - DNA, 542 bp, Gossypium hirsutum
  unsure (1)..(542): unsure at all n locations; Clone ID: LIB3826-002-Q1-K6-C8
ctcaagcccagcatggtcactcctggtgctgaatgcaaagacaaggccaccccacagcaagttgctgattacaccctcaagctcctccacaggagaatccccccagctgttcctggaatcatgttcttgtctggcggacaatccgaggttgaagcaaccctcaacttgaacgcaatgaaccaatctccaaacccatggcacgtctcgttctcgtatgccagagctctccagaacacttgcttgaagacatggggaggcagacccgagaacgttaaggctgctcatgatgcactccttgtccgtgccaaagccaactcactcgctcagctcgggaaatacaccggcgagggagaatcagaagaggccaagaaaggaatgttcgtaaagggctacgtctactaagctgctgcaaacaaagctttagctgagatgatggagatttcatgatatnggttctttctctttgtgttgaatgttttataggctctggagactactttttgttctggattgcaatgtactgntaaataaaccttcttgct

SEQ ID NO: 5043 - DNA, 609 bp, Gossypium hirsutum
  Clone ID: LIB3826-002-Q1-K6-C9
gtggatatgctgttgattaccttacacaaggagcacagagcgggtttccagggaacttcctaaaccagaattctcaagctggatattctcgttttggttctggaaatgatttcatgtctcaggactacatgaatcatggatcacaaggcctgtttactcaggctggctttaatgacccttctcatgatgatgcatctcaaagccactttggcgtgtctaatccaaaccagcttcagtcccagggcttgatgaattctctctactcccagcccttttcccactacaacacacagccactgaacttgcctgctcctcaacagcagcctcagcaggaccagggctcccaaaaccagaaatttcactataacggttaagaataaagatgcatattgctttgatgggttatagtcttttgcaatcagcaacttggtttgtgctgtccttgtttgcccaaaacatacaactccgaagatgcttaaccgtttgcctgttttgaggtcagttaaatttctgtccataacctgtaagatacaattccttatggtgggaataagtataaatagaagtaagagtaagatggttatggggactatgtgcaaatactgggga

SEQ ID NO: 5044 - DNA, 630 bp, Gossypium hirsutum
  Clone ID: LIB3826-002-Q1-K6-D1
gaaaaccctaattcaccttcatgtatatatataaaaccccaacagacttattccgtgttttcgaaacctagcagaaccctccatttctctctgccaccagcggcacccaaagatgcaaatcttcgtcaaaaccctaacggggaagaccataaccctagaggttgagtcttccgacaccatcgacaatgtcaaagccaagatccaagacaaggaaggcatcccacccgaccaacagcgcctcatctttgccggaaagcagctcgaggacggccgcaccttagccgactacaacatccagaaggaatccaccctccatctcgtgctccgtcttaggggaggtgctaagaagagaaagaagaagacctacaccaagcccaagaagatcaagcacaagaagaagaaggtcaagctcgctgtgctacagttctacaaggtggatgaatcgggtaaggttcagaggctgaggaaagagtgtcctaatgctgaatgtggtgctggaactttcatggctaaccatttcgataggcactattgcggtaagtgtggactcacttatgtttaccagaaggctggtggagattaagtagggctcgtgcaaaagatggatcttttagggtttttccagtatgg

SEQ ID NO: 5045 - DNA, 458 bp, Gossypium hirsutum
  Clone ID: LIB3826-002-Q1-K6-D10
cggacgcgtggggtttgccgcagcctcccttttcttccactccagatccacccattccgacggcggaatgaagatccctcaacgccgtatgcgacttttttcgcatgtatgaaagtcgtggaggacgtgcgcaaagtgctgaacgtggggcgatgttgaggcgtgggtgaggttgtcgcggctgctgattttgctgctaggtttctctgttttgtgttttaggctagtgggttaattgggccctgtaattgggttaagcttggcccaagttttattggatttaattgtatttaatttgggcagtgttatgatattgggttggtcttattttgaatgggccgggcaaaactgggttattacacatataatgtttggtttcttcgaataaagtaatgtaactgacttgaaaagttatagtaatcattaagtaatggattaaatatagaattggtacttgg

SEQ ID NO: 5046 - DNA, 545 bp, Gossypium hirsutum
  Clone ID: LIB3826-002-Q1-K6-D11
gaaaaaaaacattttttactgtgttttattttctcttgtactaaaactgtttggtcgtcgagaaaattttagaatcatgggagtgccggaaactgatccattggctcaattgagcttgccgccggggtttcggttttatccaactgatgaagagcttttagtgcaatatttatgcaggaaagttgcggggcatcatttttctctgcaaatcattggcgaaatcgatttatacaaatttaatccatgggatttaccaagtaaagctttgtttggtgaaaaagaatggtattttttcagtcctagagacagaaaatatccgaacgggtcacgacctaatagagttgccgggtccgggtactggaaagctaccggaactgataaaattatcacaacagaaggccgtaaagttggtataaaaaaagctctggttttttacgtcggaaaagctcctaaaggaactaaaactaattggattatgcatgaatatcgactcattgaatcttctcgtaaaagtggtagctccaagttggatgattgggttttat

SEQ ID NO: 5047 - DNA, 539 bp, Gossypium hirsutum
  Clone ID: LIB3826-002-Q1-K6-D12
ctcattctctccggtttaatcctagctggcaccgttattgcactcactatagccactccactcttcgttattttcagtccagttcttgtccctgctctcattgcaacagctctcctagcaacgggtttcgtcgcctccggcggtttcggtgttgcagccgccacggttctgtcctggatttacaggtatgtgacggggaggcacccaccggcggcggatcagttggatagtgcggggatgaaattggctagcaaggcacgggagatgaaagatagggcggcacagctcaccggtgcggcggcttcttaaattagttctctactgcatgcttttgtaatggagctgtgcaaaagttcaggatcaagtggccattaaaccgatccttaatgatgttgttgttatgttgttgatgatgaaaagatgtttttttctaaatttaaaagcagcattagaaacttcggggggatgatgtggctgtctgtttatgttaaaaactcccatgtaattgactgtaataagcactacttgtttttgttgtt

SEQ ID NO: 5048 - DNA, 625 bp, Gossypium hirsutum
  Clone ID: LIB3826-002-Q1-K6-D2
ccgggtcgaccatgcgtccggcttggttatctccctctagagttagctcagtatttatctcctctgattgaaaagtactgcttgagctttgagggatatgtgatatctgttcctaaacgttctcttgatgctgttccaattcagattgtgtgtcagaacagtatatttaatggtaaaaaaggatgtgatgaatttgaggctttacatttgtggcaaaaagctcttcaagtagttgaatttgcaaagaaccgcccacctaatacgacaaaatatcagcaaaatttttgtctgttactaaaggaggttctaactagtagccctcaccttttcacaaaagataaaaagaaattcatcgaatcattcacttcattatcagaggatagtcagaggctttttgttcgactttatacacggaaaggaccttggtttcgattgtctaccattatgtaccctgaaatatgtaatcctcaacaagctgtcaaggagctgtctgcaactggctatctgtatctctttgaagatacaactaaactacatgatgatgaaatgaaggaccttttgagtctgctcactgtttctgagcttcgtgacattttatgtacacttaaaaaggtttggatttttt

SEQ ID NO: 5049 - DNA, 571 bp, Gossypium hirsutum
  unsure (1)..(571): unsure at all n locations; Clone ID: LIB3826-002-Q1-K6-D3
tttgcgtccgcggacgctgtggnngcggacgcgtgggtctcgactacctcccacatacctcatnggtgtggaaaccctcctaccagttcctggaatggttgggtagaggaaaccctctgaccattcctacnntattgtgtgtgaggaaacaannccattcctgcaaccttatggtcaagataactcctacccttcctgcaanccttgggtgaaggaactcatagtattccctcaacctcgagtgaagaaagtcatatcattcccactaacctggatgaagaaactcctactgatccagtgaccttggcagaggaaaggccaagtattcctgaaaccttgggtgaagaaaccccaaccgttcctctgacattcagtgaagaaactcaagttattcctccatcattcagcgaaggagctactattcctccttccttcaatgagggaagtcctactgttcctgtaacattgggtccagaaactcagaccattcctacaaccacgggtgaggaaactgcaaacattcctgcaacctcaggtgaggaaactacaagtgctcctgtgaccctacatg

SEQ ID NO: 5050 - DNA, 718 bp, Gossypium hirsutum
  unsure (1)..(718): unsure at all n locations; Clone ID: LIB3826-002-Q1-K6-D4
cttggagagtccaagaacaaagcagaatccgttccactctatgtgaatgttgatggaaagaaacttattctgggaaccctttcccaccagatttgccctcaattatcttttgatttagtatttgacgaagagtttgagctctcccacaactggaaaaacgggagcgtatatttcctcggttataaaactttcataccagaggaaggtgatgattttggtatgtctagtgaagaagaaagcgaggaggaggaagatgaggagcttcctgtcgctgctgctgctgctgctgctgcagtaaatggaaaagctaagccagatgcaaaaacagccaaggctaatgctgggaaacctgatgctgttaaacaatctggcaagatagcagaacctagcaataacaggaaatctgaggatgaagatgatgatgatgagtccgaggatgagagtggttctgatgaggaagatgattctgatgacgatgatgagtctgacgagatgtctatggatgaaagttcagatgacgaggatgaggagacacctaagaaggtcgagtcaagcaagaagatacctgtcgagtcaagcaagaagagacctgctgaagctgcaaccnctgcttctgaaaaaaggctaaatctgcagttacacctcagaagacagatggtaagaagggtggacacacagcaacaccgcatccagcanagcaatctgggaaaaattctgc

SEQ ID NO: 5051 - DNA, 545 bp, Gossypium hirsutum
  Clone ID: LIB3826-002-Q1-K6-D5
gccaacgcgcaacgaaatcttctagctatagcagctgcaggtggcaactccaatgcaggaaatcccttggtttcacaattgagtaatggaccactgactcatctgcatgagatggtatgctcccctctctctgtttctcatgaatctgacagtcactatccatctgcctcacaccgatgttatacgtgtaccgcagcctgaggcacacttagatccaactaaagagttagcaagattgatagctgaaaagaaatatgaagaagcattcacctcagccctgcatagaagcgatgtctctatagtttcctggttgtgttctcaggtaagttccaataactagttgtactctttgacattattttccaacaacccttgttgtgcatgacaagaaaactctttgagacctgacattggtctgatctgaattaaccaggttaatctgcaagggatattgtcaatgaaaccatgtccactgagccaaggagtattgctggcactttttcagcaactggcttgtgatatcaacaaggaaacaagtagaaagc

SEQ ID NO: 5052 - DNA, 519 bp, Gossypium hirsutum
  Clone ID: LIB3826-002-Q1-K6-D6
gcatgaccaccgtcgactgccctggctgtcctccacttcgagccttgactttcgatgcacttggactaatcaaagcaatcgaagctcgagagaaaggaggaggaggagttgccaaagtggtggagagatggggaggtcctgatgcttccaaatgtgtgcttgccgcttccatgaatgaccgcaaaatcgacccgttattagctgttgcaagaaaaaatggtgtgattgagatacttaatccccttaatggtgaactttcccgtatggtttccgatgttagtaatgctggtgttaggccagaagatgatgctattgctgggctgcatttgttcagaagacagagagtggagttaaccccgagttcatgcactttgctcacatgtaaaacaaaaggaaatgcaagcataaaaactgttgatctcgttgacactcaagctgattctggtgcctcaaaaacatggactgtatgtggctctggtaatatcttggtttctgaagtggatgggagtgaaagctatg

SEQ ID NO: 5053 - DNA, 582 bp, Gossypium hirsutum
  Clone ID: LIB3826-002-Q1-K6-D7
atccatacatgaccgcattacatttgcccgaagtccaggagtatcgattatttttattgacccaagatgagccagggacaacctaggaggcctcaacaaccagcaggtcaaggtgagaaccaagagcctatcaaatatggagatgttttcaacgtgagcggtgagttagccaacaagcctatcgcaccccaagatgcagccatgatgcaaacagctgagacccaagtgttgggtcagacccagaaaggtggaaccgctgccgtgatgcaatctgccgccacgaggaacgaacaagttggcgttgtgggtcataataatataactgacattgctggtgaacaaggcgttagcgtcgctgaaactgatgttgctggtcggcgtataatcactgaggcagtcgctggccaggttgtggggcaatatgttcaagcaacaccggttatgacaagccaagtgggcgctgtgcagcaaaacgcaataaccataggtgaagccctcgaagcaaccgctaaaacagcgggcgacaagcccgtcgatcatagcgatgccgctgccgttcaagccgcggaagttcgagcgact

SEQ ID NO: 5054 - DNA, 667 bp, Gossypium hirsutum
  Clone ID: LIB3826-002-Q1-K6-D8
cagataaatggaaattttattgataagaccttttcaattgtagccaatatcttattacgaataattccgacaactttaggagaaaaagaggcatttacttattacagagatggtgcgatttgattattattatatatatattttactttattctctttattctttatttattatttacttttttatttactttactactctcagtcttaggaaaaagacacattattcagaatagaaaaaaggctattgaaaacaaaaaagaaatctacgcttgttgaaggtgaagtttataaataaagcaattccttctgtcgtgtatccccgattaatgcaacctcagatgcttcaattgttgattcgagtattgagcgaaaggttacacctatgggtctgtattgggggtcaaccctactacactagtaccaataggcggcatagaggaagaagcactacgcctaggaatcaacaacacgaaaactttgttattaatgattccctttctttattcggatcggaactaagagaaatgggttgggacaacatacatccatcttggttcgtactttggatacccatataaccatcgaagattggtgaagtgactaattcctggaaattagggagcgttgagaacaagaaatgttggagtttactttttatctagatg

SEQ ID NO: 5055 - DNA, 584 bp, Gossypium hirsutum
  Clone ID: LIB3826-002-Q1-K6-D9
gaaggacgtgacatgctgagaagacaaaacaggggacggaatatgcagcggagaaagcaaaggaaggtaaggatacaacagttagtaagcttggggagttgaaagattcagctgcagacgctgctaagagggctatggatttcctcactgggaagacggaagaaacgaagcagaaggcatccgagactgcacagaacaccaaggagacattgagtgaaacgacggagtcagctagacagaagatggaagagatgaagctgagaggtgatgaaggtagaaggaagacttatgatgatgatgcgaaacgccacggtcgtgaagggttttcagagacgatagtgattaaggttgaagaatccccggcaggagccgttgatgctacactgagatcatctgatgaaacattcaatgatgttgggcgtgttggggaggaaggcgttattcgtgatcgctccagcaaaaccaaaatgtgatctcacactgcacacacccttaatataggggtggaatatttgcgttgcttttcattgttttaacttctgtttgtgttatctttttgtaatacaagtacggtctttgttgcc

SEQ ID NO: 5056 - DNA, 449 bp, Gossypium hirsutum
  unsure (1)..(449): unsure at all n locations; Clone ID: LIB3826-002-Q1-K6-E1
gtgattcctagtttagagacagagactctgattttgagatgacaaggcaggaatttcctaattctagggagtatgagttatctaggaatggtagccgtgatgttgcaagggctcgattatgggaagctagagatagagctagggctagacagaaagatattaaagagagggacgtgataaatggtgggtatcgttcctcttcgagtagaagtgattctggtggtaatagtagtggtggtggtagtcatggcctcaggcgacgtgaattctctcttagggtggtagacaaggagcctggtgaattgtctagtgagagtggatcagaggatgccattgagtctgagtcggtggttaaagatagtgaggttgagaaggtaatggagaatggggctttatctnctgtggggaggaagaaggagttttcacctattgtgtgggatagaagtgac

SEQ ID NO: 5057 - DNA, 578 bp, Gossypium hirsutum
  unsure (1)..(578): unsure at all n locations; Clone ID: LIB3826-002-Q1-K6-E10
cagaaagagatttgagggagaagacatgccaactaatagtgcaaacggttctaccagtatatcgaagctatatgcaaacttatgggccactggtagagaaagatgcaagttccagtaagtatgcaaagtacacagtgcagggattggaacaaatgctcctttctctttttctaccgaggcgggaaaggtacggcagtttcaaaggcaggccaacaggcagcaaaattgataatggggtagatcttcgccggactgcatctgctgttgcatgattgtccaatctatttctgtcgcggtggttaaactgtacgtgttttataactattcttcatcatatattcatcctttgcccatcaaagttaaaactgtgttgggttggtagataaagataatgatacattcaggtataccatttcatgttataatttcatattaagtttatttaatttagttgctagcttggttggcataaaagctatgtaatttagtgaatttcatgtataaatattgaagcataaaagtggaaactgaagcgttagctttgattgattaatttatttaatnggcaatattccctt

SEQ ID NO: 5058 - DNA, 381 bp, Gossypium hirsutum
  Clone ID: LIB3826-002-Q1-K6-E11
aggagatttggtgacagagatggctatcgcggtggtcctcgaggaggcggtgattttggtgataaaggaggagctccagctgattatcagccttcattcaggggccctggaacacggcctgcttttggtcgtggaggtggtggttatggtggtgctggacctgctggtcttccttgagagatgatttttcatgatggataattttgtcagtttaggtttgttatcatatggagttcatagaagtacttggcttatgcttcaatgttcggtaattttggtttgatgcttaaaaacgctgcttctctttggttcattcatggggaattctgaaacaatgttttctttgcaccaagtgcttgatatttctgttctgttcttacg

SEQ ID NO: 5059 - DNA, 470 bp, Gossypium hirsutum
  Clone ID: LIB3826-002-Q1-K6-E12
taaggtgtgtagtgatgcttatttgcaatgacacttcatggaatggtcacacgtgattgctagaatgacctaacttggagcactgatccttagtggtacatacagtgacttgacagaactgtcttgttctataagtcatctgcccactctgcaagcagtctccatctcaataccatccaccttcggactctgactctgcacattgtgagcgacttgacaaactagataacctgattgtggaccacaatcctctattagtgccttccattgtgatagctaataatggggctgttgcttcataagattacatgtttaaacagtggctcgatatattaaccgccgatcaaaagagaatgatgcttgaaacacgcgatcagagacgtcagatgggttggtagtgatggggaacttcattgttgagttacgccatctatgagatgtaccaaagtgttggacaatacctgattggg

SEQ ID NO: 5060 - DNA, 580 bp, Gossypium hirsutum
  Clone ID: LIB3826-002-Q1-K6-E3
attggacatatgggtgatgatactcttgatgacccattgtctgatagatacaagaaaataggatgctcaatttctccactggataaagattccgaggactacaagatgatcctcaattatgtggaaaaaacttatgaacctgtcaagcttgcagacattgaatatgagatctcagttgagaacatcttcaatgtggaaactaaggaaggcccctcgtttgatgaagtaaaaaagctgccaaacaagagactcctgtggtgcggtactcggagctcgaacctgttaaggcatttgcataaaggcttcctgccagcaagctgttctctatcagttccaggatatatgttcgggaagggcatagttgttctgatgctgcagcagaagctgccaggtatggcttcactgctgtagacaggcctgaagggttcttggttctcgctgtgttttcacaaggtgaagaaattatggagctcaagaacccaccggaggatactaagccattggaagagaagatagtgtgtgtgaagggactggggagaaaagaaccagatgaatcagaatatatagattggaaagatga

SEQ ID NO: 5061 - DNA, 539 bp, Gossypium hirsutum
  Clone ID: LIB3826-002-Q1-K6-E4
caggattgtgaggtttgttctgaggaacatgaaggagctccccatgaagctctgaattttgcctttggttatctgggtctgcgggatctatttgctgttgaaagtgtttgtatgtcactgcgatctgtagttcagaatgatccccttttatggaggaatattcacattgatcaaccactaagcgagaagataactgatgatgttcttttacaaataacaaggagggctcaaggtagcttacaatgcttgagtctggtagattgccaaaggattaccgatgagggccttcagtgcgtggttgaagaaaatccaaagctagtcaagttgagtgtacctggatgtacaaggctaagtattgagggcattttgaatagcctaaaggctctgaagtctgtgggcagacaaggggtgaagcatttgaggattgctggggtgtatggtgtaacacagaaacattttgaagagctgaagttgtttttgggcatggacaaccaaattcaacagattatgcacaagccacatttttataacagaagaat

SEQ ID NO: 5062 - DNA, 650 bp, Gossypium hirsutum
  Clone ID: LIB3826-002-Q1-K6-E5
tttcaggatcaccccacaatccagagatacagttactgtctactaaactcaaaaaaggatgcaggaacctgctgaagagttggcactgatcttggattctaaaggaaatctcatgtccttgatgaaacagcttaaattgcttattcctttggtcttctcatcaagtttggttatctgagtattagccacggtaccaggcttcgggcagttggctacgatggcatctgtttcgctcatgaaggtttcaactgcagctgcagtctcatctgaatgatctgtgtcagggactagacctttgacagtcggtgttgaactgtgatcttcatttttcatctcattgttcagactatatttcctgaaactttcacttaaaggttcttcagctatgaaggacagctctttctcttcactatcctttccagtatcttgaatgcaggagattgaagggctctgatctccattatcatcaaaaggctccaaatggactgccgcagctggctcgaccactgaatcctctctttctcgcaaggtccttacgataagtgtcttgagggagttcatcacttggaccgatacatcagtgcattaggggatctgccatctgcacccaaataagcattaagcgcagccagcagtcagcacaatatatg

SEQ ID NO: 5063 - DNA, 565 bp, Gossypium hirsutum
  Clone ID: LIB3826-002-Q1-K6-E6
gcaatattatcacaagcagcagctaaaaaaaaaggcaagaagaaaaatggcgtcagagcaatatcaagctatgaggaatgcaccacaagaggaaaaagaagagcttgatgcaagggcaaagcaaggggagactgtggttcctggtgggactcgtgggaaaagcttggatgctcaaattaacctagctgaagggaggcacaaaggaggggaaacaaggaagcaacaactaggaacagaagggtaccaagaaatgggacgcaaaggtggtctgagcaactctgatatgtctggcggtgaacgtgcagctgatgaaggtgtcaccatcgatgaatccaagttcagaaccaaaaactaaatatcatctcccacgacagaaccctagctactctttttatatataaaccctaataatgtatgtttgttttaggttttaggaagaactgaaccagtttatatgtaacaaaacgctggacatgtttaagctttaggcttggtgtctgtaatctaagctatagccctgttgacggttttgtttagtgttattaggactaaccagtttacatgt

SEQ ID NO: 5064 - DNA, 535 bp, Gossypium hirsutum
  Clone ID: LIB3826-002-Q1-K6-E7
ctcacgtatatacctttactaagtaaaaaaaaaaagaccacagttggttatatcaaaattcgggagcaacagatattttagtttaccatgggtaaggacactattgctgacataataacctgtatacgaaatgctgatatgaatagaaaaggaacgattcaaataggatctactaacatcactgaaaacattgttaaaatacttttacgagaaggttttatcgataacgtaaggaaacatggggaacgcaacaaatattccttggttttaaccctacgacatagacggaatagataaggaccacatagaactattttaaatttacgacggatcagtcgaccaggtctacgaatgtattctaactatcaacaaattcctaggattttaggacggatggggattgaaattctttctacttctcggggtataatgacagaccgggaggctcgactagaaggaatcggtggagaaatcttgtgatctatatggtaatctgtccggtatacgaattgtatccgaaactctccatttgtgc

SEQ ID NO: 5065 - DNA, 748 bp, Gossypium hirsutum
  Clone ID: LIB3826-002-Q1-K6-E9
gcaaaggcagtccacaaaatctttctctcttctctcctattttaaccattccttccttgtcctcgccccttccctagcaagctacatttccatggccccccctgaattggttcgacccagtgataaatcaaacgttttcgctaaacaagtcactttgcgtaatcgtgcatatgttacgttcttggccggaaatggggactacgtcaaaggagttgtagggttagccaaagggttgaggaaagtgaaatcggcgtaccctttagtggttgctgttttacccgacgtgcctgaggagcataggcggatcctggagaaccagggttgtatcgtccgagagatcgaacctgtttacccgcctgagaaccagacccagttcgccatggcctattacgtcatcaattactccaagcttcgtatttgggagttcgtggagtacagtaaaatgatatacttggacggcgacattcatgtatacgacaacatcgatcacctatttgatctgcctgatgggcatttctacgcagtaatggattgcttctgtgagaaaacatggagccactccccacatacaagatcggttactgccaacaacgccctgacatggtgaagtggcccaccgagatgggaaatccccctgcactttacttcaatgctggcatgttccgtgtttgagcccagccttgtgacttacgaatctctcttgaagactctcaagatcacacaacctaccccatttgcagagcaggac

SEQ ID NO: 5066 - DNA, 568 bp, Gossypium hirsutum
  Clone ID: LIB3826-002-Q1-K6-F1
cgattgcaccacctaaccgactaaagaaaggagtcccatcagttgactccaaccatgtgaggaatgagaatgctgttttcaagaagcaagcagcagtctctaaaaatgcagctgatgatcattcgcagctgttaggaatgcagaaacaacaatcaaatggcatttcttttggtgtggtcagtagtctctcaaatgtaaaaatattgagcaaatctaaagaccctacagaaattaatagagccaattttgagagaacaagtgttgaaagcaaggcctctgctcatggaaggtctaattcgaattttgttggaaaacaggacagggcaactggggcagcattaacttctagaagatagcttgtgcatttacctcaattgtgagttgtcttgtttgttttgatgaactgatactagtttgttattatagcatatttgatttcatggatgtttataatatcatcgctcaaccaaaacaagttttcaagagatttatcgatctcattttgttccagcaggatacaccgaatctcgatgttgagtggtggatcatgcattaagctgatttcaat

SEQ ID NO: 5067 - DNA, 656 bp, Gossypium hirsutum
  Clone ID: LIB3826-002-Q1-K6-F10
cccacgcgtccggaaaagcttacatgtttactttctgttaaaacccagttttcttttccttatgcttcactgatcccatgaaaatttgtcctctttttgtgtcatatatatctgcaagagagtgacatcatttatatccttaacttgttcatacaatcatttgttcgaatacacatagcttaatcttgatacaaaagaatgggtctctcaagtctcccagccccatcagaaggagtgctatgtgtactcttggtaaacacagctttatccatatctatggttaaaggcataattcgatcaatccttcacgttgtcggtatccatctctcctcctcctcgtcctcctcctcctcgtcatcatcatcatcaccgccatcctcggatcttattgaaatccctgcggtatcattcgacatcagcatcggtaatgctgatagttacattaaagagttccggagcaggatgccatcgacccggtacgatgcggtatgtagcgacagtcaaccggagcatgactgttcagtttgcctgactaggttcgaaccagaatcagagattaaccgcttgtcctgcggtcatctgtttcacaaggtatgctttggaaagtggttgaactattggaatgtcacatgccctctttgcatgatcgctctgct

SEQ ID NO: 5068 - DNA, 665 bp, Gossypium hirsutum
  Clone ID: LIB3826-002-Q1-K6-F11
cggacgcgtggggtcttatttttcagggttgggatgatccgtatgtacctcgcactcatgaaggtcttctgaaatggaaatatgctcggctgaactctgttgactttctatttgagattagcagtgatgatcgtccacaactttatctctttgaacggggaaaaaggaagttgatggatagggatacagttgaattcagagatgtttcagatcctccatcttcattctctgggaagattatcgagtgttcttgggatcctgatcagcaggtgtgggtctatatgcggatcaggacagataagtcgactccaaacgatttcaatacttcaagaaggtaatgcgaagtataaaggataatatcacagacgaaatcttattaaatgagattaatgagattattcggttgcccatgtatgccgatagaataaggatggacagcaaggcttcagcacgacgcaagtgacattgggttgtgcagttgcttgagatatcggtattggatggcttgggtgtgctgtggtttcttatggcggtaaggtaatgaggcggttgtgttgagcagatgacgttgatgaatcgggtgggtcactgggatatgatgtattgtaattaaaatctgtcaaaatctttgtggtgagtggtatgatccaggcagcggtgtaata

SEQ ID NO: 5069 - DNA, 569 bp, Gossypium hirsutum
  Clone ID: LIB3826-002-Q1-K6-F2
acaaccttggccaatgggccaaatgttggggtctgttagattgtctttttaatgaaaaggaaacaaaagagaaaatattatttgtttaatggatacaatatgttttaattgcagttgaattcatattagtttttgagagactagtgcttcaactctatgaataactaatatcaagagtacaaatttatcaaacacaactctctcaagaaaacaagctgaaccatagataacctatataatatcaagagatagtagtcctatcaaaatatatcctgatttagagtattcatctttggtaaacacatttggtgatgtttttctttattttggttttatgataatggtagcactatagactaaatgaaacaatgcagtaatgatgtttctgtgaaaagaaagaagagatgaaatgtagttgcaaaccacttttgcagtgccactacagctatagtgcatgtggtcttggttccgatgggacagatagactggtacagttggtgcaggagatgcagcatggtaaagcctctagagttgatgatggaactctatatggagctaaaattactggt

SEQ ID NO: 5070 - DNA, 642 bp, Gossypium hirsutum
  Clone ID: LIB3826-002-Q1-K6-F3
tcagtctataaatgttactttattgagttttttttattgtttttgtccaacaattctactcctatataagtattatttgatttaactgacagtgagagtgtccttttgaagaactgatagtgagagtgtccttttgaacccttgttatattccagtttgggaatgaatagttgataaaaatgggaaggtaattctgaatttcgaattactctttgaaaatttgatcaaaatttgactttcccagattttgattttgcaaatggacatgtggagttgtgttggttaattattttatgaattttagattagtaataatgatgttgagaattgagattgtccttttgacacctagttatattgttgtttatgtttctaaggtttggcgatgaatatttgataaaatggcaagacaaactaatatcctttttcttgaacaatggttgagtactaatattggtgctattagctactctgtttcagaaattagggttaatattgatgaaagagagaatattaataatttcaatatttttaaaatccttaattgaatttggtaaatctgaatattatgctgaatattcaatattttcaatattgaatttggtgagaatattatgctggcatggttttttttttattggg

SEQ ID NO: 5071 - DNA, 544 bp, Gossypium hirsutum
  Clone ID: LIB3826-002-Q1-K6-F4
aattacccttcattcttggccttggtcctttgctttgtcaagcggcattctgtcaagattgaccgctcgttggaccgaggttgctgcatggctgttgtgccggtccctcaccatatatttcatgcactccagtcgtatttctgccttctggagtgccttgccgctgggaacatgaaccttggtgcctaggcaatgaaagaaaggcttttcctttatccaaacatggccggattggtgttgctgtcgacatctgatctgtcgcaagatgacctccatgcatgagatagtgtatacaatagcggattcttttcattcactttcacccacttcaccgactctcgggccgagggttcgattcaacgtacttcgattaacagcgcttacacagtgcgatgaagagagcgaatcatgcgatctggtctgtaggtggcatgcagacgtactactaatgaggcgcttcagctagggagtgcttataatgatacccggctttagatcgtgactcaatgcatctggagatactggtatataggactcgcttgta

SEQ ID NO: 5072 - DNA, 592 bp, Gossypium hirsutum
  Clone ID: LIB3826-002-Q1-K6-F5
gtagaaagaaacaacggtaaaccctgtggaaacaagccgactgcaaaacgctgcagctgaagccctaacttttccgctcacctctctgcaccagccgctcctctattcgcatcttccatggctacgataccagttaacccaaaacccttcttgaacaatttgactggaaagactgttatagtgaagctcaaatgggggatggaatacaaaggttttcttgcatctgttgattcatacatgaacttgcagcttggcaatgctgaagagtatgttgatgggcaattcactggaaatttaggggagattttgatcagatgcaataatgttctctatcttcgtggggttccggaagatgaagatatagaagatgctgacaaggactagatggttcacatgtggttgaaatagaacctttggtatttgattagaggtgctgtaacttttgtttatcatggttgaatgtcattatgtcatttagtcgcccggacagacaaaccgcgatgtagttaaattgtgcttttgcttgaccgctattgccaacattatttggaatattgcttcttttatattcaagccggatgtattaatggag

SEQ ID NO: 5073 - DNA, 512 bp, Gossypium hirsutum
  Clone ID: LIB3826-002-Q1-K6-F6
agaagatctggcaaaggaggaaggattactggaagctgatcattgcatgattgaagaagtgatattggagcaaaatgaccaaaataagaaactgaccagtaacaagaaatgtaaatacgataatctcttgctggcttcctgtcaagtggatactgaagttggagttaagctaaagaggaaaagaaaagaacaatttgaagagaaaacacttgaaaacaatgttaacaaagaggatgaaacgcacaaaagtggttcaaattataccgagaccaaggatgtagatgtggaggatagggataatcaaaaccaagttaatgacaagaagacgaaaaagaggagtaaggatgaggagggggatgctatgaaggtggaacaacctgtcttaccagcccatgaaaagaagagatctgatgtggaaatgggggctaagaacgctaatgacaaggaaattcagctgtcaaatggaattatcattggaggagtagaaatagggaaaccagatgggaaaatag

SEQ ID NO: 5074 - DNA, 611 bp, Gossypium hirsutum
  Clone ID: LIB3826-002-Q1-K6-F7
ggtcaagttgaggaagcatataaattgatcaatgacatgcccttggaattggataagacaggtgcttggagtagtttgcttggttcttgcaggatccaccaaaaagttgaaatcggtgaaattgcagctaggaatctcttccacctagaacctgatgtggcaagccactatgttttactatccaacatatactcatcagctcaactatgggacaaggcaacagatattcggaagaggatgaaagaaatgggggtaaaaaaagaaccagggtgtagctggattgagttcgatgatgaggttcataagtttatagctggggatgcatcacacccacaaagcgggcaactatatggattccttgaaatactgtcagaaaagatgagaaaggaagggtatgtgcctgatacttcttgtgttctacataatgttgatgaggaggagaaagaatacttgctttgtgggcatagtgagaaactggcaatagtctttggcattctcaacagccctcctggtaccacaattagagttgcaaagaaccttagagtttgtaatgattgccatgaggctgctaaatacttctcaaggataacagatagggaaataatcctaag

SEQ ID NO: 5075 - DNA, 564 bp, Gossypium hirsutum
  Clone ID: LIB3826-002-Q1-K6-F8
gcagctcgtcaagcctttgatgctgaaaaactggataacaagaaatttagttctttaggtgaaactgttgtaaagaatgataggcttgttgttcgaattgatggccattactttccatgggatgcagcagcacctattcttttaggaatggttacatttggaagtgaaaaaataattgaacccacaggcatgatacctattgacagactggagaaatccgttgaagggggtccatcaaaagccatagtcacccagagtagaaagtggaggctttggcctttttctttgaaaagatcaagatctaggaaggctgcgcagccgggtgcagcagataccggaggctcagatattgggaatgctgctgatgattctgttgctagtgatgatgatgagaattttcttacacccaagccagtgaagaagatgatcagggcaatcaccccaacctctgaacaactagcatcattgaatctaaaagatggaatgaatcagataacctttacattttcgactgctatgttagggaaacagcaagttgatgccaaaatctatttgtggcactgg

SEQ ID NO: 5076 - DNA, 288 bp, Gossypium hirsutum
  Clone ID: LIB3826-002-Q1-K6-F9
cggacgcgtgggtgaatctagggatttgcgggtggagaagacgagagctcatctctctgcttcaaagctcctgtccgggtagaattctcttcttcctttgcgttgtgttctttgttgttcaatcgccatggcttcaaagcggattttgaaggaactcaaggatttgcagaaagatccacccacttcttgtagtgctggtccagtagctgaagacatgtttcattggcaagcaaccatcatgggaccctcagatagcccttatgctgggaggtgtgttttagttactat

SEQ ID NO: 5077 - DNA, 287 bp, Gossypium hirsutum
  Clone ID: LIB3826-002-Q1-K6-G1
ggcttgctcgtaagttgccgcatgacaagagcgtgtacttgaagcctggtgaaagggtattgaattggacagctggcccttttggtgatctgaaaccttggtagctgttgtaacatcaaattcctaaaaccttccagcactctgctgatttgacctacctctgaacgttatcggggtttatccgtataagtgatccagagatacaaaaaatgtagaacataattcttccaaaatggtctttgttttgcagctttagcaatgcgattgttccttgtatgttatctcag

SEQ ID NO: 5078 - DNA, 757 bp, Gossypium hirsutum
  unsure (1)..(757): unsure at all n locations; Clone ID: LIB3826-002-Q1-K6-G10
gagggtataatagtagtatttaattgtgctattaaattactatagaagggatattctgactaaggaaagacttggtatttaagagatcattgtgatccacctctcttccctgggaattgaactttgtgtgattttttagtacaataatttacacgcttccgaccctattggaacaacatgtcatgggtgttaatgagaaggattacaagccggaatatgatattatttccaatgctagctgcactaccaactgtcttgcaccccttgctaaggctattcatgacaaattcggtatcattgagggacttatgacaactgttcattctattacaggtaagcttggaaacagaattctcacttttaaagtaacttagtatgttctgtttatcttattttgctcctactcagctacacaaaaaactgtggatggtccatcaatgaaggactggagaggaggaagagctgcttcgttcaacatcattcctagcagtactggagctgctaatgttagaattgtgtctagattgtagctntagagtgttaatacgaactcagacttgtacttcataattattggtcttatatnntctagaggttcaatttttataagatcttttcattacaaaatagaaagataatcagtttgatgaatttccctttccaatagtacgcatacaggaccttgatttgcagtgggttaggttgcttttccttagcatctctctccatgtatacatctaatgcagcaattctatac

SEQ ID NO: 5079 - DNA, 571 bp, Gossypium hirsutum
  Clone ID: LIB3826-002-Q1-K6-G11
cggagatgagtaagcttcagagtgatgcgcttagagaagctatttcaaccattgtagctcagtcaaaggagaaacagcgcaaatttactgagaccattgaactccatgattggtctagaaaaactatgatccccaaaaagacaagcgtttcagtgggtctgtgaagcttccacatattcctcgccccaaaatgaagatttgcatgcttggagatgctcaacacgttgaagaggcagagaagataggtttggattatatggatgtggaagcattgaagaaactaaacaagaataagaagttagttaagaagcttgccaagaagtatcatgcctttctggcttctgaatctgtcatcaagcaaatccctcgtcttttgggtcctggtctcaacaaagcatgtaaattcccaacccttgtcactcaccaggaatccctagagtcgaaggtgaatgaaacaaaggcaatggttaagttccagctgaaaaaggttctatgcatgggagttgctgttgggaatgttgcaatggaggagaagcagatcttccaaaatgtgcaaatgagcgtcaatttc

SEQ ID NO: 5080 - DNA, 676 bp, Gossypium hirsutum
  unsure (1)..(676): unsure at all n locations; Clone ID: LIB3826-002-Q1-K6-G12
gaaagttcatatatcattatattaggatgataattttgcttcagttgtgaaggttgttcgctggggtcgttctgtgtatgccaatattcagaagtttatacaattccagcttactgtgaatgttgcagctcttgtaatcaatgttgcggcagcaatatcttctggtgatgttcctttaaattcggtgcagttactatgggttaacctgatcatggatacacttggagcacttgcattggccactgaacctccaacagacaaccttatgcataggtcgccagttggccgaagagaacctctaattacaaacatcatgtggaggaacttactaatacaggctttatattaagtcactgtcctccttgtgttcaacttcagaggcatgaccattcttcagttggaggatgatggtaacagggaacatgcctataaagtgaagaattctttgatattcaatgcatttgttatgtgtcaaatcttcaatgagtttaatgctagaaagcctgaagaagtcaattgcttcaaaggagtgactaaaaactacctctttatgggaataattggattcactttcatacttcagataatcatcatcgagttccttggaaagtntacctcaacagtgagacttgattggcaactgtggcttgtattccttggcattggattatcagct

SEQ ID NO: 5081 - DNA, 565 bp, Gossypium hirsutum
  Clone ID: LIB3826-002-Q1-K6-G3
gttaaaactgaatgctcattgggaagttagtaaatctggtgaggatgctctcagagagatcaatttgaacactgcaggaagcatgaacagtgagcagacctcatttttaacagctgatgaggaatctagggcatctgtagatctcgaggaaacagaaaagtacccagagatctttcagacacttaaagagtcttttctgaaggctttcaaagtaatggatagggatcttagaacacatgccagtattgattgcttctgcagtgggacgacagctgtaactttggtgaagcagggtccacatattgtcattggaaatgttggggactccagagctgttttaggtacaagggacaaagacaattcacttattgcagttcagttgactgttgatcttaaaccaaatcttccagcggaggcagagagaattcaaaaatataaagggtcgtgtctttgctcttaaagatgaacctgaggttgcccgagtttggctaccaaacagtaatgcacctggccttgccatggcaagggcttttggagatttttgcctaaggattttggtctcatc

SEQ ID NO: 5082 - DNA, 605 bp, Gossypium hirsutum
  Clone ID: LIB3826-002-Q1-K6-G4
cggacgcgtgggcggacgcgtgggtccaaatggaaaatattatcttgttgattctggatatcctcaaatgaaaggttatcttgggccatatagaggtcagcgatatcatttacctgacttccgtagaggtagaccgatatctggtaaagaagagatattcaatcattcacattcatcattacgtagtgtgattgaacgaacttttggtgttttgaaaaaaatgggccattttaagggatatgccaagttatagttttgaaaagcagacgatgatcgttgttgatacaatgacgatacacaattttatccgaaaacatgtcagccgaaatgatgcagattttatggaatacgaagatattaattggccatatgagaataatattgattcagaaaatgcgcatggtcgagaaaatgatgatgatgatgatgatgacgacgacgatgatgatagtgatgatgacggtgaatcaaacaattcaagtggttttgaaatggaattaacaagagatgctatagcttctagtttaatgaattcactttaaattggaaatgctactgtaaaatttttagtatttatatttgatatataaatattaccccttttt

SEQ ID NO: 5083 - DNA, 573 bp, Gossypium hirsutum
  Clone ID: LIB3826-002-Q1-K6-G5
caatagtttatgtcttgcatttggagtgtaaaatgtatttggtccaaaattattattgaaacatttaactttcaaatttgcttaatgcaacagctaatggtttcttgctctaaaaaagctagaggattatggcattttaacaaataaacaccgacgtctacacattccaaacgactcgtcaatacccttggcactcccaatgacacccctgagctccgagaaaaactgcataaaacaaggctacatattgggcaattggtgaaggacacttcagctaaacttaaacaagctagtgaaaccgatcaccatgctgaagttagcacaagcaaaaagataacagatgccaaacttgcaaaagattctcaagcagttttgaaagagtttcagaaggctcaacggcttgcagctgaaagagaaacttcatattccccttttgttccccagtcagctcttcctgcaagctacactgcaagtgagatggatgcaggttctaataaaagtgctgaacagcgatcccttcttgttgaaagaagacaagaggtcgtgctgttggataatgagaatgcatttaat

SEQ ID NO: 5084 - DNA, 576 bp, Gossypium hirsutum
  Clone ID: LIB3826-002-Q1-K6-G7
gttcttaactgtcaagacaccgaagaatctttcggttcagatatatcagctgaatctaatggaatggtggcctcagatggtagtaacaacaaaccaatgggatcttctgatcacagttatgttgagtgctataacggtttgaacgcatatgattttggtttagatattggggcttataatcataaagataccagtgacgagaaaaacctcagggaatatatagcgataaaacattccgcaaagaactctgacacttccttaatggattcttgttcatttgcttcacaagacatgagcttgtcaagcatcggctctttatcccttgcagacaaggacaagatggaagagctgaaattggagcttgatgcgatagattcacagtaccagcaatgcttccaagagctcttaaggatgagagaagaagcaatggaaaacgccaggaagaggtggatatcaaagaagaaagtatctgtgatgtgatgtacaaaatcttttacttgctaaccatcgagttttttctcctcttaccttagcttatgataattgcttcttttttttcggctggtggttggattg

SEQ ID NO: 5085 - DNA, 539 bp, Gossypium hirsutum
  Clone ID: LIB3826-002-Q1-K6-G8
ccgaaatggcagaggcgacaagaaagtcaagaagagggatctgaggaagaagaaagagaagaacgaggaagaggaaggagaaggtcaggaaacggcttagaagaaacattctgctcaatgagactgaaacacaggacccctgcttcctctgctgatgttttcaacccacgaggtggtcgcatcaccacagttaacagtttcaatcttcccattctccaatacctccaactcagcgccgagaggggagtcctttacaataatgctatctacgctcctcactggaacatgaatgcccacagcattgtttacatcacaaggggaaatggaaggattcaaattgtgtcggaaaatggagaggcgatattcgatgagcaggttgagaggggtcaggtcataaccgtaccccagaatcatgcagtggtgaaaaaagcaggaaggcgagggtttgaatggatagcattcaagacaaatgccaatgctaagattagtcagattgctggacgtgtctccattatgcgaggattgccggtggacgtgct

SEQ ID NO: 5086 - DNA, 515 bp, Gossypium hirsutum
  Clone ID: LIB3826-002-Q1-K6-G9
ggaaaatgcttaacacaaaagctccttaaaaagaagcctaagaagggttcaaagaatgccaagcaaatcactaaaactgaagattgtgaaagtttcttcaacttcttcaatcctcctcaagttcctgatgatgatgaagacatcgatgaagatgctgctgaggagctacaaaatcaaatggaacaggattatgacattgggtcaacaattcgagacaagattattccacatgctgtgtcatggtttacgggagaggctattcagggagatgagcttgagttggatgatgaggatgaagatgaaattgaggaagatgatgacgatgaagatgaggaggatgacgatgatgacgatgacgatgaagaagaagaagaagaaactaagactaaaaagaagaggaatggaagagcacaaggagatgggcagcaaggtgagaggcctccagaatgcaagcagcagtagattgtaatggctgcacactatatagagatgtttgattggaagacaaggtgggg

SEQ ID NO: 5087 - DNA, 334 bp, Gossypium hirsutum
  Clone ID: LIB3826-002-Q1-K6-H1
cgggtcgaccctgcgtccgcggacgcgtgggctggcaacctcgaacaagcggattttgcagggttttggggttccttttctttctttatattaaatgtttgtagttttatatcatctttgacgctcagttccctcgagttcgagagacaaagctagtaggcaattaagcttttaatactttttttcttttccaaaaatctaatgtttcatcattgtaatttacacatttctaggagacgtgaccatgcatttaggatttgaaattttgtagaatggagtagttaacaatgctgaacctttaattaattaatgaattcttatagtttatttggat

SEQ ID NO: 5088 - DNA, 619 bp, Gossypium hirsutum
  Clone ID: LIB3826-002-Q1-K6-H10
ctcagattgaatcctagaatataacaaaaccctccaaaaaagactttgtacggaatgtcgcagttgttggagaaggcgaaggacttcgtggtggataaggtggccaacataaagaagccggaggctagtgtctcggacgttgatctgaaacatgtgagccgtgagtgcgtcgagtatggcgctaaggtctctgtctccaacccctacagccattccatccccatttgtgagatcttttacaatttcagaagtgctggaagagggatagcatcagggacaataccagacccggggtcattgaaagccagcgacacaacgatgctggacgtgccagtgaaggtaccgtataacatcttagtaagcttggtaaaggatattggtgcagattgggacattgactatgaattggaattgggtctcaccattgatcttcctatcgtggggaacttcactatccctctctctcagaaaggagagatcaagcttcctactctcagtgacatcttttagatttatcattagtatgtcgctctcatactcataaaacttgtgtgttttcccttttactcatgctgtaacatgaagaaaatatcgaactatactaggttgtttttctttt

SEQ ID NO: 5089 - DNA, 517 bp, Gossypium hirsutum
  Clone ID: LIB3826-002-Q1-K6-H11
agaagaatcaaagttgtaacggctaagcctgagtaattcaggtgtggtggagaaaacgatggagaaggacgcattaaggatcaataacagtggtattggtaatagcaccaactacagcagagatagaaacggaggcgcaggagacggcggattgttaagatccagctcggatccggccaagcaaacggcgtcgtcttctgatttcgttttgcagtggggaaatcggaagcgtctgaggtgtatgaagatacaagtcaaagacgatcagtccggcccggttaatcgaacaacggttcgagtcgaccgccgagtcgtgagggccgacagagactcttcgaatcaaccaagcaataataatcacgggaatggatattttaacctccgtcaacgacctgcttctcctcaagctccgccatctcagcgcgttctcaggaactctgagaattccagtgctatgagaggccaaaacaacggtggtgtaagggaatttgcttcgccagataggggtgcgcacgat

SEQ ID NO: 5090 - DNA, 639 bp, Gossypium hirsutum
  Clone ID: LIB3826-002-Q1-K6-H12
cgcttatccccttctaatttagaaaagaaatggagactttcaacatcccggcgacgccgtcattgatgaaggagttcctccgccagatgggaggcaccgctgttatcgacggtggactggcgaccgagctggaactccacggtgctgacttaaacgatcccctctggagtgccaaatgcctcctcacttctcctcaccttattcgctccgtacaccttgattaccttgaagctggtgcagatattattatcacagcatcctatcaggccacaattcaggggtttgaagcaaaaggcttttctagagaacaaagtgaaaacttgcttaaaaaaagtgtggatattgccctagaggcaaggcgtatatattatgaaagatgtagtaaaagttctagtggtggaacaggagatggtaggatactaaaaaaccgtccaatcttggttgcagcatctgtaggcagctatggggcttatctggctgacggttctgagtacagtgggtgctatggtgaggcaatgacagtaaatgctttgaaagaatttcatcgaagaagggttcaggtcctggccgaagcaggtcctgacataatagcatttgaaacagttccgaacaagatagaagctcaggcttttgctgaac

SEQ ID NO: 5091 - DNA, 623 bp, Gossypium hirsutum
  Clone ID: LIB3826-002-Q1-K6-H2
ccgggtcgaccatgcgtccggaatgtaagcctttgcatgccttctttacagcttcctgagcctcatcttcacttgtagctataggagatttcttgaaggttgcatgaacatagctggtagaatttccaaaagataggatcaggcaagcacctgtggtgttgacttctaccgaacagacttccagtccagatttcgtcaaagctgcaagtaagacattttgatcaagtcttaataaagtttgaagaagtacccgtaactgaattctgaatgcaatttttgagaaaccaatgcttctagaggagctggacagaccaaatgagagttcaacaatgatggaagcgatttgatattcgcagcagcagtggcagccactgcagttgctcagttgctgggatgcagtgggggaaggcgctaaaacctggcacagcagaggctgagtagtatgcttctgtttgtcaccatgccaactaccaagatctttttaacaagtggggctctgctgatagtttggtggtggcctattcactatggctgaatggcacaacttattagtgcttgtaatttcataatcttggaaaaacttaaatttctttgttactagttctgatgatcacagtctgctg

SEQ ID NO: 5092 - DNA, 604 bp, Gossypium hirsutum
  unsure (1)..(604): unsure at all n locations; Clone ID: LIB3826-002-Q1-K6-H3
gggttatttagtgttttgtaaatggatttttttttgaactatttagtcttggacttttattcatttattttgggtttatttatttgcaaataaattaaatgggcccggacaaaattggttgactacaccatgtttattattacgcagaatgcaattatattgcatatattcattgtttcctttccgaggtaagacaactgtaatagctaaaatagtagtcgtttaactcacaatagaaatgtgcgtggtaaaaaaatggcacatgtataattactaagttttaaaccaaaacaaaaccgatgttattcactatcctaaacttattacgaaggttttgttgtatttggtacaagtatgaaactaaacatttgtgcttaggtacttgagcctccgaaaaagatgcatttagatcctcaaagaaaagagaattttgacgatggaagtttgggattggagatggttagtatctatgtaataatttattattttaggtctcaaagattattaatatactaatcatatcacaatttgacaatgtgtaaattaagaaaattaattaaagaaaaattaaaaaaaagattaaaaaanggaaaaaaaanaaaaa

SEQ ID NO: 5093 - DNA, 615 bp, Gossypium hirsutum
  Clone ID: LIB3826-002-Q1-K6-H4
gtttttacaaagacagatatagagaaggagcaatcatgagctttcaagatctggaggctggacggccatttgcgtcgaggcaaaacatgatcaacggaaagcaagacgcttcgcaagctgtggcttctggcattttccaaatcaacaccgccgtctccacattccagcgactcgtcaatacccttggcactcccaaggacacccctgagctccgagaaaaactgcataaaacaaggctacatattgggcaattggtgaaggacacttcagctaaacttaaacaagctagtgaaaccgatcaccatgctgaagttagcacaagcaaaaagataacagatgccaaacttgcaaaagattttcaagcagttttgaaagagtttcagaaggctcaacggcttgcagctgaaagagaaacttcatattccccttttgttccccagtcagctcttcctgcaagctacactgcaggtgagatggatgcaggttctaataaaagtgctgaacagcgagcccttcttgttgaaagaaaacagaggtcctgctgttggatatgagattgcatttaatgaggctatcattgatgaaagagaatcaggaattcaagatattcagcag

SEQ ID NO: 5094 - DNA, 507 bp, Gossypium hirsutum
  unsure (1)..(507): unsure at all n locations; Clone ID: LIB3826-002-Q1-K6-H5
gtgaaattgtggcaaacaaacaagaaacgaacatacttgatgaacctaaaacaccttacccatcaaggattgaagaagatggttcttctgccgcaagcatcgactttgctgcacatgctgaagccttaaaaaatgccttgaacaaactagctttcactgaagagcacaatagcccgtttggagaaacctgccgagacgaagatcaaggctcagcaaaacaaaaagatactgtaagctttgacgagagaaggagagcacattatgacgagttcaacacagtgaatgaagtacaagaaaagggctgctctctagacgatgagcttgataactgtatacatgtttccggttcaggttcaaccctcgacatcgattcaatagaaattgatatcgaggatgatgatgatgaaattctgccaaatattgacatacaggaaaccgatgatctgagtttgcctcaatactgacattttggttaactagaanaatcatgtcaatatctagcaatca

SEQ ID NO: 5095 - DNA, 367 bp, Gossypium hirsutum
  Clone ID: LIB3826-002-Q1-K6-H8
ccgggtcgaccatgcgtccggtcaaagcttgtgaatctacatgctgttcatgtggttgagacttccaagcctcgtcctggtgttaggggcagccttaaaaagtgataaaaaaccccaaaaaatgtgtttttcgtcaagctttggtgttttgtgatgtttcgaaatatgggtttggttcctttttcatcttttaattgtttgtcacgcttgcagtagagatgggaatgagaaaggggttggggtgaaaaaagttggattattcttgtaagggtcccccttgatttgatgtcgatgatgaatggtgttgttatagcttcctcatttaatgctaatgaagtgtttgtgcaatacatgttgtgcttgtttt

SEQ ID NO: 5096 - DNA, 326 bp, Gossypium hirsutum
  Clone ID: LIB3826-002-Q1-N6-A1
cattccaaggcttgcgaggaaaattacttatgctttcaactttgagcaaaataagaagattgaaaaagccaaagttccctaaattttcattaatcgatgttcaacaaagtactaaaatactaatacaacaactttctcttaaaacttagtcgtcaattctgcttccccgaccacatgtccttcgatagcttcaagaaccttctccttcgtcactttgttgccaacattcaactcatcatccaaagcaaatagcctgaacaggaaacggtggccgtgagagggtaacttgggacctcgccaaccagggaccttgtgatcgttgttgc

SEQ ID NO: 5097 - DNA, 444 bp, Gossypium hirsutum
  Clone ID: LIB3826-002-Q1-N6-A10
gtctcttgggttttcccgggttccccggcccgggccccgcgggggccccccccggccctccggggcggggcctgggggccggcccgcctcgggggcatgggggcttcctgggggcaaggggtagcccggcccaatgccccgcccgggcgggaccgggagcccctcgcgataaccccggggggcccaacgggggagctaaaaaacaaaaactggggggccctaaggggccgcttacccaacgggaaaccggtggggccaccggcctttttgaaatgggcaaaccccggggggcggctgctttcatgaagggcgccacgggggggggggggtgcgccagggaaacggcccaaagggggttttccttcaccccctgggcccgggagaaatggtgcaagccctccacgcccggcccccccaggagggcaaaaacccggccgaaggggg

SEQ ID NO: 5098 - DNA, 557 bp, Gossypium hirsutum
  Clone ID: LIB3826-002-Q1-N6-A12
gtgtctcgggctttctccacagagtcttgaattaaaaggtttttaactgatgatcacatttctttatttttctctaattattcccaactttaattgctttatagaactgccctggctaaccctataacattacaacaggaccaaacttctttttatatggtacaacagtacgatcttgaaaaagaaaaaagtagaagcagacaaacaacaaacacagactcaaggcagtagcagagcacaaaaactcgctcctttcatttaataggatcgataataaggatcatcctgggtacctccgcgggtgttccttctagtcccagcattgttagacgccacatttggcaagtcttgggttccccgttgtaccgtaagcaccctctgtatctccgccaaaccccatactgctgaggtcatcttgcctgcctgtatcatacccactacctggggtggggtacccacgggttgtcatgtccaccggtaccgccatagccaccatggtcgcctatgttgtacccagctggtggggagccagtgcccccaataccaccaccaccaac

SEQ ID NO: 5099 - DNA, 551 bp, Gossypium hirsutum
  Clone ID: LIB3826-002-Q1-N6-A2
ggatacaaaagaaagggttgtaccgagcacacgacctaacacaaactatctcacaaagtgaagatagcttgattcatctaagaaatatatctcctaaaccctaatgacaattgcagtatactgccataattgcaattggtcatgtaaaggatcttatattaatgccttaaaaaatttcttgccaaacaaattttaagaagttcgcaaaaaaaaatctattgctaattgtttgaagtgataaacaaattatttctatgcctagttaatatgttcattatcacattaacaaaaagaaacaacctactttttttttttctcgaacaatcaaaatttatgcattcaaatctcttcaaaacttgccaactaattcggtttccttccttaaacccaataatggtgagacgggatagatggacaactagagtggatgtatcatttagcatcatcgaacatgagaacgttaatcttgtcgatcccaagatcagatatgggttcaattggctgttcatctccctccatatgagacaaaaagcttgaaggttctctactaa

SEQ ID NO: 5100 - DNA, 367 bp, Gossypium hirsutum
  Clone ID: LIB3826-002-Q1-N6-A3
attcaaacttttttacattatgaattatagatttgtttcatctaattaaatatatcttcttaaaccctaatgacaattgcagtatcttgccataattgcaattggtcatgtaaaggatcttatagcaaagccccaaaaaattacgcgccaaacagattccaagaagtacgcaaaaaaaaaccatccgtaagttggaagagcgcaaaacaaattataaccatgccccagaaaaatgtgcactgtcacacccacaaaacgaaacaagccaaattcagccccttctcgaacaaacaaactttatgcaaacaaatcttttcaaaactggccaacaaactcggatttcttccttaaacccaatcacggcgag

SEQ ID NO: 5101 - DNA, 440 bp, Gossypium hirsutum
  Clone ID: LIB3826-002-Q1-N6-A4
aaaaaaaaaaattttttggcaaaattcccccaaaaaacccgttttgggttttaaaaaagggaaagggggatttgtcttgaaagtttttggggggaaggggggggggacccctgattttaaaaaaaaccaaaagggtttccaaggaaaaaccattggggaaattggggggggggaaattatttgccccccaaaggggggaagggcccaaaatctgaaattgggggagcttgcaaattgggggggggggggcccccaaatccacctttgggaccaagggcacgggcttttccacccccagggcaaaaaaacttttccccttaagggggtttaaagaactcattggtgcccaaaaacttttgggtttttttttttttataaaaatccttgggcttggccttttaaaaacccagtttgaaaaaaagggcaacattgcttttttt

SEQ ID NO: 5102 - DNA, 620 bp, Gossypium hirsutum
  unsure (1)..(620): unsure at all n locations; Clone ID: LIB3826-002-Q1-N6-A5
ctctaattattcccaacttttattgatttatagaactgccctggctaaccctataacattacaacaggaccaaacttctttttatatggtacaacagtacgatcttgaaaaagaaaaagtagaagcaaacaaacaacaaacacagactcaaggcagtagcagagcacaaaaactcgctcctttcatttaataggatcgataataaggatcatcctgggtacctccgcgggtgttccttctagtcccagcattgttagacgccgcatttgggaagtcttggttccccgttgtaccgtaagcaccctctgtatctccgccaaaccccatactgctgaggtcatcttgcctgcctgtatcatacccactacctgcggtggggtacccacggttgtcatgtccaccggtaccgccatagccaccagtgtcgcctatgttgtacccagctgtggtgtagccagtgccaccaataccaccaccaccagcatggccagctgtggcgttatgatggcgggcctcttgtttcctcagctctgcatcttcttgnctctcttctttcctttccctcgccatctctttctcattagggtctcttgtctccatttggtccaccttttcctgca

SEQ ID NO: 5103 - DNA, 138 bp, Gossypium hirsutum
  Clone ID: LIB3826-002-Q1-N6-A6
aaaacattgcaaaccagctcatcgaagtaaacaaaaggggatggtaaattaaagaaaattcaacttcaaccagccagatggggcctaggcttctcaaatgaaaaacattttccaatcaacaaactgacagacgttcac

SEQ ID NO: 5104 - DNA, 576 bp, Gossypium hirsutum
  unsure (1)..(576): unsure at all n locations; Clone ID: LIB3826-002-Q1-N6-A7
ctctaattattcccaacttttattgatttatagaactgccctggctaaccctataacattacaacaggaccaaacttctttttatatggtacaacagtacgatcttgaaaaagaaaaagtagaagcaaacaaacaacaaacacagactcaaggcagtagcagagcacaaaaactcgctcctttcatttaataggatcgataataaggatcatcctgggtacctccgcgggtgttccttctagtcccagcattgttagacgccgcatttgggaagtcttggttccccgttgtaccgtaagcaccctctgtatctccgccaaaccccatactgctgaggtcatcttgcctgcctgtatcatacccactacctgcagtggggtacccacggttgtcatgtccaccggtaccgccatagccaccagtgtcgcctatgttgtacccagctgtggtgtagccagtgccaccaataccaccaccaccagcatggccagctgtggcgttatgatggcgggcctcttgtttcctcagctctgcatcttcttgnctctcttctttcctttccctcgccatctcttt

SEQ ID NO: 5105 - DNA, 537 bp, Gossypium hirsutum
  Clone ID: LIB3826-002-Q1-N6-A8
gtgaaccattgtttattgcttcaaaatgaaactgttcactgcattttaataatgtctggccttcttaatctctttggagctgcagtgaaataagagagaacgggggaatctgtgagggctgaaatactctattcagaattcttgaggctttcacttgtcagccacaatttcttttggatgataaaaacaatgtcatccccctcattatctgaatcagctgttgctaccgcttcccaaagcaaagctgataaatatttctttacaaaatctatcactggttgtttgtcccggatgataaccaatccacttggacggagaatacgatccatctcgagtaacaaatcctcggcactgcagcctttcttgttgatatcagaaaagacagtccaagcttgaagtaaattatacgttccagggtatgtggaaaaggcttcacaccagttatgagtagtgccaatcagacctctgtcatatatcaccttaagtgtgtttggtccatcctccgggacaacattcatgacccaaacatcttgcttt

SEQ ID NO: 5106 - DNA, 595 bp, Gossypium hirsutum
  Clone ID: LIB3826-002-Q1-N6-A9
gaatccaaaagcttattttatattttccatatttctttcaaacttgaaaatattagttatccatttctaaatccgatgaaatacctaactaattcatagatcaatgacacgagacaacttctggatccggtttaataagaagtcaccttgtttaatagtggcctggtaaagagcattcttcgcatcagggcggttagtttcgaggacaccagcaaccttgtcaatcttgcaatgaagcttccctgctgcgataaaacgagatagctccctatatagagagaggtgttaatcagacgtaattagttactgatcaatgaactctactgtcaccccaaaagcctttgccatggcttcaatagtaacactcttgtaggattccaaaaattgagagtaaacaacagtcctgacctctctcatgtaaaaccggaaatgtagatgcaaatagcggtccaattttatctgctctgtcaggccagcgaatgctaagaagaatgatttgtactgacaattgtaaagagaatttaaaaattccgaaagatgtggaatttttccaatcacagtcaagatttcaggagcatcaaccaccttttgtttc

SEQ ID NO: 5107 - DNA, 122 bp, Gossypium hirsutum
  Clone ID: LIB3826-002-Q1-N6-B1
ggggccccggggggcgcccggggaatccggggcggggcccggggggggtcccagttttccttataggggggggtaaaaaagctgggggaaaaaaggggaaaaggggttcccgggggaaaaag

SEQ ID NO: 5108 - DNA, 217 bp, Gossypium hirsutum
  Clone ID: LIB3826-002-Q1-N6-B10
gggcccaaatcagggttttttaaatttggttacccgggcccagaatacattttaatttaaaatttccttttttttttgggggtatatatagggattgggttacactacaccatttccctcaaattcaaatactaaaaaatgggtgggggggaggggggacttcaaaaaaagccctgggtttaataaaaaaaacatagttttctaccaaagcgtccgg

SEQ ID NO: 5109 - DNA, 496 bp, Gossypium hirsutum
  unsure (1)..(496): unsure at all n locations; Clone ID: LIB3826-002-Q1-N6-B11
aactgagactaaactgtatcatattaattcagagtcactgacatggcaacaactggaatcatggatatgctttcaaacggtaaaagaatgtatcttcacaaactgcaaactcaaatgcattaaaaatttaacaaacagcctaaggataggcccaaacttgttcttttacacatgccgccttttttttaccgactggacagcaagtccaccggctgatttggacatcacaaaccagtactggttaaagcatcacctgcgaagctatgattcccaccaatatcatgaatttggcttaactatccattggttccaacctggctaggttatatacccaatctgcaatttcttttccaccgggccaaccaaaaacatgtntcctcctacgaacagtactgacaaactccatgtaaactcttgctgacttatcagtcactacctgccataactaagaacttccctttatacttacttatagagcgaggttgagtgtttccac

SEQ ID NO: 5110 - DNA, 531 bp, Gossypium hirsutum
  Clone ID: LIB3826-002-Q1-N6-B2
gagcacataaatctcaatagcctctaacatagaagattttcaagatgtcccacacacaatataactgtctcaaaattcttataaaccctacaatagtaatgaagccaagatagcaggaacaaaatcaccaagtacggtccaggggatcaacggtagcggcgaagggagagtgtgttgtttctcttccaggttgccctccttgaaggtcgagccttgtggtgcaagtgccccttgccacgaagacccctgtatttcttgccagcagaggtcagtcctcggagttccctgtgcttgtgaaccggattgcagatccagttgattcttgggtcattgcggatagcgttgtgggcaggatcgactaagatgacttcaaagtatttgtaagttgaatcctcattgatccaataagagttcacgaccctaagaccaccaagcttccggccagctcgttcctctgcaactgatcgtttgctacgttggaatttcagctgggtaacaccctggtttgtgggctttccatatacaataccc

SEQ ID NO: 5111 - DNA, 423 bp, Gossypium hirsutum
  Clone ID: LIB3826-002-Q1-N6-B3
cttgcttccaaaccacagccaggcaataagtaaggaaagaagaaagaaacaaatcctacctaaagccaaccgtacagcacaaacaaaaaaaaaaagagggggggaaaggagggcggacgggaacgagggaagaaaggggactaaacaggggggggcaaaaagggggggaaaaaaagagagggctaatgggcggccgaccgagaggggcccggaaagaggcaacccaagaagaaacaaccgggcgggctggaagaacagacagatcaccgggcgggagggcactcacgagggagcgcgcgggagagaaccccccccggggagggccagggggaaagaaatgaaagacgtgttcgattggggttaccccaaccaaaaaaaaaaccaatccaacccaaccgcaagcgaaccacccaggggaaaacc

SEQ ID NO: 5112 - DNA, 578 bp, Gossypium hirsutum
  Clone ID: LIB3826-002-Q1-N6-B4
ttttttttttttcaaacaaagagagattcctgcactgtaaatacaggtctagagttcaacggcagaagactccagtaagatccttcattgtcaatacaacagctataccattctattctataacaacccataggaaaatgagatacatcaagtacacaacttgagaatccttgccctttagcatttggttcaaaacacacaaattcatacaccatctgatcattcatatcgtcatccctgaaaagcttaccataactagtcgtcttctttgcacactctgttacatactgaaataacttctcattcatttctactatctcctcactttcccaaggttgacactgccattccatttcttcatcgtttctttccctgtggcactgcttctgaaaagacactctgctatgaagaacgcagtacaatctagtcaatccaagtgacaattcaggtgaggcatttctcagttgaagacagagatttaatgagaggtgaaggcctgatgaaacagtaatctgactttgatttctgctatctgtactgtagacaaagagctctgaaccaattataggccttgtatt

SEQ ID NO: 5113 - DNA, 577 bp, Gossypium hirsutum
  Clone ID: LIB3826-002-Q1-N6-B5
aacttaaaatctactaattcattcaactaatggagttgagaatgtcatcttctgtaagacatgcatgaactcaaaagcaagctcttacaaattgtcaatagtatacaaaaccctgttttatgctttatacatcatgttctagctatgcgtctagctcaggaagttcaaccagtcattgatgagacagatcaagtagcgtgtctttggttcagctctccatgccaatgcttgaagctgccttaccagcagaatccttgaatttgtttttacactgcttcttcctctcttccttgttatccgagaatatgcttctccttagactccggcttgaaagatatgttaatggtaaacagtaggacatggatgatgagttatcttgaccccagcatgaaagcaacgaactaggaagagcctcaaaggtagaacgaggagggtaaaatgcagacactgttttaagtcggagctcttgtaattctcatcgagcagtttcaccggagaaaagagataatgcaagaagctggactgtcaggagtagcaatttttttacttcgcaggctttgctgaactggcaatttat

SEQ ID NO: 5114 - DNA, 257 bp, Gossypium hirsutum
  Clone ID: LIB3826-002-Q1-N6-B6
ggattcttcatttctatttttatttttttttttattttcttaattttttttttgtttaatctttgggttttttactctatttttatcttagttttatttttatcttttttttttttaattttcaattaagtttttcttggttttttttttaatttatctttttactctttcaagggggattattatatttttttttttattttttattttattcttctaggtttttattttttccgacccctgggcggacccctggg

SEQ ID NO: 5115 - DNA, 549 bp, Gossypium hirsutum
  Clone ID: LIB3826-002-Q1-N6-B7
aaggggaaatttttctttgtaatccttgaatgagaagaatggaagcagaaatatggaaacaagtctgttctgctgaaatgtcacaatcccctctactctaatttagacagacagacagacataacttcccactacacaacgcagcagggcaaaataaaagaacgagaaaaaagacccgagctcatttccgctttttagctgggggctgaagttcttcttcctcctcatcttcttcctcttcttcctcctcttcctcttcctcaccctcatcatcgtcgtcatcgtcgtcatcatcatcatcctcgtctccagtgccaccgtctccattggcctcgggttcatcctctggatcaccttcctcttcatctttttcgccagatccatcttcctcctcacctccatcttcatcatccactgcttcatcttcatcgtcgtcgtcatcatcagtgtcgctggcatccttgttctcaggaccaggtttagtcatcgcaataagttgagcaagtggaaaccctgcatatgcctcaggctctttgatgaagactcaat

SEQ ID NO: 5116 - DNA, 534 bp, Gossypium hirsutum
  Clone ID: LIB3826-002-Q1-N6-B8
caacttcaaatgaattagaatttctcttgtttaatacaacaaaagaatggaatccaaagccacttgatgttttgttcccccccccctcaaatccgtattttcctaaacatgcaaatactatggtatacagtcttgtttctcaaatgtctcttttccttttaaacaaacaggcactttttacacttactgatggtcaatcaaccatttgcacatatgatggctatgattgtgagatcatcgaagatcgatgacgtcaaagttcagattcggattcatatacacatctgtacatgtactgtaaagggggccaccatctggaggttgaatgtgtggatgaaagccacgtttctggcactgtctaatgacggacatcccacccggagtagtcaaacgaaaaattccatgttttctcgaagcatctcttggtgccattacgattgctacagattccggcaacataatctggtatgagtagtgagtatggagatcaattgatgacatgaaacatgattgcgtaggatgtgtatgaatcca

SEQ ID NO: 5117 - DNA, 602 bp, Gossypium hirsutum
  Clone ID: LIB3826-002-Q1-N6-B9
gcatcaaaatatgtatcgatttccctattaatagttcctaatgatgagaaatgattcaataaaatccacaggacatacagttgcaattcagtaaagatttgtgagtgataatatgatgaaaacattattggcgttatcgggattggcaggaaccgccgcacagccaccgtcctattccaactttattgacgtatcttttacccaccaaaatctcaacagttgcaaagttgccggcagtgacacaatattccccacaccacaaagcaattgtccccaacgcaacaatgacatccaaacaaacatcacttcattcatttctttcactgtctttttgctttcccccacttccttcaaactcaaaaagccccaagaaaacgaaagaaaaaataaatgaacagatatggaaaatcagagcacatttgttatttgttatctaatttttattttctatacccatcaatcccctctaaaaaaggacaaccatttgacatactgaaaatattaaatttaaaattaaggggaaaaaagagttatcatttatcatcatcctcgtcatcaccggacttatggtgatttaccttcgaacaacccatacacgcgcc

SEQ ID NO: 5118 - DNA, 433 bp, Gossypium hirsutum
  Clone ID: LIB3826-002-Q1-N6-C1
caagacggaacaaattttcattccaaggcttgcgaggaaaattacttatgctttcaactttgagcaaaataagaagattgaaaaagccaaagttccctaaattttcattaatcgatgttcaacaaagtactaaaatactaatacaacaactttctcttaaaacttagtcgtcaattctgcttccccgaccacatgtccttcgatagcttcaagaaccttctccttcgtcactttgttgccaacattcaactcatcatccaaagcaaatagcctgaacaggaaacggtggccgtgagagggtaacttgggacctcgccaaccagggaccttgtgatcgttgttgccttctttgatgctagcataatctccacccacttcctcttctttcccagaaaatccctctgggagacccttcaacgttggcggtatgtta

SEQ ID NO: 5119 - DNA, 402 bp, Gossypium hirsutum
  Clone ID: LIB3826-002-Q1-N6-C10
gcttcatcctctcattggggcgtttgaagggggggggggccccaatccccctggggggtttttgtctccttctttttccattggatttttgtgttcttccccgtggtcttggggttcttctcttccatcaggtgcttcttccccttgttcccccccattgccaacctggatttttgggggggggtcttctttactcctccctgctgaccttgttttctttttggcccctcccttcctaatccccctcgctgggggcctcggccgacggggggctccccgcggttccttcccggtggttgttggcggcccccccccccctcctgtggggggccttcccggttggcggccccctccccctggttgctccctggggtgtcgtgtccttccccgccaactttcccc

SEQ ID NO: 5120 - DNA, 384 bp, Gossypium hirsutum
  Clone ID: LIB3826-002-Q1-N6-C11
cttatcgttacagaattgtcgagcgctgggtgcttttaaaacatgggctaaacttgctccatgattgtaccattgataagcatttatttttaatcattcattccatacaacgtggacattttagcttcatgctattgcacttattgatcttcatattgatagtcacacctaatctgacaaaagattctatcatttaaaaatcttgattctaggaagaccaattggaatcatctctatcatttccaatatctccactaccaattagttggccagtgtatcgtgtcccatgattgtatggttattatagagaatgagcttatcattaatgaccataatcaatgtcttctaattgtctatcctaattagacattattttatccaaat

SEQ ID NO: 5121 - DNA, 499 bp, Gossypium hirsutum
  unsure (1)..(499): unsure at all n locations; Clone ID: LIB3826-002-Q1-N6-C12
cgttggaaggctggagtttttattnaaacatgggcccaaacacgtaaaaccaaagataatttacatattancttggaggaggaggcttcttcttattcgggtttcatcttacctcnaaaacttacaaacctctctaattacatggttctcgcttcagttttttcccatttcacaacattcacaacttcggcatttacaagaaactactcggctaagctctcaaccatggagctcctcatctcaacgcacacacatatcccctcaaggctttaaccccacaactcccattcttcattcataatgtcggcccttttgttgtcttgttccagggaaaaataactcttcatcttggggccaaagatcctatccacctcttcttccttgcttcttttattgcagttccctttgcttccttctccaattggctgggacatatttctccctcccctgcaagaaagttacctatacgtggttttcttggtgtgacctcaaagcataa

SEQ ID NO: 5122 - DNA, 528 bp, Gossypium hirsutum
  Clone ID: LIB3826-002-Q1-N6-C2
acaaacacaagctctcggggttaaacgacttaagacacatacaacagtagccttatacacaggtttgtaaaggaaacagagcttttacagtacagagctccagcactaaacaaagcttaagctctagatacaacaacatatctcggatgtctctccaacattattagaaacataacaggagttgcgaagacataaatatagcatctaatatcaccaagaaaaaaacacaataccaggctcttcaggggtaaaacaacatcgtttggcttgattcctgaaccatgaaggggaaaatgattagaggcacaccccgccattggctgtagcagcttcgggatggtaatgaagcatttccttccacattttctctctgatcatctcttcccctaaatcctcatctatgtcaagatcgagtggcacctgggctgaagggttgctgttcggatcatacaatggtgccatgtaagggtgttggagtgcttcagttacactaatcctttttgaagggtcaaaaacaagcatcttttg

SEQ ID NO: 5123 - DNA, 617 bp, Gossypium hirsutum
  unsure (1)..(617): unsure at all n locations; Clone ID: LIB3826-002-Q1-N6-C3
aacccccaaaaacaaaacagccaatttcaatatgaaaataataataataataaaaaaggctagaaaatccaatctctcacctcttctctttgctcaaattgaaatgccaaaactaggtttgatcatggcagtcacaaaaaatagggccctgccgttttaatattacaacaaaagagtcccttcttccccgccaaaagctcatttgcaaaatggatgagggattggatgtacctgtgccaatgccttcgtcttccaaaccgagttgctcctgtccatgcttgtaagatactcaatgcaaaggaaatgatcccgatggcacccatggcgtacaataccatgatgcgtggaaggggcacttcagaatttaacaatgactccgaactgaagataccgtgaagaatcaaacaaatgcaaaggaacgaatctaggaaccttgggaagctctgatgcatccctattctctgcaaccaagacaccagagagggaacaaacattagtgtagccaaaatatgcagcaccagtaagccatgnccgaagtggaagatatcttcttgtgtctgaatataacttngagctgtttcttttgaaggggaacccggtttgggctttgagtgctg

SEQ ID NO: 5124 - DNA, 535 bp, Gossypium hirsutum
  Clone ID: LIB3826-002-Q1-N6-C5
aaaacgaaaaacccaaacaaggaacacaatttattaacccatcaactgttaactgttttgaagttgttacacatcaacatgttgcactaatattacttttttaacataagtaaaccttctgattatcgtttttagataatgaacaaagcatgaagcaaaaatttattatacccttcttccaccatacactacgtttgtcttgtacctacatttttgaccagaaccggctcaagctagcttcgatcgatccgtgaggttcatttgtcggaagatatacatcatcatcgaactttacaatgctgccgggatccttgcttgatatattaacaggtaaaaaatggatattcggcatttttagtttaactgatgatatgtcactgaacctgccaagtacagcctttgccatctgcaaaagagtgctttgaacagatgcactatatacaccccgttcaggaggaccaaagaaagcatcgaccaaagcctttttcacattcaagtattgctcattgaggtagagcgacttttgagggatgct

SEQ ID NO: 5125 - DNA, 524 bp, Gossypium hirsutum
  unsure (1)..(524): unsure at all n locations; Clone ID: LIB3826-002-Q1-N6-C6
gccacagagcaaaaattgaaaaattccataattccagtaaatttcaagcaccaaatcttaaaatctcttgttacaaattgattctcgtaatagagttcaagttagtatcttctcctaggactccgagagcgatgtgtccgtccggctctcatattttttctcttagaggctccaacactgggtccattgctaaaggcccaatcaacattcatagtctgcgtaagaagttctgctccatccattgcagatatggcattctttgcttcttcaaacttttcatattcaatcagtgcatatcccttgacaaatccagtgcgacgatcaagatttaaatgcaaattcttgatctcaccaaattcaccaaatgtattgtgcaaatcatcctcttgtgcttcctcatgtacaccagtgaccaaaattatccatccttcaatagatctctgtggaccggggccgccgtcagagccgagagagtcaaagtcgcgggaagcgagatgggagtgacggtcggcgtcntcctggcg

SEQ ID NO: 5126 - DNA, 541 bp, Gossypium hirsutum
  Clone ID: LIB3826-002-Q1-N6-C8
agcaagaagtttatttaacagtacattgcaatccagaacaaaaagtagtctccagagcctataaaacattcaacacaaagagaaagaaaccatatcatgaaatctccatcatctcagctaaagctttgtttgcagcagcttagtagacgtagccctttacgaacattcctttcttggcctcttctgattctccctcgccggtgtatttcccgagctgagcgagtgagttggctttggcacggacaaggagtgcatcctgagcagccttaacgttctcgggtctgcctccccatgtcttcaagcaagtgttctggagagctctggcatacgagaacgagacgtgccatgggtttggagattggttcattgcgttcaagttgagggttgcttcaacctcggattgtccgccagacaagaacatgattccaggaacagctggggggattctcctgtggaggagcttgagggtgtaatcagcaacttgctgtggggtggccttgtctttgcattcagcaccaggagtgaccatgctgggcttgag

SEQ ID NO: 5127 - DNA, 588 bp, Gossypium hirsutum
  Clone ID: LIB3826-002-Q1-N6-C9
aacaaagccatcaacaacattttatatgcaaagtaaagtgtcaacaaacaccaagaacactttccaacatattggcctcgtctactagcggtagttaaagagtataattacatttcaggttgcgctgaaagggtcagccgatattccccagcagcacgctatacaaaatgtttcttcacctgtaactgcctctctgtatctataatgggttttttatcccataagttaaaccaacggcctgccatctttaatatcgaacccttttgacaaaacctaccatgtaatgctcttttgaatcaataacatttcttcaaaacaggtatttgggggttatccttttcttttcacagccctggatgcactccccagtatttgcacatagtccccataaccatcttactcttacttctatttatacttattcccaccataaggaattgtatcttacaggttatggacagaaatttaactgacctcaaaaaggcaaacggttaagcatcttcggagttgtatgttttgggcaaacaaggacagcacaaaccaagttgctgattgcaaaagactataacccatcaaagcaatatgcat

SEQ ID NO: 5128 - DNA, 585 bp, Gossypium hirsutum
  Clone ID: LIB3826-002-Q1-N6-D1
atgttgattcaaacagctgaattgataatcaaaactccaaatcacatagcccaagtattataacatattcaaacacaacaaacttcattcgactaaacaaaatccgacgattactgaaaatttaaaacctaaaacccatactggaaaaaccctaaaagatccatcttttgcacgagccctacttaatctccaccagccttctggtaaacataagtgagtccacacttaccgcaatagtgcctatcgaaatggttagccatgaaagttccagcaccacactcagcattaggacactctttcctcagcctctgaaccttacccgattcatccaccttgtagaactgtagcacagcgagcttgaccttcttcttcttgtgcttgatcttcttgggcttggtgtaggtcttcttctttctcttcttagcacctcccctaagacggagcacgagatggagggtggattccttctggatgttgtagtcggctaaggtgcggccgtcctcgagctgctttccggcaaagatgaggcgctgttggtcgggtgggatgccttccttgtcttggatcttggctttgacattgtcg

SEQ ID NO: 5129 - DNA, 457 bp, Gossypium hirsutum
  unsure (1)..(457): unsure at all n locations; Clone ID: LIB3826-002-Q1-N6-D10
caagtaccaattctatatttaatccattacttaatgattactatnacttttcaagtcagttacattactttattcgaagaaaacaaacattatatgtgtaataacccagttttgcccggcccattcaaaataagaccaacccaatatcataacactgcccaaattaaatacaattaaatccaataaaacttgggccaagcttaacccaattacagggcccaattaacccactagcctaaaacacaaaacagagaaacctagcagcaaaatcagcagccgcgacaacctcacccacgcctcaacatcgccccacgttcagcactttgcgcacgtcctccacgactttcatacatgcgaaaaaagtcgcatacggcgttgagggatcttcattccgccgtcggaatgggtggatctggagtggaagaaaagggaggctgcggcaaaccccacgcgtccg

SEQ ID NO: 5130 - DNA, 580 bp, Gossypium hirsutum
  unsure (1)..(580): unsure at all n locations; Clone ID: LIB3826-002-Q1-N6-D11
aactgaaactaaatcttataattttaattatgctaaaaacagagcaaaatttcgaattttggctatctttttaaactcttttggtttctataattccaaaaggttagcccaaaagaattcaaaatatttacacaatttctgaaattcctttcctggtccttctacatataattttttctttttattggctaaacccaaatccacccgattgagtcgggcaccgaaacccatacgggtcattcgagttagagaagttatgactgttcaacacattcgaattttgttgaactatccccgagttatcagctcgctgagttctgagtccactctgtacttcctcttccaccgagttaccaatcttatttgtcgacacgtccatctgacaaagtgtaggcgggattgtgctgacatatacgttactatttccataacttagtattcccctgactctgagttngagtttgtgtttgagtttgtccactcggtaccagctcaagcacccgacttagcccacccagacttccccaatccaaaattccctatccccaattgtggaaccccagttcacattgttttgaaa

SEQ ID NO: 5131 - DNA, 86 bp, Gossypium hirsutum
  unsure (1)..(86): unsure at all n locations; Clone ID: LIB3826-002-Q1-N6-D12
aaaaaaaaaaaaaaaaaaaanaaaaggnnnaaaaaaaannaaaaaaaaaaaaaaaancgagaagaaaaaaaaaaaaaaaacaaaaa

SEQ ID NO: 5132 - DNA, 597 bp, Gossypium hirsutum
  unsure (1)..(597): unsure at all n locations; Clone ID: LIB3826-002-Q1-N6-D2
agcataataataattacattccaatcctaaaacaccacaccaaggataaaaagaaatgcttttacagagtacagaattgctatagtgccacaaagaacaataggaagtagacataaaaaatccaaacctttctaagtgtacataaaatgtcacgaagctcagaaacagtgagcagactcaaaaggtccttcatttcatcatcatgtagtttagttgtatcttcaaagagatacagatagccagttgcagacagctccttgacagcttgttgaggattacatatttcagggtacataatggtagacaatcgaaaccaaggtcctttccgtgtataaagtcgaacaaaaagcctctgactatcctctgataatgaagtgaatgattcgatgaatttctttttatcttttgtgaaaaggtgagggctactagttagaacctcctttagtaacagacaaaaattttgctgatattttgtcgtattaggtgggcggttctttgcaaattcaactacttgaagagctttttgccacaaatgtaaagcctcaaattcatcacatcctttnttaccattaaatatactgttctgacacacaatct

SEQ ID NO: 5133 - DNA, 574 bp, Gossypium hirsutum
  Clone ID: LIB3826-002-Q1-N6-D3
agcaaaaacaaatatcataacacatgcttttactgatcaaattcacaaggaaccaaaacaataatcaggagctgggctccataattcgatataatgcaatgcatgataatcccttgtacgacatggatatgattacgcagcagaaagaaatagaattgattcaacaattctctgggtcctctcctctaggaattagcttcagtgaaaaaggtcatcatctaaatgattatatattacactagccggagcacacgtgaagggcaatacactcagtactgcataattctaccaaagaaagaatctgagcacaagactcgagttgcaccagatgagccatctgccacctgcttgctttcttctatggcaactcgaatcatccctaccaaaccccacaccgatatcagaaccactggacgtattctcccctacaacaattctgaaatttccaagtaatacagtaaagcaattaagttgcaggttctacactttcagcacccgcagggggtaaagtttccatttctgtagttgtagaaacagctgatgtttcctcactgttagtttcgagaactgttga

SEQ ID NO: 5134 - DNA, 420 bp, Gossypium hirsutum
  Clone ID: LIB3826-002-Q1-N6-D4
gaagccaactttccccagcgctgaaaataaaaccaaaaaaaaaacccaaaattaaaaaaggggctaaacaaaaggccccccccgaaggcttttttaaaccaaaaaacacccaattttcctggaaaaaaaaaaaaaaccaaaaccccaagccaaacatttttcccccaaaataaaacatgcccattaaagcagggaaacccgaccccatttgccaccatgctgggccttttggggaaactttaaaccccccccaaaccccaacgacttggtccaaaaaccccaagaaaattggccccccaactttggaaaccttgcaaaatttttcccaaaaagctttgctggaagccgggtttctggggggccccccttttaaccaactgttttctgggggggaaccggaaaaaaaaccttttttggaaa

SEQ ID NO: 5135 - DNA, 604 bp, Gossypium hirsutum
  unsure (1)..(604): unsure at all n locations; Clone ID: LIB3826-002-Q1-N6-D5
aaacaaataaactcaactatttcacacattngaaacatacaannctgaatttacgaaatatnccacctttttcanccgtatgttccttaaatttctatatgtanaaggggaaaaaaaagggaaaatcttcttgcaaaaattagcacaaaaatcatttacagttcaacacactgtttatgacaaacttaagaacccggatgctggcggtttctgaggcagatgtcgtggacatgctttgtaaatgatccacaatctgagacacctgtctaaagattgataccacatgcatggctattgtcggatccgaggggattatggcaacagctacatcagtcatccatacaagctttctacttgtttccttgttgatatcacaagccagttgctgaaaaagtgccagcaatactccttggctcagtggacatggtttcattgacaatatcccttgcagattaacctggttaattcagatcagaccaatgtcaggtctcaaagagttttcttgtcatgcacaacaagggttgttggaaaataatgtcaaagagtacaactagttattggaacttacctgagaacacaaccaggaaactatagagacatcgct

SEQ ID NO: 5136 - DNA, 588 bp, Gossypium hirsutum
  Clone ID: LIB3826-002-Q1-N6-D6
aacagtcaaaatgaatgctttaatagtaagttcagaatactacaatcttcacagatcacaataaaactcacagacacttggaatggaaagaaacgaaaagcagctagctccaactgaagctgctgtactgcaatgtagctttgtctttcttctccgacaaatacccttgagctcttgcccaacgggagagttggtagatctgtactgtctcatttgaagcatggcacgccaacagtagatagtttcgtggttgtaccatccatgcaaacctcatgaataatgcagaatagacacacatcgctgatgtcatgttgccagaaatcatttctgggggcttattcatgtccaccaatcccttcttcggtaaaattagtatcgaaaacaacttttgtaagatgctgcttcaggaaaaccgatgatagaagttgccttgttccaatgtcccaaatgcgcaaataactgtccaagccgcaagatgctataacaggaagttcagggtgccgggcaatggatcggatgcttccagagcacttccccaaaaacatcctaacaatttacctgtgcgtatatccacagaagcaagtcacc

SEQ ID NO: 5137 - DNA, 608 bp, Gossypium hirsutum
  Clone ID: LIB3826-002-Q1-N6-D7
caacaaaggtggcagccacacactccattgacttaaaacaaaacagaaaccccatcttttgcttattttacaaaacaggacaccatttttatatatagctgctacagaatgcatactatcttaaacacacaagatttcacttccccagcattatatataactttaaaaaactacatatagatgatgaagctatgtatatattattatgcgttgacattctcattaagcctagcagctgccgccatagatgctgccactcctcctggatgtgtggctacatttggattgtttctcagctctgcactcaccactccttcagcatcttgccttgtcactgctttatccgccggtaacttcgccgttgcacccgttaaaacttgattcagcttgatcttttcctcatcgcgatccagggtcgcgttatgagccgcggcggattgagcagtagcggcgagtccgccggggattatgacattcgaaccagtcgctcgaacttccgcggcttgaacggcagcggcatcgctttgatcgacgggcttgtcgcccgctgttttagcggttgcttcgagggcttcacctatggttattgcgttttgctgcacagcgcc

SEQ ID NO: 5138 - DNA, 596 bp, Gossypium hirsutum
  Clone ID: LIB3826-002-Q1-N6-D9
gcaacaaagaacgtacttgtattacaaaaagataacacaaacagaagttaaaacaatgaaaagcaacgcaaatattccacccctatattaagggtgtgtgcagtgtgagatcacattttggttttgctggagcgatcacgaataacgccttcctccccaacacgcccaacatcattgaatgtttcatcagatgatctcagtgtagcatcaacggctcctgccggggattcttcaaccttaatcactatcgtctctgaaaacccttcacgaccgtggcgtttcgcatcatcatcataagtcttccttctaccttcatcacctctcagcttcatctcttccatcttctgtctagctgactccgtcgtttcactcaatgtctccttggtgttctgtgcagtctcggatgccttctgcttcgtttcttccgtcttcccagtgaggaaatccatagccctcttagcagcgtctgcagctgaatctttcaactccccaagcttactaactgttgtatccttaccttcctttgctttctccgctgcatattccgtcccctgttttgtcttctcagctgtcacgtccttccggacgcgtgggtc

SEQ ID NO: 5139 - DNA, 577 bp, Gossypium hirsutum
  Clone ID: LIB3826-002-Q1-N6-E1
atggaaagatctctggtacattattttattagaaaaatgaggatttaactgtgacaactgacattatggaaagcaatcaatggcatacataatgcaccactcacctgtaccaaagagtaacaaccaaatgagtatatggttttaatgggcttccatattgacgagccaacccaaaatcacaaatcttcaattcaccttggttatttaaaagaagattagatgtcttcaagtcccgatggagaacccagttatcatgaagatacttgacaccctccagcagctgaagcatcaggcatttaacttcactttggctaaacggttgtttcatcgtctccatcagccctttcagatcatgttccatgtattccatcaccataaaaatgctatcaaggttactccctacaactacttctttaacatctacaattgatggatgatgaaatgaaagaagaatatttatttccctcagagaggtcaaaggaaaaccttctctttctttctccatctttaccttcttcaacgccacaatttccccagttttcttgtccttagctctatatacaacaccataagtacc

SEQ ID NO: 5140 - DNA, 591 bp, Gossypium hirsutum
  Clone ID: LIB3826-002-Q1-N6-E10
agggaatattgaccactaaataaattaatcaatcaaagctaacgcttcagtttccacttttatgcctcaatatttatacatgaaattcactaaattacatagcttttatgccaaacaagctagcaactaaattaaataaacttaatatgaaattataacatgaaatggtatacctgaatgtatcattatctttatctaccaacccaacacagttttaactttgatgggcaaaggatgaatatatgatgaagaatagttataaaacacgtacagtttaaccaccgcgacagaaatagattggacaatcatgcaacagcagatgcagtccggcgaagatctaccccattatcaattttgctgcctgttggcctgcctttgaaactgccgtacctttcccgcctcggtagaaaaagagaaaggagcatttgttccaatccctgcactgtgtactttgcatacttactggaacttgcatctttctctaccagtggcccataagtttgcatatagcttcgatatactggtagaaccgtttgcactattagttggcatgtcttctccctcaaatctctttctgcggacgcgtgggtc

SEQ ID NO: 5141 - DNA, 384 bp, Gossypium hirsutum
  Clone ID: LIB3826-002-Q1-N6-E11
cgtaagaacagaacagaaatatcaagcacttggtgcaaagaaaacattgtttcagaattccccatgaatgaaccaaagagaagcagcgtttttaagcatcaaaccaaaattaccgaacattgaagcataagccaagtacttctatgaactccatatgataacaaacctaaactgacaaaattatccatcatgaaaaatcatctctcaaggaagaccagcaggtccagcaccaccataaccaccacctccacgaccaaaagcaggccgtgttccagggcccctgaatgaaggctgataatcagctggagctcctcctttatcaccaaaatcaccgcctcctcgaggaccaccgcgatagccatctctgtcaccaaatctcctcgt

SEQ ID NO: 5142 - DNA, 597 bp, Gossypium hirsutum
  Clone ID: LIB3826-002-Q1-N6-E12
cgatgatcaaaacataatttaaaccatatctgtaatttacccttcacttaaaccttgtacaaaatacataaatgatctttcagaatcagttgccttgattacactcaggcaagcatattttcttctgttctgttttgcctttttaagttaggatgcaatcaaccgctttgcggttagacaaccctttctatacacaagcttcagcaattctcagattgtcaattttacttaaatagcaaggaacaacagaaataacaaattcatgcatccctggatcttttgcattgttgaaatggctttatgaagtacgaggcaaccggtgtcttgggaaccggaatcagctttcccacaattgcaagaggccagctgataatgccaatgccaagggatacaagccacagttgccaatcaagtctcactgttgaggtaaactttccaaggaactcgatgatgattatctggaagtatgaaagtgaatccaattattcccataaagaggtagtttttagtcactcctttgaagcaattgacttcttcaggctttctagcattaaactcattgaagatttgacacataacaaatgcattgaatatcaa

SEQ ID NO: 5143 - DNA, 563 bp, Gossypium hirsutum
  Clone ID: LIB3826-002-Q1-N6-E3
atataggggaagtttttactgtatctttatctgcctcttatcatcagagatgtttgagatgattatgtacaacaaaagacatgaacatccctttacatgaccacgtccccccatactttaacaaccatcttccccaccatcccatattccaaaagtccagtgaaactatacaaaaacgatcagaaaaccctatctcgaattcccctccttcaatcctgggcgtccatcactgtatccttttcttcaaacttcactccgaccaagaacctcatgctcacctgtttgggatcatagactgtgtattcattatactcgagagggctatcctggtgttctgaggggatcaaacggccacaagggactttgatatcatctttccaatctatatattctgattcatctggtttctttctccccagtcccttcacacacactttcttctcttccaatggcttagtatcctccggtgggttcttgagctccataatttcttcaccttgtgaaaacacagcgagaaccaagaacccttcaggcctgtctacagcagtgaagccatacctggc

SEQ ID NO: 5144 - DNA, 621 bp, Gossypium hirsutum
  Clone ID: LIB3826-002-Q1-N6-E4
gatgataattgatgtttactattatttttaaaaggagacatcaaacaagtagtttccaaggaaaaccaaatagatgacaaagtaaatgttggtacccctttagtctaccgtggaaaatttaagacgaagcaacagtgacttcagtttatctgttattgcccataactttattttcataacaataagtcgagatgtcatataccgctgctagcagaaaaatcatggcctgccgtgcaaactgctacgcagcaacaagactgatcacaaccaaattcatcctgcaacagtggccacaaatatttctcattctacagtaacagctcatgttcaagtaggcaaacttccattttccaccttattctccacaacacagatttcaatacagaataaaacttcttaggtcatttcccaccaacttcagtattgaccattcacaagcaaacgcaaaaatgccaatgaagtgcccaatgccaaccatagatgcaacacgaggttttgcaatttagacatcaagattttatttgtagcctccaacaatctgaacaaagcaactccagactaaacgtttcctcatactcaccatcattaatgcactggccacactggacgcaccgtggtatg

SEQ ID NO: 5145 - DNA, 596 bp, Gossypium hirsutum
  Clone ID: LIB3826-002-Q1-N6-E5
aaaaaaggcctaattacaattgattgtatgatgcgttaaaagggttcaatattccactgatgctgcgcggaaactccatctgcacaccatatattgaatattcaaattcaattgttatgaaactggaagttccatttagtgtttcttcatgtagccttgtagggcattcatggcatgtagagaatggaaacccccccaaaaaaaacaatggaaacccccccaaaaaaaacagacacccgagatcagcatatctcttaattcgtgtttttgttccttctttttgcagtacaactgtttttggagtttccacagaatccatgcagttgtcgtatgactccagagggaacatcgttccaacaatacttttgctaatgcaaagacgtctgtatgctcaaggaggcttgcaggttttctttcttattttcatacttcattttctctttgctattgctcaacataggaggacatccaattcttcaacattctctcgtatctatatgactggaaattctcaagaaggtttctaagttttcagccccgagtccttaccatagacttcatacatgcaggcagaagggatttttcgaataatgccg

SEQ ID NO: 5146 - DNA, 622 bp, Gossypium hirsutum
  Clone ID: LIB3826-002-Q1-N6-E6
acatataaactggtttagtcctcatttaaaacactaaaacaaacagtaaaaaactaagctccagcttagattacagacaccaagctaagctttaaacatgtccagtttttacatgtaaactggtttagtcctaataacactaaaacaaaccgtcaacagggctatagcttagattacagacaccaagctaaagcttaaacatgtccagcgttttgttacatataaactggttcagttcttcctaaaacctaaaacaaacatacattattagggtttatatataaaaagagtagctagggttctgtcgtgggagatgatatttagtttttggttctgaacttggattcatcgatggtgacaccttcatcagctgcacgttcaccgccagacatatcagagttgctcagaccacctttgcgtcccatttcttggtacccttctgttcctagttgttgcttccttgtttcccctcctttgtgcctcccttcagctaggttaatttgagcatccaagcttttcccacgagtcccaccaggaaccacagtctccccttgctttgcccttgcatcaagctcttctttttcctcttgtggggcattcctcatagcttgatattgctctg

SEQ ID NO: 5147 - DNA, 515 bp, Gossypium hirsutum
  Clone ID: LIB3826-002-Q1-N6-E7
gcacaaatggagagtttcggatacaattcgtttaccggacagattaccatatagaacacaaaatttctccaccgattccttctagtcgagcctcccggtctgtcgttataccccgagaagtggaaagaattacaatcccgatcccgcctaaaatcctaggaatttgttggtcgttagaatagatgcgtagacctggttgactgatccgccgtaaattaaaaatagttttatgtggaccttttctattccgtctatgtggaagggttaaaaccaaaaaatatttgttgcgttcccgatgttttcttacgttatcgataaaaccttctcgtaaaagtattttaacaatgttttcagcgatgttagtagatcctattcgaatcgttccttttgtattcatatcagcatttcgtatagaggttattatgtcagcaatagtgttcttacccatggtaaactaaaattttaggtgctcccgaattttgatataaccaacgtggtctttttttttttactta

SEQ ID NO: 5148 - DNA, 590 bp, Gossypium hirsutum
  Clone ID: LIB3826-002-Q1-N6-E9
ggaattcacaaacttgttttctattttcatgtcacaattgctgaaaatttaagattacaatggccccatttcccatacacattttatcaacaagactttttgccagagccacactataaacagacatccactttgaccccacactccaccttcatcaccattcatcaagaaaaaacaacgccctaaatagtttaaaaacccctaagagcttttcaccaattcctcaacccttgtttaaaaccacctttgttttccacataggatcgcccctttctcgattcttacaatatttctttacacctatggactgttttttatcgtcgttacagaacatatttacgccgcagatggagcggccacgaaatggactgccccagcttcagagagtgccgccagaaacggctgcaggttaacggtctctgtccctccttcagccgcgctggtaccataatcaagtgactcgtcgttgtaaacgtcccaccatttctgaacaagcatcttaatatcttctctttgcatgttatcctccttccctgtgtacctccaaggctttgatcccgcagcacaatagtgaacaactttcacttttt

SEQ ID NO: 5149 - DNA, 581 bp, Gossypium hirsutum
  Clone ID: LIB3826-002-Q1-N6-F1
attgaaatcagcttaatgcatgatccaccactcaacatcgagattcggtgtatcctgctggaacaaaatgagatcgataaatctcttgaaaacttgttttggttgagcgatgatattataaacatccatgaaatcaaatatgctataataacaaactagtatcagttcatcaaaacaaacaagacaactcacaattgaggtaaatgcacaagctatcttctagaagttaatgctgccccagttgccctgtcctgttttccaacaaaattcgaattagaccttccatgagcagaggccttgctttcaacacttgttctctcaaaattggctctattaatttctgtagggtctttagatttgctcaatatttttacatttgagagactactgaccacaccaaaagaaatgccatttgattgttgtttctgcattcctaacagctgcgaatgatcatcagctgcatttttagagactgctgcttgcttcttgaaacagcattctcattcctcacatggttggagtcaactgatgggactcctttctttagtcggttaggtggtgcaatcgcggacgcgtgggtc

SEQ ID NO: 5150 - DNA, 506 bp, Gossypium hirsutum
  Clone ID: LIB3826-002-Q1-N6-F10
aaaaaataacatcagaaacctggcattttcattttacacaacaacagctacagccattacaggggagtaatcctgtctgtcaccagattttgattccactaatcgaaaacaggggacataacaaaatctgggtgaaccgaacataagggggatgggcatacaagttcagaaaccctgtacaataaacgcgctgtacatggaaaattcgaaaatctccgcatgctcaccaaaagtgggccggatcattttcgggcagcagagcgttcctgcaaagagggcatgtgacattccaatagttcaaccacttttccaagcataccttgggaaacagatgaccgcaggacaagcggttaatctctgattctggttcgaacctagtcaggcaaactgaacagtcatgctccgggtgactggcgctacataccgcatcgtaccgggtcgatggcatcctgctccggaactctttaatggaactatcagcattaccgatgctgatgtcgaatgat

SEQ ID NO: 5151 - DNA, 566 bp, Gossypium hirsutum
  Clone ID: LIB3826-002-Q1-N6-F3
aaaaaaagctcaaaattgaaccaataaaaagtacttaaattctaatgcaattgagtatccacaattgattttaaacttttaaactcaaacaacttgagccatcaagcaattctagaagataaaatcagtcctcaactatctgcataacatcatggttggcagctaaatcttctgagccaatcacaaccttaacaagattagggtccatgtactcctgagctaaccgatgaactgttgcaggccatgtagcactgaacattaccatctgatgagctgcaaaggttaaaagcaacatgaggatttccaacctaattgctcatgcattattctaccaagatacagaacaatattttttagcttgattaaaccttaagttatcaatgtttagtggcgtttactcataagcatcaataaaagctttaatctaagcatcttctaggagtttaaaattccaatgtaccaacaaagagacataccagaacatgtctttcccaataaaaaaaaaaacatgacagcataatattctcaacaaattcaatattgaaaatattgaatattcagcataa

SEQ ID NO: 5152 - DNA, 567 bp, Gossypium hirsutum
  Clone ID: LIB3826-002-Q1-N6-F4
ggaagttagctgttcatagctctgcagcatttaggtaaaaggagtttggattttgttttgaagcagtagggacctaatggtgcatattggacattgagcttttttaagagaatcacaaggcaatacaaaaatttcaaggtaaaacaaagatatcagtaaactaaaaatgcattaagttacgggcgaaaaccgggtattattatcagcacctacaagctgaagcggagattaattcacgtttctgccaacaaagaacgagcgaaaactcgtctcttctcgacgaggaaacctctaatcggagttggttgaatcaaacactaggcttgagactcggtgaaggtactgaaaggtaatggaaagaatacggattgtataaacaaactcctacatggaagtcttctttcaagagaccgatgtcgacccaacacgattttttaaatgcttggttgaaggaagaacctttcaatcttttccaaggcattaaggttcatgttcaccgcatcaagggactcgaggaggccagaatacgataggagtgcatggattatatggagagggaacgggaca

SEQ ID NO: 5153 - DNA, 605 bp, Gossypium hirsutum
  Clone ID: LIB3826-002-Q1-N6-F5
ctccataatacatacagcttgaatattaaaagaagcaatattccaaataatgttggcaatagcggtcaagcaaaagcacaattaactacatcgcggtttgtctgtccgggcgactaaatgacataatgacattcaaccatgataaacaaaagttacagcacctctaatcaaataccaaaggttctatttcaaccacatgtgaaccatctagtccttgtcagcatcttctatatcttcatcttccggaaccccacgaagatagagaacattattgcatctgatcaaaatctcccctaaatttccagtgaattgcccatcaacatactcttcagcattgccaagctgcaagttcatgtatgaatcaacagatgcaagaaaacctttgtattccatcccccatttgagcttcactataacagtctttccagtcaaattgttcaagaagggttttgggttaactggtatcgtagccatggaagatgcgaatagaggagcggctggtgcagagaggtgagcggaaaattagggcttcagctgcagcgttttgcagtcggcttgtttccacagggtttaccgttgttttctttctaccggacgcgtgggtc

SEQ ID NO: 5154 - DNA, 590 bp, Gossypium hirsutum
  Clone ID: LIB3826-002-Q1-N6-F6
atacagccaatactatatattttcacttctaatcatatcattataaaatcccaagtccaaagacaaagtccaacctcatttactactgcacttgtcattctttgaagaattaaggcaagtatgactaaacaaaactggtgcatgatgccaaccaattacctgacttttcgataaaaaaagaaattacttaactttaaccaattcaatatcaaaaaccagccaggagtttggtggaatattctcacttgttccttcatttctataacttactgaaggagggacaatgagcctacgtttgccaccaattcgcatgccatcaaggccaacattccatagttcttgaacttttttcccacctagacgaaactttaagtgtgctttgccaacactagaatcaaatacttgcccactctccttcaattttccagtgtaatggacacgaacctttttaccaagagaagctattttcccatctggtttccctatttctaactcttcaatgataattccatttgacagctgaatttccttgtcattagcgttcttagcccccatttccacatcagatctcttcttttcatgggctggta

SEQ ID NO: 5155 - DNA, 563 bp, Gossypium hirsutum
  Clone ID: LIB3826-002-Q1-N6-F8
gaatacaaactatctccattgaactaattatgaagattgattttatataaacaatgaatatatatatataattaattaacactacccctcctcccttaagatttttaatgaatgttttatagggaatcagatgaattcactatacaaattacaaattgaactactcacaaggcaaatgtaacttagagaacaaaacttttttttgtatgaatattaaattattttggactgccaagagttagccagctctgcactttcaagggcatatgacggaagaagctctgccaacagccattgtcacatgtaacctggataactccagaatggtggcagacatcattcatctatctcaatatccgaatgctcaagcattatattctagctgacaacttcatatatcaattccaggaggcggcagtttccagaaattccacgaattataatcctcctgctcatgagaagccattggtggaaacatgccatgcacaagagcgtgaagagaacataagattttgtgtcaacacggcggttcacaacaacctcaccctttggattaataatga

SEQ ID NO: 5156 - DNA, 605 bp, Gossypium hirsutum
  Clone ID: LIB3826-002-Q1-N6-F9
aaataaaaagaatgttccatatctttcccatatccaaagcacaatggcaagttactttaagaaaaaacacctccttccttccccaaaacacataagaaagctgataggtattacacaccaaccactgtcatcccatggcatacttctgggtccagctacgagcagtggcttcatacttggcccgatcggtcttatacatgtgagcaatctccggaacaagagggtcatcagggtttggatcggtcagcaacgagcagattgagagcagaaccttggaaatggttagtgcagggctccattgttctttgaggatatcaagacaaatgcttccattgctgttgatgttgggatggaagaccttggtcctaaacgcaaccttaggaggcttgaaaggataatctggagggaaatggatagtaactaaaaacacacctccagcataagggctatctgagggtcccatgattgttgcttgccaatgaaacatgtcttcagctactggaccagcactacaagaagtgggtgggatctttctgcaaatccttgagttccttcaaaaccgctttgaagcctggcgattgaacaacaaaaacacaacgcaaagg

SEQ ID NO: 5157 - DNA, 287 bp, Gossypium hirsutum
  Clone ID: LIB3826-002-Q1-N6-G1
ctgagataacatacaaggaacaatcgcattgctaaagctgcaaaacaaagaccattttggaagaattatgttctacattttttgtatctctggatcacttatacggataaaccccgataacgttcagaggtaggtcaaatcagcagagtgctggaaggttttaggaatttgatgttacaacagctaccaaggtttcagatcaccaaaagggccagctgtccaattcaataccctttcaccaggcttcaagtacacgctcttgtcatgcggcaacttacgcgcaagcc

SEQ ID NO: 5158 - DNA, 433 bp, Gossypium hirsutum
  Clone ID: LIB3826-002-Q1-N6-G10
cccccgcccccgaaccgttaaaccgggggaaaacccaattttggggttcttttaaccggataagggggaaaaatttttggccccaagccttaaaaaagggtttttttttttaaaaccaggggccccccccttaattccggaccaggggggggaaaaccccggaaaataccaaacgggggcggaaaaaatccacccccccaatttttttatttttgaaaacccctcccccttaaaggaaaggggaaaaaaccgggggggtggcccccctttattgggccccccccaaaaaaggttgggaaaatttttatttaaaagttttcccggttttggcaaaaaaaatcctccccctgttgccccccccaaattcggggaaaaccaaatttttataggggaacccaaaaaaccctttaaattccccccggggggcccccta

SEQ ID NO: 5159 - DNA, 319 bp, Gossypium hirsutum
  unsure (1)..(319): unsure at all n locations; Clone ID: LIB3826-002-Q1-N6-G11
ctcaggagcctctgaatcttaaatggttcttaacttttgatgacatttctaaattnaaaacctatttttttctaaaatcccttgttcttctttacatgccctgcgtttcccctgttacatccttacctgaacaaattctgtttgtatatgcccctaacgctttgtatatttgaaaaacctcacgttttaccaatattttcttcaaacacaaaaccacaaggaattgaccctagttcgcacacttttgtccatatattttatcctatctgtcatattgactcacactggcttccttcgctggagcttcttctagtccaac

SEQ ID NO: 5160 - DNA, 566 bp, Gossypium hirsutum
  Clone ID: LIB3826-002-Q1-N6-G12
aacgatacaactgcatcaccattattcaaagcactcctatgctaacaacctggttccatcaagatgcttccaataggaaaaaaaaagtccctccaaacccttcaacctcagatgcgaaagtttatcacaaaagccaaagcattggaccaataccttatgatctctacatgccgccacttcccaaccaattcgcaaagctagtccaggtgctgctttcgacatcaccaaaagttctttttaacgatcacctatcgcaacttgtttccccaccaattcataaatttggcttgtgcagccattgtgtacaacctgtagagctgatatgcgtgatccgcgatttcttgtccaaatgttccaaccaaaacacgttcctatctcacgaacgcacagtctacaccactgtaaactctttgagtatttccagtcaaaacctgacatttcagataactccgattgcacttccgtataaggcgatattagctgcttccctgcatgtcttcaagatgggtccatgcaccggatcagcaacgatgaactcgataacatcgttctcagaccatgaagga

SEQ ID NO: 5161 - DNA, 615 bp, Gossypium hirsutum
  Clone ID: LIB3826-002-Q1-N6-G2
accaaatccttagtaaattgttatagactgtgtttggcgtaactgctcaagtgcatctgctatcaaattgctagccacttacaactaaaaaaatggcaatgtctgctgccaggaagcttgctgggttcaaatcaaaacacacaaaaaccaaaacttagcgtaaacaatctaatcgtaaggcactactcctattgttagcgttgcattaactgattcaccatcttgtaacaaattttggttcaagcaatgctcatggattccactctagcgttgtccttatggggtatcgtcatcttcctgagtgtcatcttcactgagatgcttaagaacaactcttggtttcttaggttctgatacgccttctggtttattgtcatcacctttcctttttacactttccccctcttgcccgtcatgctcagccacagtagcttcatcattggagttttccggtttatccaacggtggccttgaagaatcaggttgttcaaccttccttttaccacccgtatttacttcctcaggggcctgttcacgttctttcagtaatgaccgaatttcttcactgactgcaagatcaagtggggttttcccagctttggttttggcatcaaa

SEQ ID NO: 5162 - DNA, 613 bp, Gossypium hirsutum
  Clone ID: LIB3826-002-Q1-N6-G3
aaggataatgaggcttcatttcattgtcacaaagtaaacatttaacagcataatacaatgacttaaccaacaattcacacatgaacatttgaaggtggaacacaaattaacaataacaataataatgagatggagagctggatttacaaaaattccaattctacccaacagactatagatagaaaggacaatttcccagacacactaatacagccgggtctgcttgctccattttttaacatcaaaccaaaccaaaccaaatcaatgcccctcttttccactctttctcatgtcgaagcctggctttgaacctcctgcatcagaacattactttccaggatcgaaccttgggagattgaaaagggtattgacacgagatactccttcaagggctgaccaatctgttcctatttctgaattcatttcctcctcctttgagcagtctaaatctacatctacatctaaatctaaatcttcattccctcctggaacaacttttccacttccaacagtcccagaccggtccacactggttaagacattgatattattgtctttctcattcccattctcaacttggtccattgaaactggctgcacttttgcattagca

SEQ ID NO: 5163 - DNA, 440 bp, Gossypium hirsutum
  Clone ID: LIB3826-002-Q1-N6-G4
aaaaggggggaatttttttttttcaaatttaaatcccaaaaattttcccggggcctttccaatttaagggggattcattaaactggaagctttggcctctttgggtaatcccctttcaaaaccccttgaatgggtgggttccccggcatcatccctttcatcatgggggggggcatcatcatcatcatcatcattttctcgaccctgccccttttcggaatcaatttttttctcatagggccaattaatatcttcggtttccataaaatctgcatcatttcgggggacatgttttcggaaaaaattgggtttcggcattggatcaacaacgatcatggggtggttttaaaaactataactgggcatatcccttaaaagggcccatttttttaaaaacaccaaaaggtcggccaacccccccccctaatgaggaaggggaa

SEQ ID NO: 5164 - DNA, 501 bp, Gossypium hirsutum
  Clone ID: LIB3826-002-Q1-N6-G5
atgctgttaagacattcttaacaaaaaaaccaaaacaccaacttagtaaaagagacactccgccaaagattaaccaaaaatatcattatgattaactgataatcacatgctatatacttgaaaaactattaagcgaattcgaggcagccatcatgtcttgcaaacaaacgtcaaacacattactcagaaaaccacattgcttgctgctgggaagatcttttgagtttgccctagatcatcttggacgactttctgattaggctgccagtactatgatcactatcagaagcacaattccgaaaatcaccaggagcaagcatgccagagaagaatttgatctctggctctttgcggctttcacgagatgggatttagcctgagaagtggcagcctgagaattttcaatatgggtccccatgtcatgaatcatagttccctgctcatgaactaccacaggaagatctttgaagatctcgggcacctcaccaatgtgctgctgaa

SEQ ID NO: 5165 - DNA, 205 bp, Gossypium hirsutum
  unsure (1)..(205): unsure at all n locations; Clone ID: LIB3826-002-Q1-N6-G7
aaaaaaaaaaaaaaanaaaaaaagaggaaaaaaaaaanaaaaattnnggggcccacacaaaaagaggaaaaaaccccccacaacacaaaaaaaaaaaaaaaactctgttttggttttttccccctctgttgggtttcccccccaaaaaacagagaaaaaaaaaaaaaaaaaagaaaaaagaannaaaccgcagggaggggggggg

SEQ ID NO: 5166 - DNA, 583 bp, Gossypium hirsutum
  Clone ID: LIB3826-002-Q1-N6-G8
aagaagaaaaccttgtttactattacttttatttaatttagctggattacaaaacattgctcccgcacatttttaaatacatgcaagttgtagagtagaaactagagttgcatgcctgttaaggccatgttttattttatttatatatatatttattccgaatccagatattgggatctgggttttattgttgatgcaattacgtacgtacgtacacctagattagttgtttgatctactgttgcgagccttgccttgggctaaaaaccgacacctcctgtctgttatgcttcaacctcatggcctcctcccgggatataccaaaggagttggccagcacgtccaccggcaatcctcgcataatggagacacgtccagcaatctgactaatcttagcattggcatttgtcttgaatgctatccattcaaaccctcgccttcctgcttttttcaccactgcatgattctggggtacggttatgacctgacccctctcaacctgctcatcgaatatcgcctctccattttccgacacaatttgaatccttccatttccccttgtgatgtaaacaatgctgggggc

SEQ ID NO: 5167 - DNA, 574 bp, Gossypium hirsutum
  Clone ID: LIB3826-002-Q1-N6-G9
gacaaagttctttagtcattttattcaaataataaaatcagttgagcattgtgctagcacagcaatacagaatgtttttgcttcttgctattggtattaaaaaaagcaaatagccaatgcataatcaaacaaaaaatcaattaaggctggaacatggcaagagatcaaaaaaataataattataatcagactgagaataaatactaaaataggcatactcgagagttttaaaggaaaattcacgtaaaagaaaattctttaacacatttcaactaacagaccagggttcctatcaaacccacagaccagacccaataaaaaagggaaaaaggattttctccaaaccaatcatgcatggaatgacgtaaaaaaattgtaaaaataaatataacccaccaaaactgcaaaccccacactccccccaccttgtcttccaatcaaacatctctatatagtgtgcagccattacaatctactgctgcttgcattctggaggcctctcaccttgctgcccatctccttgtgctcttccattcctcttctttttagtcttagtttcttcttcttcttcttc

SEQ ID NO: 5168 - DNA, 315 bp, Gossypium hirsutum
  Clone ID: LIB3826-002-Q1-N6-H1
atccaaataaactataagaattcattaattaattaaaggttcagcattgttaactactccattctacaaaatttcaaatcctaaatgcatggtcacgtctcctagaaatgtgtaaattacaatgatgaaacattagatttttggaaaagaaaaaaagtattaaaagcttaattgcctactagctttgtctctcgaactcgagggaactgagcgtcaaagatgatataaaactacaaacatttaatataaagaaagaaaaggaaccccaaaaccctgcaaaatccgcttgttcgaggttgccagcccacgcgtccg

SEQ ID NO: 5169 - DNA, 599 bp, Gossypium hirsutum
  Clone ID: LIB3826-002-Q1-N6-H10
aaaagaaaacaacctagtatagttcgatattttcttcatgttacagcatgagtaaaagggaaaacacacaagttttatgagtatgagagcgacatactaatgataaatctaaaagatgtcactgagagtaggaagcttgatctctcctttctgagagagagggatagtgaagttccccacgataggaagatcaatggtgagacccaattccaattcatagtcaatgtcccaatctgcaccaatatcctttaccaagcttactaagatgttatacggtaccttcactggcacgtccagcatcgttgtgtcgctggctttcaatgaccccgggtctggtattgtccctgatgctatccctcttccagcacttctgaaattgtaaaagatctcacaaatggggatggaatggctgtaggggttggagacagagaccttagcgccatactcgacgcactcacggctcacatgtttcagatcaacgtccgagacactagcctccggcttctttatgttggccaccttatccaccacgaagtccttcgccttctccaacaactgcgacattccgtacaaagtcttttttggagggttttgttata

SEQ ID NO: 5170 - DNA, 133 bp, Gossypium hirsutum
  unsure (1)..(133): unsure at all n locations; Clone ID: LIB3826-002-Q1-N6-H12
aaaaaaaaaaaaaaaaaaaaaannaaannnaaggagaagnggaaaannnnaannaaaaaaagaaaaaacacacaaaaaaaaanaaaaaaaccaagaaaaaattaaattttttgtttttttttttttttttttt

SEQ ID NO: 5171 - DNA, 542 bp, Gossypium hirsutum
  Clone ID: LIB3826-002-Q1-N6-H2
acgtaaattcatactttacgatttatatatatggatacttatttaatgttatacatgcttaatttagttcatatacatatatatactctttcttttatgccttcaaaatccccttctcagcagactgtgatcatcagaactagtaacaaagaaatttaagtttttccaagattatgaaattacaagcactaataagttgtgccattcagccatagtgaataggccaccaccaaactatcagcagagccccacttgttaaaaagatcttggtagttggcatggtgacaaacagaagcatactactcagcctctgctgtgccaggttttagcgccttcccccactgcatcccagcaactgagcaactgcagtggctgccactgctgctgcgaatatcaaatcgcttccatcattgttgaactctcatttggtctgtccagctcctctagaagcattggtttctcaaaaattgcattcagaattcagttacgggtacttcttcaaactttattaagacttgatcaaaatgtcttacttgcagctt

SEQ ID NO: 5172 - DNA, 603 bp, Gossypium hirsutum
  Clone ID: LIB3826-002-Q1-N6-H3
tttttttttttttttttttttttttttttttttttttttttttttttttttttttttttcttttttttatctttttttttatttttcttttatttatttttcttatttacccatgggcaaatggggataggattagtatattaaaaatcttggggaactaaaataataaattattacatagatcctaaccatctccaatcccaaacttccatgggaaaaattctcttttcttgggggatctaaaggcatctttttggggggctcaaggccctaagcacaaaggtttagtttcatactgggcccaaatacaacaaaaccttcgtaataaggttaggatagggaataacatcggttttgtttgggtttaaaacttagaaattatacatgggccatttttttaccacgcacatttctatggggagttaaacgactactattttagctattacagggggcttacctcggaaaggaaacaatgaatatatgcaatataattgcattctgcgaaaaaataaacagggggtagccaaccaattttgtccgggcccatttaatttatttgcaaataaataaacccaaataaatgaataaaagtccaagact

SEQ ID NO: 5173 - DNA, 616 bp, Gossypium hirsutum
  Clone ID: LIB3826-002-Q1-N6-H4
aacaactcatagatatatatttatatagaaagacaaagaattgcaactcttattacaacacgaaagctgtaaagacatcctcaacaaaaaaaccaaaacaccaacttagaaaagagacactccgccaaagattaaccaaaaatatcattatgatttactgataatcacatgctatatacttgaaaaactattaagcgaattcgagtcagccatcatgtcttgcaaacaaacgtcaaacacattactcagaagaccacattcttgctgctgggaagatcttttgagtttgcccttgatcatcttggacgactttctgattaggctgccagtactatgatcactatcagaagcacaattccgaatatcaccaggagcaagcatgccagagaagaatttgatctctggctctttgcggctttcacgagatgggattttgcctgtgaagtggcagcctgggaattttcaatatgggtcccgatgtcatcaatcatagttccctgctcatgaactagcacagcaagatctttgaagatctcgttcacctcaccaatttgctgctgaatttcttgaattccttgttctctttcatcaatgatagcctcattaaatgcaatct

SEQ ID NO: 5174 - DNA, 92 bp, Gossypium hirsutum
  Clone ID: LIB3826-002-Q1-N6-H5
ggtggttcttttttttttttttttcagtgcttgaatttggggcccaactttttggtatgtttgatcggggacgtgtcaagtgaatcagattg

SEQ ID NO: 5175 - DNA, 595 bp, Gossypium hirsutum
  Clone ID: LIB3826-002-Q1-N6-H7
ttttttttttttttttttttttttttttttttttttttttttttttttttttttttttttttttttttttttttgggggggaattggtccaattttttttgaaaggactaactgcataatttacactggacttcaacttgaacacccggttttagttccaatgccggccaaagaaaaaaaggcacaactggatcaacaattttttttttttggccaatggttccaaataaaattaagtcccccccccttaggagtctacatcctttttcccaattattttcttttttaaaccgaattttgccccccctcgacctttaagccatacaggacacctgcatatttttggcctgatttgaaaaattttccctcaacttcctaaacgggcctgatgggagcaaactatcccaaccagcttgatgggatacaccaactttttccacttttaacaactcggccagcttgtttaaaccaccatgttggccattgcaaaacttcatcatatgtttgatatcggataccaccgggaaaaacattttgatcaaattgaaaaaccccgtttgagtatcgggcaaacccctttttcatggggcttctt

SEQ ID NO: 5176 - DNA, 122 bp, Gossypium hirsutum
  Clone ID: LIB3827-001-Q1-K6-A10
aaaaaaaataaaaaaaaaaccaaaaaaaaaaaaaataaaaaaaaaaaaaaaaaaaaaaaaaaaaaaaaaaaaaaataaaaaaaaaaaaaaaaaaaaaaaaaaaaaaaaaaagggcccggccc

SEQ ID NO: 5177 - DNA, 375 bp, Gossypium hirsutum
  unsure (1)..(375): unsure at all n locations; Clone ID: LIB3827-001-Q1-K6-A2
gtcaagtttctctctctctctctctctctctnttgttgnagttcntaagcttttgtttcantggctgntgtccgtggccgcttcctgcctctccaagttcatgttctcccactgtaccgtttcgtctttgcttccggtggcggtttcggtgcattgaactttctcagtgggccctcgncaggccgggttctagccgtcctttcgcttctccccattggtggtgcactgcttgcattngccgggtttgcactggccggctccgtctttgggctggtgcttgccgcaccgctgttcttcatcttcagcccggttcttgtccctgctgcctttgccnttgccttggcggtgtcggggttcttgtcgttgggggcgttt

SEQ ID NO: 5178 - DNA, 568 bp, Gossypium hirsutum
  unsure (1)..(568): unsure at all n locations; Clone ID: LIB3827-001-Q1-K6-A5
ctccggtatccatacggggaccgcattacatttgtccgaagtccaggagtatcgattttttttattgacccaagatgagccagggacaacctaggaggcctcaacaaccagcaggtcaaggtgagaaccaagagcctatcaaatatggagatgttttcaacgtgagcggtgagttagccaacaagcctatcgcaccccaagatgcagccatgatgcaaacagctgagacccaagtgttgggtcagacccagaaaggtggaaccgctgccgtgatgcaatctgccgccacgaggaacgaacaagttggcgttgtgggtcataataatataactgacattgctggtgaacaaggcgttagcgtcgctgaaactgatgttgctggtcggcgtataatcactgaggcagtcgctggccaggttgtggggcantatgttcaagcaacaccggttatgacaagccaagtgggcgctgtgcngcaaatcgcattaaccataggtgaagccctcggagcaaccgctaaaacagcgggcgacaagcccgtcgatcaaagcgatgccgctgccgttca

SEQ ID NO: 5179 - DNA, 526 bp, Gossypium hirsutum
  unsure (1)..(526): unsure at all n locations; Clone ID: LIB3827-001-Q1-K6-A6
gttctagatcgcgagcggccgctcgcgatctagattagagaatagtnaactatctggtctcttacaaattcttgaagtgcaagaatgataatttcaggtgccttttctcctggaattctgacaagagtataaacatcttctatgctcaaaccttgatcaccaacctttcgaatttcggtgccaacagccttgtccaactcaagatgaaagtggctgccttgtccttcatcagaaagttttgacaacagatgctcagtgtaaccctccatagcttcccaaggggacttgccaaacttcaatgctgtgctgacattctttctaaactcaagcatttccttcatctgatccaaactagttacactttcatcattcaaaagctcaagattgtgcctctcctcatctttgaacaattctaaagcattggatgtgggaaatcttgtgctntatacggntaccatgataccatgaaagcctctttcttgtcgngaaataaattcaccttgcgtgatggattttagtttctttt

SEQ ID NO: 5180 - DNA, 517 bp, Gossypium hirsutum
  unsure (1)..(517): unsure at all n locations; Clone ID: LIB3827-001-Q1-K6-A7
cttgtggtaatacagttgccatggttggtttggatcagttcatcaccaagaatgctacattgaccaatgagaaggaagttgatgcccacccaattcgtgccatgaagttttctgtctcccctgttgtccgtgttgctgttcagtgcaaggttgcatcagatcttcccaaacttgttgaagggttgaagcgtttggccaagtctgatcctatggttgtctgtaccattgaagagtctggtgaacacattgttgctggtgctggagagctccaccttgagatctgtctcaaggatttacaagaagatttcatgggtggtgctgagatcgtcaagtcagacccggttgtgtccttccgtgagactgtccttgagaggtcttgcaggactgtgatgagcaagtctcctaacaagcacaaccgtctgtacatggaagctcgacccttggaggaaggtcttgctgaggccattgatgaangtcgtattggtccaagagatgatcccaaggttcgttccaagat

SEQ ID NO: 5181 - DNA, 491 bp, Gossypium hirsutum
  Clone ID: LIB3827-001-Q1-K6-A9
atccggcaaatcttgcccttttgaacgatgattttgttctcaggtacaggttacagtctggagcaggctttgacaaatggtaagcactaaagggtttcttacaaactttgttacatatgcaagcgtctaggagggatgggaaccgtagggggattggatattgtgtcgtttggtcccagctcatctatcgggggccgctgcttatggtgatttgttgcagactggtaagccattgctaaggctaatgcgatgtgatcatggttaggaggagcatatatgcccgtgttgactgtggttcgtctaccagtaccagttggaggtggattaggtatgtttttgaacccagtcggaacaacaattactggcaaacctacgagatttcccatgcatactcgctcccaatccggtgcatttccaatgaatgcatcaacattgaagttttctttcacttcttggattaactttccacgagctctttgtgcctgtgggac

SEQ ID NO: 5182 - DNA, 465 bp, Gossypium hirsutum
  unsure (1)..(465): unsure at all n locations; Clone ID: LIB3827-001-Q1-K6-B10
ctattacttctcattatcaatgagcagtctcaacacctaaaccatacaatacaccggaatatttttccaaagtaccactaaaaaaaccatctcctttcgattttcaactgatgtctctgttgccaaagagcgattcaatccaaatgcggggggggtggaacgataaccttgaggaggaatttgctttgattcgtgaaattgttgatgattacccgtacattgccntggacaccgagtttccaggctttgttttacgtccggttggcaatttcaagagccgctttgactatcactaccaaaccttgaaagacaatgttgatttgttaaagttgnttcaattgggtcttaccttttcagntgggaaagggaacttgcctccttgtggaactgttttgtnttgcttttggccgtttaatttttgtgagtttaatgtcggccgggatgtctttgctcttgcttcttttg

SEQ ID NO: 5183 - DNA, 470 bp, Gossypium hirsutum
  unsure (1)..(470): unsure at all n locations; Clone ID: LIB3827-001-Q1-K6-B12
gcgcagtgcagntactttcagagtcgcatatgttatttccggaccgttgctagtccccttaagtgtagctttaagtgttctcttgggttggcatatctaccttattttgcaaaataagaccacaattgagtatcacgaaggggtgagagctatgtggctcgcggagaaaggagggactgtctataagcatccgtatgatattggtgcctacgaaaatctaacaacggtattgggtccaagtatcttctgctggatatgcccattttcaagacacataggtaacggtcttcgttttcgaactgcttacgatagagtatctacttcatcaacatcaaaatgacatatcacttcttctttttttcctttacattgccttggcaataacgaatttttcgatgcttgagggatcgataaatgcttaccatatgataccctttttaagttattctaccacacagatgctgtcacct

SEQ ID NO: 5184 - DNA, 484 bp, Gossypium hirsutum
  Clone ID: LIB3827-001-Q1-K6-B2
gctttaaatgtcatcaaactggacattgggccagagactgcccaaactctggacgtttacctccattgaggcactgatttttcttcaggaagatatggaggtgttcagaggcaacaggagttggacattggacttgggaggcatgagttgctgctggaatgccatttggacaatcttaaagtgaacttaataggttagggctttctggtggagacttgagatggcggtggcacaggttctttcattttgtattggggtcatgcatgcgaaaagcctgatgaacttggcagtctggaaagggtagcttttcaagcattttggtttcggtgtatttagtgccgactctatatctttacatattacatggttctgttttctacatgtaaaaaagttggattgtggtataatctttggttgtactaacgttttgttgcattgcgtgttcctgaattttatgacaaacaccttccattggtttgcactg

SEQ ID NO: 5185 - DNA, 606 bp, Gossypium hirsutum
  unsure (1)..(606): unsure at all n locations; Clone ID: LIB3827-001-Q1-K6-B3
gtcacatcccatgctcggattttggagaacaacaaacagtgggatggagagaagtgcattatcttgacttgcagtttcactccaggttcttgctcattaacagcgtacaagcttacaccaagtggatatgagtggggacggataaacaaagatacaggaagcaatcctcatggctaccttccaactcattacgagaaggtgcagatgctcttaagtgataggttccttgggttttatatgattcctgacaatggtccatggaattacaatttcatgggagtgaagcatacagttagcatgaaatatggggtgaagctagggacacctagagaatactacaacgaggaccacaggccgactcatttccttgagttcagcaacttggaggaaggtgagactgcagaaggagatcgggaggatacattcacctaagtctgggttcatgtcaaccttgttcgttgttgtttctgtagcttacgcctgttaacactttgtgcccgaaatattagtagaggcctgacgttnttgtttgaatagttgcatgtacttttataccatttgtaacaatgctgggagttgtaatttacgagcaaaacccttctgatt

SEQ ID NO: 5186 - DNA, 337 bp, Gossypium hirsutum
  unsure (1)..(337): unsure at all n locations; Clone ID: LIB3827-001-Q1-K6-B4
gaaaccaagagacatgcggggggatactgcagcaggcgggggagaaagtgaggaacgcggcacatggtgcgactgatgcggtgaaacatacctttggaatggctgatgccgatgaggatgaacataattatccggctactgttactaggaaggattagggtagcatgtngggttaagataataataatagttgcaatatgtacgtgagtggttttagataacgtacggttgcaaacgcttcgttgttatgagtgtgtgttgtgttactttgttgttttagctttttttttaataataaaaattttaccttttcacttttaaaaaaaataattttagt

SEQ ID NO: 5187 - DNA, 627 bp, Gossypium hirsutum
  unsure (1)..(627): unsure at all n locations; Clone ID: LIB3827-001-Q1-K6-B6
cccgatttgctattgcctccttccctgttaaatcatcaaacaagccaaaaccctaagcagcctctcccccacccccaccccccctctttttcgatggcaccaaaacgttcaaaccccattgaagtcccaccagccgcttcttcctctgaagaagatgaagaggtgacttcttctgaggaagaagaagaagggtcttcaactgaggaagaagatgaggaagaccccaaaaccgagtcaactccattgatccaaaagagcccaccacccagaaagccggaaaccgctacgcctggcgtcgttaacgatgaatctgatgaatccggttctgattccgaatccgaatccgacaccgctacaccgaatgttaaacctcttgcgacgaaacctatggaggaaagtttgaatgcanagaaacccagatctaataagcccttgacttctcccattagggcttcttcatctaaacggcctgnggagttggagttggatgctaaagaagccaaacgacccaagaagaaggttggggaagaagggttggctacaacacctgctgtggaggatgtgaaaaagactggtgaagatgcaaaaaagcagctttttcagcggttggtcagtgaagatgatgag

SEQ ID NO: 5188 - DNA, 566 bp, Gossypium hirsutum
  unsure (1)..(566): unsure at all n locations; Clone ID: LIB3827-001-Q1-K6-B8
gtattacacaaattgaacttccgatcaacggaactatgagccaggaacaaccacaaaggcctggggcttgtcaggaacccatcaagtatggtgatgtctttaacgtcaccggtgaactggcttcaaaacctattggaccaaaagatgccgccgccatgcagtcagctgagaacaagatccttggagaaacaccaaaaggtggtgcagcagctgccatgcaatctgcagccatcgccaatgaaagagcaggcgtcgttagtcacaaccaagctgacgttgctggagaccaacgcgtcgccgtcattaagtctgacgcagatggcgatgttatgatcacagaagccgttgctggacagattgtggggcantacaggcaaccagatgtttcagcggtgactactccagcaatgttggttgatccaggatcaattacaattggagaggctttagaggcggcggccatctctgctgctgataaaccgattgatcagagcgatgcggctgcaattcaagctgctgaaatgagagccactggcagcagcgagataactccgggcggtattgca

SEQ ID NO: 5189 - DNA, 192 bp, Gossypium hirsutum
  unsure (1)..(192): unsure at all n locations; Clone ID: LIB3827-001-Q1-K6-B9
gtgggggggggtttttttttttttttcttttgttttttttttttttcttttttttttttttgttttgttttttttttgtttgtttggttggtgtgtgtttttttttttttttttnttttttggggggggggggggggggttttcttttttccttttttctttttttttttttttttttttctcttttttttt

SEQ ID NO: 5190 - DNA, 320 bp, Gossypium hirsutum
  unsure (1)..(320): unsure at all n locations; Clone ID: LIB3827-001-Q1-K6-C1
gcgctaccggttgctgcgcctccaggtcaatggatgggggctggtggctcnntgtttttggtgtctgctnancngacgggggctgtgcggaagcacttcntagggatggttaccatgcttgatattgtggcatatattgctgntgacgntggtggtgatgatcagatgacagacgttgctaatcttgagaagaagatgatggtgccggtntcgtcgattatcgggcgcagttttgagggtcttagcttatggactctaatcccagtcacagtcattgtggactgtctggaattgtttagcaagggaatccacaggtcctt

SEQ ID NO: 5191 - DNA, 522 bp, Gossypium hirsutum
  unsure (1)..(522): unsure at all n locations; Clone ID: LIB3827-001-Q1-K6-C11
ccggngtcgacccacgccgtccgcgcaggggagttcaatctgccatggtgggcttacaagtacgtgtcangagctatnggaggaagaagcaatccgatgtgatgaggttcttgcagagggtgaggtgctgggagtaccgtcagcacccttccatcgtgcgagttaaccacccaactcgccccgacaaggctcgtcgattggggtacaaagccaagcagggttatgtcgtctatcgtgtccgtgtaaggcgtggtgggaggaagagaccagttcctaagggtattgtatatggaaagcccacaaaccagggtgttacccagctgaaattccaacgtagcaaacgatcagttgcagaggaacgagctggccggaagcttggtggtcttagggtcgtgaactcttattggatcaatgaggattcaacttacaaatactntgaagtcatcttagtcgatcctgcccacaacgctatccgcaatgacccaagaatcaactggatctgcaatccngttcacaagcaca

SEQ ID NO: 5192 - DNA, 639 bp, Gossypium hirsutum
  Clone ID: LIB3827-001-Q1-K6-C12
cttttctgattattttttgataatccagagttcaatcatctaaaagaagccctaaaatctttgaatcaggtctgagcttgtggtttgttaggcctctttgatcaaactaagtttcatgtctgatcttgacgttcaaattcctactgccttcgatccctttgctgatgcaaatgctgaggactcaggtgcgggtgcaaaggagtatgtgcatattcgtattcagcagaggaatggtcgcaaaagcctgacaactgtccaggggttgaagaaagaattcagctataacaagatacttaaagacctgaagaaggagttttgctgcaatgggaccgtggtccaggaccctgaattaggacaggtgattcaacttcaaggtgaccagcgtaagaatgtatcaaccttccttgttcaggctggcatagtgaagaaggaaaacatcaaaatccacggtttctaagcctgtgctgtggaagcaggaaatactatctatctgattaggacatatctaagttggttggatgacaaagtatgcatgttgtgttacatgtgctttccagttcagtggatgattatgatatgtttggaaagttgtttggctatgttgattatattagacctttatatgtgttgaaatattct

SEQ ID NO: 5193 - DNA, 301 bp, Gossypium hirsutum
  unsure (1)..(301): unsure at all n locations; Clone ID: LIB3827-001-Q1-K6-C2
ctttaacatattcccccactccgcccaatggaccctcgaggcggtgatgccatccccgtcggcgatgccaacgattttagatcctccgaccctcccggtgatgacaagtctctccctcncaccggggatggagcttgtcctggcaagttttttgtaggaggtttagcgagagagacaagttctgcacagtttattgagcatttcggtnaatgtggtgcaatttcgggttctgtgtttatgaaggaccggaaaacgggtcagcctcgtggntttggttttgtgacttttgcttagccttctg

SEQ ID NO: 5194 - DNA, 649 bp, Gossypium hirsutum
  Clone ID: LIB3827-001-Q1-K6-C4
ccgtccgaaaatttaaaattttaattagacccctcaaatttttagaaattctaattaagccattcaaaaggtttaaattttaattagatcctccaatttttttgaaaatcttcattaatattctaaaaaaagtttaaattttaattaaacccttaatatttttaaaatttttaagtaggccccatcccaaacttaatggcacgtttcgccactaagtcatagttccactaaattcaaaatcgagctgggtcaaaccctaagcattaagcaaaactctctcaacaatattttctctactcatagaattcaaactcgaaatcttgcttaaaaaaatatcgtactcgtttcttcactcactacccaagagatcacattaagcaaatgtaaaaatctcttttcaatcttccctattgaaattctattcaaatggggttgctttgattaccatgggtagcacttgcaatttgtcatttcctttaaaatgtttggtatgccttaaaaaagttgtatcatgccaaaaaagttccccagatttgagccatttttatgctctgcttttctcctttttttaagtttctctttgataatgtgctttttttctttgtactttttagctttgaatgtgttaggttacctatcaccatttgag

SEQ ID NO: 5195 - DNA, 609 bp, Gossypium hirsutum
  unsure (1)..(609): unsure at all n locations; Clone ID: LIB3827-001-Q1-K6-C6
cggacgcgtgggcggtcacttactaaagaagagattgaagctttctggagatcaaaaaggaaaacagaggaagagcatcttaatgctatatatggttcaccagatagttgcaatcagcagtatggaaggaaatatatgagatcaagctccatgcctacaccaaatagaaaccagggtttcctagacatggacaccgaaacaagcctggaaaatatcgtaaagcaaagtgggtggtggacaaggagcacttgggcattcttgaatgaacctccagttcttgaccgccctacaaacaattaccaaccacagttccatgttgccggccttgctacttcaaagtttaacaaagattctggaatcagtgccaattagtatttttaactcctaatggtatcttatgtgggagtatttatctacttaatctgtntatatagaacataatattactgagataatatgctggtttgtgcgtgttgagtgtgtcatggttttgaatctgccaaangttagagagaggactaaattagtgatagtgtggggatgaatctgttgtnagtattggtctctagggttcctttgacagcttaagattngctaagcttttgtgct

SEQ ID NO: 5196 - DNA, 298 bp, Gossypium hirsutum
  Clone ID: LIB3827-001-Q1-K6-C7
ggtccacactcccggtcgacccagcgtccgccgccctttttttttttttttttttttttttttttttttttttttttttttgtggttttttttttttttttttttgggggggctttttttttttttttctcccgggggggtttttttttcttgccccccccccccttcctttttccgaacgggcggggggggggtttttgttttttttgggtctcccccggcctgggggggccttggggggggcccccctttgcgccgtttttttctgggggcccgggggggccccgttttgtgcggg

SEQ ID NO: 5197 - DNA, 482 bp, Gossypium hirsutum
  unsure (1)..(482): unsure at all n locations; Clone ID: LIB3827-001-Q1-K6-C8
cggacgcgtgggttctcctacagggttgttgagtttggttgtgttcatggtcttggtggtggagcctcatccagcctatggctcgagccgtggtggttggtttggccgaaaccaaggtgcagccactccactagtcaatgggatatgcgccgcctcggtcactatccatggttacaaatgtgaggaacaccaagtgaaaacccaagatggatataacttgagcatgcaaagaatcccagagggacgtataggtgggaatattagtggaaataagaagcagccggtgttgatacaacatggtgtacttgtggtgagcccctttttttttttcttcttttctttttaccatattggatgaatgttttacgtgatttacttttncaaaagaaattgccaagactttatctaagcaccntaaaagaatgtctaccttagtttgggtgcaccatgtgtgggaataaagtgacatttgtttcnaaaaa

SEQ ID NO: 5198 - DNA, 600 bp, Gossypium hirsutum
  unsure (1)..(600): unsure at all n locations; Clone ID: LIB3827-001-Q1-K6-C9
gcctataatcaattgggaggatgacaacctttagtactccaatgctggcagttctagtctttgcctctgtggcattattccctacaatacttctaccatctacaccatcaatctgggtggcagggatgacttttggttatgggtttggatttctactaatcatatcaacagctgctgtgggtgtatcacttccattctttattggctctcttttcctccacagaattcaaggctggttagaaaaatatcctaagaaagcagccattctaagagcagctggtgaaggaaattggtttcatcagtttaaagctgtaacattaattagaatctctccattcccatatatcatatataactattgtgcggnggcaacacatgttaaatatggtccttacatcttgggatctttgataggaatggtgcctgaaatttttgttgcaatatacactggtatcctcatacagacattggcagatgcttcacaagaacaacacaccttatcggctccacaaattttgttaaatgttggcggtttccttttaacagtggttacaacaattgttttcacagtttatgctaanaggcaactaaaagtgttgc

SEQ ID NO: 5199 - DNA, 536 bp, Gossypium hirsutum
  unsure (1)..(536): unsure at all n locations; Clone ID: LIB3827-001-Q1-K6-D10
tgtatgtgaagatgatacagggatttgcagctgnaaaaaaaaaaaaaaaaaaaaaaaaaaaaaaaaaaaaaaaaaaaaaaaaaagaaaaaaaaaaaaaaggcgggagcgatgcaaaggaaccaagctttctatacgcgtgacctgcaacgaaatacactgtgccgtagtgttacctcgaattcaactggggggggccctggtgtaccccctctctaactgggttgaaccctcgtgcccccctcctcacttggcttgctagccatgcggccttcaccggtcgcccttttcaccagttaggcccgccccaatggcccttgggacccgccctgcaccctgactttaaactcggacgcgcccttggttacccccttaatcaccgctgctgttgcggttgccctcacgcccaccccttcccttttcttccccttatttcccgcccctttcgctggctttccttcttttgtcctcaatttggcgggcttttcccggttaggtttaaatgggtggctgcccctcggcctcccattacttgctt

SEQ ID NO: 5200 - DNA, 466 bp, Gossypium hirsutum
  unsure (1)..(466): unsure at all n locations; Clone ID: LIB3827-001-Q1-K6-D11
gtgtaaatcggnaaaactcaccggnaaattcaccatggtgtacgttgggagaaacgcggcaacctctttattttaacgtttaccggcgaagaccagcaccggtttaatcccaatgtcatcggctcccttctcagccttctctctcaggtcaaggctgaagccactcgtggctcagctcttattacccaagcccaaggtaagttcttctccaacggcttcgatctcgactgggctcaagccgccggatctgaacaaggagccgcggaacggttacaccacatggtggatttgtttaggcccgtcatcgcggctcttctgtccctcccgatgcccaccgtcgccgccatcaccggtcacgccgctgccggtggatttgccctcgcgttgtctcacgattacctcattatgaggaaagaccgaggggttctttacatgtccgaggtggacatagcgctgacaatccccg

SEQ ID NO: 5201 - DNA, 536 bp, Gossypium hirsutum
  unsure (1)..(536): unsure at all n locations; Clone ID: LIB3827-001-Q1-K6-D12
gngaaacctaagcaggaagcttcacctttctgttacggatgagaatttttttgtgtcacaatccgattcattacaaggggaagaatgtactcgattctctcagcatggcaaagctttatatagatgattccagcacgtcaacttctgtgaagcctttaaccaacatgcagatgctaccttcaggaccttcattgggtaatactggtcaaccctctcagtccagggtacagggtagaggtgtagctattccaggaccgaaggcctatcatcctgctccacatcataaccaattaaacagagtttctccaccaacgcaggtgaattctgttcagggaaatcctgttcatggcagggctatctcttctgtacaagcagctgctcagcagttgggccagcatcctggtattgggtctcaagcttcctctcctccaaagacagctgtgtcagtcagttcctatgaatctggagaggttgaatcgtcagaaacaagtaaatccaagggtgccattggtgagcaagggaaaaagcagtgctca

SEQ ID NO: 5202 - DNA, 556 bp, Gossypium hirsutum
  unsure (1)..(556): unsure at all n locations; Clone ID: LIB3827-001-Q1-K6-D3
cagcatatgggatgagtgtgtgggttacgttcatttccagctatatcctggcaggacagctaccaagacagcagtttggggtggtgcagagcaagatataccctgtttacttcagggcaatggcttatagtatagggatggctttgttggggcacttattgtggcacaggaaaagatcgatctcgagcccgccagaggtgtttcaagctattaatcttttgtcatcccttttcatggttttggtcaatggactgtatttggagcctaaagccacaaaggtgatgtttgagaggatgaaaatggagaaggaagacgggagaggaagacatgactttgtggctgagggaagcagggccactgagtcaccaagtgttgcagatccagtngctaaaaatagcaggaaaggcccctcaacggcaccagcaccagcaccagcagtagcacccactagttcagaacaggaagtgataaagcgcacaatgggtaggctgaatgtgaggctgaagaagctaaatacaaactcatcaatgcttaatattctcactttaatggctct

SEQ ID NO: 5203 - DNA, 636 bp, Gossypium hirsutum
  unsure (1)..(636): unsure at all n locations; Clone ID: LIB3827-001-Q1-K6-D4
ggtaaaggcagtagtttccttcaacgtgaatatcttctggaaagcagtactttggactgttgctattgcatctcttcctgtacgagtgttgactgccttgcagagggaaaggatgctggaacagcatctacatgagattcagtttgagttggagactcttgtttgggacaggaaggagcttgaggaccatctccaagcagctgttagagaaagcagaattatggagtcaatgttaattgaacttgaaggggaacatgacaaggctattgccaggattgaactattagaggttgcaggatttaaaggatgaaaaccttcggctgaaagaagttcaagtattgcatcatgggtttccaattataaggggagtggcatctccttccaggagctgatggtgaacagagaagtatgggaaggtaagagcaagagtactactgaaatgatcaatttcttaaaagcaggccctgcaccaagcggatccgtggaagtattttcacccggtgttcaaaatttggaagttgacactgttatcgaacaacgaaaagaggttgcactttcacagacactttttagtgcaatattatcactcttggttggaatgattgtcntggaagctgaagatcctgcatgcctctt

SEQ ID NO: 5204 - DNA, 571 bp, Gossypium hirsutum
  unsure (1)..(571): unsure at all n locations; Clone ID: LIB3827-001-Q1-K6-D8
atttgtgttcactgtacgttaaaacatgtgtacgatngaaaaagaaaaacttgtcagcatcaatggtgattcaagtgattttaactctgtcaaagccgtgtttgacgaaatgtctgaaagaagataataaaaagccatcttctttaccattcttttgaagcaactcatcatggcctcttcagttggttttgcacaccccacttcttctttgatcattaacaagaaagataaatgcctctcagtcgtcccttcaacttcacaactctcgatttacaaatgcaagaaacccatttccaacaacatttcgatggcaatggccacgcgacaatcagagagaaaaccagccaccactggctcagttactgtttttttttttaaccattgatctacatatatttcgattgaatttgggaattttgtaaacgtttttcatatattccatttggatttcagatgaagagtccaatgacgatgacagagaagctacttgcaaaaggggcggagaaagcagaggtgaaagcaggcgacaacgtttgggtgaatgttgatgttttcatgactaatgatataa

SEQ ID NO: 5205 - DNA, 630 bp, Gossypium hirsutum
  unsure (1)..(630): unsure at all n locations; Clone ID: LIB3827-001-Q1-K6-E10
ctgagcgcttgcttcagaaaggtctaaaatttagccatttggtgcttaaaaggcttctacttggggttgcttactacttctcaaatggaccatttcggagattctggatcagaaaaggatatgatcctcgcaaagatcctgagtctcgcatatatcagagaactgattttcgtgtacctgaaccattgcggaactatgcagatgctagcgtggctaacaaaaactttgcagcctaaaactggatggttctccgagtgtgtgcttgattgcctgagacttcgtgtagcactgaggttcttgtcagtttatcccaaaactggtgcagaaagcatactgaaatcttgctctaatgaatttgagaagttaaagaggtcatgcttatacaaggatgtcttcaactctcatcaagaggagcatcagcaaactaataaaggtgatgatgataaagagagagccaaaagttctgataataaggaagatgaagttgaagctgaggatgaagaggaattggatgcgtatgatgagacacttactctgggtgatggggatgatgaaatctctntgcaacctgatacatatttagatatggagaacaactcaaggacatacttgcaagagctntttggtagc

SEQ ID NO: 5206 - DNA, 519 bp, Gossypium hirsutum
  unsure (1)..(519): unsure at all n locations; Clone ID: LIB3827-001-Q1-K6-E11
ccccgcgtccgcacaattcgtctgagaaaccaggaagaacaacattcccaaacttgtagttgttggtggggctatcgcggttgcatgtattctagatcgagggctcttaaccaaagctgttatattcggagtagctcgaaggtttgcaaaaatcggaagaaggttgtaatcctgaatatttttgtgggtcaatcgaaggaaaccgcacccaccagcaaagcagattgccattgcaatgaagtgagatgttggggatggatgaatcttctcacttagccgcgtttaaaaggttggaagatggaaagattatattagtttttgcaatatttgggccatataggaagttagaattgggcacaagagaatgggatcagatagttggattttttaaatggccatgtcgaaaacagatcttaaaaccgaaactgagttccttttcttgttcagtggctcttctatttcaatatatatactatttatattaannnnaannnnnnnnnnnnnnnnnnnnnnnnnnna

SEQ ID NO: 5207 - DNA, 522 bp, Gossypium hirsutum
  Clone ID: LIB3827-001-Q1-K6-E12
cggtcgacccagcgtccgactcacagcaatattatcacaagcagcagctaaaaaaaaagcaagaagaaaaatggcgtcagagcaatatcaagctatgaggaatgcaccacaagaggaaaaagaagagcttgatgcaagggcaaagcaaggggagactgtggttcctggtgggactcgtgggaaaagcttggatgctcagattaacctagctgaagggaggcacaaaggaggggaaacaaggaagcaacaactaggaactgaagggtaccaagaaatgggacgcaaaggtggtctgagcaactctgatatgtctggtggtgaacgtgcagctgatgaaggtgtcaccatagatgaatccaagttcagaaccaaaaactaaatatcatctcccacgacagaaccctagctactctttttttatatatagaccctaataatgtatgtttgttttaggttttaggaagaactgaaccagcttatatgtaacaaaactggacatgtttaagctttagcttggtgtct

SEQ ID NO: 5208 - DNA, 626 bp, Gossypium hirsutum
  unsure (1)..(626): unsure at all n locations; Clone ID: LIB3827-001-Q1-K6-E2
catcctcctcctcctccacctcctcttcttcgaattagggtttcacgatccccagatatgaagcgaactgctacgaagaagaataggcggcctcgtgcgacgaaaacgccggcggtcaacgattcgtcacgtcatgcgttaagtcagcgggatcagcggcgagaaggagaaggagaagacgatgaagaacaaaaaaggcttctcggctcgttaatggaagccttcggttcgatctctctagaagaagccacgtcagcttataaccaagccgacggtgatttggacaaagcggccgagattctatccaatttgatcgatnacggtnacaatagtgaagatcccgatccgtcaacgagctcgatatcgagtggctcgtcatcgncaggttcttccgggttcggtttttccgaaacgagttgcttacaaaatctgaatagcggaaggggacgtagcagatggggaaaacagcagaagcgagtggtagcgtcaacggtgacggtttcaaccgtcctcgggaaagaattcgttaggtcaagcccatggcgagaccgcgctgcagtggcaccggcgaaatcggtgttggcgacggaagaagccgcacagtttttatgctcaatgcttgggga

SEQ ID NO: 5209 - DNA, 601 bp, Gossypium hirsutum
  unsure (1)..(601): unsure at all n locations; Clone ID: LIB3827-001-Q1-K6-E4
ccggngtcgacccacgccgtccggcaccttcattaaaaagctnggtgccgtcaagnaccaatttccaaatggggtcgtgggttgcacggcgtgacgtcaacgtgatctnccggtttnaccggcagccacaagccaccgaacgtctncgatattcttaaacgataatgnaaaaggtanaccgggtttagcatcatntggcggtgaacataggttgacgaattaccggtcggtgacgactgtacatgggtttgaacgtgatgggaagatctggactgttgttctggaatcatatgtggttgatgtacctgaagggaatacggaagaagatacacggttgtttgctgatacggttgtgagacttaatttgcagaaattggcttccgtcgctgaagggttggcgcgtgatggcgattgtaataaatcacaggtgatgtgaaaataaattatatatatatgtgggtaagaaataaatattggctctttttcttctctctctctctttttttttttaactttgatcttaatttgtttttgtgaattagggtttaattatgcttcagtccctgtacttttcagacgtttgggattaagtgcttcttct

SEQ ID NO: 5210 - DNA, 557 bp, Gossypium hirsutum
  unsure (1)..(557): unsure at all n locations; Clone ID: LIB3827-001-Q1-K6-E5
ggctcaccgtctgaggcgtgcttgtctttaccaatgaccatgcggtggctttcacctgtctcgaactgcaaagatgaagagtggggagaacatcaaaattctgtgtcaaatttgaaagcaaatgatagttcatctcaagagcttcttatgtccatcacccttaaaaccggtggaagctataattcaaaaaattcaacccaaattccatttgtcaatcctaattcttctaatgttacaggtcaagaacaaccagaatgcaagggagacaaagtcgatgtactggttaggctcggtttgctgaagctagtaagcggagtttctggtctaacaccggatgctttacctgaaaccttcatgcttaacttctctagattgcggggtgttcaggccgagattcagaagatcattgtnatatcaacaagcattcttatatttaggcaaatcctctcgagcgagcaagtctctgacatggaaagaacaatatcaaattgcactgaacagctctcggaattcttaaactgtgtcgaagatgcagatattgaagggattgttgacac

SEQ ID NO: 5211 - DNA, 598 bp, Gossypium hirsutum
  unsure (1)..(598): unsure at all n locations; Clone ID: LIB3827-001-Q1-K6-E7
gntcacactatcaaagaaataactcggtataactagatgttttgttttgggtatggcatgtatagaaacttagctacttttggtataatatgaacaataaatgatgtgtgatcggcctccgacgtttccttcgatccccgagtgactagataagtactttatacaaaatgtgactaaactttacaatttagtcatttactttttctttcccccgatctactcccgaacttcattcttcttgattttatcataggagcactcttttcttttctttttgttgttttagatgcgaaaaatgaaaaaaaataaagtcgaaaggaatagatcaagagaaaaaccgcaacaaatccggagattcaaagaaaggaaaatcaccttcctctatttttcttgctttgtattcaatatctgtatgcgtaaatgtgcgttcttaacctttacaaagactaaaagttgggcttttatagccgaaagaaaagaaaaataaccgaaaattacaatatgtctttgtttctattcgctgttgtttttgtttccttcttgcaggtacgggtgcgcgttcgtgtatgggggtcctgttggcgcttggcgtgaggag

SEQ ID NO: 5212 - DNA, 605 bp, Gossypium hirsutum
  unsure (1)..(605): unsure at all n locations; Clone ID: LIB3827-001-Q1-K6-E8
ggaagcttttggttctcaaaccagatgggagaatggggtctcgtctcctactcaaaaagatttgctagttcagcaacaatcacaaacaacagggttactactagccaacatgctgttgctcctattaaatctgctcctgcaagaaactcaaacagccccaagctttcttctggggaactcaaggcagcttccattaatccaatagctgggttcactgtggaaaagagaccttctttggctcaaacccagagccgaaatgatttttttaatctcctgaagaagaagacctcaacaaacacttctgctggtctttcagatccggatcctcatatttcaacttccactacagagaaaactgaagttacaaaggaagtagacggggcttctgcaactgctcatgctgatgagaatggtactgcagctgctagcaatggtgacacctgttctgatgatggggaaaagaacatgagtgctactgctatggtttatcctgatgaggaagaggctgcattccttcgttctcttggttgggaagaaatactggtgaggatgaagggcttacggaagaagagattaatgctntttatcaggagtacatgaaactg

SEQ ID NO: 5213 - DNA, 488 bp, Gossypium hirsutum
  Clone ID: LIB3827-001-Q1-K6-E9
cccacgcgtccggcttaatcagagccatcagacgactgggagaagttcttcagcagcttattttagcagccaggtctattggcgaggacacagctcgaaacaaaatttgaagaggctgtctctaagattaaaagagacatagtgtttgcagcatctctatacttgtagtataggtcagttgctggaaaggatcaaggttgttaaatggcaagatgatcatctttgatgagaatattttttgtcagtaagctgagtgaagcaaatgtgatcaaaggggagggaaaattacctacaaaataaattgcacattaatctgcaagtggatgccttttgccttggaagctatttttcacgatacactttacacagagcagcctgtaacagaaaacagcatataaggcggcaaagcgaacaagattctgaaccaatgttgagaaataatttctcacaatccctaacttacattttacacaatgcactagcctgtt

SEQ ID NO: 5214 - DNA, 551 bp, Gossypium hirsutum
  unsure (1)..(551): unsure at all n locations; Clone ID: LIB3827-001-Q1-K6-F1
gncttgtctcagtagtttccatgttctttttncgaatgaagcaaaagtaaccccgagaagagtgaaagtgaccatggcatcgcatcaggaaagacaggatcttgtcgccagggcatggcagggagagacggttattcccggtggaactggtgggaagagtctcgaagctcaagagcaccttgcagaagggaggagccgtggaggtcagacaaggaaggagcaactggggagagaagggtaccaggagctgggaagcaaaggaggtcagacaagaaaggagcagatngggagtgaggggtaccaggaaatgggacgaaaaggtggactgagtaccatggacaagtcgggaggagagcgtgcagctgatgaaggaatcgacattgtcgagtccaaatacagaacttgatgcagtaaccccttaagtgcctgctggcactgtgttttgcttaggtccagagtcttgctagttttgtgcgtctcttggttgacccagtgttaagatcgtatctttttttgtgaccgctcctcctgtttaggcagtactaatgatg

SEQ ID NO: 5215 - DNA, 575 bp, Gossypium hirsutum
  unsure (1)..(575): unsure at all n locations; Clone ID: LIB3827-001-Q1-K6-F10
cttcgattccatttggtctagacgaagatcagctgcgaatggtgaaacaggcagggaatggtggactgactacaaagaaggaagtgngagagaggtcnncttggtttggggttcggnnaaaatgtagattccgttatgctgtgggaaagaagtcatactgcagacgcttatttaaccgggaaagcagaaggactggatgatggtgacatatcaggccaagcaatagcaaccaaaacagtccaaggtgatgagagaacttatttaactggagaagagctcaagagaaatgtagaattttgtgaggcagtagattgcaatccgcacgatcccgcggttgatatggaaccagctgtttatgacatacatgttgtcgatgataaagtagacattctgaaggaggagaatacaaaagaaagtaaattaccatctggttccgctttaaatcacaaaactttgctatatgactcgaggaggagtttttctgcagtcggtactgaaatgttggagattggtgctgaaatcaaatgccttatagaaaggctgcaaatcgtacgaggagaaaaagtgaagctgag

SEQ ID NO: 5216 - DNA, 545 bp, Gossypium hirsutum
  unsure (1)..(545): unsure at all n locations; Clone ID: LIB3827-001-Q1-K6-F11
ccggtcgacccagcgtccgcccacgcgtccgctgngnaacctaagggaaacaaaggccttcatcttagcactccgccgccccttatctcatcgcaatcatgatcatcccagaaaagaaccgcagggagatatcaaagtacctctttcaagagggtgtttgctacgccacaaaaagattacaacttggcaaaacacccagaaatcgatgttccaaatcttcaagtaataaagctgatgcaaagcttcaaatccaaggaatacgttcgtgaaacttttgcttggatgcattattactggtaccttaccaacgatggcattgaatttttaaggacttaccttaatctcccctctgagattgttcctgctactttgaagaagcaaactaggcccggcggtggtcgtcccatgggtccttctgatagccgcccacgtggtccgccacgctttggcgacggtgagaggcgattcggtgacagggatggataccgtggaggtccacgaggagtcggtgatttcggtgataagggtggtgcgcctgctgatta

SEQ ID NO: 5217 - DNA, 588 bp, Gossypium hirsutum
  Clone ID: LIB3827-001-Q1-K6-F12
gggacaagttggggtcagaatgggcaagcaagtcatggaggatgggcacttccttctaccgagcgttctcagcagtcgggaaaagcaatgatggatgccaaagacagtgcagggccatcacgcggccagaattctacaaaggcgaaaggtttgggagcccttaaagataagatttctcagacactagggaagaaaaagaaccaagtttgaactttgaagcactgagttgatcatctagagagtttatattgtgttctctcatataacatatcaacatgcccttttttggacataactacccatctagttcttcagttttcagaccatcgatagcatatctttgtcatgtgtctgtttctgtagtacaagacctttttggtgttgtggtggttaatgcagagaggtatagacaatttctgcaaatggcacccttttaggttatggatattacaacattataatatggattttttaatgcataaaactttgccttttcatggtttcttcctttttgcatttgtgttgaatatgaatatgatcctgttgttgaaagcttaaatgggtgaattgaattgaattggaaaattc

SEQ ID NO: 5218 - DNA, 689 bp, Gossypium hirsutum
  unsure (1)..(689): unsure at all n locations; Clone ID: LIB3827-001-Q1-K6-F5
cggtccagaactcccccggngtcgaccccacgcgtccgctccctagaataattttctctttctcacttccaccaacgaaaaagtcgtcgatcggatcacgtattagattgatattgtaaagatgtctccaactgaatcatcacgagaggaaaatgtttacatggccaagctggctgagcaggctgaacgctatgaggaaatggtggagttcatggaggaagttgcaaaaactgttgatgttgaggagctgactgttgaggaacggaaccttctctcagtggcttacaaaaatgtgattggggcaaggagggcgtcttggaggatcatctcttccattgagcagaaggaagagagcagaggaaatgaggatcatgttgcacaactaaaggagtataggggtaagattgaagctgagcttagcaagatctgtgatgggattttgagccttcttgaatctcacctcattcctttggcctcatctgctgagtcgaaggtgttctaccttaagatgaagggtgattatcacaggtatcttgctgagtttaagactggtgctgagaggaaggaagctgccgagagcactttgntggcttacaagtctgctcaggatattgctcttgctgagcttgctcctactcacccaattaggctgggggcttgctcttaacttgctctgtttctactatgaa

SEQ ID NO: 5219 - DNA, 630 bp, Gossypium hirsutum
  unsure (1)..(630): unsure at all n locations; Clone ID: LIB3827-001-Q1-K6-F6
ttcttctcttcgagacaagctcaccgngnaaagaccaacaaatcgccgacttgtgtgcccagatcgatgctctcgagacttctttgtctgaaacctcgaataagctcgttatggccgaccaagaaaaggagagcttgttgaaagataatgcttcgctttctaatactgtaaggaagcttcagagagatgtttccaagttggaggtctttagaaggaagcttatgcagtcacttcaagaggacgatgaaagttctgccacagggggtcctccaatcattgcgaagccaacactgtcagaagatgattctgccttgatttcaagaactgcttcaatgcgcagccagtactctgattcgggtgcagaggatcgtgactcagatgtgtcagcctcaagacctggcttacctcatggcctnctgctagcatcacaaacaagcacaccgnggctaactcctccgggttctccaccaagtgtgtcagcttctgtatcccccacaaggacatctaagccagtgtctcctangagacatgcagtttcgttttctacctcaagaggcatgtttgatgataggtcatcaatatcaagctccgattctngatcacagtctggtcgcactcgggttgatggga

SEQ ID NO: 5220 - DNA, 590 bp, Gossypium hirsutum
  Clone ID: LIB3827-001-Q1-K6-F7
cagctcattacttcccgtgctctctcgtcctcctcaccaaataaaagtctctggtggcgaacgaagactttcagcacattttgcgtgtactgaacaccaacgttgatggaaagcagaagattatgtttgctttgacctccatcaagggtattggaaggcgtttcgctaacattgtttgcaagaaggctgatgtcgacatgaacaagagggctggtgaattgactgcacaggagctggacaatctcatgaccattgttgcaaaccccaggcagtttaagatacctgactggtttttgaataggcagaaggattacaaggatgggaagtattcccaagttgtgtctaatgctctcgacatgaagttgagagatgacttggagcgattgaagaagatcaggaaccaccgtgggctgaggcattattggggtcttcgtgtacgtggtcagcacaccaagaccactggtcgcagaggaaagactgtaggtgtctctaagaagcgttgaatgtttcatatatgttgtcaggcagagtgtttatttccttggtttatacgcatcctttgcaccagtggatgtgacattttgttttga

SEQ ID NO: 5221 - DNA, 573 bp, Gossypium hirsutum
  Clone ID: LIB3827-001-Q1-K6-F8
acaaaaccctccaaaaaagatttgtacggaatgtcgcagttgttggagaaggcgaaggacttcgtggtggataaggtggccaacataaagaagccggaggctagtgtctcggacgttgatctgaaacatgtgagccgtgagtgcgtcgagtatggcgctaaggtctctgtctccaacccctacagccattccatccccatttgtgagatctcttacaatttcagaagtgctggaagagggatagcatcagggacaataccagacccggggtcattgaaagccagcgacacaacgatgctggacgtgccagtgaaggtaccgtataacatcttagtaagcttggtaaaggatattggtgcagattgggacattgactatgaattggaattgggtctcaccattgatcttcctatcgtggggaacttcactatccctctctctcagaaaggagagatcaagcttcctactctcagtgacatcttttagatttatcattagtatgtcgctctcatactcataaaacttgtgtgttttcccttttactcatgcgtgtacatgaagaatatatcgaac

SEQ ID NO: 5222 - DNA, 451 bp, Gossypium hirsutum
  unsure (1)..(451): unsure at all n locations; Clone ID: LIB3827-001-Q1-K6-F9
ctactcggcaagcggtcgactgggtctccatcaggataaggatgaaagtccggaaagtctacataaaggattacctgtgatatccttttccattggcgatgcagcagaatttttatacagtgaccaaagggaagtcgacaaggctgaaaaggttgaacttgaatctggtgatgtgcttgtatttggtgggagctctagactcatctttcatggcgtgactgcaattaagcaaaaaactgcacccgggagtctcttggaggaaacgaacctccgtccaggtcgtttaaatctaacttttagagagtattaaaatcctgtatagacatttgagctacaatcagtctttctaggtatgatcttttatgcaaccgactcttctaatctaaaaagaagaaatatctaaggttnaaaaaaaaaaaaaaaaaaaaaaaanaaaaaannaaaaannaaa

SEQ ID NO: 5223 - DNA, 314 bp, Gossypium hirsutum
  unsure (1)..(314): unsure at all n locations; Clone ID: LIB3827-001-Q1-K6-G1
caaaagaggaagcgtggggacaatagcaccgctggctttaggcttaatagtgagcgccaacttcttagtaggcggaccatttgatggagccgccttgattccagctagggcatttggtccnnccttggtaggntggtggtggaaccacctctggttctactgggtaggtccactgataggtggaggtttagcggctctgatgttcgagtgcatggtgatcccagcgtcggagcctgtacacccaacgctccagcccttggctccagatgattactnatcaagtgtttcttgtgttttgtgtttgttcctgtacc

SEQ ID NO: 5224 - DNA, 625 bp, Gossypium hirsutum
  unsure (1)..(625): unsure at all n locations; Clone ID: LIB3827-001-Q1-K6-G10
gtcgaccccgcgtccggaactgtattgattcactcagctgagcagctagagaattattctaaaactgaagaagctaaggttgaggaactcatcaaagcagttgctgattctggtgccaaagttattgtcagtggaggagctgttggtgaaatggcattacatttctgtgaacgttacaagttaatggtcttgaaaatcagctcaaaatttgaactgaggcgtttttgccgcactacgggaacttctgctcttttaaaactcagccaaccaaagccggatgatttgggatttgttgattcaatttcagtcgaggaaattggtggttctcgggtcactgttgtgagaagtgaagaaggtggtaacaagattgccactgtggttttacgaggaagtactgatagtatattggatgatcttgaaagagctgttgatgatggagtgaacacatataaggcaatgtgcagggacagtcgaatggtacctggagctgcagctactgaaattgagttggctagaagattgaaagagttctccttcaaggaaacaggattggatcagtatgccattgccaagtttgctgaanagtttgaaatggtaccaagaaccctagcagagaaatgctgtc

SEQ ID NO: 5225 - DNA, 487 bp, Gossypium hirsutum
  Clone ID: LIB3827-001-Q1-K6-G11
ggagggaaaaattacaggggatgtaaaaacatttttcaacataatatacatttacatttttgttggccaccccagttgtacaactagccctgccgttcctaaaccttttgtttaatgcacaacgaaaacaatagatactgggatttgagtcccaaacttaggctttttttggggcggcggtgtattgcggggcgatgcgtttagtttacactttgtctcacgctacagtattgctacagtttttaatttcaccgccaccgttttttttacactaaccgcaagtaaacacactgcccatccaaactcacccttaatagatatcaccacttacgggtggctttttgaactaattagattaaacctgggttcaaattctaaaaacttcggatgtactatacacagatcgggttagacctatcacttaaaaaagggttaaaagaaatgccgagtttggacaacctgtttctttacaagttcgtgattgggc

SEQ ID NO: 5226 - DNA, 562 bp, Gossypium hirsutum
  unsure (1)..(562): unsure at all n locations; Clone ID: LIB3827-001-Q1-K6-G12
ccggngtcgacccacgccgtccgattgactcataaggtcattccagaacgaatgcctgattgttcatatttcctgcaaggtttgtgcacaaacgaaaattgtccttatagacacgtgcatgtgaatccaaatgcctccacttgcgaaggatttcttaggggctattgtgctgacggtaatgagtgccggaagaagcacagctatgtctgtccgaattttgaagcaacagggtcctgccccctaggatctacatgcaagcttcaccaccccaaaaaccgaagtaaggcaaagaaaagcaaaaggtcaatggagcacaatactgctcgtgggcgttattttggtatcgacatttcagaaccgaaaagaatgggatcggaaagacaacaggaggtactagaggaagacaacatttgctttgatgggaaattctctgattacattagcctgggtgttagcgaagatgaagtggggggacttcatcaagcgaattgtgacgaaacaagctttggtgacaatgattcgactgttttacaatctgaagatttggatgagttaatcaaac

SEQ ID NO: 5227 - DNA, 128 bp, Gossypium hirsutum
  Clone ID: LIB3827-001-Q1-K6-G6
cgtcacactgatactttgggtctcacgaattcgtgagaaagagtgataaaggaggggcggatgaagatgattgtattcaagttgttcgacaaatattcgggcttgacttgaaaacaatgaactattag

SEQ ID NO: 5228 - DNA, 454 bp, Gossypium hirsutum
  unsure (1)..(454): unsure at all n locations; Clone ID: LIB3827-001-Q1-K6-G7
ggacctttgatgatnaagcagcaccctccactggttatactctaatacaagatcaaccctcaagtttgccagagaaacctgtactagagcgtattcttgacatattacagaggagagacacctatgaaatatttgctgaacctgttgaccctgaaaaggttgagggttactatggaatcattaaagaacctatggattttggcacantgagagctaaacctcatgaaggaatgtatacaagtctgcaacantttgtgtcttcgagattgatcccaagttgagcagttgttgtgatatattgtcgaagaaccaccagagggtgctggcaacaaacggtccttcaagtttccattctttgcctgtctgatntttacctgtgagattgatgtccttttgagggcttttgctgcggnggatgagttgttgaacttacttttctccttggaaccgaacc

SEQ ID NO: 5229 - DNA, 583 bp, Gossypium hirsutum
  unsure (1)..(583): unsure at all n locations; Clone ID: LIB3827-001-Q1-K6-G9
aaatgaaaacaaaactttgattaaattgtaaacattcatgccgtcatccagttttagttctcaaatcactgcatgctgtaagcataatggtaccaaaagaagcatcatattccactcttggctccctttgggtgcttctttttccccctcattggctttctcttctcttcccttgcttttgagatttcctctttagaaagaaaatttcttttcctctttttcgatgtcgctgccaattctaccttcccattttcgcttctgtcccggtttttcaatgttggtggtgattcaacctttccgtttccagataaccctttcgcctttaagctcttctttttccctttcgggatttgtttcttcatcttttgttgttcaagctcttttttgttgtcctcatcactatggatctcctctggcctctgggtttgctctactgtttctgaaccatcagaacttacaagattcttctttgaattgctcattttcttcaactttgccncaaaaaaaccgtccatattatgtacatgaggataaaaccgccttgtgttttctaaggatgtttgaaaccgatgctccctaaatc

SEQ ID NO: 5230 - DNA, 386 bp, Gossypium hirsutum
  unsure (1)..(386): unsure at all n locations; Clone ID: LIB3827-001-Q1-K6-H1
gcaaattaccctgaaaccctttcactatatattgnagatgcagtcaatgaagggtgctgctgcctctgctaaggccggcgtggagaaggccaaggcctccgtgcaggaagaggtggtccaattgaagacaagagaccctaatgagaaagagatggcgagggaaaggaatgaagagagacaagaagatgccgagctgaggaaacaagaggcccgccatcataacgccacagctggccatgctggtggtggtggtattggtggcactggctacaccacatctgggtacaacataggcgacactggtggctatggcggtgccggtggtcatgacaaccgtgggtaccccaccgcaggtagtgggtctgatgcaggcaggtaagatgacc

SEQ ID NO: 5231 - DNA, 600 bp, Gossypium hirsutum
  unsure (1)..(600): unsure at all n locations; Clone ID: LIB3827-001-Q1-K6-H12
gacgaggataaagggtgagcgaatgaacaatctcgatctttcaaagggtccagctgaagtaaggacaagggataaatttgggttccatgaagacaacaaattcgagaaccttaacttcaatatgttgaacttggactccaagatcggagatagtgtaagcaaaagtaccttccgaaatggtatttacaacaccgatgctgtttaccagaaaaataacagccacaacattgggaacctgtctgccaacaaatatagcggcaacaaccatagcaacaaagatattaataataacagcaacaccaactccaacaacaacgagaacagcaatgcaaacaatgctgtcgataaaaggttcaagactttgcctgccaccgagacactccctagaaatgaggtgcttggtggatacatctttgtttgcaataatgacacaatgcaagaagatcttaagcgtcagctatttggtttaccgccaagatacagggactctgttcgggcaatcacacctggcctgccattgtttctctttaactcaccactcatcaattgcatggtatttntgaggcagcaagttntgggggttctaacattgatccactg

SEQ ID NO: 5232 - DNA, 650 bp, Gossypium hirsutum
  unsure (1)..(650): unsure at all n locations; Clone ID: LIB3827-001-Q1-K6-H3
cagcatatgggatgagtgtgtgggttacgttcatttccagctatatcctggcaggacagcttccaagacagcagtttggggtggtgcagagcaagatataccctgtttacttcagggcaatggcttatagtatagggatggctttgttggggcacttattgtggcacaggaaaagatcgatctcgagcccgccagaggtgtttcaagctattaatcttttgtcatcccttttcatggttttggtcaatggactgtatttggagcctaaagccacaaaggtgatgtttgagaggatgaaaatggagaaggaagacgggagaggaagacatgactttgtggctgagggaagcagggccactgagtcaccaagtgttgcagatccagtagctaaaaatagcaggaaaggcccctcaacggcaccagcaccagcaccagcagtagcacccactagttcagaacaggaagtgataaagcgcacaatgggtaggctgaatgtgaggctgaagaagctaaatacaaactcatcaatgcttaatattctcactttaatggctctcacctggcatcttgtttacctcggccaacgcctaaccttaaactgttgatgagatggatgctacttgatcctgtgtnaagatctagtctaggac

SEQ ID NO: 5233 - DNA, 624 bp, Gossypium hirsutum
  Clone ID: LIB3827-001-Q1-K6-H4
tcaagtgtgttccctttcttactcgaccaaacaaagaaacccacaccataaaccaagacaaaacaaggcaatgatgcaatttagattggcaacagcatcatcaagatcgtatttggcagtgtttacagcccaaaaacaggttcagttccgaagatttgcctctggagcagccattaaaggaagaacagctgaccctactattcactctggagaacttgaagctggacctgatgttcacaggggtgaacctcagggtatagaaaatcatccagatgaccatggagagaaagaactcaaaccctgttccgaaacggatccggtaaaacaacccaagctgccgtataaatcttctccgaggctgaagatttcgccagtgaatcatcctttggaacccaacgttcaacaaaggcgtacggctactagcggtgcagcactggacgacgtaagctgcgtggggatggacggtacgcctttgccggagagcaaagaggaggaaaggggaaagagagaggaaacgatggatgacaaggagtattttaagcatcacaaggcttccccgttgtcggaggtagaggtggcggatactcggaagccgatcactagagcgactgacgggacagcatc

SEQ ID NO: 5234 - DNA, 591 bp, Gossypium hirsutum
  Clone ID: LIB3827-001-Q1-K6-H6
ctcaagggcaataaagatagccattgttgtgaaaggtgaagggatactttgaaatggtatcacctcctgtttcccccaagtccagtcaggaggattcagcaggaagaaagagtgggtctcgttatcaaaagataagctcacgtttgagatccgacacggtgttcgttgttccagcagggcatcctttcgttacagttgcttcaagaaacaataatctagagattctatgctttgaggtcaacatagaaaacaacgttaggtaccttcttgcaggggaggggaattatgttcagcaattcgagaaggaagcaaaggaactggcattcaagagcaaggaagaagaggtggataggatctttggtaaccaagatgaggagttctttttccctggaccaaggcaacaaagaggccgatattatgaatgaagattgggagttgtggggtttaagctttgaggggttatgtgtgtgtgttaagatgaggagctccatggctgagagcttgccgagtatttctgtaatgccgaagttgtgatgttgtgaatgggaaaaactgtgcgagacgatgtattagagatgttgtaagttttga

SEQ ID NO: 5235 - DNA, 455 bp, Gossypium hirsutum
  Clone ID: LIB3827-001-Q1-K6-H7
taaaaaaacgaaccaacacgttcgaccctcgcccgttctttttatgaagttttggcctttcatcggcctccattcaaggttcctctcttcaccatttctttttccgaaattgccaggcctatccaaagaaccccaaaattaatttggggaaaacaccctttggccatttttctaccctctgggattcaatgggccggcctgccttgcgtttaaaataccgaggatgaaaacaaccgcttttttttgcccaattttttgaattaaaaataaaaataaaattggcctttatttgctgtattctgttagtgggtcttctggtgtattcctgtgcagactcactcctcccgcggagcgaggagacacgccaaggaggccgcgcgaggagccactcctgggagccccaactctctggcctattccagaagcttctggtgctctcatctgctgtactcttt

SEQ ID NO: 5236 - DNA, 391 bp, Gossypium hirsutum
  unsure (1)..(391): unsure at all n locations; Clone ID: LIB3827-001-Q1-N6-A1
ccaggcaacagctatcacctgtctaacacctttattcgatataattttcgagcacgagtttaagntacgagaaaaacagtggaatgtactcatagggctaagtaaaagatagaaagagactacaatttttatcaggcttgaacaccgtatagcatgcaaaaacagaacagctttggactagngaattctaatagcgaagaaaactgattcaagtgatataatcggcccattcagagatgaatgaggtgtgatccatggactctccggggcattgctcatgccttgacggttttttcttccctccgacgagccttgcagggtttccttcagtcctggtccgaggtggcacatcgatcagtacttctgaccctgccccgatctttgctacttc

SEQ ID NO: 5237 - DNA, 181 bp, Gossypium hirsutum
  unsure (1)..(181): unsure at all n locations; Clone ID: LIB3827-001-Q1-N6-A10
ccgctcgcgatctaggttctagatcgcgagcggccgcggttggggtgccttgcttccgttcgcgtgcgtgctgtgtctttgcttttctgtcgtggttctgtctgttcgttctctggtcgtcggtgttcgccttttttttttttttttttccncctttttttggtgggggggggggggtttt

SEQ ID NO: 5238 - DNA, 279 bp, Gossypium hirsutum
  unsure (1)..(279): unsure at all n locations; Clone ID: LIB3827-001-Q1-N6-A11
gggggggggggggggttnttttnnttttngggggngggggggtggggtgtttttttttttgggggggtgtgggttggtggtggggggggggggtgtgtttgngtctgggtttggtgtgttttttttttttttcttcttgggggccgcctttttttttttttttccccattttttttttttttttttgtgctttttttttgtttggtttgtgttgggttttggttgggggggtggggggttttttttttctgtggtggcggtgctgtgtttttttttttt

SEQ ID NO: 5239 - DNA, 401 bp, Gossypium hirsutum
  Clone ID: LIB3827-001-Q1-N6-A12
ggggaaatacaaactcttttattggcacttttttttaaatggattttctttaaaagatttttgttaaattttttacaaaaactaacagggccaatgctcaaataaagggaaataaacttccacgccccgaaatcactgaaaatcatttaccggttacccaaatttcagatgccaaattcaatcaaacacgatttagctttataacctgctcgatcttggcacgacaaacagggcagccccattttttcgctttgatctcgttcaaacatgacatacattcggcaacatggccacaggggacacaagctgcctttggtggggcatccaaacatattgtgcctgaaaaagggcccccatcttcctttgtttgacccgccttagcagctaagttttcagcaccc

SEQ ID NO: 5240 - DNA, 388 bp, Gossypium hirsutum
  unsure (1)..(388): unsure at all n locations; Clone ID: LIB3827-001-Q1-N6-A2
agaggnaaagacaggcatggttaagacattnaaaggaaacatacatggaattgaagcgnaaccctcatttttcatccacacatgcacgcttgcaacgtaattcaaccccccccccccagaaacgaaaagccaaaagcctactttcttttttattcccataagccctgttttgttttttaagtccttccagtttggccttcgtgtgccttgttttcaatcttctgcccaactttctttgttttttgccccacatactctgccctgtcctggacccttctttttgcgtggtctaaatctagcttctccgtccctgttgtcgtcctcagcctgtttgcccgtttctcactacgtcaccctgtttacccgaacgcccccgacgtcaagaacc

SEQ ID NO: 5241 - DNA, 82 bp, Gossypium hirsutum
  unsure (1)..(82): unsure at all n locations; Clone ID: LIB3827-001-Q1-N6-A6
ttttttttttttttttttttttttttttttttttttttttttttttttttnttttttttttttttttttttttgtttttttt

SEQ ID NO: 5242 - DNA, 476 bp, Gossypium hirsutum
  Clone ID: LIB3827-001-Q1-N6-A7
aagacgatcaatgttgactcaaatacatttcatcgaaacaataaaaattaacaacacagatggagggcgaagtacattgtaaaaaggcgtctaaaaaagactgaaatgaccttgcatgataagattgtgtgggtgaaggcaccccaaaactactaacaaaaacattaagagacagacaccgaaacaaaactaaattgcagcagaaaatatagcggcagaagctgagttattctcaaccttacagcttgtcctcgtactcagaaagtggggtcatctgctccttcaatcccttcctcttacggatctcagcaacatggcctgctgcctgggaacccggttccaatggatctgatgacatcatatcccagtgatcaaacacacattgtgggaaagcctgtccggaggttgcagccctcagagtgctggagaatcaaaagactcaatactggaaggtaggccttgatgttgtaaagtgg

SEQ ID NO: 5243 - DNA, 496 bp, Gossypium hirsutum
  Clone ID: LIB3827-001-Q1-N6-A8
agtagtaggagtattgattttcataataataacaacaacaataattttggcaattttctacagaaatcaaccatacaatcatccgccagtataattatgctcaccccatttcaaaaacaaggtggtgatcacaatatgcgggtctaaattacaaacacatatttattacacacaaccattgatttaaaagaagaaaaatcatcaacaaatctaagacgacgacccttcttcttcttctttttttcctttcgtgcacccttaaatttaataaggccctttaagcgaaggacccttcaaagttcaaactgcaccacgaactaaaaccgactcaagctttcgtttactcaatggagacgtaggagccgtcggagattgtcagtggctcccacatcgaactcagcggcttcagcgttgcatccgagcttcggtctaagcgagaacttgggcaaaggcaagctgctaggcggtggagagagtgtaaagacggaacctgaaa

SEQ ID NO: 5244 - DNA, 579 bp, Gossypium hirsutum
  Clone ID: LIB3827-001-Q1-N6-A9
tcgcgatctagttgacatgttagcacattttgatgaatggcaacgatctgggaaggatgatgattatgaagctcaagatcaatggcctgttgagttacgtcgtgcacgtgtggtttcagctgtagattatttgcaggtctgttttttactctctaattattggttgatattatagtttggatgaaatcatacaacttttgaaaacattttctaatgagctattagaagacacgtacttcttttactttcaatttttgagtaggaaaaccggaaacagtcttcaaagatatggagatttatgatgtgggacatcagcaggaatgcatggaaatcggggatttaggtctaaaagtagcccgtctgatcatttagcactggagtggatagcgcttaatccgaaatctagagagaaaagatagaatcatttttcattttttctcgtgatgttttttcccctctattttcactatttttataaagttccacaggcacaaagagctcgtggaaagttaatccaagaagtgaaagaaaacttcattgttgatgcattcattggaaatgcaacggattgggagcgag

SEQ ID NO: 5245 - DNA, 307 bp, Gossypium hirsutum
  unsure (1)..(307): unsure at all n locations; Clone ID: LIB3827-001-Q1-N6-B10
cccggaaatggggcccaaagggggttttgggggggggggggggggggccccccccaaaaacaacaaaaaggaaccccttttttttttttttttttttttttttttttttatacccccccattaaaaagggggcgtcccgaccccgnncccgtcccgggcccggggttttttttccaagggccccccaaaaaaatcccccctgggttccccggggggcccaggggggggccccctttcnaacccgggtggggggcgttccccccttttttccccttcccgcgccctgtgcggggggggtccccccccc

SEQ ID NO: 5246 - DNA, 82 bp, Gossypium hirsutum
  unsure (1)..(82): unsure at all n locations; Clone ID: LIB3827-001-Q1-N6-B11
ggcggaaccagcttattcaaataaaaagagggcaggnnnnnnnnnnnnncttttttttttttcctttttgtggggggggggg

SEQ ID NO: 5247 - DNA, 316 bp, Gossypium hirsutum
  Clone ID: LIB3827-001-Q1-N6-B12
gggggttgggccaaattcaaaaaaacccctttttttgaaaaaggggttaaatttaaaaaacccccttttaacccccttccaaaaacatttttttcaaaaagggggaggggggggaaagggggaaacccccccccaaaaaaaagggtaaaccccccccaaacctttttttaaaaaaaaaacccttttcccgggtttaaatgggaaaataaaaaaaccttttttttttttccccccaaatttttgggtttttaaaaaagggaaagggttttttttgaggggaaaaactttttggggggaaaatatctaaaaaggggtt

SEQ ID NO: 5248 - DNA, 484 bp, Gossypium hirsutum
  unsure (1)..(484): unsure at all n locations; Clone ID: LIB3827-001-Q1-N6-B2
cngtgcnnaccaatggggggtgtttgtcntaaaattcaggaccccgcattgcaccaaaacgttggttcacccaaagattatcccacantccaacttttttacatgtggaaaacagaaccatgttntntgtnaagatatagggtcggcccttnatacaccgaacccaaaatgcttgaaaagctaccctttccagactgccaagttcatcaggcttttcgcatgcatgaccccaatncaaaatgaaagaacctgtgccaccgccatctcaagtctctaccagaaagccctaacctattaagttcactttaagattgtccaaatggcattccagcagcaactcatgcctcccaagtccaatgtccaactcctgttgcctctgaacacctccatatcttcctgaagaaaaatcagtgcctcaatggaggtaaacgtccagagtttgggcagtctctggcccaatgtccagtttgatgacatttaaagc

SEQ ID NO: 5249 - DNA, 504 bp, Gossypium hirsutum
  unsure (1)..(504): unsure at all n locations; Clone ID: LIB3827-001-Q1-N6-B3
gaagaaaaaccaaacagctcacatttcattatcaagcaacgtcaataggaagaagcaaatccaatcacttggttgtaacagaaaccatgttttattgtatgggttattgctacgcacaaccactccaacagaacaaaagaaaacaaaccaaagcactcattctttgtatccatgtattgaatgacatgcattattattagtagtagtagtagaattgttatttattattagcagtatcagtatgaagcatataaaggcatgacgcggagccatctcatcccgctacttttctggtaaaagttctgccagacggtatctgttgggttggcctcagaaacatgtcattagattccgcagtccactgcaccccagccttcataggtggtgcccctatttgtccaccatactgcctccgacttccaattgtcacatttcccaacttctccaccacctctgaagccccagctccacgtcccgnacgcgtgggcggacgcgtctgatcgc

SEQ ID NO: 5250 - DNA, 338 bp, Gossypium hirsutum
  unsure (1)..(338): unsure at all n locations; Clone ID: LIB3827-001-Q1-N6-B4
attaaaattattttttttaaaagtgaaaaggtaaaatttttattattaaaaaaaaagctaanacaacaaagtatcacatcacacactcataacaacgaagcgtttgcaaccgttcgttatctaaaaccactcacgtacatattgcaactattattattatcttaaccctacatgctaccctaatccttcctagtaacagtggccggataattatgttcatcctcatcggcatcagccattccaaaggtntgtttcaccgcatcagtcgcaccttgtgccgcgttcctcactttctcccccgcctgctgcagtatccccccgcttgtctccttggtttc

SEQ ID NO: 5251 - DNA, 608 bp, Gossypium hirsutum
  unsure (1)..(608): unsure at all n locations; Clone ID: LIB3827-001-Q1-N6-B6
ccataagttactctctatgcaagagataaatattatcccaaagttaccaatattttgagctacagataccccccatgattggcaacatataggcagcttacttatctaataagcacaaaagtttgaacatttctttaaaatgcatataaaaatatcattacttattatactagcactctatttttcttcagacttgtaatattccagcaccaacttagcttgctcagtgaccaattcacttcgctccacaaacagctccaactgctcaatttgcaatttcctccatttcgcctccaaagctgccttcttttcaccatcaaccatatccaacccgagctttacaactgcctcttccatgtcagagacaccaaatctcttatcaaacaaactaccagaactcttagacaccaccttatcggcctctattggcactgcatcgtatgttttcttatcgggtgaagaaaactctgctntcaatgcaaccactgccttgttattccccttggctttcccattcgacttagcagctgaagactcaacttttncactaatcccttcttttccccaaatcaatntcgacaactcaaaagcattctgctcatgggcct

SEQ ID NO: 5252 - DNA, 497 bp, Gossypium hirsutum
  Clone ID: LIB3827-001-Q1-N6-B8
aagcccgtaaagggttacttttttttcaaaaaagccgaacacatgggggtttattaaatagccttgtggtaagatctagattggtgaattttgattacccttagcaggtgcgggcctgggggcacccactcccccaggcgttgtactcatgcccggattatttttcacctcagctgctacaacccttttagcatcttcacgagtcactgctttatccttaggcagcatcgcagtagcatccgataaaacgtcccagagagggggttgatcttcaaaccgctgggttcgagcattccgagtggctgcagactgagcttcggatgcaataccgcccggagttattttgctgctgccaggggctctcatttcagcagcttgaattgcagccgcatcgctctgatcaatcggtttatcagcagcagagatggccgccgcctctaaagcctctccaatcgtaattgatcctggatcaaccaacattgctgggagtagtcacc

SEQ ID NO: 5253 - DNA, 415 bp, Gossypium hirsutum
  unsure (1)..(415): unsure at all n locations; Clone ID: LIB3827-001-Q1-N6-C1
aaccaacactagaaacagataagatttggtttgtaggaagtgtttattatatacagaaagcacaggcagccaacanagattctaagatgttgcgtctctcaacaagacatggaagttcacatgacgtcaatctttgacaacaacgaaaccctgagggctccaactatatcggtgagagaaacaagccccgcaagtaatccttgttcatcaaccacccacactcggtgcacgtgcttcgatacgatcttctcaattacttctgcgagggccgtctgcggctggcaactcaccatttgctttggcgccgacaccccctccttggatgcaaataaagggctccttgagactaactcggtgaattccagtgcccttagaggcaaccntgtctgctgtgcctaaagatggcaacccctca

SEQ ID NO: 5254 - DNA, 442 bp, Gossypium hirsutum
  Clone ID: LIB3827-001-Q1-N6-C11
aaaatctaaaatcccatttctagtatttaataaaaaatactcaaacaacacaacctcaatatgacaatagcattggacattttcagtgagcacataaatctcaatagcctctaacatagaagattttcaagatgtcccacacacaatataactgtctcaaaattcttataaaccctacaatagtaatgaagccaagatagcaggaacaaaatcaccaagtacggtccaggggatcaacggtagcggcgaagggagagtgtgttgtttctcttccaggttgccctccttgaaggtcgagccttgtggtgcaagtgccccttgccacgaagacccctgtatttcttgccagcagaggtcagtcctcggagttccctgtgcttgtgaaccggattgcagatccagttgattcttgggtcattgcggatagcgttgtgggcaggat

SEQ ID NO: 5255 - DNA, 416 bp, Gossypium hirsutum
  Clone ID: LIB3827-001-Q1-N6-C12
gggtgtccaattgaaaaacccaatcttttatcattttttccttgtcccataaaaggctaaaaaaaaaggtgctaaatcccagtttcaagcttgggactggggacatccagctcggcaaattacttctttggttactatttctcattttttttcccccattctttttgccaaattgggccccaaaccacagaatttttcaacacatttaagggtttaatttaatcaacatagccaaacaaacttccaaacattttataatcatccactgaactggaaagcacatgtaacacaacatgcatactttgtcatccaaccaacttaaatatgtcctaatcagatagatagtatttcctgcttcccagcacaggcttaaaaaccggggattttgaggttttccttcttcactttgcccgcct

SEQ ID NO: 5256 - DNA, 542 bp, Gossypium hirsutum
  unsure (1)..(542): unsure at all n locations; Clone ID: LIB3827-001-Q1-N6-C2
ggctgctgtattcattcaagagtcgatctcacagctggggaagtttgcnttttgntatcgactagaagagaaatacaaaatcagaccacttagctctcacagtttagcttatattnaactaaattttaaaaaagtgaaatggctactcaaatccttaagaagttgaaacctcaaattctgaaaaagactcccaaagntaaaccacagggaaactnaactgaggagtnatgatcataagaaaagagctacaattgtacatattgagacaacattttgtgacctctcaacagagatcttcccagtttgcctatcttccatagggatggtatcgaccacttcccgcaccactatacccccctcgacttccatagaaagaactccctcctgcagcaccaccaccgttgccgccaccaaggcctgcgtcgtagcttctaccatatccaccagcagcagctccagcaccgtatcccccataaaactcacctgggccttcgtagccactttccatgtcataccctctgttgaaattcctcctagcgacc

SEQ ID NO: 5257 - DNA, 481 bp, Gossypium hirsutum
  unsure (1)..(481): unsure at all n locations; Clone ID: LIB3827-001-Q1-N6-C3
agtaccaagtgttccaacaacctgagtatcataaatgcgtatacaattcaagctaaatgaacctacttgtccgatgttatcacagaacaatctgtttcttggcaacagaagggtgtaactcaacacttaaaaccctctggagctcacttgattgcacaaaaatgggtagaacgtggcgaaaatacagggcggaggaaggtaacgtacataaagtcgttctaacaaacagcaggagttgacggttgtcatctgaagttgcaacaacgtgcctgacctctagaaagtttgtcccaaagacaaatcatctgcctaggggattggtaatgtgcagtataatagtctaccatgcatccgtattgacagaacttccaactatgggagtattggacagtcgtcgactggttaaattgttcgacccacattcccatactcacatcctccatcttgaaaagccctaattnttgatcngcatgttgtgaga

SEQ ID NO: 5258 - DNA, 530 bp, Gossypium hirsutum
  Clone ID: LIB3827-001-Q1-N6-C4
ttttttttttttttttttttttttttttttttttttttttttttttttttttttttttttttttttttttttttttttttttttttttttttttttttaaaaaaaaaagggtttgaaattttgggggaaatggcccccaggggcccaaaattttaaaaaaggccccttttagccccttaattaaaaaaggcccaaaaaggccccaaaacttttcaaaggtttaaaataaaaccaggggggggaaaaaaaaatgggggaaaaacttttttttttaaaaccgcccgcccaaaaaaaaagccccccccctttttttttaaagataagttttttttttaaaaaaaaggcttggaccccccaaaatttaaaaaaaaaaacccaaaccccttttttttttaatccccaacattggccgaaaaaaggccccgaattaaaggggtgtttttttccccggggggggggttgggtgggcaaaccattgctgggaaaccgatccccaaattaaaaaaataaaaaaaacccccggccttaat

SEQ ID NO: 5259 - DNA, 582 bp, Gossypium hirsutum
  Clone ID: LIB3827-001-Q1-N6-C6
agaagaaaattccgtcatacagatctgatacagcacaaaagcttagcaaatcttaagctgtcaaaggaaccctagagaccaatacttacaacagattcatccccacactatcactaatttagtcctctctctatactttgtacagattcaaaaccatgacacactcaacacgcacaaaccagcatattatctcagtaatattatgttctatatatacagattaagtagataaatactcccacataagataccattaggagttaaaaatactaattggcactgattccagaatctttgttaaactttgaagtagcaaggccggcaacatggaactgtggttggtaattgtttgtagggcggtcaagaactggaggttcattcaagaatgcccaagtgctccttgtccaccacccactttgctttacgatattttccaggcttgtttcggtgtccatgtctaggaaaccctggtttctatttggtgtaggcatggagcttgatctcatatatttccttccatactgctgattgcaactatctggtgaaccatatatagcattaagatgctcttcctctgttttc

SEQ ID NO: 5260 - DNA, 488 bp, Gossypium hirsutum
  unsure (1)..(488): unsure at all n locations; Clone ID: LIB3827-001-Q1-N6-C7
gctgtgaagttgttggagaaagtgaagcagcggctccggttgaaccaacttcaagagcttctcgtcgccggataatggagcttctaccgtttaaattagtggccgaagctgctgttcgaccgccgttagagaacggccggaaacgtcagaagctcgatctcgttcgcccgacttctcgtgattgtgataacgctgttcaaaactcggttactgataagcttgagaaagatcaagaacttaatggaagtctaaagtttaatggagcagtaaaatcagaagccgtagaagaagaaaaggaatcgccgaagttcggcatgacatccgtttgcggaaggcgacgagatatggaagacgccgtttcgattcacccttcgttttgcaaacaaagacggcaagttcaaatgtcgtcggatattcacttttacggcgtcttcnacggccatggctgctctcatgttgctatgaagtgtaaagatcgatttcatgag

SEQ ID NO: 5261 - DNA, 475 bp, Gossypium hirsutum
  unsure (1)..(475): unsure at all n locations; Clone ID: LIB3827-001-Q1-N6-C8
gaaacaaagtcactttattcccacacatggtgcacccaaactaaggtagacattcttttatggtgcttagataaagtcttggcaatttcttttgtaaaagtaaatcacgtaaaacattcatccaatatggtnaaaagaaaagaagaaaaaaaaaaaggggctcaccacaagtacaccatgttgtatcaacaccggctgcttcttatttccactaatattcccacctatacgtccctctgggattctttgcatgctcaagttatatccatcttgggttttcacttggtgttcctcacatttgtaaccatggatagtgaccgaggcggcgcatatcccattgactagtggagtggctgcaccttggtttcggccaaaccaaccaccacggctcgagccataggctggatgaggctccaccaccaagaccatgaacacaaccaaactcaacaaccctgtaggagaacccacgcgtccg

SEQ ID NO: 5262 - DNA, 531 bp, Gossypium hirsutum
  Clone ID: LIB3827-001-Q1-N6-C9
ggcaccaaagaataaactctttaaataaatgggagacaggaagatgttataatttttggcttgggtttgggtttcccctgtcacttccttcacaatgttacaaaaaaccaattttgtggcacatttccatccggggattgctcaataaataaaatttcatcaacccctataacgcatctcactgtaatagcaattcttctccctgcaacacttttagttgccttttagcataaactgtgaaaacaattgttgtaaccactgttaaaaggaaaccgccaacatttaacaaaatttgtggagccgataaggtgtgttgttcttgtgaagcatctgccaatgtctgtatgaggataccagtgtatattgcaacaaaaatttcaggcaccattcctatcaaagatcccaagatgtaaggaccatatttaacatgtgttgccaccgcacaatagttatatatgatatatgggaatggagagatttaattaatgttacagctttaaactgatgaaaccaatttccttcaccagctgc

SEQ ID NO: 5263 - DNA, 393 bp, Gossypium hirsutum
  Clone ID: LIB3827-001-Q1-N6-D10
accggttccctggggtggacccgggtttcccggaccgggccctgggggggcccggggggggcgggggcagagccggttccgggggggggggggtaaggggtaaaaatgccccccgggtgacagatgcgaacccctaaaaagtccacccaggggagcccccggagggagaaaaggcaaaacaaggggggcggaatgagggaccgaattaaaatcaaaaaagcggaagtaacagccgccttaacaaatgggaaaacgggcgggcaaagggggttaaagaattggccaacacggggggagagggggttaccagtgagacggccaaggggggatggcctttcaccgccgggcccggcaaaagttgaaggaactgcaccacccggccctggccaaggg

SEQ ID NO: 5264 - DNA, 400 bp, Gossypium hirsutum
  Clone ID: LIB3827-001-Q1-N6-D11
acatatcaaatgaaagatttcatttcataaacaaactggtacagcaaggggacctaaagcccaagagatacatgagataaagcccaaaggcttggcccaagagttcaaaccaacaaaaaccctggcaacacacaacaccccgcggccattattaatgaaggaggggagaatgggaaaccccccacgaccgtgaaaaaaaagtcggctcaagaaccaggaccaagcagagtgaagcacgaaaaaacccgagcgcttgtgatcaccaacatcgattacaagcttgtcggtggaggagccaaggaccaaaagaccctccgatcagtcggccatgagcagccaccacaaaaacacttaaaattcatggtttaaatcaaaacctggcaatggtgtatgctttgtg

SEQ ID NO: 5265 - DNA, 488 bp, Gossypium hirsutum
  Clone ID: LIB3827-001-Q1-N6-D12
caaaatgatttgcactgataaaattaaaggaatccactgaacaagagcagaatcaaactgtgcaatgtatcagccttcaaaatctcaaacattgatcacgtactctcaaaaccaggcaagcgtgctcaccaaagagaaataataacaccatttcttataaagaagcccgcctaaaacctctcagaagcttcattagaaaaccgagccacaagaaaaaccgcacatttaaacaaagcgaatgccacccgtcaagccacactaccatacttgaactgactgcagcatgagcaggcgtttgtcatatataactacactatcctggaacaagttgcagcccaaagtggtccaggtcaaaagctggggaacacaaagggcctgaaaggaaggccttcatcaattttatttggacgggctccatcttcaataagcgaatcacttgctaaagctcatttctgaatatctgcgaggctgtttatttgggttatttt

SEQ ID NO: 5266 - DNA, 460 bp, Gossypium hirsutum
  Clone ID: LIB3827-001-Q1-N6-D3
gcgacagaaggttcttatttgatctccaacaagtagggttgaagcttaaaatgtgggtttcttttgggggagaaaattaataaagaaaaaaagttgtgaacagaaaattttactaaaaagtacacagaaacaagtgttgcaaaaccaaactgtcctagactagatctttacacaggatcaagtagcatccatctcatcaacagtttaaggttaggcgttggcccaggtaaacaagatgccaggtgagagccattaaagtgagaatattaagcattgatgagtttgtatttaactttttcagcctcacattcagcctacccattgtgcgctttatcacttcctgttctgaactagtgggtgctactgctggtgctggtgctggtgccgttgaggggcctttcctgctatttttagctactggatctgcaacacttggtgactcagtggccctgcttccctc

SEQ ID NO: 5267 - DNA, 582 bp, Gossypium hirsutum
  unsure (1)..(582): unsure at all n locations; Clone ID: LIB3827-001-Q1-N6-D4
ggagaaattggagttataaggggagaagaaaacaaaacaaaacaaaacaaactagtgctgtatttaaaaaaaaagaagctattttccttatacaactctgccctgtccaccatgacatattcatacaagtttacatggtaatacaaacttgtcgaaatgttgaggtcaaatccggaacaaaaaacagaaacaagaaagaaaatatgataaaaacctttaccttacaatctatggaaaacacacatatatgcatctcaatgggtactccatgggatataaaagctagttgaatgagataccaagccagcttgctattctgtccacgaggctcaaggtcagtggtgccagcatacgggtaacctttggcagtgctggataactgagtgtcccaactatgaaccaattgaaactcaatagggcaactgcatcagaagcaggtttgttctttatactgaagaaaaactgaaccacactttgaagtgacatgccaacaacagtaaagagagccaccacaagaggcatgcaaggatcttcagcttcccagacaatcattccacncaagagtgataatattgcactaaa

SEQ ID NO: 5268 - DNA, 432 bp, Gossypium hirsutum
  Clone ID: LIB3827-001-Q1-N6-D8
aggggataaaaaaaagtaatttcattaaaaataaacatacctctctctaaaaaaaaaaacatacctgtttctaaatctcatcacactgaatctaagttgggtgtttttgtaaaagggatttaaattacccacaaaatgtgataagatcatgttgtctaatgcaaaaactcttttgggtcagtggtttaacccgtcaaagctgaaacagtggcagtgtatggggaagcaagatatatttgcccttccttatgccccatcccaccaggaaagtttctatttgttgttgacacacaaacctgagcttcgttcatgcgagcatatgtgtccttagggccacccatacaagcagcacaactagggcttgctggtgtgccacaaccagcttcttcaaattttgagacaagtcttgccccagatcctggtcaatgagag

SEQ ID NO: 5269 - DNA, 588 bp, Gossypium hirsutum
  unsure (1)..(588): unsure at all n locations; Clone ID: LIB3827-001-Q1-N6-E10
aaataaacaagcatgaataaaaagattgttaagacccaattcatttacagccctagcagactagccatgaagcgacattaagtccactaagaaaaagaacaaaaacagagctaatgcttcaactgtgatgattattcctggaaatttgttgtctcctcttaatttacaaaggaccatgtctttttcataccattatattccttatctaaagcacaaatcagtttggctaaaagatgcttcctgataattggtaatttaggagctgatatgtaaacaagacctgcaatggaacatgcagatatctagtcacccttctctctagctagaaagactttaactgcagtatatcttccccatcctaccacgtattgtagcttcaagaatctggaaatctgtaaactttggagttaggaacattagctatnatnaccaccaacaccaccaccaccaccaccaccaccaccatcatcgtcgtcgtcgtcgttgttgttgtcgtcgtcgtcgtcgttgtcgtcgtcagagtagttattatcaccaaattgttcatatatttcatactctccatcactagtgtctgcagcctgtatt

SEQ ID NO: 5270 - DNA, 487 bp, Gossypium hirsutum
  Clone ID: LIB3827-001-Q1-N6-E11
aatataaataggatattttttggaaatagaagagccactgaacaagaaaaggaactcagtttcggttttaaaatctgttttcgacatggccctttaaaaaatccaactttttgatcccattcttttgggcccaattctaacttcctttttggcccaaatattgcaaaaactaatataatctttccattttccaaccttttaaacgcggcttagtgagaaaatttatccatccccaacattttactttattgcaatggcaatctgctttgctggggggggcgggttccttcgattgacccacaaaaatattcaggattacaacctttttccgatttttgcaaaccttcgagctactccgaatataacaactttggttaaaagccctcgatctaaaatacatgcaaccgcgatagccccaccaacaactacaagtttgggaatgttgttcttccctggtttctcaaacgaattgtgcggacgcgtgggc

SEQ ID NO: 5271 - DNA, 369 bp, Gossypium hirsutum
  Clone ID: LIB3827-001-Q1-N6-E12
aggaccaggtcttacataaaaacgggggtgggccccttttaaaacactaaaacaaacaggaaaacactaagggccagcttagattacagacaccaagctaaggtttaaaaaaggccaggttttacatggaaacggggttagtcctaatttaaaacactaaaacaaacaggcaaaaggaaaaaactagggtatagcttagggtacagacaccaagctaaagcttaaacatggccagttttggtacaaaaaaactgggtaagtttttcctaaaacctaaaacaaaaatacattattaggggttatttttaaaaaaaaaaagctagggttctggcgggggaaaagaaattaagtttttgggtctgaacttgg

SEQ ID NO: 5272 - DNA, 476 bp, Gossypium hirsutum
  Clone ID: LIB3827-001-Q1-N6-E2
aactacggaatttacagtctctcttgagtctttgtcattcccaattattgggtcaggtacatgattttgctaaactcaacatacgggaacacggaaagcttcattttcatgaagcttccacctaccttagggggaaagggtacagggatttctagtaatgtacatataaacatctgatccctgtttttgaaccactaattaaccttgttacattacatccttgtcttgtacaaacaggtggtaaatgatgcaaacctggtattagataattaatttactccgggtcactattggattctaaaaagctgaactctctgtatccgccaagcttgattagtacagttccacggttttcttcacgccactgaatgccttccttttcaagaagcttagtgaccgactgtttcagttttgacttccccataccatgtgttccacagccagtaataaccctcagagtttgaacagaaggaaca

SEQ ID NO: 5273 - DNA, 520 bp, Gossypium hirsutum
  Clone ID: LIB3827-001-Q1-N6-E4
aaaagaaaagaagaagcacttaattccaaacgtctgaaaagtacagggactgaagcataattaaaccctaattcacaaaaacaaattaagatcaaagttaaaaaaaaaaagagagagagagaagaaaaagagacaatatttatttcttacccacatatatatataatttattttcacatcacctgtgatttattacaatcgccatcacgcgccaacccttcagcgacggtagccaatttctgcaaattaagtctcacaaccgtatcagcaaacaaccgtgtatcttcttccgtattcccttcaggtacatcaaccacatatgattccagaacaacagtccagatcttcccatcacgttcaaacccatgtacagtcgtcaccgaccggtaattcgtcaacctatgttcaccgccaatgatgctaaacccggttaccttttcattatcgtttaagatatcgagacgttcggtgcttgtggctgccggtaaaccggagatcacgttgacgtcacgcgtgcaac

SEQ ID NO: 5274 - DNA, 516 bp, Gossypium hirsutum
  Clone ID: LIB3827-001-Q1-N6-E5
aagaaacacatttattaatattaaaatacttcgtcttacattttggcttattcccaatgaaaagagagaaaagccaacacaaatcccttctttttttccaataaacctaaaaaatatttacattacaatatatgttctattgaaccgaccgtaggaaatataatagaatccattctaaccatattttgaaacacacattatttacattacagattgccattattttcacaaatcacatgtaccaatcaaggttgcgtaccatggtccgtggaccccgatagacactgtggcagcaaccaccaacaccttggcttctttcacgaccctttcggttagagaagcagccccgactcggcggagagcagtttccgccaactttctaccatgggtaccgctcccgccgaatacaacccctctgaaagctaaataaacggcaagggatacctttttgaacactggatcctcagcttgcaagctctttgctagcatcctggccatcatagatttccttaactg

SEQ ID NO: 5275 - DNA, 540 bp, Gossypium hirsutum
  unsure (1)..(540): unsure at all n locations; Clone ID: LIB3827-001-Q1-N6-E7
aatcccaaaacaaaaaataatatattagtccattataatgtctantttacagaactttggcgccaatacatgcccctagacccaataactaaaaccccacggcccaaggactgacccaaaacccgaaatgagcccaaatggcccaaaaattttagaaaccctagggttcctttctttctcctgcgccgcaacagcaacctccctatgccttcgcctctgtactcctcacgccaagcgccaacaggacccccatacacgaacgcgcacccgtacctgcaagaaggaaacaaaaacaacagcgaatagaaacaaagacatattgtatattttcggtttatttttcttttctttcggctataaaagcccaacttttagtctttgtaaaggttaagaacgcacatttacgcatacagatattgaatacaaagcaagaaaaatagaggaaggtgattttcctttctttgaatctccggatttgttgcggttnttctcttgatctattcctttcgactnntattnttttcatttttcgcatctaaa

SEQ ID NO: 5276 - DNA, 576 bp, Gossypium hirsutum
  Clone ID: LIB3827-001-Q1-N6-E8
gaactaaactaaattgaacttcttttatttccacatatttttccataaaattaaccaaaaaacacaaataagctatatttctatgaactctcttcaaagtaaaaggaagaaaaaggaggaaatatctccctaaagatgcaacaactttcacagcatcttttccaaatcaattcttatcctagacccaccatggaaaactaatcaattctctcttatacgaacctagggcctatgttactcaaacctggtttgagtgtgagtcttggatatgtctgcacggatttctaagtttgttttttttttcttgtcatgtatgtgaagtgtccttgaagagtcatatccttgtacaaggttcggaagtatatcgagcataatatccggatatgggtacttcaagaaagatgaagaacccgtgaaacataagaaaggacttattgcaacatttgcaaaatgaactgtcaaaccaaaacctacccactaaaatacctaacgcatcagctttgtttctaacagaagacatcaaaaaagagataaagtgaggcaaagaaagggaaaaaaataagagaagaagaagag

SEQ ID NO: 5277 - DNA, 407 bp, Gossypium hirsutum
  Clone ID: LIB3827-001-Q1-N6-E9
cttccaagcctagaaaaaaatccttcttcattttttttttttaaaaacattaaacaaacttacaggaaaaattttaggggactaatttcactaatttaactagaatttagcttaagttcccccaacaatggcagaaaaaaactgggatcagaaacaacacatgttttttttaacaataaaacaggctagggcattgggtaaaatgtaagttagggattgggagaaattatttttcaacattggttcaaaatcttgttcgctttgccgccttctatgctgttttctgttacaggctgctctgtgtaaagggtttcgggaaaaatagcttccaaggcaaaaggcatccacttgcagattaatgtgcaatttattttgtagggaattttccctcccctttgatcacattt

SEQ ID NO: 5278 - DNA, 508 bp, Gossypium hirsutum
  unsure (1)..(508): unsure at all n locations; Clone ID: LIB3827-001-Q1-N6-F1
aacatatcnaccaaaaacacatttcattccatagtcaaaaagcatccagaaggaagagaggcgccttgcaaactgaaaacctctcatatgccatgccactccatcattagtaactacctaaacatggggggggggttacaaaaaaagatcgatcttaacacttggtcaacctagagttgcacaaaactaccaagactctcgacttaagcaaaacacagtgccagcaggcacttaaggggttattgcatcaagttctgtgtttggactcgtcaatgtcgattccttcctcagctgcacgctctcctcccgacttgtccatggtactcagtccaccttttcgtcccatttcctggtacccctcactccctatctgctcctttcttgtctgacctcctttgcttcccagctcctggtacccttctctccccagttgctcctttcttgtctgacctccacggctcctcccttttgcaaggtgcgtcttgagctttggagactcttcccacca

SEQ ID NO: 5279 - DNA, 535 bp, Gossypium hirsutum
  Clone ID: LIB3827-001-Q1-N6-F10
aaacttaaatatttatgtatttatggacttcacagatattttatcaacttcttatctgaaaaaaagaaaacctaagaaacagccgattccatagcttattctgtacattgcttacattgcttacgcactatcttcgattccatccgatacgctccggcagcgtctccggttggagtttaccttgaaaggtgaaggtaaaggaggtaaagaagtctgccgaacgggctcctttagctgctgaaattctcgaagttggttcaccagctcctcgatgagtttcaaatgggtatctatccttttcctctgatccgatgagaaactcagcttcactttttctcctcgtacgatttgcagcctttctctaaggcatttgatttcagcaccaatctccaacatttcagtaccgactgcagaaaaactcctcctcgagtcatatagcaaagttttgtgatttaaagcggaaccagatggtaatttactttcttttgtattctcctccttcagaatgtctactttatcatcgacaacatgtatg

SEQ ID NO: 5280 - DNA, 444 bp, Gossypium hirsutum
  Clone ID: LIB3827-001-Q1-N6-F11
gccaaagatgccggtttcatttttttttataataattaatggttcttccgaaattgagctgcacaacttcgggttttactggctaattgaaacaaagaaaatcaatgcgacaaaagcctcaaaaacaaggggggaaaaaagaacatagataatctcaaccatttgagtgcaaaaaagcacaccccaaaatgaactaggaagggccattcaacctaaactgacaaactcatggaagacctgcaccgcttggggaactggcaccaccataacctccgccttcacgaccaaaagcaggccttgaaccagggcccctgaatgaaggctgataattagaaggcgcaccacccttattaccgaaatcaccgactcctcgtggacctccacggtatccatccctgtcaccgaatcgcctttcaccgtcgccaaagcgtggcggaccacgtg

SEQ ID NO: 5281 - DNA, 527 bp, Gossypium hirsutum
  Clone ID: LIB3827-001-Q1-N6-F12
catattaacttcattgaataaatcactaatggtttccatgcaaaaattttggtgtaatgtctataacaatgatgtgtctcggtagcctatgttggatatatggttatattacatcaagagatggtagctcttttgcctaaccatgaataactttaaggacaaaatactccttcaggctccattccagccgtctacttttcgactgagattcaatgatcttcagacactatgaacttgaagagttgtgacaccacattttagtcccaactgtcccggctttttcgaaatgctttcttgtctgaaaggaccttcttgcttttaaggcgtttttgctccccaattgcagccatctttgcgattttcttcttttgttcttccgatggaggtggtggcacataagcagcagcatcaatgattgcctgtagttttgccaaagcatcatcgatgtttcccttttgcgtcctagtcttggttgatgatatcacgatttctccatccttgtttatacggttcttttccatttgcat

SEQ ID NO: 5282 - DNA, 544 bp, Gossypium hirsutum
  Clone ID: LIB3827-001-Q1-N6-F3
ataccaagataacttaacatttaagttgtaagagcccatttttgcccgggcttgggccgccgccacgacccgcgttggtccacgccccgagccgatcggcggaccggtttttgccgttccacattcgaccggggcgcattgccggcccccatccgcttccctcccgacaatttcaagcactttttgacttttttttcaaagtccttttcatttttccctcgcggtacttgttcgctatcggtctctcgcccgtatttagccttggacggaatttaccgcccgattagggctgcattcccaaacaacccgacttgtaaacagcgccttttggtgcgacagggtccgggcacgacggggctttcaccctcttcggcgcccctttccaggggacttgggcccggtccgtcgctgaggacgcttctccagactacaattcggacgccgatggcgaccgattctcaagctgggcttttcccggttcgctcgccgttactaggggaatcctggtaagtttcttttcctccgcttattgatatgcttaaac

SEQ ID NO: 5283 - DNA, 237 bp, Gossypium hirsutum
  unsure (1)..(237): unsure at all n locations; Clone ID: LIB3827-001-Q1-N6-F5
gggaggggggaggtttttnttgttttttttaaaggcaaaggttggggtgggggtgggggggggagggggggggggaggnaaagggggggggggggggggggggaaaggggagggggggggggggggggggggggggggggggagggggggggtgggggggggggggggggggggtgggggggggggntagggtgaagggggggggcggcgggctggagggggggggggggggggggg

SEQ ID NO: 5284 - DNA, 317 bp, Gossypium hirsutum
  unsure (1)..(317): unsure at all n locations; Clone ID: LIB3827-001-Q1-N6-F6
ctgntgggggccccnccccggcttttttgggcccctccccccccccnaggggggggggggggcccacggcggggaagccgccgcctccccntccggtttactggcccccgcccctttccaacccccctnatattgcctagaaatctntgctgtcccggccacaaatctcctctgctttcctccttgccccttctctcctttgtttgtgggggttttgttcttttccctttgctgggntgcccccccctgcccctcccccaagcgggtcctgccttggcggacgatttctttcccctccacccccgcgcgaccaggct

SEQ ID NO: 5285 - DNA, 545 bp, Gossypium hirsutum
  Clone ID: LIB3827-001-Q1-N6-F7
gatcaaacgaacaattgattaattaaaacactacttgtctgagatatttaggccaactcaaaacaaaatgtcacatccactggtgcaaaggatgcgtttaaaccaaggaaataaacactctgcctgacaacatatttgaaacattcaacgcttcttagagacacctacagtctttcctctgcgaccagtggtcttggtgtgctgaccacgtacacgaagaccccaataatgcctcagcccacgggggttcctgatcttcttcaatcgctccaagtcatctctcaacttcatgtcgagagcattagacacaacttgggaatacttcccatccttgtaatccttctgcctattcaaaaaccagtcaggtatcttaaactgcctggggtttgcaacaatggtcatgagattgtccagctcctgtgcagtcaattcaccagccctcttgttcatgtcgacatcagccttcttgcaaacaatgttagcgaaacgccttccaatacccttgatggaggtcaaagcaaacataatcttctgctttccatcaa

SEQ ID NO: 5286 - DNA, 471 bp, Gossypium hirsutum
  Clone ID: LIB3827-001-Q1-N6-F8
aaaagaaaaacaacctagtatagttcgatatattcttcatgttacagcatgagtaaaagggaaaacacacaagttttatgagtttgagagcgacatactaatgataaatctaaaagatgtcactgagagtaggaagcttgatctctcctttctgagagagagggatagtgaagttccccacgataggaagatcaatggtgagacccaattccaattcatagtcaatgtcccaatctgcaccaatatcctttaccaagcttactaagatgttatacggtaccttcactggcacgtccagcatcgttgtgtcgctggctttcaatgaccccgggtctggtattgtccctgatgctatccctcttccagcacttctgaaattgtaagagatctcacaaatggggatggaatggctgtaggggttggagacagagaccttagcgccatactcgacgcactcacggctcacatgtt

SEQ ID NO: 5287 - DNA, 233 bp, Gossypium hirsutum
  unsure (1)..(233): unsure at all n locations; Clone ID: LIB3827-001-Q1-N6-F9
gggggggggggaggcccnaaattttttcttttttggaggaaaaaaagggggggggaaaaaaaaccccccgaaaagggggggggtggccccacgggtttttcgggggttttataccttcttcaaggggtatttaaaaacccggggggggggggagttttccccaaaaaaaccccggggggggtttttttttttaattgcggccccccccggaaaggggggtggggggccccccc

SEQ ID NO: 5288 - DNA, 481 bp, Gossypium hirsutum
  unsure (1)..(481): unsure at all n locations; Clone ID: LIB3827-001-Q1-N6-G1
gttctacttactgcaccttttttatttttttcgtgacgtcccttacaagcataggagaagacattccatatgtggcgnaaaaggacttttgattgcaacgtctagcttgatggatccctgtgggacccaattgtgttgcttggtncaggttcaggtncagagcacagggncacagtgaaacagtttgagcttgtatatctttctgtgagccattgggcgtgntgcgttngggtgntgctgggctccgccngctggtgatcactcntgtacttcgtacatttagagtccggtagacctgtccctgtcagtggaccttcccagttgatccagtggtggttccacctccctcctgccaaggctggaccaaatgcccttgctgtgttcatggcggctccatcaaatggtccgcctcctaagatgttggcgctcacttttgagcctatagccagcggtgctattagtccccctctttcttttttgc

SEQ ID NO: 5289 - DNA, 403 bp, Gossypium hirsutum
  Clone ID: LIB3827-001-Q1-N6-G10
gtggggggggttttgggggggggggggccccctttttaaattttgggggggggaaacccccagtggggtggccccccacccaaaacccccgccccaaaaaaattttaaaaaaaaaaaaaaaattttttttaaaggggggttgggccctccggaggggccccaaaaaggccccaaccccccttttgggaaaaaaaaaaaagggggggggtttaaagggggggggacaaaaaagttggccccacccccccccggggggggggtttttttttcggggaccccaaggggggttgggcttttttttgggagccccccctaaaaaagggggggggggttcgggggttttttgggggggaaaaaaaggggggcaaaaaaagccccaattttgggggggaggcaatttttg

SEQ ID NO: 5290 - DNA, 389 bp, Gossypium hirsutum
  Clone ID: LIB3827-001-Q1-N6-G11
ggggtcaaaagaaaccgggggggtttttaatagggggaatggggcccccccgccgtttcccagttaacaccctaaagggcggggggggggggaaccttttggggggaaaatggcccccccccccgggggggggaaaagattccgtttggggggggggccccgttcaggggcctgggggggggggggttttgtaaggggggcccttctggcaccccctccaatgggggggggttgcttcggcccccccccccgaaaaaaaagggggggggggaatggttgaaaaaaggggggggaacccccccccccaccttggtaaaaaacagggggtcccaccccggctttttttttaaccctttttttggggggggggccaacccccgctgggggtt

SEQ ID NO: 5291 - DNA, 467 bp, Gossypium hirsutum
  Clone ID: LIB3827-001-Q1-N6-G12
gctcaactccaattcggcattttttatttctacatttctgttttgttacaaggggcacatgacaacatatactatgctgtaaaaatgcaaattttaaacaaaagagaaaaaataagcctatgggtggatgctaaatatttctcagaaagctaaaaatacataaaaagggtgctcgctctctctatacaacattttcaattcctctattggatggctaaatgcttaccacttgaagattcagtaaccagaaatgattctgttattttacactcactcattatacgaatgggtttgattaactcatccaaatcttcagattgtaaaacagtcgaatcattgtcaccaaagcttgtttcgtcacaattcgcttgatgaagtccccccacttcatcttcgctaacacccaggctaatgtaatcagagaatttcccatcaaagcaaatgttggcttcctctagtacctcctg

SEQ ID NO: 5292 - DNA, 101 bp, Gossypium hirsutum
  Clone ID: LIB3827-001-Q1-N6-G4
cgggcccggggggcgccccgggaattccggcccggggcctgggggggggcccccttgccctttcgggggggggtttgggggggggggttttcgggggggtg

SEQ ID NO: 5293 - DNA, 261 bp, Gossypium hirsutum
  unsure (1)..(261): unsure at all n locations; Clone ID: LIB3827-001-Q1-N6-G6
ataagaattattttagaatatacaaaaattctcaaaaacaacaaataaatatgtcctcacatgggcgacanaatcttaaagcagttnagtaatttgtngaaatgtaaaanatatttgtgttctttcncaactccgtgtgtgggggggggggtgtaattntacctctactttacgttgaaataaaaaaaaaaaagggggggggcccggggggggtccgggcttgggncgggggctgggggcgggtcggggcgctttgtgggg

SEQ ID NO: 5294 - DNA, 557 bp, Gossypium hirsutum
  Clone ID: LIB3827-001-Q1-N6-G7
gaagaaatcactcaccaagctgaggcaacattgcattgatagtctctgaatttacagggattggaggctcatacataagttgatttcggaaagaatacatcaagggagaattaattgctgatctttttggatccaacaatgagatgcaaaccgagagtgagtttacaaggccagatttggaatgtgaatcttccaatgcatgaccaaatatccttgcaacaaagcttggactagagagttttgtggctaatgctgatggcacattccgagttattgcacataatgtttctgccgcattagcatgaacttcaggagcacatgatggactcaatttatccacaatcatttccagcaagttgctatcagctaaccattgcattacatccgaaaaatttggatatacatgatcattagcagctactaaccgaaccaaaacctccatgatggatgtgattcctatcaaatcaaccagttggcagaacacatcttgatgcacttgaacgtagttcataagtggaacagtcttccgtagcataaggcatacaacaaccttactg

SEQ ID NO: 5295 - DNA, 402 bp, Gossypium hirsutum
  Clone ID: LIB3827-001-Q1-N6-G9
ggggggggggggggccccccctttaaaaaaaaaggattttttttttttttttttttaaaaacaagggggggggggggaaaataagggggggagcccaaaaaaaaaaaaaaaaaattggggaaaggaaaaaaaaaggtttttttttgaaaagggggggggtttttcccccccccttttaaaaaccgggccggaggcaaaagggggggggggggatgggggggaacctttttttttcacaaccccccttggggggccccgaaaaagaatttttttttttttttcctcccaaaaaaaaaaagaaaagaaattccctggtgggcccccttttggggggcggggttttttttttttgggggggggggtggttatttttttttaataaaaaaggggggggtttttttt

SEQ ID NO: 5296 - DNA, 379 bp, Gossypium hirsutum
  unsure (1)..(379): unsure at all n locations; Clone ID: LIB3827-001-Q1-N6-H1
atggaactgccctggctcnccctgtttcttttctgccgggccaatcttctttttttttggtgctgcggtgcgttcttgttttgtgttaatgtgggtgcgtcttgcggctggcgcggtctcggggcggttgctgtgcgcgnaagctcgctcctttcgtttatttggatcgntggtgtgggtcttcctgggtgcctccgcgggtgttccttctggtccctgcgttgttngacgccgcatttgggnngtcttggttccccgttgttcctgtggctccctctgtgtttccgccaagccccttgctgctggggtcatctttcctgcctgtgtcnttcccnctacctgcggtggggttccctcggttgtcatgtccaccggttcc

SEQ ID NO: 5297 - DNA, 475 bp, Gossypium hirsutum
  Clone ID: LIB3827-001-Q1-N6-H12
gacatcttgcaaatatatctttgataggattttaattcatagcatattaatgcaaaagttttacaatgcatctttcacatgacatgaacgcatttattcatatgtggctaatgccatttcctactttttccccaactggatttaacacccaccacagcttgcgctctatggaaaaatctgcggaaacgtgcatcacaaaccctactgctactacatttgcactcggctagcattttgtttatggggagcctgcttgttcacaaaggtccattagatccaaagtctcaggaactgagagctcgagacggaacttgggaccgtcatagtggtgcaagactggcctaaaagcatcctcttccaatgccttgcataccttccttatacggattctcacctgagcaggaaacctcgactcgcctttacactttttgtcttccaagcagttggatcaatgttagaacccccaaaacttgct

SEQ ID NO: 5298 - DNA, 504 bp, Gossypium hirsutum
  unsure (1)..(504): unsure at all n locations; Clone ID: LIB3827-001-Q1-N6-H3
gcgacagaaggttcttatatgatctccaacaagtggggttgaagcttaaaatgtgggtttcttttgggagagaaaaataaataaagaaaaaagagttgggaacagaaaattttactaaaaagtccacagaaacaagtgttgcnaaaccaaactgtcctagactagatctttacacaggatcaagtggcatccatctcatcaacagtttaaggttaggcgttggccgaggtaaacaagatgcccggtgagagccattaaagtgagaatattaagcattgatgagtttgtatttagcttcttcagcctcacattcagcctacccattgtgcgctttatcacttcctgttctgaactattgggtgctactgctggtgctggtgctggtgccgttgaggggcctttcctgctatttttagctactggatctgcaacacttggtgactcagtggccctgcttccctcagccacaaaatcatgtcttcctctcccggtttccttttccat

SEQ ID NO: 5299 - DNA, 495 bp, Gossypium hirsutum
  Clone ID: LIB3827-001-Q1-N6-H6
cgttggaaggctggagtttttatttaaacatgggcccaaacacgtaaaaccaaagataatttacatattagctaggaggaggaggcttcttcttattcgggtttcatcttacctcaaaaacttacaaacatctctaattacatcgttctcgcatcagttttttcccatttcacaacattcacaacttcggcatttacagaaactactcggctaagctctcagccatggagctcctcatcttaacacacacacataacccctcaaagcttaaaccccacaactcccaatcttcattcataatatcggcctctttgttgccttggtccagggaaaaagaactcctcatcttggttaccaaagatcctatccacctcttcttccttgctcttgaatgccagttcctttgcttccttctcgaattgctgaacataattcccctcccctgcaagaaggtacctaacgttgttttctatgttgacctcaaagcatagaatc

SEQ ID NO: 5300 - DNA, 412 bp, Gossypium hirsutum
  unsure (1)..(412): unsure at all n locations; Clone ID: LIB3827-001-Q1-N6-H7
ttttttttttttttttttttttggtgtgtttttttttttttttttttttnttttttttttttgggtttttttttttttttttttnncttnttttttggggcccatattccctaattatgggcaagggtttcccgccctttggggcggggggggggcctaatttaaagggcccccgggccccttttttgcccttttttaccaacccccccaaaccccctaaccccttttcctttaaaccgccccccgggcccaatccctaaaccccaaatttaaaacccaaaaccccggcccccgacgccccaaaaaagaaacaaggggggagggcaccaaaagcccctaaatataggccaaaagggggggggggcccgagggggcggatgggcgggccccttgcccccccttccggaacctc

SEQ ID NO: 5301 - DNA, 606 bp, Gossypium hirsutum
  unsure (1)..(606): unsure at all n locations; Clone ID: LIB3827-002-Q1-K6-A11
ccgggtcgcccagcgtncgaaagctttgcgcgctgccggagggggttcttgagctcccagaaggggctgggtccggcctgacttctttgagaagaaacgccagaaggagcttgtgaagtcaccagcgttcaacttaaggtcaaaagggcctgggtattaaaggttagatgattgcgaagaaaaattatgcgggaaagggcctcattaaaaaaacattggctctgcctgaggaatcatcaactatgcgtaaggtggatgatgaagtccgagatggagctattcctgcctatcttatggatcgtgaaaaaccacacgtgctaaggttgtcagcaataccatcaagcaaaagaggaaagagaaagccggcaaatgggaggtccctattcccaaggtcaggccagtcgcagaagatgagatgtttaaggtgctcagaactggtcaaagaaaaacaaagcaatggaagagaatggttacgaagtgcacatttgtatgacctggttttcaagaaaacctcaaaatatgagcgttcatccgtccttccgattgcgatttctaaagctatgttcacatcctgagctcagtgcaccttcaatctcgacattattg

SEQ ID NO: 5302 - DNA, 510 bp, Gossypium hirsutum
  unsure (1)..(510): unsure at all n locations; Clone ID: LIB3827-002-Q1-K6-A12
gtacactgcttggnggcacacaatggcatctactgcaaactaagaggccacctccccgtgaanactgttttgaaggcgaggacctcccccgaacatttctaaccaccattcctgagactgaattttcccgagattcattaaaagcagcgtcgaaattaagtttgacaacagaaccagttggtgggcaccaacccatacactcatgcctcatgatcgcccacaaagaacagcaaaacactcgacattgtatgctggaattattcttgaacacctagggcaatctctgaagatattatcaatgttttcagcagttgcctgacatctgggacatactaccaccgagagcaatcgcttacactgaagattcataaagtggggaataaaattctaagaaattttccagattaggattttaattttccttggaatgtgaatattccacagttttttgtaaaatattctagcctcagtctgtaaataattaggaaaatgccttgtaatagtttataa

SEQ ID NO: 5303 - DNA, 602 bp, Gossypium hirsutum
  Clone ID: LIB3827-002-Q1-K6-A3
cggacgcgtgggcaagcctatcgcaccccaagatgcagccatgatgcaaacagctgagacccaagtgttgggtcagacccagaaaggtggaaccgctgccgtgatgcaatctgccgccacgaggaacgaacaagttggcgttgtgggtcataataatataactgacattgctggtgaacaaggcgttagcgtcgctgaaactgatgttgctggtcggcgtataatcactgaggcagtcgctggccaggttgtggggcaatatgttcaagcaacaccggttatgacaagccaagtgggcgctgtgcagcaaaacgcaataaccataggtgaagccctcgaagcaaccgctaaaacagcgggcgacaagcccgtcgatcaaagcgatgccgctgccgttcaagccgcggaagttcgagcgactggttcgaatgtcataatccccggcggactcgccgctactgctcaatccgccgcggctcataacgcgaccctggatcgcgatgaggaaaagatcaagctgaatcaagttttaacgggtgcaacggcgaagttaccggcggataaagcagtgacaaggcaagatgctgaaggagtggtgagtg

SEQ ID NO: 5304 - DNA, 549 bp, Gossypium hirsutum
  unsure (1)..(549): unsure at all n locations; Clone ID: LIB3827-002-Q1-K6-A4
caatgccattggccgagacagccatggnaactcatacaagtaccactcgcagtgctatcagcaagcaccttgatgtagaagagttagaaatgctcttggaagcatactttgttcaaattgacggtacactgaacaagctatccacgctgagggaatatgttgatgacacagaggactacattaatataatgctcgatgacaaacagaaccatctccttcaaatgggagtcatgctaacaacggcaacccttgtcatcagtgcttttatcgtagttgcaggtatctttggcatgaacatccatatcgagctattcgatgaagataaagcagggatgccagagtttctgtggacaattggaggtggtgctgccggctcgatattcctttatgtaatagctatcgcatggtgtaagtacaagcggttattagagtaagtcttctgagaccgtactgtatatcgcattgaaaaaaataagatgacattgaaacatctattgtataaacttttccagaatgttggacacgataagcttatatttttactgcctc

SEQ ID NO: 5305 - DNA, 619 bp, Gossypium hirsutum
  unsure (1)..(619): unsure at all n locations; Clone ID: LIB3827-002-Q1-K6-A7
cggacgcgtgggcggacgcgtgggcttgatataagtatgcttataaatagggtagcaaagagctgaagacatgatcctctttcttttcctggaccgtttttctgattgcaatttgtatctgttgtcaaatgcttctccttttccatttttggtgttttttcacacttgactacctcatcaaacaatagattgcttcacagatgattgaactctgtcgggagaatgtctaatttacaagggctgcggtgatgctagacaaatgaatactggaaactgtttagttgtaaataatagttattgctttctaatagcattgttttcatgttactcaacagatttggcatcctcaagtcacagatatgcatggttggggacagattagatactgacattctgtttggacaaaacggtggctgcaaaactcttcttgttctctcaggcgtgacaaatttgtcaatgcttcaaagccccagcaattccatacaacctgatttctacaccaataagatctcagattttctttctatcaagactgcaacagtgtgatgatgcaaggactntgntntctcttngcattactagttgccaactattaccatcagatcaagagccctttgca

SEQ ID NO: 5306 - DNA, 634 bp, Gossypium hirsutum
  unsure (1)..(634): unsure at all n locations; Clone ID: LIB3827-002-Q1-K6-A9
cagacgacggacgttgctaatcttgagaagaagagatggtgccggtatcgtcgattatagggcgcagttttgagggacttagcttatggactttaaacccaaacacaaacattttggactgtatggaattgtttagcaagggaatccacagggccttggtcccaatggacagtcaaatggagaacattcaaggagttgaacttgtggagtctgcatccagctataagatgcttacacaaatggacttgctgaaattcctcaaggaccatgcctctgaattgggggagatattatcaagcagcataaaggaaataggttgcttaaaccagaatgtttacgccattaccgatcgtaccaaagtgatagatgccatcaaatgcttgaggactgctttgctcaatgctgtccctatagttgagtcctctaatgattttgaagaagatcaccgacaactcgtagatggcgaaggaaggaagccaattggaacattttcagcaacagatttgaggggttgccatctttcggcactgcagacatggttgcctctaanggcactgtgattcaccgagctagtctcaaggagccctttatttgcattcaaaagaggggtgtcngcgccaaagaaatggtgagt

SEQ ID NO: 5307 - DNA, 671 bp, Gossypium hirsutum
  Clone ID: LIB3827-002-Q1-K6-B11
gtgcttttgcttctgtgcctccttgcaatcaatgccatcaatgtctttgtaattgtcatattaccgattaaaagcttaaagaagcacaattcatttgctatcttttcagtagcgattgccatccacccaattattgatgaatactcaccttcattacattaaaataaagaaaaaaatattttgataactgaaagtatggagatttgactctggaacttttcgggaaggtgtactctaattggataatgccagcgattatgtaattcttgattcttgtttgatattatgtactttgtggtctaatacacctcaaactctgcatgatcttataattccaggttatcaattgccatgattcagttatttacattcttgcgcctttgagatatgccaccatttatggatgctctgatgctactatagttcttggagctgttggcaaggcagtacgagtcgaacactgtgaaagagttcatgtgattatagctgcaaaacgggtctgcattgccaattgtcgtgagtgtgtattctttttgggagtgaatcaccgtccccttattgttggcgataaccacaagctacaggtggcacctttatatacatattatttctcgttggaagacacatgactgaagttggcatcgaggcaactatcaatagatgggatgata

SEQ ID NO: 5308 - DNA, 538 bp, Gossypium hirsutum
  unsure (1)..(538): unsure at all n locations; Clone ID: LIB3827-002-Q1-K6-B2
ccccattcctgtttctcttttgcttcctttgtttctctcttctctcctgccttcttgcnnantacgagctgaagccgtgcttcatttacactagtgttttcaacattnaattaatcatagccgcngcttgtttcttttaagctctaaattaaaggaggccaaacatgccgcctcgtngattccaatttgggagggctgatgaggccactcatcccgactccatgagagccaccttggctgaattcctctccactttcattttcgtctttgccggcgaaggctcaattcttgctcttgncnagatgtncanggatacgagtgcgacgcctgcatgactggtgatgatagcacttgcgcatgggttgtctctgtttgcagctgtggcttccagtgtaaacgtttctggtggccatgtgantccagcagtcaccttcggtgccttgctctgtggaaggatctctctcgttcgggcgctgtactactggattgctcagctcttaggttccaattgggcttgtctcttgcttcggctcaccgc

SEQ ID NO: 5309 - DNA, 532 bp, Gossypium hirsutum
  unsure (1)..(532): unsure at all n locations; Clone ID: LIB3827-002-Q1-K6-B3
ggtcgataatttggtttagctgagaattcaaatatatggtaaccattcattaaaagcaaccacaatattcttgacttcttctaaaaacaaatcctacagtgcaggagcgcaaatatttctcgcttcccaccagttccagtccttcgacgcccactcggttaaggactcagtagctgattcccctccgatgttctcctacggtaccggagatgatgtcttctcatctcaatcaatacctgaaacacctccgatctacagtggcggtggtggaaactctgctttctcatcggagcagaacgaaaaaggattgaacggagagttcggaggatcggatggaccaatcttgccaccgcctgctgagatggggccagaagaaggctctgctttgagagagtggcgcaggcaaaacgtgattcgactggaggagaagggaaagaaagagaaggagacgttggagcatattatgaaggaagcagaggagtacaaagttgaattctttaggaagataagtctagctgntgaaaataaaaag

SEQ ID NO: 5310 - DNA, 601 bp, Gossypium hirsutum
  unsure (1)..(601): unsure at all n locations; Clone ID: LIB3827-002-Q1-K6-B4
tgatgctgaaacttttgttagtattaaccgctactcattcaactggtctgtaaataatacctcggtaagtccagatgggaagttgcttgcagtactcggagatagtgtggagtgcttgatcgttgatgcccaatctggcaaaattaccaacagcctaaaagggcatttggactattcttttgcttcagcttggcaccctgatgggcacattctggcaactgggaatcaggacactagctgtaggttgtgggacataagaaacctgtcgaagtccctagctatattgaagggaagaatgggagcaataagaggcgtgaagttcacatcggatggtcggttcctggccatagctgagcctgcagattttgttcacatctttgatacaaagttggggtatgttaattgccaagaaattgatatttttggggaaatagctggaatatcatttagcccggatacagaagcgctctttgttggggttgctgatcgcacttacggcggcttgttagcgtttaaccgcagacgatataaccaatatctggactccatgttgtagaatgcagtgcctctgntaatttatatgagaggtaaggtaagctag

SEQ ID NO: 5311 - DNA, 624 bp, Gossypium hirsutum
  unsure (1)..(624): unsure at all n locations; Clone ID: LIB3827-002-Q1-K6-B5
atcaagatgaaattccaactgtttttaagaagttatcatgagtttcttttattttatgggttatattgattttttgtttcttcttacaagtgcaaactagtttttaaaatattagaggagatatattattatttgattttcagttcacagccaaattcgagcgcccaaacacacgtcatagcccctgcagcaaacgtgacagacacacagggaggatcccgactaatgcctgaaccagcctggtcgacaaagaacatacacccaaagcctcaagctcctgcgtatagttaagaataaaggtaacaattgcgttgctcgtttgtgttacaccttcacgatcaaatatatctatacttcgagttaactcatttaatcataaaaatatatttaaaaggattttcgtaaatttcaaaataattgaatttattctttcaccatagccactttaccaaagaatattcaaccataagcccttaagagttaattttttatattcaaatgataatataagattgaatatttaagccataaccattctactctagggaagattaagttatttgatagccggtgggtttgacaagggtgtcatttntttagttgtgctcaaataataaatatgga

SEQ ID NO: 5312 - DNA, 591 bp, Gossypium hirsutum
  unsure (1)..(591): unsure at all n locations; Clone ID: LIB3827-002-Q1-K6-B6
cggacgcgtgggtttgagattttgcttcagcactctaaggccccttacaagccaaaatgggtatttctcgtgattccatgcacaagaggcgtgccactggtggcaaaaagaaggcttggaggaagaagagaaagtntgagcttggaaggcaacctgcaaacacaaagctatcaagcaacaagacagtcaggaggattagggtccgaggtggaaatgtgaagtggcgtgccttgaggcttgacacaggaaactactcctggggaagtgaggctgtgactcgtaagaccagaattttggatgtggtgtacaatgcgtctaacaatgagttggttcgtacacaaactctggtgaagagtgctattgttcaagtcgatgctgctccattcaagcaatggtatctccagcactatggtgttgacattggccgcaagaagaaagcagcngcngcagccangaaagaaggagaggaaggtgnaaactgctctgnggaagtgaagaagagncaccatgtcttgaggaagctggagaaacggcngcagagtcgcacacttgactcccatattgaggagcaattggtagtgggcgtttact

SEQ ID NO: 5313 - DNA, 645 bp, Gossypium hirsutum
  unsure (1)..(645): unsure at all n locations; Clone ID: LIB3827-002-Q1-K6-B9
attaaattttggaggccagtgagtcgacaagaacgaaaaattcactgccagtccaaaatggtattaaagaagttgaagtgattgctgaaaatgatggagtccagatttcatccaatgaaagctatcgaaggtcatctgcagtagatggtagcgatggtgtagtaagaatgaatctttcttcaacactcaaggaaagcgtgcaaccaggtggcttgcagtttgacggcaatgctgccaaggcttttcttgctgagaggtggaaggaggctgttgcaggagaacatgtgacattggttctctcctcgaaccctaagcctccagggtgctcaggggttgaaattgattcatcagagaagtggatggtcaaggcaggggcctgtgaggcttctactgttgggctgcaatagccaagtacagaaagaagcctgaaaggggtgctaaaacaaagtacattccaaaacaaaggtcggcaacctatgaggaggaggagagataagggaatatttattaatgagatatgaacagagattagtaggtcatgactattttatttttgcagaggttccagttttaccagtggtcttctgttggaaaatgaagaaggtaaaggtntaccagaagtttatggtttcttcttttactcta

SEQ ID NO: 5314 - DNA, 520 bp, Gossypium hirsutum
  Clone ID: LIB3827-002-Q1-K6-C11
ctttagtggggcagacacttacggaaatttgtcaacgtgcatgcaaatatgctataagagaaaacattgaaaaggatatcgagagagaaaggaggaggagtgagaatcctgaagccatggaagaagatgttgaagatgaagttgcagaaatcaagcctgcacattttgaagaatcgatgaagtttgctcgtaggagtgtgagtgatgcggatatccgcaagtaccaggcatttgcacaaacattgcagcaatcaaggggatttggaagtgaatttaggtttgctgaaactggttcaaggactgcagcatctgatccttttgcagcttctgctggtggagctgatgaagatgacctttacagttaaattacctttcatctgtgtttgcttatgggtctttcatatgatatttacatataaacgtagtgttaattgaactgtatgatattaagaacacattggcacagatcttgagcctgtgggtgctcaatggagtttagaaaacaggttttgttattttg

SEQ ID NO: 5315 - DNA, 513 bp, Gossypium hirsutum
  unsure (1)..(513): unsure at all n locations; Clone ID: LIB3827-002-Q1-K6-C2
ntccgntctttttaaacaatgctgggatcatgttctgtcccttccagctttcacaagatggaattgaggttcagtttgcnactaatcattttgggcttttcctcttaactgagcttcttctagaccaaatgaagaacacagtgaaaactactggtnttcagggaaggattgttaacttatcatcaatggcccacacccactgttataaaaatggtctccgatttgatcacatcattgctaaagatggttacaatgacaaaagagcgtttgggcagtccaaattagcaaatatattacatgccaatgaactctctcgtcgnttgcnggaagaaggtgtcaacgtcacagttaattcggttcacccaggattgattatgacgcctctatttaggcactctgccgtcctcatgaacttcttgaagttcttcagtttcttcctatggaagaatgtccnccagggggcggcgacgacctgttgcgtggtccttctccctcggctgaagggagtcaccg

SEQ ID NO: 5316 - DNA, 389 bp, Gossypium hirsutum
  unsure (1)..(389): unsure at all n locations; Clone ID: LIB3827-002-Q1-K6-C3
tttgaattcgtgnactcagaagtttgatggccgttaaccccgacttcgtgcagcatgtctatcgttgtcaaaattgagggtttaaccattcatgggtccatggntaaaattgtccagcccaantgccctggaatttgcccggtttattcgaaattccaagctgcgcataattgaaggagctgatcatgagttttctgcacaccaggatgagttagctacagttgtgctcgattttgtaaaggcagttcgtgaagacagaaactccgctgaacgtctgcaatcatgcgagagagcagttaatttcatcaaagctcggatctgaagattgtggtgacttgtctacaaaggttttaacattgtgtttaaaagtcacactattaaatccaata

SEQ ID NO: 5317 - DNA, 601 bp, Gossypium hirsutum
  Clone ID: LIB3827-002-Q1-K6-C4
ggacccaagttaagggaagcagccttgtgttgttgtaatccactgggaaaatcagggggtgctttgattcaacagtttatgatcttgacctttggatcacttgcgaattcaaccccataccttggagggatacttctggtgattgttcttgcatggctatccgcagccaagtctttggatacacaattcacagaattgcgtagggaagaagaactcgagaaagagatggaaagagcaactgttaagatccctgtcatgtctgaaagcggaaacggctctcttgcaagcggttctgcagaaacagcagaaacatcagaaacatcaacttcaagcaatatctaagaaaaaaaaaacattcttccatttgttgccaacaggaagaataagaagctgataagaaaccagtgctaggcgactgttggctctagaatttacgtttgttcatacaaaggatattagctaaaaacgtaaatgctcgactttattataagtcttccatttctttagatgttgagcttagtgtttgtttagttattgtgctctttagaattgcatttggatacacaccaattgaaacccttttttgatcaaaattcttttt

SEQ ID NO: 5318 - DNA, 561 bp, Gossypium hirsutum
  unsure (1)..(561): unsure at all n locations; Clone ID: LIB3827-002-Q1-K6-C5
ccgggtcgcccagcgtccgggctcagctctttccagccgngntcaaagattggtcttttaggttctaagtggcccacaatccctgcattgggttggccttggagatccggttcacaagcggtaactccgtcagatcgcccttcttggggtggtttngncattttgtacagcttgggaatacggtgttcaagaaagtgttggccatggagtcaaagcagcntacatgcaggagttgaaagaagggatcttttcattacatccaagctatggtgcaccgtgttgtgtcccgaacgagttcgncctgctttattgaacactctccaacaactccaacttgaataccttgatctttacctgatacattggccctttaggcttgcngatggngcaggcngaccacctaaaccnggtgtcgttcccgaaatggacatggaaggtgtttggagagaaatggaggacttgtaaaagacaagctggtttgagacattggtgtgtgttattttacnttgttgnagatgaacaaattgctttggttttgcttgggccttgccctctgtttgt

SEQ ID NO: 5319 - DNA, 655 bp, Gossypium hirsutum
  unsure (1)..(655): unsure at all n locations; Clone ID: LIB3827-002-Q1-K6-C7
gacaaatctcaggctgacagagacttcgtgctgagtcagtttcgcaccgggaggtcaccagtgcttgttgcaaccgatgttgctgctcggggattagacattaaagacataagggtggtaatcaactatgacttccctactggagttgaagattatgttcacaggattgggaggacagggagggcaggtgcgaccggattggcatatacattctttggtgatcaggattcaaagcatgcgtcagatctcatcaaggttcttgaaggagcaaaccagcgggtgcctgcagaacttcgtgatatggcttcacgtggtggtgggaggggaatgcctagacgttgggctcccagttctggtggccgtgatgaggggcgtggtggacgtgctggttcaggatatggtggtagggaaggtggaagaggcggtcgaggaatttccacatcttcctctagctggcatgagagaagtggaggacgcagatatgatcgtgagtctcgcgacagtcgtggtttccgtgatagttatgacaagggaagaagtcgcagtcgaagtcctgcangttgggggtgatcgccataaaactggntgtccgtgaccgcagctggagtcgtagtgctgaaagtatgatagtggtgctggacgtcaacgttcccca

SEQ ID NO: 5320 - DNA, 377 bp, Gossypium hirsutum
  unsure (1)..(377): unsure at all n locations; Clone ID: LIB3827-002-Q1-K6-C8
agcattttggaactcgttattccagtttataagagcagaagagcatatggacaactggctaaatgtcatacattgctcacaaacatctatgaatcaatccttgagcaggagtcaagccctatccctttcactgatgctacttactatagggttggattttatggtgagagatttggtaagctggaccggaaagaatatgtttaccgagaacctcgtgatgtgcgcttgggtgatataatggaaaaacttagtcatatatatgaatctaggatggatggtaatcatacattgcacattattcctgattncagacaggtgaaggcagaggagttgcagcctggagtctgttacctgcagataacagctgttgatccagt

SEQ ID NO: 5321 - DNA, 609 bp, Gossypium hirsutum
  unsure (1)..(609): unsure at all n locations; Clone ID: LIB3827-002-Q1-K6-C9
aaaaataaaatcctaatttcccccgcttgctactgctagggtttctttctcttctctctcgcaactcaccaggtttctttggagaaaaaaggaaatgtctcgagtttacagtgggtaaccttgacccacgagtttcggagcgagatcttgaagacaagtttcgtgtctttggagttattcgaagtgtgtgggttgctagaaggccaccaggttacgctttcattgactttgatgatcacagagacgccgaggatgcaattcgtgaattatatggcaagaatggctggagagttgagctttctcataattctagaggcagaggtggacgtggaggcggaggtggaggtggtcggggacggtcgggtggttctgatttgaagtgctacgagtgtggtgaggccggtcattttgctcgagaatgtcgtacacgtggtggttctggaagacgtcgcagccgcagccctagatatcgtaggagcccaagctatgggcgcagaagttacagtcctcgtggacgatcccctaggcgtcgcagtccctctcctcgtgggcgtagctacagcaggtcttcaccataccgnntgtcgtgaggaattgccatatgctaat

SEQ ID NO: 5322 - DNA, 162 bp, Gossypium hirsutum
  Clone ID: LIB3827-002-Q1-K6-D10
atacgaatcgaagcgacaaagggctgaatctcagtggatcgtggcagcaaggccactctgccacttacaataccccgtcgcgtatttaagtcgtctgcaaaggattctacccgccgctcggtgggaattacgctccagggaggcgcccgcgacttgtccgcc

SEQ ID NO: 5323 - DNA, 365 bp, Gossypium hirsutum
  unsure (1)..(365): unsure at all n locations; Clone ID: LIB3827-002-Q1-K6-D11
ggnagaaggatagcatcagggacaataccagacccggggtcatttgaaagccagcgacacaacgatgctggacgtgccagtgaaggtaccgtataacatcttagtaagcttggtaaaggatattggtgcagattgggacattgactatgaattggaattgggtctcaccattgatcttcctatcgtggggaacttcactatccctctctctcagaaaggagagatcaagcttcctactctcagtgacatcttttagatttatcattagtatgtcgctctcatactcataaaacttgtgtgttttcccttttactcatgctgtaacatgaagaatatatcgaactatactaggttgtttttctttt

SEQ ID NO: 5324 - DNA, 535 bp, Gossypium hirsutum
  Clone ID: LIB3827-002-Q1-K6-D12
ggtttagctgctgctactgttgggttgactttgaagcctctcaacatcttgaacaaattgtgccaccagtgcttaattctttttctgaccaagatagcagagttcgttattatgcttgtgaagctctatataacattgcaaaggttgtccgaggagattttatcatattctttaatcagatatttgatgctttgtgcaagctatcagctgattctgcagccaatgtgcagagtgctgctcaccttttagataggctagtgaaggacattgttacagaaagtgaccagttcagtattgaagaatttataccattgttgagggaacgcatgaatgtcttgaatccctatgtccgtcagtttttggttggatggataactgtactggacagtgttccagatattgacatgttgggtttcctacctgattttcttgatggtttgtttaatatgttaagtgattccagtcatgaaatacggcaacaagctgattcagcactttctgagtttctccaagagatcaagaattccccatgctt

SEQ ID NO: 5325 - DNA, 532 bp, Gossypium hirsutum
  unsure (1)..(532): unsure at all n locations; Clone ID: LIB3827-002-Q1-K6-D2
cctcatcctcntcatcttgtttattgttgngaacctcngcnttgtggagtggggttgttttgttgctaatcttcntgatcccgtccatcagccacacttcttaaaggccctgctttcttgttcacagccaattgttctccatgcggcgctctcttctgntcaggggtgttcccgggagcttgggnttcctcttgtggcgtttcccacccattcacctcaatgttttctttgatcctatcagtgttgtttgatttgggtntgacnctggttcccctttgtattgcccattttaccagcacttgtcctggtgttttgttcagcttctttgctgttctatcgcctgtttcntcatggattaggtccctaccaccttcttgtgaaccaagtggtgaatatgcagtgacatggatgccattctgtttacangcttccaacatcttatcatttctccaaccgggatgcntttccgtttgacaaacagatggcatagtttcagcagaaccaagcggcttgttcattttcttcggtgtgg

SEQ ID NO: 5326 - DNA, 466 bp, Gossypium hirsutum
  unsure (1)..(466): unsure at all n locations; Clone ID: LIB3827-002-Q1-K6-D4
ctctaattattcccaacttttattgatttatagaactgccctggctttcactgaacattacaacaggaccaaacttttctttatgtggtacaacagtncgaacttgaaaaagaaaaaagtggaagcgggcggcatcatacacagactcaaggcagtggcagagcacaaaaagtcgctcctttcatttaattggatcgatnttaaggatcatcctgggtgcctccgcgggtgctccttctagtcccagcattgttaggcgccgcacttgggaagtcttggtttcccgttgttccgttngcaccccctgtgtctccgccaaaccccatactgctgnggtcatcttgcctgcctgtgtcatacccactacctgcggtggggttcccacggttgtcatgtccaccggtaccgccntagcgcccggtttcccctctgttgttccctgctgtggtgttgccggtgccaccat

SEQ ID NO: 5327 - DNA, 631 bp, Gossypium hirsutum
  unsure (1)..(631): unsure at all n locations; Clone ID: LIB3827-002-Q1-K6-D5
ctgctggccggtccagactcccgggtcgcccacgctccgtttgcatcagaataaattggtgctttatggcgcttctacattggattatgacttttgcttctgggccttgccaatgttgtcacccatctgctgtcaaagcataggctcttcttagaactatcacaggacatggtcaggatcaaacatatttctttcgcatctctcacagttccagctcaaacaacttattttcccacttggatgtctctcaaaggatgaagttcgcaactagctgctaatttgacttgcctaacaaaggtaggaaggattcacaaggaatttgctttcttgggaaggtatataatgaaagctacacgtgtttccccctaagttctgcttagaggtgttcatgggtcaggtcaggccaggcctatgcatgatatcagtaccatacacagttgcccaagcttggcccaacttgaaatatgggcctcaaacgttgccccagtctgcccatatttgtaaatggctaactcaaacctgtttaggcccttccatattattnttatttttaaatgtgattgtgttatttaatntttaggtattatgtatatttactacccttatatatttcttttctttataaattttt

SEQ ID NO: 5328 - DNA, 599 bp, Gossypium hirsutum
  unsure (1)..(599): unsure at all n locations; Clone ID: LIB3827-002-Q1-K6-D6
gcaaagcatacaaaaaccaanacgagtctctcaatctcccaaaattcataatccaattttcctgttaatcccagttttctattgtgaaaatggctatgattccaagcttttatggcagccgccgcagcaatgtctttgatcctttctctcttgatgtatgggatcctttcaaggacttccccctttcttcttcactcacctcacaaaccccggaaacctcagcgtttgtgaatacccgaattgactggaaagaaaccccagaagcgcacgtgttcaaggctgatgttccggggcttaagaaagaagaggtcaaagtggaggttgaagatgacagggtgcttcagataagcggagagaggaacatggagaaggaagacaagaatgacacatggcatcgcgtggaacgtagcagtgggaagtttatgaggaggttcaggttgcctgagaatgctaagatggatcagatcaaggcttccatggaaaatggtgtgcttactgtcactgttcccaaactggaagtgaaaaagcccgatgtcaaggctattgacatttctggctaaacgattgaactttggtttctaaacccgtgtctttacact

SEQ ID NO: 5329 - DNA, 72 bp, Gossypium hirsutum
  Clone ID: LIB3827-002-Q1-K6-D7
cggacgcgtgggcggacgcgtgggattaagcgtagctcaatttgcgaataatcggctgcgagtaacacacga

SEQ ID NO: 5330 - DNA, 578 bp, Gossypium hirsutum
  Clone ID: LIB3827-002-Q1-K6-D8
gcaaattcccttcttttcccctccacccaagcctaaaaaatcatggcgacagctcaaatcagcaaaaagcgaaagttcgtcgctgatggagttttcttcgcggaactcaacgaggtattgaccagggaactggctgaggatggatactctggagtcgaagtcagagttactcctatgcgtaccgagatcatcatcagagccacccgcacccaaaacgttctcggtgaaaaaggtaggaggattagggagcttacctcagtggttcagaagcgattcaagttcccagaaaacagcgtcgagctttacgctgagaaggtcaacaacagaggcctttgcgctattgcccaggccgagtctcttcgctacaagctactcggaggtcttgccgttcgcagggcctgctatggtgtactgagattcatcatggagagtggtgccaagggatgcgaggttattgttagtggaaagctaagagcacagcgtgccaaatctatgaaattcaaggatggatatatgatctcttctggtcatcctgtcaatgagtatattgactctgctgtcagacatgttcttttgag

SEQ ID NO: 5331 - DNA, 608 bp, Gossypium hirsutum
  unsure (1)..(608): unsure at all n locations; Clone ID: LIB3827-002-Q1-K6-E1
catttnttccctgtgntccctttcactnaatnttggggatgcngtcnntgaaggatgctgctgcctctgctttggccggcctggagaaggccaaggcctccatgccggaaaaggtggcccatntgatgacangagacccttttgagaaagagatggcgtgggtaaggtatgtagagtgacatgaagatgcagagctgtggaaacangaggcccgccatcttaacgccacagctggccatgctggtggtggtggttttggtggcactggctacaccacagctgggttcaacataggcgacactggtggctatggcggttccggtggacatgacaaccgtgggtaccccaccgctggtngtgggtgtgattcaggctggcaggatgacctcagcagtatggggtttggcggcgatacagagggtgctttcggttcttctgggtaccaagacttcccaaatgcggtgtcttacaatgcttggtactggaggaacacccgcggtggtgcccattgatgatcctttttntccgttcctttttaatgataggagcgagttttttgtgctctgcttctgccttgaatctgtgtttgttgttctgtcgcttttctt

SEQ ID NO: 5332 - DNA, 623 bp, Gossypium hirsutum
  unsure (1)..(623): unsure at all n locations; Clone ID: LIB3827-002-Q1-K6-E10
tggggtttgaagaattgatggagaagatgaaataagagaggagtttcgatgccctttttgttcagagtatttcgacatcgttggcttgtgttgtcacattgatgatgagcatccagtggaggctaaaaatggggtttgttcagtctgtgcagtgagggtgggcgttgatatggttgcgcatataaccctacaacatggaaatatatttaagatgcagcgcaagaggaaatcacgtaaaggtggatctcattccacgctttctcttctgaggaaagagctgcgagaaggaaatctacagtccttcttcgggggttcttcttgtacggtgtcttccaattcagcccctgatccgttgttgtcttcatttattttacccatggttgatgactttgttagtgtccagcctaacttttctcgtgaaacaagaacaactaagaaaagttcagacgtgaataagtcagaaagaaatgtgaagtcgtctcccctttcactaaaggatcaggaagagaaggcaaaaagatgcgagtttgttcaagggctgctgttgtccacaatgcctgatgaaatntataaaacagcattctcagggttcaaatcgttgctgcaatgcaattgtgaacctg

SEQ ID NO: 5333 - DNA, 575 bp, Gossypium hirsutum
  unsure (1)..(575): unsure at all n locations; Clone ID: LIB3827-002-Q1-K6-E11
gctgactgcgtgcgaggtattactttttcaccactgaaaattgggtataccatggngaaattgcaaagcttggggtcaagctaggcatgtggggaactgtcaggaagattgaccctggcttacgtgcatatcaaaccgaaagagcatcgggagcgcccctttctcattcagcttccatggctcaaataaacaccaaagtaactcaagactatctgacatccttggaaagcaatagtaatgattcatcagagcttgaaacacacaattcgtctgagaaaccagggaagaacaacattcccaaacttgtagttgttggtggggctatcgcggttgcatgtattctagatcgagggctcttaaccaaagctgttatattcggagtagctcgaaggtttgcaaaaatcggaagaaggttgtaatcctgaatatttttgtgggtcaatcgaaggaaaccgcacccaccagcaaagcagattgccattgcaatgaagtgagatgttggggatggatgaatcttctcacttagccgcgtttaaaaggttggaagatggaaagattatattagttnttgcaat

SEQ ID NO: 5334 - DNA, 524 bp, Gossypium hirsutum
  unsure (1)..(524): unsure at all n locations; Clone ID: LIB3827-002-Q1-K6-E12
ccgggttcgacccacgcgctccggcggttcgctcgcggatctanaacttcaaagttaaagacgaagacagaagaagccactgatgaacaccacagcagaactcagcaagccaaggatgagttgaaaagcaaggcggatcatgctgcaaatgaggtaaagagcaacacacaacaagcaaaggatagggcatcagaggtagggaaagaagccaaggagtacacagagtcatggactgaatgggctaaagagaagatatctgaagggcttggattcaagcaagacgatgatcctaagggttctgtcgagaaagcctttgattcagtagctgacactgctaccaagaccaaggacaagttacaagacatggcctcaggagctggtgaatacagtgcaggaaaggcaaaggacatgaaagatacagcctacaagaagaccgatgatgtgaagaacgcggcaaagggaaagagcagtgagatgagacaagcaaccacggagaaggccagggaattggcagattctgcaaa

SEQ ID NO: 5335 - DNA, 613 bp, Gossypium hirsutum
  Clone ID: LIB3827-002-Q1-K6-E3
gtctgaaaagaagaaatggctactgtaggaagaaacgcggcagctcctttgttgttccttaacttgatcatgtatttcattgtgttgggatttgctagttggtgtattaataggtttatcaatggccaaactgctcatccaagtatgggtgggaatggagcaacaggtttctttttaaccttttcaatcttggctgctgtggtgggtatagtatcaaaatttgcaggtggtcatcatattaggtcatggagaagtgatagtttggctgcagctggttcttctgcacttattgcttgggctctaactgcattagcctttgggtttgcttgtaagcatataaatataggaggatggagaggatggaggttgaggatacttgaagcattcataataatccttacattcactcaacttttgtatgtgttgttgatccatgccggtgtgttcagcagtcggtacggaccagggtatcgagattccgactatgggatgcatgcaccgggggatgaaccaggcacaagacagcaccgtgtaactgatctgggtctgaaggactatatttaaacagctaaaatgaatttgttttgtgtgtagcagaatatcactcgtcttt

SEQ ID NO: 5336 - DNA, 608 bp, Gossypium hirsutum
  unsure (1)..(608): unsure at all n locations; Clone ID: LIB3827-002-Q1-K6-E4
gtggttttcatccaagtgcaccttcttccgctagacgtgaagcaccagtccaaaccgctcctcctgcaagttctgcttcagataatcatctatgccctatttgcatttgcaatgcaaaggatatggcctttggttgtggacatcagacctgttgtgagtgcggacaggaccttcagttgtgtcccatctgccgaggcaccatcgatacgagaataagactctattaagcataatatgctttgcctggacttgcttatgctctctctatcgtccagcattccaagagtaagtcctttaagtttattgtgcaaaaggcttcatagttggccatgattggatgcgcattggatcttttctttagagagattgggcacccatcatatatgtatccaaagttttgtacatagttgtggatttcatcgaacgaaaaaacttagtcatatagcattatctatttcagtagatcatattgttgtaatgtaatcaggcacagaacacctgggaacagacatgtctcattgtcggattagcatccgtgccacatgccaactgtnatctgtaatgtttttcatgccgtgagaatgcattttcagcccccttttttaact

SEQ ID NO: 5337 - DNA, 530 bp, Gossypium hirsutum
  Clone ID: LIB3827-002-Q1-K6-E6
gttctaaaagtaggttttaacataaaacaaacttacggttgtccataacaagcccgttaattaaagaaaaacgaaggcaaaccaaaccaaacaatgtctagcaagtattaaaaaccctattaaccgacaaaaacaaagcaaatatataaaggttccaaacttaaagcctaataaacaaagatagcccagttttgataaaggatttagcaacttctctgccaagaaactggacccgaatttagtcactcaggaaacgaggttatcattcagggacaatgaagccaattggtcggcttgattgttggcctgttgctgagcagcaacactcctcaacacctccatggcttcagctactttggccttcaaagcttctggtgattccaggagatgcaaaacctctgtttggtccatctccagaagcatgcctgtaaccttggcagctgcatcacgctcaagccgttccacaagggggtacaagctttcaccaagcatcgtcctttgctgttcaggtgtcgcatttgcaagagctg

SEQ ID NO: 5338 - DNA, 521 bp, Gossypium hirsutum
  Clone ID: LIB3827-002-Q1-K6-E7
gcccaacttgaactggcctttggattggattagattaaaacccccagcctgaaattcttaaaaataaaaagaaacaataacataaaaaaccataacgggcagttatcaacatttaccactttgccagctgccccctggacaggaacaaacttagcatcaacccgtgaacagacattgtatcccaaaaaaagattcataccactgagcagtagagaaacatcgtttagcgaacaatggagctacagagcagtatagagattttatagcaaaaacctaattcatacgagattggagcattactactcacagagaaagatgtagggcatcactattggaacattcggagaaagttattggcataagccatcggtttgacatcagggtgaggcacagctgagaatgtaacaatatttggctttaaatcaggggcttcgaaccgaataatgcacccttgttcccatctgatacagtaatttggtgcagagaaacagtataagttaccatcatgctaatctcatacc

SEQ ID NO: 5339 - DNA, 325 bp, Gossypium hirsutum
  unsure (1)..(325): unsure at all n locations; Clone ID: LIB3827-002-Q1-K6-E8
gtgtgggggggggggttnnnttttttggttgtttttttttttttttgtgttgttttttttttttttttttttttttttngtgttttggttttttttttgtttgttttttttngtgtttttttttttttttgttttgtttgttggttttttttttttttttcttttttttttttttgtttttgtttttttttttttttgttttnttttgttttgtttgttttttttnttttttgttttttttttttttttttttgttttttttttttgtttttttttttgttttttgtttgttttttttttgtttttttttttttttttttttttt

SEQ ID NO: 5340 - DNA, 483 bp, Gossypium hirsutum
  Clone ID: LIB3827-002-Q1-K6-E9
ctttgcatacaagataaaattggtgcatttatggacgctatctacaatatggattatgactattttgcttctgggcactatgccaatgttgttcacccatctgctgatcaaagcaataaggcttctatcttagaactatcacaggacatggtcaaggatcaaacatatttcctttcgcatctctcacagttccagctcaaacaacttattttcccacttggatgtctctcaaaggatgaagttcgccaactagctgctaaatttgacttgcctaacaaaggtaggaaggattcacaaggaatttgctttcttgggaaggtatataatgaaagctaacacgtgtttccccctaagttctgcttagaggtgttcatgggtcaggtcaggccaggcctatgcatgatatcagtaccatacacagttgcccaagcttggcccaacttgaaatatgggcctcaaacgttgccccagtctgcccatatt

SEQ ID NO: 5341 - DNA, 472 bp, Gossypium hirsutum
  Clone ID: LIB3827-002-Q1-K6-F11
aaagagacgtaataagaaaaaccatttgaagacaaatgagctggtccccatacattagacaccacaagttcaaaagggagagaatacacagtatgcgtagcagggaaatgaagcttgtgagctttgcctaactgacaagctgtacaaacttgctgcaaatcactctgtttgaaaaaaatatcacaagctttcagtacacaagcaagaacagtattgcaaggatggccaagcctgttgtgccacaaggaggatgaaggcagttgagcaacgttcagcaaactagtgtaagatttcaaggaaagatcggcaccagtggaagcagatggagaaaaatgaaatctgtacagaacttcatgcatgcagccctcgagcagagtcattcctgtctgaatatcctgtgtaaagagaagcagttgtgagattggaggcatcagaagtgatgtgattggtcgcactcgagtcaggatactag

SEQ ID NO: 5342 - DNA, 565 bp, Gossypium hirsutum
  unsure (1)..(565): unsure at all n locations; Clone ID: LIB3827-002-Q1-K6-F4
tttagaaagaacaactttcagcggaaacagccgcttcctccaacatggctagagggttgaagaaacacttgaagaggctcaatgcccccaggcattggatgctcgacaagcttggtggtgcattcgcgcccaagccatcgtctggaccccacaagtcgagggaatgtttgccacttattcttattctgcgaaacagactgaagtatgctttgacatacagagaagtgattgctattcttatgcaaaggcatgttntggtagatgggaaggttaggactgataagacctaccctgcaggttttatggatgttgtgtcnnttcccaagacaaatgaggacttccgtctcctttatgacactaaaggtcgtttccgccttcatgccntcactggtgatgagactaagtttaagctctgcaaagttnggtctgtccaatttggcccgaagggtnttccatacctgantacctacgatggacgcacaatccgttacccagaccctttggtcnaagccaacgacaccatcaagcttgacttagagagcacaaaattgttgatttcatcaag

SEQ ID NO: 5343 - DNA, 607 bp, Gossypium hirsutum
  unsure (1)..(607): unsure at all n locations; Clone ID: LIB3827-002-Q1-K6-F5
acttaagcggcttcatattaatgaagaatatgaggactntggctgcaataaaattggagttgcaattgtgcagtctgctctgttgagaaggttgattttgactgcttcatcatctaaagtacttggcaatgctgtgaaactactgtctaccctaaacaaagaagcagctgataaaggggattttacagacttaatcattatatctaaagaccaatttccagaggttgctagagctcggaaagcacttcagttggcaaaggagaaactggataatttgattggcttgtatagaaagcaatttaggaatcacaaattggaatttacatgtgtttcaggaactacacatttggtagagctgtctatagatgccaaggtaccttcaaactgggttaaggtaagcagtnccaaaaaaacagtaaggtatcatccacctgaagtattgacagcactagaccagttaagactggcaaatgaagagctcaccattatttgtcgagctgcgtggggcagctttcttatggagtttggagaatattatatggactntcaagctgctgttcaagctcttgccactctggactgtttgcactctcttgccattctttca

SEQ ID NO: 5344 - DNA, 585 bp, Gossypium hirsutum
  unsure (1)..(585): unsure at all n locations; Clone ID: LIB3827-002-Q1-K6-F7
aaatctattacttttctttttcatcatcaatggctgaccgtgaccgtgaccgcaaccagcctcaagagattcagttacttcacccaccaccccactaccgtcaaacaggaccatcaaccacccaaattgtagctgtcctcactctcctccctgtcggtggctcattgcttgctttggcagcgcttacactcactggcaccctcatcgggcttagcatcgccattcccctcttcattatcttcagcccagttattgtccctgccaccatcgccatttccatggcggtggctggtttcttgtcgtcgggagcattcgggttgacggggctgtcttcgctcaattatgggttgaagcgcatgataagggctaacgccggcgccggagttggaaaagggcaggcaaagagagggatgtgggacatggtaggatacgtgggacagaacatggagaacaaggctcatgagggtggtggtgctgttnggacataaatggacatttcaattacggtcgtatatttgtattaagcttatatatttactcgtctntgttttgttacttttaaacttattttatgtttattattat

SEQ ID NO: 5345 - DNA, 544 bp, Gossypium hirsutum
  unsure (1)..(544): unsure at all n locations; Clone ID: LIB3827-002-Q1-K6-F8
aggaaaacagaaagcagagccgcatcactttttgctagctaagctactgtgggagttattgttcttcagaacagcttctgcagtagctaataataacgttatatattatataaattttatacatcctttttaccctacgactccatatataagcaagtaaaaataaatatggctcgctctgtttcttcctttaagttccttggtgcttctgtttttgatgctctttatgtctccatatcaaggagaggttactcaggtgcaccgccggcggcagtgacggctagctttggtaggcctggagcgatggggaaagtggaacgaagatatgcgatgaaagagtcgtcgtcgtcggagacaagggcttattcttcagcttgggcgcctgaccctgttacggggtattaccggccggagaactgtggggctgagatcgatgcggcggatctccgggagatgatgttgaatcacagggttagatcacagtagaaacttgccaccgantgtgatcaccgtagcagagcagagccagaatgttttgcagatg

SEQ ID NO: 5346 - DNA, 613 bp, Gossypium hirsutum
  unsure (1)..(613): unsure at all n locations; Clone ID: LIB3827-002-Q1-K6-G10
tatggctagaaaccttgaaatccagatcgaagataagaactcaaaattccctaggaacttgtggctattgttacccaaacttcccttcaacagaaaacgcagtgttgaagttgtgattgaaaagaaacccanacggaaaacagttgagcgaggagaagaaaacaactaataagccagctgatgaggtgaagttttcggagcctcggatggctgttccaccgcctttgacgcttgaggccgaccagacaggaaggacttccaatcgtgtaattctctggcaggtatatgccattggtggtttctttttactgaaatggatttgggctagatggaacgaaaggaaagagatgggatccaagaaggaagcgtcggacgatgacgaacagccacctgcggtggatgactcccaatatgtgtgattctctctcgattattgttttactaaaccaagaccttatcgttttttctgtacctatttttgcttcgttgttgcttgttgtagttggaaaaaaatacaatttcatggttttgtgtgaaagaaagggaaagtaaagtttgaatccaatgaatgagttacaaaataatacaatcatcagattgaactccttatttc

SEQ ID NO: 5347 - DNA, 562 bp, Gossypium hirsutum
  unsure (1)..(562): unsure at all n locations; Clone ID: LIB3827-002-Q1-K6-G11
acanaactttctcttggccatacacctttcctttcataaaatatttcgatgaaactgattcttcactggatctgtgaagtatcttgttatacaccaaggagcttgaagaataatggggttctacagaaatttctccaggccatacactagatgctgttgaaattgtatggaccactcaaatctgaccaaggttggagaggttgttggcaatctggatggcatctggtgagggaagatcctgtaatcaatgacaagtttagtatctcatcaggtcatctacaagggacatgtattgaaccactaccttaatattgctttgagagggttgcactgagcaagagaaggaaggcctaactctggcattgcaaggaagtcgatggatagcaagatgaaactggcagctcaaggtcgccatggatgttcttaaatatatttagctactgagccttctcagctgataagggtaaaatcttctttgcctaaaaccttttattgtcacgcatgctttgttcctcggataaggtttgtgtgggttttgacaagcctcttttggagagtattg

SEQ ID NO: 5348 - DNA, 131 bp, Gossypium hirsutum
  Clone ID: LIB3827-002-Q1-K6-G12
ctaatatttacttgtttttctgtccagtgtgagcatctctgctatctcaggatatattgtgactattacataattaatgtaaggaagtgagtcagattcctaatgaatgagaagaagctcctatttcgttt

SEQ ID NO: 5349 - DNA, 529 bp, Gossypium hirsutum
  Clone ID: LIB3827-002-Q1-K6-G4
gtaaaaccaatgggtttgaggaatattattggcaaaaggcttggccttggccttgtaaggaggaggaaacctttttcgactgctacttgcgatggcgatggcaatggcaacggcaacgccaaatccatcaacctttactccgccatcaatcaagcccttcatattgcgcttgaaactgataatcgcgcatttgttttcggagaagatgttagctttggcggggttttccgttgcactaccggactctctgaccgatttggtaaagctagggttttcaatacccctctctgtgaacagggcattgtcggatttggaattggcctagccgcactgggaaatcgggccctagcggaaattcagtttgcagattacatataccctgcttttgatcagattgttaatgaagctgccaagtttagataccggagtggcaaccaattcaattgcggaggtttgacaataagagccccttatggcgctgtgggtcatggtggacattaccactcacaatcacctgaaactttctttt

SEQ ID NO: 5350 - DNA, 646 bp, Gossypium hirsutum
  Clone ID: LIB3827-002-Q1-K6-G5
atcgggaccgcattacatttgcccgagtccaggagtatcgattatttttattgacccaagatgagccagggacaacctaggaggcctcaacaaccagcaggtcaaggtgagaaccaagagcctatcaaatatggagatgttttcaacgtgagcggtgagttagccaacaagcctatcgcaccccaagatgcagccatgatgcaaacagctgagacccaagtgttgggtcagacccagaaaggtggaaccgctgccgtgatgcaatctgccgccacgaggaacgaacaagttggcgttgtgggtcataataatataactgacattgctggtgaagaaggcgttagcgtcgctgaaactgatgttgctggtcggcgtataatcactgaggcagtcgctggccaggttgtggggcaatatgttcaagcaacaccggttatgacaagccaagtgggcgctgtgcagcaaaacgcattaaccataggtgaagccctcgaagcaaccgctaaaacagcgggcgacaagcccgtcgatcaaagcgatgccgctgccgttcaagccgcggaagttcgagcgactggttcgaatgtcataatccccggcggacttcgcgctactgctcaatccgccgcggctcataacgcgaccc

SEQ ID NO: 5351 - DNA, 622 bp, Gossypium hirsutum
  Clone ID: LIB3827-002-Q1-K6-G6
attgcaaccagggtctcacatctcttcaaggtaatttaagatgtttttgtaagacttttaaagtggtccttcatctaaaaggtataatacaacataaagattcttttaacacaagatccatgacccagaaaacattctgtacatgctattttgtcataatgtggtggtgcatataatatatatatatatatatgtcaattcattccttctctaacccatctacaaatgcataccacaatatttgaggaaccaaagggtcgtcaaatcttcaatcagaggatctgacacctccaaggctcccccaacagttgcagcaactacttttctgcatttccctctagctttggttcagtttcagtggattcggaattcgaggattgctcctctgcggatgaggtggatttgatcggtttcttgaactgcaccaagatcatggtcatattatcacaaccctcaccggtgctgttgatggtgctaagcacttgtcaagtaccctctcacaaacaacagaaagcttgctttccgattttagctggtcatgaatgaaataactagtgtctgactggacatgcagtcccagattccgtcacatgccagaaccatgaactcatcatcatcacaa

SEQ ID NO: 5352 - DNA, 504 bp, Gossypium hirsutum
  unsure (1)..(504): unsure at all n locations; Clone ID: LIB3827-002-Q1-K6-G7
gccaaatctaaaacccgttgtgttggtcgtgtgtcttcgagtgtcagtcaggtttttaatttcatttgttttaaccgttgtaaatatgggtgatgagagtgagaggggtaatacaagttcccagtcttgtaactctcttacttttttttttctctctctttactttataactattatactacttgaaatagtcacggttattaatgctccttttgcatgctttagacggtcaatttaagcatttttttcaaacatctacgactttgcaacctatcatggacatgctcggtgatgcgtaggtcgatgaagaaagagcgttgtaactaattagctggtcatagtgttggtggtgctagtaaaagtcctgcantctattatccataaaatgaacgtcttgggttgtaatgtgcgttatgagtcgtaatgtgcgttatggttacggatcgtgtacagattgtgactttcttttcctatattctattgacgcacttgtagtttcgttgg

SEQ ID NO: 5353 - DNA, 348 bp, Gossypium hirsutum
  Clone ID: LIB3827-002-Q1-K6-G9
gaccgatccaaaccctgatgaccctcttgttccggagattgctcacatgtataagaccgatcgggccaagtatgaagccactgctcgtagctggacccagaagtatgccatgggatgacagtggttggtgtgtaatacctatcaactttcttatgtgttttggggaaagaaggaggtgttttttcttaaagtaacttgccattgtgctttggatatgggaaagatatggaacattctttttatttatttcgtgctttataacttgtgtgaaacccttgtttcgttcaatttcaaagacgctgtgaaaccctttgtttcgttcaatgtaacaaaaaagtctttagttct

SEQ ID NO: 5354 - DNA, 363 bp, Gossypium hirsutum
  unsure (1)..(363): unsure at all n locations; Clone ID: LIB3827-002-Q1-K6-H1
gggtctccccggtggggtctacttcaaagtgacggctactttggtcgtggttgtaggtcccaggggtgtgcttactcgtgacttcntgctcctcatcctcgttttccacctctccnggacgaggagacgggcaagcgtaagctcaggatcgaggcctggttcggttcttggaagaccagcgccgtcttccgttccgccctctgcctcttcgngaatctcatcaccggtgtcnccaagggttaccggtgcatgatgaggttcgtcttcgctcactttccgatcatcgcctctttctctggcggccacatgtccatcgagatccgtaacttccttggctagatgaaggtgcgtttggtggttttg

SEQ ID NO: 5355 - DNA, 128 bp, Gossypium hirsutum
  Clone ID: LIB3827-002-Q1-K6-H10
ttttttttacatccacaacttgctttcaaacattttcatcatagtctaaaagccgatcacataaggcagctagaaaatttagaacaatgtcaaaattagcgaactaacataaataactatatattttt

SEQ ID NO: 5356 - DNA, 601 bp, Gossypium hirsutum
  unsure (1)..(601): unsure at all n locations; Clone ID: LIB3827-002-Q1-K6-H12
cgggcacttaccaaagcccagttggatgagattctaggtccagctgaatgcaccattgtttcttcattatctaacaagcaagtggactcctatgtcctttctgagtctagcctctttgtctatccatacaagattataatcaaaacctgtgggacaactaagttgcttcttgctatcccacccatcttgaaattggctggcagtctatcccttgctgtaaaatctgttaggtatactcgtgggagttttatattccctggtgctcagccatttcctcaccgaaacttctctgaagaggttgctgttcttgataactatttcgggaagcttggcgctggtagcaaggcttgtgtaatgggtgggctggataaacagaaatggcatgtgtactctgcatctgcagaacctgtgaccgccactggcccggtttacactctagaaatgtgcttgactggtttggacagggataaggcgtcggttntctacaaagaccaatcaggctccgcagctgtgatgaccattaattctggcataaggaagatccttncagagtctgagatatgtgattntgagtttggacccctgtgttactcgatgaatg

SEQ ID NO: 5357 - DNA, 458 bp, Gossypium hirsutum
  unsure (1)..(458): unsure at all n locations; Clone ID: LIB3827-002-Q1-K6-H2
tgctcagcngaaagagacctggatgatattcatgatgaggtagctgngattatcaaggaggatttntggcctaatcctcttacttatttcaacantgaggctgntgaagaggactctgnnggtgatgaagagggaaaagatgaagatgatcaagatgatgaagatgaagacgaagacgatgactaaaatcacatctggccttatattagttagttgcttgccttgctttaagtaagaacttgtgcaaagttgtgtcgttgtagttactaaggttatggggagcataatcatcttttagatngctttctctgcttcacaaacaactctcattagtgtgtcaccatacctcttaactcatttcctttttgtccatctctcgtttacctttatcttttttgtgtttgtttttttttcttgtttcctcccccgtggtgtccgtcttgggaatatacccccct

SEQ ID NO: 5358 - DNA, 207 bp, Gossypium hirsutum
  unsure (1)..(207): unsure at all n locations; Clone ID: LIB3827-002-Q1-K6-H4
aaagctgccgatgctgttgccgccgccactgacatgctaagctggacttacaatgtcaagtcacaggcaacagcatgcagctataattttgtcatttgatttctgttttcttttgtgggtatttttttttataattgaattgtatagcttaagatctttgtntgcacggttgaggattttaatggctgctttcccgttgctcgnngt

SEQ ID NO: 5359 - DNA, 539 bp, Gossypium hirsutum
  Clone ID: LIB3827-002-Q1-K6-H6
cttggatgccctgtggtccgccgtatatgatgaagcctcctgggtctcaggtgccattgatacctattcctaggttgaaaacacagcaacaatcaaggccagcttccaaagctaaaaagaatgagagcaaaactaagaaggttgctagtgttagtgttctgggaatgttgtttttcatattattgtttagtggtttggtcccaattatgaacgtaagatacgataatacccctgttggatctgggcctggttttgttggagatgggttttacgaggtgcatcgtgggagagttttgagagttgatagtcatttaaatagatctaagtatagtagggatgcagcattttcttacggtgattttaacattagcaatagagttcatggtagacgctcagagtctggtggtgagcgcaaagagactggtgcacaaagtgcacctgattatataaaaaatgttagtgagcctctcactgcttcgttttatgtaccgagaaatgataagcttgtgaaaattgatgggcatctgataattcattca

SEQ ID NO: 5360 - DNA, 422 bp, Gossypium hirsutum
  Clone ID: LIB3827-002-Q1-K6-H7
aacctgcgaaaataaaaaagagttttgggtcctgggaagggcctttggccaggcaaaatgaacctttcctaatttttggttgaaccaaatcggccttttaccctcgttgaaacccttattaagggttttgagaaaaaaaaattgggggaccttccggggccgaaaaaccggaaaaaaattttcaactctttttgggaaaaaaaaaatagaaaaagggcttaacttcacttaactggcctttattaccgaagggtattcccgaagtgacccttaaaatttattcacaaccgcggcttatttttccctttgagagtttatacaccaagagagattgaaagatctgtagagaaaacaaaaagatgttgaagttcaaaacaaacaaaatggtacacatgaaaagagtcattaccctacagccatta

SEQ ID NO: 5361 - DNA, 537 bp, Gossypium hirsutum
  unsure (1)..(537): unsure at all n locations; Clone ID: LIB3827-002-Q1-K6-H8
attggtgttcagttccatccctgattcaagtccaggccagngaaaaccatctgcacttttctcagggcttatcgctgcatcatgtgggcaaatggacttgcttttaaacaaatctgatcatttgagcaatggaatggcaaatgggataaatgggaaagcaacttccaagccccgggcaaacggaaactgtttcaagtcatccaacggatcattaaatggtgtatacagcaatggtaatggtgtccaccattaaggaagctggatagaactcttctggttatgggtttaagtgtgcgtctccaagagctttacatggacaacgttttatattatgggttaagtttccccaagagtttttcaatagaacttgggcgtgtctgtacagtggtcgagtacaagtagggtttagcaattgagaaacatacttttttccagggagttgttgggttttttggtgttggatgaaacggatatatatatcattatatgcaacaggaggttagagaatatggacaagaggtgtccaaagttgaactt

SEQ ID NO: 5362 - DNA, 583 bp, Gossypium hirsutum
  unsure (1)..(583): unsure at all n locations; Clone ID: LIB3827-002-Q1-K6-H9
ggcggccgccgggtactggaaggaagcaacagttatcttcccttggtgaattgctttctggttctgctgggatgggttttactccgcatgtcatcaccattgcaataggagaagacattgcaacaaaattaatgtcattttcacagcaaggaccaagagaagtatgcattttgtcagccaatggtgccgtctctaccgtaactcttcgaaagccgtcatcgtcgggtggcactgttacgtacgagggacgatttgagatattatgtctgtcaggctcgtacctgctgacaagcaatactggctctcgcaatcgaactggtggtcttagtgtttctcttgccagtcctgatggccgtgtcattgggggaggtgttggagggatgcttattgcagcaagccccgtgcaggtattgagatcccagtctagctgtctattttttcaactaaaaattaagttagcctgcttcattgcaagtttgaaaaagcaggaagccatcatagtaataccatttcaaagtttaaatcatntaaacttaccatatgctntactgngaatttaattatatatcatgagcangtgatt

SEQ ID NO: 5363 - DNA, 478 bp, Gossypium hirsutum
  Clone ID: LIB3827-002-Q1-N6-A11
gagatcaatctggaaaactttagcgtctctaattctgaattacatttttctgaaattttagattttaagaagcggacaactatatagaaagcaagcaactgggaagggctatcccaaatgccatacgggagatgagtggccatcggagtcccgatagcaattgtgggcagctgccaatgtgatcccaccaaggttgtcagtttttgaccttcatccacccatcatgcaaatcacgatccacatgtttctttaccacttaaaacattccacttttcaaattaccctttatgactactcaaaatttgaaacacgtaacatactaaacaacatgaaatgaaatgacaatcaagcaaagttagcagactcaacccaacacatggggtgtaaacctcttagacaagcaaaactgcatttatacacccgtcattttctgggttatttgttacttgagcatattttccccaaacaactttcccag

SEQ ID NO: 5364 - DNA, 400 bp, Gossypium hirsutum
  Clone ID: LIB3827-002-Q1-N6-A12
agcaaaggaacctcatgtggactttatggtatggaagggggaggcctctaaaaaattctttgggcgaactggttataaactattagaggggattttcctaattatttacagactgagggtagaatattttacaaaaaactggggaatattcacattccaaggaaaattaaaatcctaatctggaaaatttcttaaaattttattccccactttatgaatcttcagggtaagcgattgctctcggggggagtatgtcccaaatgtcaggcaactgctgaaaacattgataatatcttcaaaaattgccctaggggttaaaaaataattccagcatacaatggcgagtgttttgctgttctttgggggcgaacatgaagcatgagtgtatgggttggggccc

SEQ ID NO: 5365 - DNA, 374 bp, Gossypium hirsutum
  Clone ID: LIB3827-002-Q1-N6-A3
gggcttaaaacaaaacagaaaccccatcttttgcttattttacaaaacagggcaccatttttatatttagctgctacagaatgcatactatcttaaacacaggggatttcacttccccagcgttatatttaactttaaaaaactacatttggatgatgaagctatgtgtatattattatgcgttgacattcttattaagcctagcagctgccgccatagatgctgccactcctcctgggtgtggggctacatttggattgtttctcagctctggactcaccactccttcagcatcttgccttgtcactgctttatccggcggtaacttggccggtgcacccgttaaaacttgattcagcttggttttttcctca

SEQ ID NO: 5366 - DNA, 438 bp, Gossypium hirsutum
  Clone ID: LIB3827-002-Q1-N6-A4
gtgtttttttttttttttttttgaggcagtaaaaatataagcttatcgtgtccaacattctggaaaagtttatacaatagatgtttcaatgtcatcttatttttttcaatgcgatatacagtacggtctcagaagacttactctaatgggcgcttgtacttacaccatgcgatagctattacataaaggaatatcgagccggcagcaccacctccaattgtccacagaaactctggcatccctgctttatcttcatcgaatagctcgatatggatgttcatgccaaagatacctgcaactacgataaaagcactgatgacaagggttgccgttgttagcatgactcccatttgaaggagatggttctttttgtcatcgagcattatattaatgtagtcctctgtgtcatcaacatattccctcagcgtggatagcttg

SEQ ID NO: 5367 - DNA, 467 bp, Gossypium hirsutum
  Clone ID: LIB3827-002-Q1-N6-A7
cgaatagcgaaagaacaatctacattgcatcattcattgatacaatttaaaactgtttttaaccattgcccttaatacagaaatttttgcatggccagaaaatggaagaaagaatagaatttgcaaagggcttcttgatctgatggtaatagttggcaaactagtaatgcaagagaaaacaaagtccttgcatcatcacactgttgcagtcttgatagaaagaaaatctgagatcttattggtgtagaaatcaggttgtatggaattgctggggctttgaagcattgacaaatttgtcacgcctgagagaacaagaagagttttgcagccaccgttttgtccaaacagaatgtcagtatctaatctgtccccaaccatgcatatctgtgacttgaggatgccaaatctgttgagtaacatgaaaacaatgctattagaaagcataactattatttacaactaaacag

SEQ ID NO: 5368 - DNA, 571 bp, Gossypium hirsutum
  Clone ID: LIB3827-002-Q1-N6-A9
gaagccaacgcgcgatggaaagagcgggtgaggaggaacccccagtccaagggcggcgaggaatgaggcaccatccggatcgtgtattccacgtacatgaaaaacaccatccccaccgcgaaaacacatggtatccgatgagatctcaccacgttaacaacgtcattgagtgtccacttcatgaaagagggtttcccagaatgaacgccgccattgaaaacgtgataatcagcaacattgccatgaacgcctgttttcttattacccataactttaacgttgttgcttttgcagttacccttatcgggaggtctataaggagaggtaagaagggtcgttgtggcgatggtactgaaaacattagcggaagatacccgtttcatggttgttaacagtgctaatagaacgaaacatgagaagaagatactgcgggatggatatatataaagggaaagggaaggaaaaatacaacggcaaagtttccaaagaaatgtaggtgagaaaattatcccagaaaagggagaaaactttggttttttaacgtttttgttaaaatttaagaaaagtttga

SEQ ID NO: 5369 - DNA, 408 bp, Gossypium hirsutum
  Clone ID: LIB3827-002-Q1-N6-B1
cagaaattaaattaaactcatgaacaatgaatttgttggactttttatcattccaactgtttataaaacaaaacaacacccaatctaacatgacctcactcttaaatatctgacatgaaaactttgtccctaagtcttgtttcagagttaaccagagggccaaaaacatgattgggacatttgagcaacattagcatctcgtatacagcaaaaaaaattcatgacgccaaatgatgattagtcttcctattcaaagatggtaaacagctagacaagaaaccaacctattttggtaggttaaatatcatccagtcacaccaaagataacaggccagtcacttcacctatgcttgttttgcagcctaccaagggacccaaagatatatagcaaggtcggcgaatcatgat

SEQ ID NO: 5370 - DNA, 474 bp, Gossypium hirsutum
  Clone ID: LIB3827-002-Q1-N6-B12
gcagaaagtaaaacctatcttcttttgacatattaacatggtgctttagtacaaagcgcaagaaaaacgacttgtattcatcacaaacttcatcttccaaggcaaaagaggggaggataaaaaagaaaaatgatgtcagattagcaaacctccgctgctactgctttcagctttagcatgatctagtcacgcctcttcttcttcttctcgctcttctcagctgaatttttcaacataattatcagaatgcggacgaatacggcaacaaagtcggtgaaaagggtaagggcatgcttaacatagtccaggtcacccaagtgtgccttttcaattatgtctggagtatccactaccatgtagcccacaaacaccaaaagcccgaagtagatctcaaacataaagaaggctgcgcttccaccaaagataaaggaagcaagatgcaaccacagaaagctggacacaccagatgaaagc

SEQ ID NO: 5371 - DNA, 242 bp, Gossypium hirsutum
  Clone ID: LIB3827-002-Q1-N6-B2
ctacttactgcaccttttttattattttcatgacatcgcttacaaacatacaagaaaagatccatttggtggcaaaaaaagagttaagaaagcaacgacgggggtgatggatccctgaaggaccaaattatgtaactaggtacaggtacaggtccaggtacaaaacacaagaaacactgactagtaatcttctggagccaagggctggtgcgttgggtttgctggctccgttggttggatca

SEQ ID NO: 5372 - DNA, 474 bp, Gossypium hirsutum
  Clone ID: LIB3827-002-Q1-N6-B3
accatacagaaaatattcacacagatgggccaaagaacaaaaggtttggttcacaaacacaactgctagatgcctaatttgagatgatgctcgtaagtacaaccttcaaacagaatgcaaaggaagggttatgcaaactaattaatatcataatcacaccgattacttgtcagccctcgacagcttcattctgaaactcaaccaagcacagctctcaagcagcggaaaccgtctctgtattagttacagctgccacctttgggggtggcggcatttggggcttcaagtggggaggtggactgtgcttcagcttcacaagtatctgtcgcatccttgagagatcagttggctttccaggtttaggtccctgtatcacaacgatggaaggtttcttttctttatccttctttccccgcttttctatagttggcacctcatgcgggataagctctgcaattgccttccagtaatttt

SEQ ID NO: 5373 - DNA, 448 bp, Gossypium hirsutum
  Clone ID: LIB3827-002-Q1-N6-B4
cataaaaacgtattaaatgtgctatatatacgattgccaatagctttacaacaaaaaatttcccttaaaagttgaccttcacagaaacatctttacttaccaagggcaaaactaaacctgctggctgctgctgctcctccccaggaagttatacactgccaaggcaattctgatacaaccccttaaaatattcacactagcttaccttacctctcatataaattatcagaggcactgcattctacaacatggagtccagatattggttatatcgtctgcggttatacgctaacaagccgccgtaagtgcgatcagcaaccccaacaaagagcgcttctgtatccgggctaaatgatattccagctatttccccaaaaatatcaatttcttggcaattaacataccccaactttgtatcaaagatgtgaacaaaatctgcaggctcagc

SEQ ID NO: 5374 - DNA, 496 bp, Gossypium hirsutum
  Clone ID: LIB3827-002-Q1-N6-B5
aaaaataaaagtttgaagattaaattctaaatatacaaagagcacaaaaactttgagcaaattgtaacctttaaatttttacattataatttagtcaagaaacaaaaaattaacctagtgcaaagtgcgggtgaaaaccatgctagtactatctaaagtacataaagttttcgtacacatgctcttttatttgtactaaaattctttaaaatgatcagacactcaattaagatattggtctagagacaaataatttaccttgagatactaaaaatatttcaaataattaaaagtattatttaaattgaaataacattatttttcattatgtaaataatttgaagaaaaaaaacttatccgaacatatcacctataaagatctatcaattataaaatccagttgattaaactataaaacaattatcatagacaatattttttcataattttaataattttgaaataatcttaataattttaaaatcatttggtgaca

SEQ ID NO: 5375 - DNA, 469 bp, Gossypium hirsutum
  Clone ID: LIB3827-002-Q1-N6-B6
gttgtttttttttttttttttttttttttttttttttttttttttttttttttttttttttttttttttttttttttttttttttttttttttttttaaaaaaacccccaacggggagttttaaaaagccccggtaaaggggcccaagggggtgacttttaaacaaaaaaaaattccaaaaaaaaacaaattttaaagggtttaaaagggggaaggggggggaaaaaaaaaaaggggctttttgtcctcaaaaaggaaatttttaaaagcaaaaaatttttggggggcccccttccccttttttttgggggacttcttaaaaaaaaaaacaagttttttgccctcaaaaaatttttccttaaaaaggggcaattttaccaagcctgaaaaaatttcaagcccttaaaacaccccttacaataggccgcctaataggggaataaagggggggaatttttttggcggtttt

SEQ ID NO: 5376 - DNA, 428 bp, Gossypium hirsutum
  Clone ID: LIB3827-002-Q1-N6-B9
gaacttccacttcgaccccaaaaaagacctctgcaatagcatcagccccaatttattacacccaaaatttagagtaaaaagaaagaaaccataaaacatttctggtaaaaccttttacctttcttcaattgggcaacagaagaccactggtaaaactggaacctctgcaaaaaatatatagtcatgacctactaatctctgttcatatctcattaataaatattcccttatctctcctcctcctcctaggttgccgacctttgttttggaatgtactttgttttagcacccctttcaggcttctttctgtacttggctattgcagcccaacagtagaagcctcacaggcccctgccttgaccatccacttctctgatgaatcaatttcaacccctgagcaccctggaggcttagggttcgaggagaga

SEQ ID NO: 5377 - DNA, 374 bp, Gossypium hirsutum
  Clone ID: LIB3827-002-Q1-N6-C11
cccaaaataacaaaacctgttttttaaactccattgggcccccacgggctcaagatcggggccaaggggttcttaatttcatacagggggggtaacactacgtttttttggaaatttcatatgaaagacccataggcaaacacaggtgaaggggaatttaactggaaggggcattttcatcagctccaccagcagaagctgcaaaaggatcagatgctgcagcccttgaaccagtttcagcaaacctaaattcacttccaaatccccttgattgctgcaatgtttgggcaaaggcctggtacttggggatatccgaataactcacactcctacgagcaaacttaatggattcttaaaaatgggcaggcttgatt

SEQ ID NO: 5378 - DNA, 377 bp, Gossypium hirsutum
  Clone ID: LIB3827-002-Q1-N6-C2
attaataatggatacaaaggattttattccctcacaaacattgaagaacgacacatgcatgaaactactattttgttctcgagttatgcttcaactgcccatgctgaaaatctttccttcttttttagtacttttactaatacaataatgatgggaaatgggagagaatgcaactgtttcagtaggcttctgtctttgtatataattggtaataacttttcatctctggtagagagagcttgtgattggattcaaggtttagaaactgagttaatcaatttgtgactgaaatcccatagtttccttgccaaagcctcatctcttgcatatgaacttggtgtcatctcattgcagtctacaaagtatttcgcggtgac

SEQ ID NO: 5379 - DNA, 395 bp, Gossypium hirsutum
  Clone ID: LIB3827-002-Q1-N6-C3
aatagtgtgtactttttaatacaatgttaaaacctttgtatacaagttaccacaatcttcagattcgagctttgatgaaattaactgctctctcgcatgattgcagacgttcagcggagtttctgtcttcacgaactgcctttacaaaatcgagcacaactgtagctaactcatcctggtgtgcagtatactcatgatcagctccttcaattatgtgcagcttgtgatttcgtataaacctggcaaattccagggcatctttggctggtacaattttatccatggacccatgaatggttaataccctgcaattttgatcaatcgatagacatgctgcacgaatgtcggtggttaatcggtccatcaaactttcttgagttacacgatattcaaac

SEQ ID NO: 5380 - DNA, 408 bp, Gossypium hirsutum
  Clone ID: LIB3827-002-Q1-N6-C4
gggcttaattcccgcgtcttctaatgtatatataaaaagaattttgatcaaaaaagggtttcaattggtgtgtatccaaatgcaattctaaagagcacaataactaaacaaacactaagctcaacatctaaagaaatggaagacttataataaagtcgagcatttacgtttttagctaatatcctttgtatgaacaaacgtaaattctagagccaacagtcgcctagcactggtttcttatcagcttcttattcttcctgttggcaacaaatggaagaatgttttttttttcttagatattgcttgaagttgatgtttctgatgtttctgctgtttctgcagaaccgcttgcaagaaagccgtttccgctttcagacatgacagggatcttaacagttgctctttcca

SEQ ID NO: 5381 - DNA, 445 bp, Gossypium hirsutum
  unsure (1)..(445): unsure at all n locations; Clone ID: LIB3827-002-Q1-N6-C5
aaaaaaaaaaaacggggggggggggaaaaaaaaaacaaaaaaaaaaaggggaaaaaccanaanaacaagggggggancaaggggaaaaaaaaaaaaaaggggaaaaggggaaaaaanaaaaaaaaaccnnaaggacccaaaaaaaaagcaaaaccnnaaaaagggggggaanccggggaaaaaaaaaaggggggggggggaaaaaaccnnnnaaaaaaaaggaannnnnaannnnaaanaaaaaaaaaaaaagggggggggaaaaaaaaaaancaaaaaaaaaaaaaagggaaaaaccancancanaaaggggggnnnaagggaaaaaaaaaaaaaaaggggaaaaggggaaaaaannaaaaaaaaccnngaagaaccaaaaaaaaaggaaaaacnnnaaaagggccggaaancggggaaaaaaaaaaagggggggggggaaaaa

SEQ ID NO: 5382 - DNA, 499 bp, Gossypium hirsutum
  Clone ID: LIB3827-002-Q1-N6-C7
agtagaagagatttcacacaactaatacattaaaagattaaaaagagatgaaggtttgtatccttcatacattacaaacttttattttgcctttaaaaacttctaaaattttcctccattcatctaaaatactacaaagtctaacccaaaaatccatcaaataatcccgtgtaatttcaacttctgaaactatatatatatatataactagaatcgaactgcgaaagaagacggtaccagaaaagcattacataaccaacaaattactaaatccaaaggtcaaaagagatcaatgacaggaggtaccatgccttccacctgaggtccattagcatatactcgtcttcccctctcctgctgagtcaccacaccatcttccccgatcaccagcataaggtgaccttgacctctcaagaattgggctacatgaatttcagtgttcgattgaattctaattattttgaagtggcccacgctgttgggatggagacaaccggtc

SEQ ID NO: 5383 - DNA, 631 bp, Gossypium hirsutum
  Clone ID: LIB3827-002-Q1-N6-C8
agcttcaataagtaatccaccattgcacacaaacaaattggttattacatacatcaacaatcatcatttgagcacagatctacaaaaagaatgtgtcacaatctttatgaacagcttgcaccagaaagatatatcggagcaagtaatgcttacaacattatcagagctctgatagaattgcagggatgtaatgagatagctctgctgtgagagattgaaatccattcactagttgtgtgtggaaatcttggtcttcttctcctattagtctgaagtgtacacgaattgcccgcttgcaaacagccataaattcaaggagtgcagcaataagttgctgtagctcctgagaacgcaaccttgtggcaggttcaccagacaagaaggctgtgcacacactcagaacaccactattcacttgaactgcaacactgccttgaagaattctttgcaggctctgaagacgaggcagttggtctccttcggaactacgaggctcttccaactcatttcgtagggctgctgttcgagtttcaatcattccaatcgcattctcaaccggagaaaattcaagtgattcagattttatcaccaagagcctattgacaagtgcagggaatgagccctcagtctg

SEQ ID NO: 5384 - DNA, 588 bp, Gossypium hirsutum
  Clone ID: LIB3827-002-Q1-N6-C9
cagaaattaaattaaactcatgaacaatgaatttgttggactttttatcattccaactgtttataaaacaaaacaacacccaatctaacatgacctcactcttaaatatctgacatgaaaactttgtccctaagtcttgtttcagagttaaccagagggccaaaaacatgattgggacatttgagcaacattagcatctcgtatacagcaaaaaaaattcatgacgccaaatgatgattagtcttcctattcaaagatggtaaacagctagacaagaaaccaacctattttggtaggttaaatatcatccagtcacaccaaagataacaggccagtcacttcacctatgcttgttttgcagcctaccaagggacccaaagatatatagcaaggtcggcgaatcatgattaacttgtgaggatattgtgactttgttcgagatcatcaagttctgcaactaagagtcaaccatcccagaacgctcccgaatttatgtaccgccaaagacacgcaaaaaactcaaaatattcgaaagataaatatcaagcacacactttttgtcaagcataatcatctggaactagatgc

SEQ ID NO: 5385 - DNA, 436 bp, Gossypium hirsutum
  Clone ID: LIB3827-002-Q1-N6-D1
aaaccgagcaaataataacatgacaatttccaaaaccaagtaaataacagaaattgttgtccaagataaaacccagttgaactcgtcaacatttattatccagctttgcggagaaaaactcacaagaacttcctgtatggcctaccattatcttcatcctgcatatgctgttggaaaaattaccaaatcactcagcaattcaattagagaaatgtacaaagggaaataaaattggaaagagtactatctctattgcacaatgttcttgcaaacaacacaggacagaaatcaaacaagaacttgcaacaaaaaaatgggaatcaacagctgaaattgttaaatcaaatcctccaaattaaaaagaaattaagagtttcaaaggagggttttttctattccttgctttgcaacttttaacctgttttattgctgacta

SEQ ID NO: 5386 - DNA, 364 bp, Gossypium hirsutum
  Clone ID: LIB3827-002-Q1-N6-D11
aaaagaaaaacaacctagtatagttcgatatattcttcatgttacagcatgagtaaaagggaaaacacacaagttttatgagtatgagagcgacatactaatgataaatctaaaagatgtcactgagagtgggaagcttgatctctcctttctgagagagagggatagtgaagttccccacgataggaagatcaatggtgagacccaattccaattcatagtcaatgtcccaatctgcaccaatatcctttaccaagcttactaagatgttatacggtaccttcactggcacgtccagcatcgttgtgtcgctggctttcaatgaccccgggtctggtattgtccctgatgctatccctcttcc

SEQ ID NO: 5387 - DNA, 572 bp, Gossypium hirsutum
  Clone ID: LIB3827-002-Q1-N6-D12
cccacaaatcaatttaaattccttaatttacacaattctatagcactgcagtggatccttattccaatttaatcataacattgtatcttagttccatttattatttataaatgaaattaaataagagagattgcgattagcctgcagtattactgctatgttcatcaagccaagaaattatgtcactaaaaactctgttaatcatatcatctggttcaccttcaagaagagaatggccagcatccttgtatataataatgttcttgtctgagctgcttgctttttcatacaatgctttgctcacagctgggtccgtaacgatatcgttctctccatgcaagattaatattggaagcgaaaccttctccaaatgttgttctatttcggctgtcgttctcaacatctccaccgcagtccgtaagcgtggcttgtccttgtaagcaataacattatagggtgtcagttctctctttttaatgtctctaaatgccgcctctgccaaatccttctgtggtactaacttctgttttggaagaatattagctacaccgatcagaatttgcttcagtatc

SEQ ID NO: 5388 - DNA, 530 bp, Gossypium hirsutum
  unsure (1)..(530): unsure at all n locations; Clone ID: LIB3827-002-Q1-N6-D2
tcgcgatctagaactaggaaatggagaggcttgtagaagacaagctggttagagatattggtgtgtgtaattttacactgaagaagatgaacaagttgcttggttttgctgaaactatgccatctgtttgtcaaatggaaatgcatcctggttggagaaatgataagatgttggaagcttgtaaacagaatggcatccatgtcactgcatattcaccacttggttcacaagaaggtggtagggacctaatccatgatgaaacagtggatagaatagcaaagaagctgaacaaaacaccaggacaagtgctggtaaaatgggcaatacaaaggggaaccagtgtcatacccaaatcaaacaacactgataggatcaaagaaaacattgaggtgtttgggtgggaattgccacaagaggatnttcaagctctttgtaacatccctgatcagaagagagtgttgcatggagaacaattgtttgtgaacaagaatgcagggcctttaagaagtgtggctgatgtatgggatcat

SEQ ID NO: 5389 - DNA, 503 bp, Gossypium hirsutum
  Clone ID: LIB3827-002-Q1-N6-D4
aaaacaaaaaaaattaaaattttttttttaaaaaaaggggaaaaaagggggcccccgggttccccccccggttgggggggggaaaatttccccaaaaaaccctttttaaaaaaatgggaaggccccccaaggggggggggtttttccttttttaagggccgttttgaaaaagccaaccccccctttcggaaaaggggggcccaaaaaaaaaaaggggccccttttaaaaaaaaaatgggggggggaaggaaaaaaaaaacccccaattttccccggtttggaaaaaaaaggggccccctttttaaacccccggggggccattttgggggggggggttttggggggccccgttcccccaaaagtgggtaaaaaaaaggggtttttgggggtttttggggcccccggggaaaaaaaaaccgggggtcccccccccgggggggggggttttttacagggggggaaaaaaaccccccccttttggggtttgggggaaaaaacggggg

SEQ ID NO: 5390 - DNA, 616 bp, Gossypium hirsutum
  Clone ID: LIB3827-002-Q1-N6-D5
ttttttttttttttttttttttttttttttttttttttttttttttttttttttttttttttttttttttttttttttttttttttttttttttttttttttttttttttttttttttttttttttttttttttttttttttttttggggggtttttggggaaaaaaaaagggcccaaaaaaaaaaaaaaaggggggggtaaaaaaaaaagggggggaaaaaagtttttttagggggggctcccaaaaaaaaaggccccccaaaaaaaaaaatggggaaaaaaaaaacccccccccccaaagggaaaaaaaaattccccccttttgggggggcccttttttcccccccggggggggccccaaaatttttaaaaaaaccctttttttttttgttccccaaaaagaaattttcctttttttttggaaaaaaaattcccccccccccccccctgggggggggggtaattttttttttaaaaaaaaattttttttaaaaaatcccggggttttaaaaaaaaaaaaagggggcccaaaattttttttttttttttttttttgaaaaaaaaaaaacccttgaaaaaaaagaaaaaaccccttttttccaagatttttttttt

SEQ ID NO: 5391 - DNA, 455 bp, Gossypium hirsutum
  unsure (1)..(455): unsure at all n locations; Clone ID: LIB3827-002-Q1-N6-D6
aaaacagaacttcgcaaacagatgtataaaattgagatatttattttgattacagatacataaaagaccaaactacaaaacgaagaccattacaaatcacaacgttatttaaaacttttatacatacatacgtaaacacacatatagtatagatcgcgcatagtgggaactgaactctgatctggcagtgttaaaagacacggtttagaaaccaaagttcaatcgtttagccagaaatgtcaatagccttgacatcgggctttttcacttccagtttgggaacagtgacagtaagcacaccattttccatggaagccttgatctgatccatcttagcattctcaggcaacctgaacctcctcataaacttcccactgctacgttccacgcgatgccatgtgtcattcttgtcttncttctccatgttcctctttccgcttatctgaagcaccctg

SEQ ID NO: 5392 - DNA, 72 bp, Gossypium hirsutum
  Clone ID: LIB3827-002-Q1-N6-D7
tcgtgtgttactcgcagccgattattcgcaaattgagctacgcttaatcccacgcgtccgcccacgcgtccg

SEQ ID NO: 5393 - DNA, 528 bp, Gossypium hirsutum
  Clone ID: LIB3827-002-Q1-N6-D8
aaaagaaagacttgaaagaaaattaccaattacgtaataactatagtaggagaaacattaaagtacaaaaagaagaaaccacaaaatgctggggtctttgaggccaaacttttagctacataaaactaagaaactcacatacttccaaaaatcaaaaagatgtcaaccaaaacagtatttaagccataactggaacctcaatattagttggctcaggctctactctcctgatttcttcatcctccttgggagggtggattgtgactagatcgggtaggggagtagtagggccttgcttacccttaggatcccagtcaagcatgatcttgaccttgataccaagcaccccctgtctcaaaagaacatgtctgacagcagagtcaatatactcattgacaggatgaccagaagagatcatatatccatccttgaatttcatagatttggcacgctgtgctcttagctttccactaacaataacctcgcatcccttggcaccactctccatgatgaatctcagtacaccat

SEQ ID NO: 5394 - DNA, 473 bp, Gossypium hirsutum
  unsure (1)..(473): unsure at all n locations; Clone ID: LIB3827-002-Q1-N6-E1
aactgatgatcacatttctttatttttctctaattattcccaacttttattgatttatagaactgccctggctaaccctataacattacaacaggaccaaacttctttttatatggtacaacagtacgatcttgagaaagaaaaaagtngaagcaaacaaacaacaaacacagactcaaggcagtagcagagcacaaaaactcgctcctttcatttaataggatcgataataaggatcatcctgggtacctccgcgggtgttccttctagtcccagcattgttagacgccgcatttgggaagtcttggttccccgttgtaccgtaagcaccctctgtatctccgccaaaccccatactgctgaggtcatcttgcctgcctgtatcatacccactacctgcggtggggtacccacggttgtcatgtccaccggtaccgccatagccaccagtgtcgcctatgttgtacccagct

SEQ ID NO: 5395 - DNA, 492 bp, Gossypium hirsutum
  unsure (1)..(492): unsure at all n locations; Clone ID: LIB3827-002-Q1-N6-E10
gggnggggggggnnnnnnnaggagaaaacaacannnnggggggaaaaaggancaaagcanaggaccggagaataaaagatgaagtggaaaccatgatcaggtctaacaacaactaaaagagtccacatatgcaacataaaattacattcattccgggggaccttatttcaacattttcactacacagtaatgaaccgtagatttgcaagtttgcttgccaggggctcttcatcgtcaacccaatttccccgtgggattcaggttcacaattgcattgcagcaaccgatttgaacctgagaatgctgttttataaaatttcatcaggcattgtggacaacagcagcccttgaacaaactcgcatttttttgccttctcttcctgatcctttagtgaaaggggagacgacttcacatttctttctgacctattcacgtctgaacttttcttagttggtcttgtttcacgagaaaagttaggctgggcactaaca

SEQ ID NO: 5396 - DNA, 587 bp, Gossypium hirsutum
  Clone ID: LIB3827-002-Q1-N6-E11
gtgtttttttttaatataaatagtatatatattgaaatagaagagccactgaacaagaaaaggaactcagtttcggttttaagatctgttttcgacatggccatttaaaaaatccaactatctgatcccattctcttgtgcccaattctaacttcctatatggcccaaatattgcaaaaactaatataatctttccatcttccaaccttttaaacgcggctaagtgagaagattcatccatccccaacatctcacttcattgcaatggcaatctgctttgctggtgggtgcggtttccttcgattgacccacaaaaatattcaggattacaaccttcttccgatttttgcaaaccttcgagctactccgaatataacagctttggttaagagccctcgatctagaatacatgcaaccgcgatagccccaccaacaactacaagtttgggaatgttgttcttccctggtttctcagacgaattgtgtgtttcaagctctgatgaatcattactattgctttccaggatgtcagatagtcttgagttactttggtgtttatttgagccatggaagctgaatgagaaagg

SEQ ID NO: 5397 - DNA, 552 bp, Gossypium hirsutum
  Clone ID: LIB3827-002-Q1-N6-E12
tgttttttttttttggaaagcaatcatccattattgtcgaccgaagtttcaaaaccaaacatatttatacaaccaccgaaacaaagcatataaaaactcatctactcttaaatcttaaaatcatcaccaccacttagcattgcagcaactgacagctcctcatctcgctcccgtcctcgcccttgccctccaccgttcacatagttatctttcagttcttgtgatttctgcttcgccgactcgtagcccgaagctatggtatcctttgcagattctatggtctctccagctttgcttttggccgcatcatacccttgtttagctgtctcctttgccttctctgtcgtcgcatcgtatccttgtttagctttctccttcgcccacttcaggctctcccctgtcttttcgttctttttcttagtttcctccgccgcatcctttgctttctcggcagctacctccttcgctttttccgccttccgagccgccctttcctgggccttattcggcatcttacttgtcctatcgggcctgtccctaaccttttccttc

SEQ ID NO: 5398 - DNA, 401 bp, Gossypium hirsutum
  Clone ID: LIB3827-002-Q1-N6-E3
aacaaaagccacagaaaatgtttcattagaaaagaccagaaacattacaaaccagatcagctgcaaatccctgtatcatcttcacatacatcaaaggaagatgaaaagatcacccccaactatacttacattaactaaatttagaaaaaggaacgagctgattattactcgctatcaacaacaaaaccaaattacatattttagctagttttaaactatagtccctttcagaccctagatccagttacagcggtgctggtcttgtgccctggttcatcccccggtgcatgcatcccatagtcggaatctcgataccctggtccgtaccgactgctgaacacaccggcatggatcaacaacacatacaaaagttgagtgaatgtaaggattattatgaatgc

SEQ ID NO: 5399 - DNA, 568 bp, Gossypium hirsutum
  Clone ID: LIB3827-002-Q1-N6-E4
agttaataaatgggggctgaaaatgcattctcacggcatgaaaaacattacagattacagttggcatgtggcacggatgctaatccgacaatgagacatgtctgttcccaggtgttctgtgcctgattacattacaacaatatgatctactgaaatagataatgctatatgactaagttttttcgttcgatgaaatccacaactatgtacaaaactttggatacatatatgatgggtgcccaatctctctaaagaaaagatccaatgcgcatccaatcatggccaactatgaagccttttgcacaataaacttaaaggacttactcttggaatgctggacgatagagagagcataagcaagtccaggcaaagcatattatgcttaatagagtcttattctcgtatcgatggtgcctcggcagatgggacacaactgaaggtcctgtccgcactcacaacaggtctgatgtccacaaccaaaggccatatcctttgcattgcaaatgcaaatagggcatagatgattatctgaagcagaacttgcaggaggagcggtttggactggtgc

SEQ ID NO: 5400 - DNA, 151 bp, Gossypium hirsutum
  unsure (1)..(151): unsure at all n locations; Clone ID: LIB3827-002-Q1-N6-E5
tgtttttttttttttttttttttttttttggtttttttttaaccaaaacaactggggggnatggggnnaggtnttacaaagagcttgggaggggggggcggccagattaaatntgaatagcttaggggntcttttcccaaacggggggggg

SEQ ID NO: 5401 - DNA, 584 bp, Gossypium hirsutum
  unsure (1)..(584): unsure at all n locations; Clone ID: LIB3827-002-Q1-N6-E6
aacaaagttgctattcagttccataaatgattgattacccaaaacttcgaagtccatgaacaaacacgcaaaaaatccgagatagaagagacattttggcgaaattactagtgccgtagttatgagggatgcagatgggaagtctaagtgttttggatttgtcaacttcgaaaatgctgatgatgctgctaaagctgttggagctcttaatggaaagaaatttgatgataaagagtggtatgttggaaaagcccagaaaaaatctgaaagagagcacgagctaaaagctcaatttgagcaaagtatgaaggaagctgcagataaatctcagggtgcaaatttatacattaaaaacttagatgatagtattggtgatgaaacattgaaggaacttttttcagagtttggtaacattacatcttgcaaggttatgcgtgaccctaatggaattagtaagggctctgggtttgttgcattttcaactcctgaagaagcctctcgtgctcttgctgagatgaatggtaaaatggttgttagcaaaccactttatgttgcagtggcgcngaggaaagaagagagaagag

SEQ ID NO: 5402 - DNA, 603 bp, Gossypium hirsutum
  Clone ID: LIB3827-002-Q1-N6-E7
tcgcgatctagaactagcatgaacaaaatctacggttttgagggtgaggtcaggtccaagctgagtgagacatttgtggaactctttgcggaagtattctgttatttgcctttggctcatgtaataaatcagaaggtctttgtcgttcatggaggccttttcagtgttgatggggtgaaactctctgacattagagcaatagatcgattttgtgagcctcctgaggaagggttgatgtgtgaattgctttggagtgatccacaaccttacccaggacgagggcctagcaagaggggagtgggtctttcttttggtgcagatgtgacaaggagatttttgcaggataataatctagatttagtagtgcgatctcatgaagtaaaagatgaaggttatgagattgagcatgatggtaaacttattactgttttctctgcaccaaattactgtgatcagatgggtaacaagggtgcatttattcggttcgaagcccctgatttaaagccaaatattgttacattctcagctgtgcctcaccctgatgtcaaaccgatggcttatgccaataactttctccgaatgttccaatagtgatgccctaca

SEQ ID NO: 5403 - DNA, 508 bp, Gossypium hirsutum
  Clone ID: LIB3827-002-Q1-N6-E9
tttttttttttttttttttttttttttttttttttttttttttttttttttttttttttttttttttttttttttttttttttttttttttttttttttttttttttttttttttttttttttttttttttttttttttttttttgggggggttttggggggaaaaaaagggggccaaaaaaatttttaagggggggggtaaaaaaaaaggggggggaaaaaggtttttttgggggggggtaaaaaaaaaaaggggcccccagaaaaaaaaaggggggaaaaaaaaaacccccccccgggggggtttaaaaaatttccccggtggggggggggccttttttacccccggggggggggacaaaaattttaaaaaaaaaaatttttttttggggggcccggaggaggggggtccttttttttggggaaaaaaaattcccccaacactcccggggggggggggtttatgttttttttaaaaaaaaatttttttaaaaaaaaccgggggttt

SEQ ID NO: 5404 - DNA, 76 bp, Gossypium hirsutum
  unsure (1)..(76): unsure at all n locations; Clone ID: LIB3827-002-Q1-N6-F10
tcgcgatttagagtagatcgcaagcggcagcnctataggggggagcataagttcgcattcaaacaaattaataaaa

SEQ ID NO: 5405 - DNA, 581 bp, Gossypium hirsutum
  Clone ID: LIB3827-002-Q1-N6-F11
tcgcgatctagacaaagatgataaatggtttgcttttgagtcttcttgtagttagttccctagcgatgactgctaccttcggaagggacgatgttatattaaaagaaggccataggttcatagttgttgaatatgaccaggatggcaaacataacaccaaagtctcaatctcatccccgtcgctgcaccagcaaacagaccaagggcaatattttggcaaggaaactatgaaagatattgcatctgcgcttcccaacgttggccatgtagttgccacatcgcgtcactcctccaacactcgggaggctgagcatttacaaggaaatggcagtttttgttcccaagcagttcattacttctccaaacatgacaccatcaaacttgctttgcacaattttcttttatggcagcatcagcttttgttgattcttgaacgttatggtcttgaagggtttgtgttagcaagacaaagggagttgttaacagaagctctctctcaagcaaatttggcttctcgacagcaagataatgaaggtggctcaaaacagtctgttgagtctactcgctattcttagggtcct

SEQ ID NO: 5406 - DNA, 598 bp, Gossypium hirsutum
  Clone ID: LIB3827-002-Q1-N6-F12
tcgcgatctaggtcgcaaccccaaccccaaccccaacactgtttctctgttgcatcctttgtttctctcttcatctcctgcactacttgcaaagtaacgagctgaagccgtgctacaataacactagtgttttcaacaataaattaatcatagctgcagcttgtttcttttaaactctaaatataaaggaggccaaacatgccgcctcgtagataccaatttgggagggctgatgaggccactcatcccgactccatgagagccaccttggctgaattcctctccactatcattttcgtctttgccggcgaaggctcaattcttgctcttgacaagatgtacaaggatacgagtgcgacgcctgcaagactggtgatgatagcacttgcgcatgggttgtctctgtttgcagctgtggcatctagtgtaaacgtatctggtggccatgtgaatccagcagtcactttcggtgccttgctcggtggaagaatctctctcgttcgggcgctgtactacctgattgcccagctcttaagttccattgtggcttgtctcttgctccccctcaccgttgaatgcgaccgggggggttcgccct

SEQ ID NO: 5407 - DNA, 540 bp, Gossypium hirsutum
  Clone ID: LIB3827-002-Q1-N6-F2
cgtcccagaattcatactgttctgtttatttagaagatatgcaacaaagaacgtacttgtattacaaaaagataacacaaacagaagttaaaacaatgaaaagcaacgcaaatattccacccctatattaagggtgtgtgcagtgtgagatcacattttggttttgctggagcgatcacgaataacgccttcctccccaacacgcccaacatcattgaatgtttcatcagatgatctcagtgtagcatcaacggctcctgccggggattcttcaaccttaatcactatcgtctctgaaaacccttcacgaccgtggcgtttcgcatcatcatcataagtcttccttctaccttcatcacctctcagcttcatctcttccatcttctgtctagctgactccgtcgtttcactcaatgtctccttggtgttctgtgcagtctcggatgccttctgcttcgtttcttccgtcttcccagtgaggaaatccatagccctcttagcagcgtctgcagctgaatctttcaactccccaagcttact

SEQ ID NO: 5408 - DNA, 502 bp, Gossypium hirsutum
  Clone ID: LIB3827-002-Q1-N6-F4
ccaagtaaaacaatagatttcagaaagaactgtaatgtgataaatgatagttaaaatataacataaaccaaatgagtaactaaactaaattcatagaaaaaaaaaacattggtgaaaagcaaatccgtaaaaccctacagaagctaggacaggaccagccagctttcatccaacaagtttttcgacaaaaaaaaaactctagatatgataggtttaagcagcagcctgagcagaaagccttttcctcgcttcctaaatgatcgacaacttgatacccttgcccttgggaagcgaaatccatggctttgttcctttaccgattgtgaaaacattgcctaaacgagttgcaaactcgtgtccagcagcattttgtacatggattgtctcgaagctacccttatgcttttccctgttcttaatcactccaacacgtcccctgtttcttccaccagtgaccatgacaacattcccaacatcaaacttggtgaaatcaacaattttg

SEQ ID NO: 5409 - DNA, 491 bp, Gossypium hirsutum
  Clone ID: LIB3827-002-Q1-N6-F5
ataatatattaatttaacaaagttcaatcaaatatatattatatatccttataaaagtaagagattataattaaaaatataaaaagttgttatcaaattaatatttacctgtttattaattcatttgcaatgccttgagcttcttttaatagctccaagctttttgcacagtcatcatccgttgttgcagacttcaatttcgaaagcaagtccctgacagcgctaacgaattcttctgaatcctctgtcctttcaccacggaagctagcagtagattttaatacaattgcttgtgtttctagttcttgatcactagatggtgtttcctgcaactgcttttctcctgattttttcctcgctctgctgctttcaatcatttccagtcttgtagccattatcattgctttattgatacacgatgaaggcagctgcgcgagcagagcaaccttgataccaaaactccttgcagaaacaccagggacaagcttata

SEQ ID NO: 5410 - DNA, 531 bp, Gossypium hirsutum
  Clone ID: LIB3827-002-Q1-N6-F7
aaaaaaaaaaaacataaaaaagggttaaagggaacaaaacaaaggcggggaaatgggggggcttaaaacaaatttccgacggggatggaaagggccattttgggccaaaaaggaccaccacccttaggggcctgggtttcaaggtttgggcccacgttttctaccagggccaaaatcccttttttgggggggccttttaaaactcggggggggggggtgggccttataaggggcttaaacccataattgggggaaaacagccccgtaaacccgaagggtcccgaagaaaagaaaacagcccccgccatggaaatggggatggggggggggaaaaaaacgggggtgaaaaaaaagaaaaggggaatggggattctaaacccgatgggggggccagggggggtaaacccttccaaaggaaggaatgggccccccccggggggggggggggggaccgcgtcaatttgggggggtgaagggcccttttaaacggaggggggggggggggagaaaaaaaagaattttggggggggg

SEQ ID NO: 5411 - DNA, 596 bp, Gossypium hirsutum
  Clone ID: LIB3827-002-Q1-N6-F8
aaagtggtaatttagtgaattttctgctttagcttaaagttaagcacactacactctttataagaaatactaccgattattaagataaaagattttgaactcaaaaccaaaacaaaatacaaaggcacccaaacatctgcaaaacattctggctctgctctgctacggtgatcacatgcggtggcaagtttctactgtgatctaaccctgtgattcaacatcatctcccggagatccgccgcatcgatctcagccccacagttctccggccggtaataccccgtaacagggtcaggcgcccaagctgaagaataagcccttgtctccgacgacgacgactctttcatcgcatatcttcgttccactttccccatcgctccaggcctaccaaagctagccgtcactgccgccggcggtgcacctgagtaacctctccttgatatggagacataaagagcatcaaaaacagaagcaccaaggaacttaaaggaagaaacagagcgagccatatttatttttacttgcttatatatggagtcgtagggtaaaaaggatgtataaaatttatataatatataacgttattattagctact

SEQ ID NO: 5412 - DNA, 584 bp, Gossypium hirsutum
  Clone ID: LIB3827-002-Q1-N6-G10
gcgaaataaggagttcaatctgatgattgtattattttgtaactcattcattggattcaaactttactttcccttttctttcacacaaaaccatgaaattgtatttttttccaactacaacaagcaacaacgaagcaaaaataggtacagaaaaaacgataaggtcttggtttagtaaaacaataatcgagagagaatcacacatattgggagtcatccaccgcaggtggctgttcgtcatcgtccgacgcttccttcttggatcccatctctttcctttcgttccatctagcccaaatccatttcagtaaaaagaaaccaccaatggcatatacctgccagagaattacacgattggaagtccttcctgtctggtcggcctcaagcgtcaaaggcggtggaacagccggccgaggctccgaaaacttcacctcatcagctggcttattagttgttttcttctcctcgctcaactgttttccgttgggtttcttttcaatcacaacttcaacactgcgttttctgttgaagggaagtttgggtaacaatagccacaagttcctaggggaattttgagttcttat

SEQ ID NO: 5413 - DNA, 584 bp, Gossypium hirsutum
  Clone ID: LIB3827-002-Q1-N6-G11
acttagcagcctatttcatgaattatacgagctcactgctaagacatgcatgtcgctatcatacaatactctccaaaagaggcttgtcaaaacccacacaaaccttatccgaggaacaaagcatgcgtgacaataaaaggttttaggcaaagaagattttacccttatcagctgagaaggctcagtagctaaatatatttaagaacatccatggcgaccttgagctgccagtttcatcttgctatccatcgacttccttgcaatgccagagttaggccttccttctcttgctcagtgcaaccctctcaaagcaatattaaggtagtggttcaatacatgtcccttgtagatgacctgatgagatactaaacttggcattgattacaggatcttccctcaccagatgccatccagattgccaacaacctctccaaccttggtcagatttgagtggtccatacaatttcaacagcatctagtgtatggcctggagaaatttctgtagaaccccattattcttcaagctccttggtgtataacaagatacttcacagatccagtgaagaatcagtttcatcgaaata

SEQ ID NO: 5414 - DNA, 131 bp, Gossypium hirsutum
  Clone ID: LIB3827-002-Q1-N6-G12
aaacgaaataggagcttcttctcattcattaggaatctgactcacttccttacattaattatgtaatagtcacaatatatcctgagatagcagagatgctcacactggacagaaaaacaagtaaatattag

SEQ ID NO: 5415 - DNA, 72 bp, Gossypium hirsutum
  unsure (1)..(72): unsure at all n locations; Clone ID: LIB3827-002-Q1-N6-G2
ggttgggggtttttaaaaattttttttttttttttttttttttttttttttttggggggggnngnngggggg

SEQ ID NO: 5416 - DNA, 366 bp, Gossypium hirsutum
  Clone ID: LIB3827-002-Q1-N6-G4
ggaagcaagaacggtttttatttatttttgaaatatattattttataattttaaagtttgatatacttgtatcaatcaacaagcacgtttgctttgcaattattatcattattactacttaaggtgggagttacagttaaatagatagatttctagcttcacgccaacactgccgctatcttttcctcatgatgaaaggatcggtatctgccagtgtgagttttttcttcttaatgcgttaatgtatgcaggtatgtagataggtttatctgggaaattttctagtaattcacggttgctttgatagcatccaaaatcttgttcttggttggcatatagaagggttcaaaaacaagagggaatggg

SEQ ID NO: 5417 - DNA, 532 bp, Gossypium hirsutum
  Clone ID: LIB3827-002-Q1-N6-G5
cacttccccagcattatatataactttaaaaaactacatatagatgatgaagctatgtatatattattatgcgttgacattctcattaagcctagcagctgccgccatagatgctgccactcctcctggatgtgtggctacatttggattgtttctcagctctgcactcaccactccttcagcatcttgccttgtcactgctttatccgccggtaacttcgccgttgcacccgttaaaacttgattcagcttgatcttttcctcatcgcgatccagggtcgcgttatgagccgcggcggattgagcagtagcggcgagtccgccggggattatgacattcgaaccagtcgctcgaacttccgcggcttgaacggcagcggcatcgctttgatcgacgggcttgtcgcccgctgttttagcggttgcttcgagggcttcacctatggttattgcgttttgctgcacagcgcccacttggcttgtcataaccggggttgcttgaacatattggcccacaacctggccagcgact

SEQ ID NO: 5418 - DNA, 504 bp, Gossypium hirsutum
  Clone ID: LIB3827-002-Q1-N6-G6
cacaaaacaaattttttgctttatattagccatccctataaaatattgtgcacacttgctatgttgagaaaaataactacaatcttctcttaactattaacaaacccactgcattattgttgcgggatcacgccatcacatgaagtatagttttgtcactgctgcatttggtaccccataaacatacttccaattgctaccatacacacaaataggagaggaaatcccacttgaactcttcttacatcactctttttcctcaacagcgccagttcctcttgtaaggtcttcctctcttgaacagttaacctcctctcctctgtcagttttgaaatggttgcttcagccttgcctagctttgattcaaggtcacttaattttgatttcatttcctccatatctttggcaaacttaagatcctcatcagtcttcaatgttttcaccttgtaatccttcacaggcttcaattcctcggtctctaaaatatcctccattggctttgat

SEQ ID NO: 5419 - DNA, 496 bp, Gossypium hirsutum
  Clone ID: LIB3827-002-Q1-N6-G7
ccaacgaaactacaagtgcgtcaatagaatatatggaaaagaaagtcacaatctgtacacgatccgtaaccataacgcacattacgactcataacgcacattacaacccaagacgttcattttatggataatagattgcaggacttttactagcaccaccaacactatgaccagctaattagttacaacgctctttcttcatcgacctacgcatcaccgagcatgtccatgataggttgcaaagtcgtagatgtttgaaaaaaatgcttaaattgaccgtctaaagcatgcaaaaggagcattaataaccgtgactatttcaagtagtataatagttataaagtaaagagagagaaaaaaaaaagtaagagagttacaagactgggaacttgtattacccctctcactctcatcacccatatttacaacggttaaaacaaatgaaattaaaaacctgactgacactcgaagacacacgaccaacacaacgggtttt

SEQ ID NO: 5420 - DNA, 348 bp, Gossypium hirsutum
  Clone ID: LIB3827-002-Q1-N6-G9
agaactaaagacttttttgttacattgaacgaaacaaagggtttcacagcgactttgaaattgaacgaaacaagggtttcacacaagttataaagcacgaaataaataaaaagaatgttccatatctttcccatatccaaagcacaatggcaagttactttaagaaaaaacacctccttccttccccaaaacacataagaaagctgataggtattacacaccaaccactgtcatcccatggcatacttctgggtccagctacgagcagtggcttcatacttggcccgatcggtcttatacatgtgagcaatctccggaacaagagggtcatcagggtttggatcggtc

SEQ ID NO: 5421 - DNA, 491 bp, Gossypium hirsutum
  Clone ID: LIB3827-002-Q1-N6-H1
gtaaacttcacccatttcatttagtactaaagatcaaacagcaagtcaaaattttctaaaacaacaaataaagataaacatccttctactcagcagctgtaatccaaataaagaggtaaaacaacaaaaaaccatggtaccaaagaaattactatgacagaaaaataacatggcacccataactatgacttgagataacaatcattcctcttcggcgatcctgcccttttcgctaacatagataccgtcaagaaactttctaatatccttgttcttcacatgacatttctggtttatcaaagctgctgagcgagacacgagttcaatatcattaccatccaaaacgatctcatccttaaccttctcggatcgagtaatggaaaccccttccaacatatccaccttacgcaccttcttctcgccaaggaagttacggatctcgatggacttgttgccgccagtgattgaggcgttgatcggaaagtgagcgt

SEQ ID NO: 5422 - DNA, 166 bp, Gossypium hirsutum
  Clone ID: LIB3827-002-Q1-N6-H10
gggggtttttttttttttttttttttttttttttttttttttttttaaaaatatataggtatttatggtagttcgctaattttgacattggtctaaattttctagctgccttatgggatcggcttttagacttttatgaaaatgggggggggggggttgtggattt

SEQ ID NO: 5423 - DNA, 562 bp, Gossypium hirsutum
  unsure (1)..(562): unsure at all n locations; Clone ID: LIB3827-002-Q1-N6-H11
gcacataaaatantctgaaactcacacctgaatccggttaacataagagataagcaacagtgaagtatgataatcacctcagcagatagcatttgatggtcagatttggccattccttttgaaaaagcaccaactggggcggggttaagtaaaggagggacctcgtaaaagctacatttctcaaaagcctcttctacagataatattggttctaaattcttcttgtcataatcaaccactgcaagtttggctgccatatctgcatttttctgtgtatctgcaaccaccaatgcaatgcgctgaccagcacattgagtaagctcatctgcataaaggttcagaaccaaatatggtctgagcccctatattctccccaggaatatctttgaaagagatagccgtggagactccatggggtgatgatccaggctaaaattttatgccctgcacccgtgccaaaggctctgtgctataaataaatgctccatgcagacagtttctcggagatggaatgtcatcctcataaacagcctcaccatgaaagcaaggaccagccactttc

SEQ ID NO: 5424 - DNA, 436 bp, Gossypium hirsutum
  unsure (1)..(436): unsure at all n locations; Clone ID: LIB3827-002-Q1-N6-H2
ggtgttttttttttttttttttttttttttttttttttttttttttttttttttttttttttttttttttttttttttttttttttttttttttttttttaaaaaaaggggggtgttttccaaaatttgttaccagggggggggaaaggggaaaaaaaaacaaacttaaaaaaggtaaggggaaacggggggtgggaaaaaaggaaatgggttaaaaggtgtggggaaaaaataaagaaagtggtttggaaaaaaaaaaaaggttttaaaaaaatgattttgctcccaaaaaccttagtaactactaaaaaaaaaatttggaaaaatttttttttaaaggaagggaaggaattaattaataaaagggcaaatgggattttaattattgggcttgggnttaaatttaaaaaatgggaaaaatttaaaattttccctt

SEQ ID NO: 5425 - DNA, 428 bp, Gossypium hirsutum
  Clone ID: LIB3827-002-Q1-N6-H4
gataagcaaatcaaaacttcaatgtctaatatttataacatttctagggaacaacagaacataacataaacttgaatattctaagtaaaagagaagaaaaaaaccgcttttagtattaaatccccactactactttcagtccgtacataacagaaggtaaaacataaactcaaaagatcctgtttgaaggacccatggtgctcttcaagtagaggcacctcacattttgccaatttttcttcaacaaagaaacaaggaaattgacgctcatttgcacattttggaagatctgcttctcctccattgcaacattcccaacagcaactcccatgcatagaacctttttcagctggaacttaaccattgcctttgtttcattcaccttcgactctagggattcctggtgagtgacaagggttgggaattta

SEQ ID NO: 5426 - DNA, 326 bp, Gossypium hirsutum
  Clone ID: LIB3827-002-Q1-N6-H5
ggggtcttcaccactactctgtcaacttcacaattcacacttcaacatctatacaaattacagggatcatcaaaatgctacaatattctattgcactggtcattctttgcttagccttctcacgctcttcaggtacatcatcaatccagtaaggaaaactatacagcattctagcaaattaaaagtaacgcttcacgggtacgtccgaggagactcaatgtggttgcagcaatgtgatgtccagtcagcccagcaagagcaagctgttctttcggtgatgcatgctcgatatagttgtctggcaagacaattggtcgccacttgag

SEQ ID NO: 5427 - DNA, 160 bp, Gossypium hirsutum
  Clone ID: LIB3827-002-Q1-N6-H6
ggtggtggccaaaaaacccttttctttttttttggcaaaggcatttttctttggttttaaaaactgggcaaatttttcttttttggtccccttgggctggaaagcccattggtttttgtttttgttttacccaaacccaaaatttcattggggttaaact

SEQ ID NO: 5428 - DNA, 475 bp, Gossypium hirsutum
  Clone ID: LIB3827-002-Q1-N6-H7
catctataaacggaatcaaagctgttgatatagactcgatttccacgcctctgttttggcttgaaatataacagacactaatggtatgtagtactttatgactctaatccctttaacaagctctttaagttactacactcgtacgggtacaacacaaaccactgtaaaataatattacaaaccttttcttgtatcattacaggactaggctagcaacaaggatagattctcaagttggcttttgcttctcctggttagcatcgatttgcttgcttgttctttagtagtatttcatctggtcggcaatggaggatgacctcaatcatgggttctttggtaaaattcttcttgaaggggctggaaccggaaaaccaatcccttcataggaaggaagataggtgcttcttttttcttgaaccccctttttcggacaaggcattccaatggtttaaactattcatttcaacttccttaa

SEQ ID NO: 5429 - DNA, 532 bp, Gossypium hirsutum
  Clone ID: LIB3827-002-Q1-N6-H9
gccttcgatccaccccatataaaactccccacaatcacctgctcatgatatataattaaattcccagtaaagcatatggtaagtttaaatgatttaaactttgaaatggtattactatgatggcttcctgctttttcaaacttgcaatgaagcaggctaacttaatttttagttgaaaaaatagacagctagactgggatctcaatacctgcacggggcttgctgcaataagcatccctccaacacctcccccaatgacacggccatcaggactggcaagagaaacactaagaccaccagttcgattgcgagagccagtattgcttgtcagcaggtacgagcctgacagacataatatctcaaatcgtccctcgtacgtaacagtgccacccgacgatgacggctttcgaagagttacggtagatacggcaccattggctgacaaaatgcataccttttttggtccttgctgtgaaaatgacattaatttttgttgcaatgtcttcttcctattgcaatgggtgatgacatg

SEQ ID NO: 5430 - DNA, 651 bp, Gossypium hirsutum
  Clone ID: LIB3828-001-Q1-K6-A1
tgtaagcttcaagtgctaaaatctagggatttgcgggtggagaagacgagagcccatctctctgcttcaaagctcctgtccaggtagaattctcttcttcccttgcgttgtgttctttgctgttcaatcgccatggcttcaaagcggattttgaaagaactcaaggatttgcagaaagatccacccacttcttgcagtgctggtccagtagctgaagacatgtttcattggcaagcaacaatcatgggaccctcagatagcccttatgctggaggtctgtttttagttactatccatttccctccagattatcctttcaagcctcctaaggtcgcgtttaggaccaaggtcttccatcccaacatcaacagcaatggaagcatttgtcttgatatcctcaaagaacaatggagccctgcactaaccatttccaaggttctgctctcaatctgctcgttgctgaccgatccaaaccctgatgaccctcttgttccggagattgctcacatgtataagactgatcgggcaaagtatgaagccactgctcgtagctggacccagaagtatgccatgggatgacagttgttggtgtgtaatatgtatcagctttcttatgttgccaactgtgtcgaaccatttttatgtttcttt

SEQ ID NO: 5431 - DNA, 618 bp, Gossypium hirsutum
  unsure (1)..(618): unsure at all n locations; Clone ID: LIB3828-001-Q1-K6-A10
cttgcaactaagctcggtgcacgtcttactgatgttaggaagatggcacctgcccctggctaaggcctgatggtaaaacccaggtcactgttgagtactacaatgacaatggtgccatggttccagttcgtgtgcacactgtcctcatctccacccaacatgatgagactgttacaaacgatgaaatcgctgctgacctcaaggagcatgtcatcaagcctgtcatccctgagaagtaccttgatgagaagacaatcttccaccttaacccatctggccgctttgtaattggtggtcctcacggtgatgcaggtctcaccggacgtaagatcattattgacacttatggtggctggggagcccacggtggtggtgctttctctggaaaggacccaaccaaggtggacaggagtggtgcttacattgttaggcaggctgccaagagcattgtagcaaatggacttgcccgcagatgcatcgtacaagtctcctatgctattggtgtgcctgagcccttatctgtcttcgtggacagttacggaaccggaaagattcccgacagggaaatactccaaatcgtgaaggagaactttgactntaggcctggtatgatcacca

SEQ ID NO: 5432 - DNA, 586 bp, Gossypium hirsutum
  Clone ID: LIB3828-001-Q1-K6-A11
cggtcgcgtgggcggacgcgtgggtccgaatcttttacagctcgtaaactcgttgaattgactcatggcttccgccgttgcttccgttgctaagaagaaaaccgctggctccaagaagcctaaatcagctccttcacaccctccatttcttgagatgatttcagatgcaatcgtttcgttgaaagagaggacaggatcgagccaatatgcgattgcgaaattcattgaagagaagcataagcaattaccggcgaatttccgcaaagtcttacttgttcagacgaggaagtttgttgcttccggaaagctcgtaaaagtgaaagcctcttttaagctgccttcggcttatgccgcagctaagaaaccagccgccgtagctaagaaacctgccgccgcgaagcctaaatctgcaactaccactaccgccgcaaagtctaagccgaaggcgactaaaaccgcgtcgaaagcgaaagcgaaagctaaagttgcaacgcctgtgaaggcaaaggctaaagttgcggcgaaaccgaagctactacaagtaaggccaaagctaaaccagcggctaagccagctaaggtagcga

SEQ ID NO: 5433 - DNA, 663 bp, Gossypium hirsutum
  Clone ID: LIB3828-001-Q1-K6-A12
gcaagtttggggaactggattccaggtggaggaaccctaaatgcaacggcaaactccctccaggttccatgggactcccacttataggagagacccttagtttttttgtcacttccaactccattgacatccatccttttgtcgctcaaagaatgaaaaggtatggttcattgttcaagacgagtttagcagggagaccagtggtggtatcattagatccagatttcaactatttcgtgctgcaacaagaggacaaacttgtcgaactatattacatggattccctggccaagttggttcaccaagacgacatgaaaaacataggtggcgacttccacaagtatttcaggcgcgtcatcctcagtcacttcggacatgagcctctgaaacacaagctcttgtctcagtttgaggatgtcataaaccatgaattgcaggactggagcaagctgcctcaggttgatcttaaacaccaaactgcttctatgttatttaacacggcctcaaagattctgatgagctgtgtaccagaagaaaattaggtcatgatttgagcgacatcttgcaaggacttatgacatttcccgtatattttcctgggaccgctttctacaaatgtttaaagaagaaagaaaagcattgaagctgacgagtggggtgcta

SEQ ID NO: 5434 - DNA, 114 bp, Gossypium hirsutum
  unsure (1)..(114): unsure at all n locations; Clone ID: LIB3828-001-Q1-K6-A3
cccggngtcgacccacgccgtccgtttaaaaaaaaaaaaaaaaaaaaaaaaaaaaaaaaaaaaaaaaaaaaaaggaaaaacaaaaaaaaaagaacaaaaaaaaaaaaacacaga

SEQ ID NO: 5435 - DNA, 642 bp, Gossypium hirsutum
  Clone ID: LIB3828-001-Q1-K6-A4
ccgtcatcccccataattacacactcacccctttttctttctccctctctcggctcagctttgccgttgccgttgccgttgccgttgccgttgctggtgcttttcttctttttccctttaataaccaaatgaggaagggagctaagagaaaagccgcttctcatgagcaagaggagaagcaagtaaaggcttcgtcttcttcgcaagagaatctcaacaacaacaaccgtaaacctgctcccaaagctaagcttgctaagacctccaagcctcagcccgagcctgagtatttcgaagataagcgtaacttggaagatttatggaaagctgcattccctgttggaacagagtgggatcaactggactctgtttaccaattcaactggaacttttcgaatttagaagatgcatttgaagagggggggaaactatatggaaagaaagtttatctctttggttgtacagagcctcaattggtcccttacaaaggagaaaacaaagtcatttgtatacctgtgattgtggctgttgagtctcctttcccaccttcagataagattggtattaactcagtgcagagagaagctgaagagattgttcccatgaaacaaatgaaaatggactgggttccatatattccac

SEQ ID NO: 5436 - DNA, 545 bp, Gossypium hirsutum
  unsure (1)..(545): unsure at all n locations; Clone ID: LIB3828-001-Q1-K6-A5
cggtcgcgtgggcgnaaaacacaaccttaaaatagatttctagggtttttttgttagcagccgaaccaccatcgttttggtgatcaatcaacatgcaaacagtacccatcctccctgttgaaggcgctcgaccatgcttagagaaaattagctcagttgtacggagaagatgacccggtgacatggacgccacacactgggatctcgcgtgggaaaccgtccctctggtgcccttccagtgtattccaggagctgctactaaaattctctttcttttgggctctttcgggtttgggctagatttaggatatgagtttattagaattgggttttaggacttattgtgtcatgggttattttggtaattgggttgggtctatattaaaggattttgggtttaagttattttggcccaaatatttgtaactggacataggacttctgaatttgaattctttatttatgggtgttttttattcaatttatttgtttggcctattttaatattttaaaagggcctgggcaaaaaaaaaaaaaaaaaagag

SEQ ID NO: 5437 - DNA, 577 bp, Gossypium hirsutum
  Clone ID: LIB3828-001-Q1-K6-A6
ttcagtatgtttatcggcgtcctatggtaagaggaccggaatctccaccatggctgacggagccgatgggtttcaaccaagcaacggttttccgcatgaagctgatcctgattcttcaacctctatcgatcctgatcctaccggattcggtgctggcataggtataggttatgaaagaagcccttactgtatcgactgcgacgatgtggatatcatgggcggcagcttttgcggcacctgcaattacggatgcccttaccgcaggttcaataatgggtgtggtggtggtatcgcttatatggatgaactcaaacgaacgattaaggaccttaccatgaaacttgatgccaatggtcttttagggaaaaagaaggccatgaatatacaagctatggcgccagaatcttcatagatttatatatagattatagaaactacggattctatacaaagagaaagaaaataaagaataaccaagcagcttgatatatgattgaattacaatgtgctagctgtttttttttatctttaattattatatgaataaaagagatttaaagtaagcttgattgaaaaa

SEQ ID NO: 5438 - DNA, 373 bp, Gossypium hirsutum
  Clone ID: LIB3828-001-Q1-K6-A7
caagtagcaagaatgtccgctatggatagttcaagcagaaacgcaggcgacatgcttgatcgcttaactcttacatataacagaacccgtcaagcatcaattaccactgaactgattgagattatatccggagcatcggcattggaaggttgaacaaaaagaacaagtgctatgttttcgggacagtgacgaaataaaatccgagtgaacaactgctatgttcggacttgttcatggtgctactttgtgaaacattttggtggagctagtgcgaataatgacctatccattgtcaagtgcaatgtaaatgtgattttatttttgatcattcattgacatcagcataagttggtaagcatttagagattggacg

SEQ ID NO: 5439 - DNA, 555 bp, Gossypium hirsutum
  unsure (1)..(555): unsure at all n locations; Clone ID: LIB3828-001-Q1-K6-A8
ctaaatctgatttagttgaagtcatatctcttgtaattttcattatctcgtttctagtttttacatgttaagttttggagcttttcaacagacctttgaggaagctgatacaaaacatgacgggaggatcgacaaggaagagtggagaagccttgttttgcgacatccatcccttctgaaaaatatgaccctgcaataccttnaggacatcaccacaacgttcccaagctttgttttccactctcaagttgatgatacctgagatcagcaattcgattcaagcttccatagaccggcttgtttcattctaggtggtttcaaatatgaatgccccaagagctagtgtatgtgatattctggtttattggttaaaaacaattcctagtgtgggtctaaattcaacaggtgaacaatcgtcatcttctttttcttcttcttgtcagtgttattggataattggtacttccagacgtgctgaaatatttaggttgtatttttcactatggtattgcaatgtaaaaagtgatgctccctttggttttttatttttaaatc

SEQ ID NO: 5440 - DNA, 638 bp, Gossypium hirsutum
  Clone ID: LIB3828-001-Q1-K6-A9
gtcgacccagcgtccgaaatatgaatctttattcttaattgaatcaagagattccaacttgaaatttaagaaatggaaaagtggtcaaaatgggtcgttttcttgtttttttgcttatcagtttgtatccgaatcccatatgtttcttcgtctactgcccctcttcaaggaaatcagggtaacaaaaaatcttcagctgcaagaacctttaagctagaggaggatgttcatgtagtacgttgttcaagagaaaggagtagagcagcatggaaagtaattgaagagtatctaatgccgtttgtggagcaagagcgatacaagatttcaagtggatgtaggcttcaccctgacaatgatttgtatagagatcaggaacagcacaagcatcatctagatataaacgaatggcgatgtgggtactgtagaaagaacttctatgaagagaagtacctggataagcattttgacaacagacattttgatttgctgaatacgagtcatagtaggtgtctggctgacctgtgtggtgcattgcattgtgaccttgtcatggattcttcactccgcaagactaagtgcaatcctgctgctgctgcaaggaataaacatctttgtgagagtcttgctgatagttgttt

SEQ ID NO: 5441 - DNA, 396 bp, Gossypium hirsutum
  Clone ID: LIB3828-001-Q1-K6-B1
ctcagtccccttctccccataactgtgcagctgcttcattcgccaatacaccattcacaaattattcggtgatcaaccctcatgaatcagagattgttcagctagagcttagtgtgtgtgtgcgtgttcacaatcttgtttgccttatcccttagccttagcctgccttgatttttttttatactttcaaaccacaattcaaccccctccaaatcttctttcagtgtttccttttttttttcctttttgtagcattgatccatgaaatttaatctctaggtttcagattaaattttgtagtttcacattctcacttgtgttttaatttaatatttacttactttttcatgcattaattctcttcaataaaaatgatagtataggtttgaagatgtt

SEQ ID NO: 5442 - DNA, 525 bp, Gossypium hirsutum
  Clone ID: LIB3828-001-Q1-K6-B11
ttttttttttttttttttttttttttttttttttttttttttttttttttttttttttttttttaaagggaaaaaaaatttcccccccccctgggaggggttctgggcaaaaaccggggggttcccccgtttccgccccaaaatccccccacctcgtcggggggaaaaggaaaaggattctttcgaaccgggaatcagcggggggatcgcgttttaaaaaacaaaagcttctcgaagatttattttacgaaggggggggcttgcaaaaaaataacccccctatttgggaaaaaaaaagttcacaacccaacgcttcgttaaaatggaagcttccaacagggttttaagagcccaagtaattgaattgaccgagagcttggagtccttgaacccgatgctgtaaaggggggaaaacataagcgggtaccacgtccatatcccggagatcccccatcctttgatgaaaccgtggaaacttctttgggcgacgcaacccatatgctcgacttttggggggggcaccgg

SEQ ID NO: 5443 - DNA, 648 bp, Gossypium hirsutum
  Clone ID: LIB3828-001-Q1-K6-B12
cggacgcgtgggttggatagaataaacaaggtatgattgcaaggtatgattgcaagcaaagaagcagattccaaaattactagcagaggtatttaatgttcaaaaaagaatagtttgatatgagcatgctttatctgttgacacctttcataaactagtttctgcgcaaatcacgtatccttttcataaactagttttagttcaatgcagtatggtacttaatttgttttctataattccttgaaaagattttatattacaaaataagatcattgtctatctttaagttttgttcctcatgaagtttgaacatagatttgttgaccagaatgttgtgtttcatgttttcacttagaaataccctttgtaacttttttaaacatttaccttattttggccaactgaaatcttattacttcttatctacatgttttttattcaattattggatattctgtttgattccgtgttaaaatgtggaaggtgttactggattatggattggcattctgtaactattttccttgacaaacttagaaataaagcaatcacattcactatttttcaagccacttgcgtcttactcctctatgttgaatcaaattgaggaattgctaagtgctagagactataaagctgccatgcagc

SEQ ID NO: 5444 - DNA, 634 bp, Gossypium hirsutum
  unsure (1)..(634): unsure at all n locations; Clone ID: LIB3828-001-Q1-K6-B2
ccccgcgtccgcggccgcgtgggtttttctcctctctaatggggttttcaatgacaagaagacatactctcttattgctctcacctttctcaccatttcctttccatgtttagaaaatgccaatggttgttgcaatgtatacaaaggtaagtgggtgtatgacagctcctatcctctctacgattcatcagcctgtccattcatccacaaggagtttaattgcctcaagtatggccgccctgatcatctttaccttaaatatcgatggcaaccaagcaagtgtaatttgccaaggtttgatgggacgcatttgttgaggagattaaagggcaagaagataatgtttattggggactccataagtataaaccaatggcaatctctgttatgcatgcttcacgctgcagtgcctgctacatctggtataatcacacaagacttgcataatcacactgtttccactgttactttcaagcattataaggtatccgtgatgctatttcgttcgttgtacttagtagacgttgataaggaaacaattggcagagttctgaaattgaattctgtaaggaatggaaatctatggaaagaaattgatgttntgatattcaacacttggcattggtggcaccgt

SEQ ID NO: 5445 - DNA, 585 bp, Gossypium hirsutum
  unsure (1)..(585): unsure at all n locations; Clone ID: LIB3828-001-Q1-K6-B3
gcgacaagnacgcggttttcagaaagctgaaagcaaaatcagaaaacaagatgtgtttncgattgtaatgcgnaaaaatccanacatgggcgtcggtcacgtatggngatctttctctgcatcgattgctcagccgttcaccggagcctcggtgtgcacatcagctttgttaggtctacaaatttagactcttggtctcctgaacaattgaaaatgatgatctatggtggaaacaaccgtgcacaagttttctttaagcaacatggttggactgatggaggcaaaattgaagccaaatatacttcaagagctgctgatttatataggcaaatgctatcgaaagaggtggctaaaagtatggctgaagatgctggtttgccttcatcccccgttgctcctcaattgtcagcagcaactaatggattttctggcagcaagattgatgaagttcttaaagaaagttctttaggcagtcaagaaaaacccgaagtttctactgccccaaaagcttcccataccgttgttaccagtgctgtcaagaagcctcttgtgcccgaaagttacagggaagaccgggggctttgt

SEQ ID NO: 5446 - DNA, 615 bp, Gossypium hirsutum
  Clone ID: LIB3828-001-Q1-K6-B4
gaaattcctctctttcaacttcgtctcctgacctcccctagtctggctcgcttaccccaccataccttgtttgatcttcagcgtacttaagaactcccatttccagcaggctatggcttcagcagcaaaagcagacgatacgtcattgtgaatttctaaacaggataagagaactttgccttccgaatctctggccacaatacctgaagctgaccggttctggctctccttatattcaccgttaaagttaatcttgatgacctcctactgtggatggcccagagtgcacaacagaaaagccgaccttgacaagcgttgagctgctctatcacccagggcattctcggaatagatgattcatagtttcaacattgtctccacatcgaggacagcttgtacttactgctagcttcatgtgttgcatatttacttttgtaggcagatagttccatgacagcctccatattgtaatctttacttttgttggtagattcaggctccagagttgtttacagaatttcctgtagatggtatgtaaagcataagctctaggattaccattcgatctctgtaatagtttataagcactgcggactctgaattcgctcgacgtct

SEQ ID NO: 5447 - DNA, 622 bp, Gossypium hirsutum
  unsure (1)..(622): unsure at all n locations; Clone ID: LIB3828-001-Q1-K6-B5
ccccgcgtccggnaatggcaaatattcccataatcgctcttttctgcttcaccatttttgtttcgtcctcactcaatttcgtctatgggggctgaaaatatgagctacgtcgtcgtaggccatgtttactgtgacacttgccgtgttgagtttgagaccaaactcagcgaacccatcgctggagcagtagtgaaactggaatgcaggaatcgtacagacaatcaccttaccttccagagccaagaaatagtgactgacgaacgtggagactatcacattgtagtggaaggcgattatgaggaatcagactgcgacgtcgccttggtgaggagtcccaacccggattgcaatgatccctccgaaatgtggaggatatccagggtggttctcaccacacttgacggcgtcagcggtgaacttcggtttgccaacaatcttgggtttaagaagaaggttgctcttcctcagtgtactcaagttcttcaagagataggctattatgagcttagccaagaagctggagacattgccccttggtcagaactataatatgtattttcacttcaactttttctaaanagctcgcattagcctataataaaaattgaatcattattattct

SEQ ID NO: 5448 - DNA, 640 bp, Gossypium hirsutum
  Clone ID: LIB3828-001-Q1-K6-B6
aaaaagaggcgtctgtaataaaatctgcaatcttaattctgtcggtgtttttatctgtaagcttcagttcgggtgttaggttgctccaggaacagcccaatgatgacctcaaaaactggacgctattcctcccattgatgcactcaaccctaccgagttcaatggacccggtgttggcattcacgaagatcatgttgtcccaaaaggttccgaaattggtactcttggttttggttttgaaggtggtcctgaaaaatgttgttcttctggatgttccggtaattgtaatcctggtggtttcgttctaccatttcctcaaattccagaaatcccaagaattccacagatcccacagatcccacaaatcccacaaattccactaatcccacagatcccacaagtcccacaaatcccactaatgccaggacagtcgggatgtgagagtggggagtgttgccgtcagggttgcggtgggacttgtgctgagtgtggtcagcccaggtgcgcatcaggatgttgccaggctgaaactgtaaagagcaaagggatagaagaggttatggacagtgaacccagtccaccaaagtagggagatgataccatattaagatgaaataatgagaagaagtggttgtcgtcg

SEQ ID NO: 5449 - DNA, 629 bp, Gossypium hirsutum
  Clone ID: LIB3828-001-Q1-K6-B7
gaagccgtgcgagagaacatccaatccctggttcacgttgttatcgttttgtttagaaggacatagcagtctccattgtcgcggaaatacagaaggaaaagaaaagggtcaaccgaacttcaccacggcaacaattaaggcacgccaacatccaaataatcccaatcatcttccagtcctataacattgacaatgtctagcccgatgattcttaagaacccaaactccctccaacggcggcaaccgctgctgcacagccgttccaacagcgtcgatagctgcatcacctctcgcgggaacaccaatctcaggttcggggaggtttgcggcggtactaccgccgacgttgcggctgtctgttgctgttgcccatgtgggttagccaaccttatggttctagcaatatacaaggttcctgcagggctgtaccgccgtgctctccgccagaaacggctgcgcaagttgcacaaaaaagggttacttcaaccaaagaaccacggcgcccatttccgatgtaatgatcccgaattactctctctcgaggactatttccaagacgcagaggtttccgaagaaactgagaaagctgcagtggaactggaaatgaaatgtgcaaagttttacggtac

SEQ ID NO: 5450 - DNA, 653 bp, Gossypium hirsutum
  Clone ID: LIB3828-001-Q1-K6-B8
tgctaaaagtgctatggtcagtatcataggacttgattcagagaaggttcagcaattgtgtgatgctgccaaccaagaagttgatgtagctgataaagtgcagattgcgaattacttgtgtcctggaaattatgcagtatctgggggtctcaaaggagtggaagcagtggaagctaaagcaaagtcattcaaggctcggatgacggtacgtttagctgttgctggtgcttttcacactagtttcatggacccagcagtctcaagattggaggctgcattggcagcaacccagattagaactccaagaatacctgtcatatcaaatgtcgatgctcagcctcatgcagatcctgagactataaagaaaatactagcacgtcaagcgacttctcctgttcagtgggaaaccacagtgaaaactttgctaaccaaagggatgaaaaagagttatgaattggggcctggaaaggtcatagctggcattgtgaagagaatggataaaagtgctgagattgagaacattggtgcttgaggagggtttttttattagttgtggctagtccaccattcatattgaataaggtgttaatgcaacttggaagttgaggttttatgaccagacatattgcaaatctagcttgtaatgatggtgt

SEQ ID NO: 5451 - DNA, 662 bp, Gossypium hirsutum
  unsure (1)..(662): unsure at all n locations; Clone ID: LIB3828-001-Q1-K6-B9
atcaaactcaccgctctcttctatctatcagatttggtcgcatgtgatgtcccaaaagcattgcctcagctccattagatcttccctttccctctcttagatcatttgcttgctcccaatccatctcctccaaaaagggctccacccaatccgttcaagcagtcgaagaagaacacgaagaaagcccagacgatgacgaagacgacgacgaagacgaagaagaagacaataaccaaggaggacccaacatgaggcaanctcgaaaacaaccacttggtgaagaaagtactggaacaggagccagaaatgttaccctgttacgcttcagcgacccctctctctccacaactatcttccttgggtactcctaggatgggtccttctatcaaagtgtgggacccatataatgttttagctccacctcctccgctgcctccgcctcctgttttctcccgttctttctctttccaccatgatcgattgctgcttgaggtttatttcatttgccatggcgagtctgatttgaatttgaggcctgatattgtcggtggaagatgcgacggtgccgccttaacctctaatggcaagcgccaagccagggctttggctgtcttcctaaattctcaaggggtcacctttaatgccgnttattgctctccctt

SEQ ID NO: 5452 - DNA, 553 bp, Gossypium hirsutum
  Clone ID: LIB3828-001-Q1-K6-C1
gttttgcagtgtttctcttttacattagagaattattactgcatttcccttgaatcacattaataaactatatttcctttatttttaaattttaacccagcaaataaagatggctcgccaagttatgctcgtcgtcgcccttgttctcattgccgttgttggggcttatgcggcggatgtgcccaagacctcttcttcttcatcaccttcaacatctcccgcctcatctccctcctcctccattagcactagcagttcccctcctacaccagacggcggtgctctcgctccatcaccatctagtgccgtttctctcaaagcctccagcttcgttggtgctgttaccgctgttgccggactgggactcttttacttctaaggtttaacacgccacatgcatggcccgtggatcaacgctttttatttatttatttatacatatatatgattaaaatgtattttgcttgcgaatagccgcggcatagaatgtgtgaacagtcttgaataataataataataacaagactttggcgagtgtttatttatttaaaaa

SEQ ID NO: 5453 - DNA, 645 bp, Gossypium hirsutum
  Clone ID: LIB3828-001-Q1-K6-C10
gtcgacccagcgtccggctttcctcccagctttgcaaatctgatcttcatgaattcaagcagcactgttgcatccacagtttcctgcaaatcgggaaacaagaacgattttcttgtctggattttggcttgcttgcttcgaagttttcttggaactcctgttgcattcattaacttccacttgtttaaggccattgtacggtgcccttcctcatctaactgcatgccagaatcatttggaagtttctagccttagcctcaaagcctttttaaagttaccacgtcatttcataaccagcatggtttcctctcagttatctagtttaaatgagtctcgcattaacaaagcattccaatatcagttgcttgtccctgtggggcaacctgattctctgacatctgatcatcttgagtttgatttctcggatgtgtttggacctgccccagttcaaccctcaatggaaatcaactcccagaatcctagaaatctggttgttgcaattgaatccaatgaaatgctttatgatgttccaactgtcatctgtaaccgttcacactccttggttggcccctcaacatatgttagccagtcattgaagcttagcaagctcacattacgtgaaacgggggattccttggaacttgt

SEQ ID NO: 5454 - DNA, 654 bp, Gossypium hirsutum
  unsure (1)..(654): unsure at all n locations; Clone ID: LIB3828-001-Q1-K6-C11
ggtaaaacacataaagattcctgcatggttaactttcaactcaaaagaggcgtcaatgtagttagcggcgattctttgcttcagtgtgcatcaattgctgaatcttgcaagcaagttgttgctgttggaatcaactgcacgccacctagatttattcatgatctgattttagcaattaagaaggtcactaccaaacccatagttatatatcccaatagtggtgagaggtatgatgctgatcggaaggaatgggtggaaaatacaggagtctcagatgaagattttgtctcttacgtaaacaaatggtgcgagattggggcttcacttgtaggaggttgttgtagaactactccaaatactatcaaagccatatacagggcactttccgatagatcccctgcagcacccgggcagaaataaaaaacagcaacctgattatatacgcaaacgggatgccgaggtgccttttaaatttctaacttgtttcccatgttttagtctgaagagaatgcttgccagaagctttgccttacatgtagtagttaattgctgttgtagcagccgctattttcgttcatgaggagcatgcatcttgtatcagtttcgggtttcccactctcttgtttncatgagtatattattttggttctaact

SEQ ID NO: 5455 - DNA, 590 bp, Gossypium hirsutum
  Clone ID: LIB3828-001-Q1-K6-C12
ggcgtctgtaataaaatctgcaatcttaattctgtcggtgtttttatctgtacgcttcagttcgggtgttaggttgctccaggaacagcccaatgatgaccccaaaaacatggacgctattcctcccattgatgcactcaaccctaccgagttgaatggacccggtgttggcattcacgaagatcatgttgtcccaaaaggtgctgaaattggtactcttggttttggttttgaaggtggtcctgataaatgttgttcttctggatgttccggtaattgtaatcctggtggtttcgttctaccatttcctcaaattccagaaatcccaagaattccagaaatcccacaaatcccacagatcccacaaatcccacaaattccactaatcccacagatcccacaagtcccacagatcccacaagtcccaaaaatcccactaatgccaggacagtctggatgtgagagtggagagtgttgccgtcagggttgtggtgggacttgtgctgagtgtggtcagcccaggtgcgcatcaagatgttgccaggctgaaactgtaaagagcaaagggatagaagaggttatggacagtg

SEQ ID NO: 5456 - DNA, 640 bp, Gossypium hirsutum
  Clone ID: LIB3828-001-Q1-K6-C2
aaagtctttagcttttcgcttcgagagagacctgttggtttaccaggatctcatctccggtgacgagcttctttctgactcattcccctacaaggaaatcgagaatgggatgctgtgggaagttgagggaaagtgggttgtgcaaggagctattgatgttgacattggtgccaatccttcagccgaagatgctgatgaggatgaaggtgttgatgaccaatctgtgaaggttgttgacattgttgacactttcaggcttcaggagcaaccccctttcgacaagaagcagtttgtcgtgttcatgaagaagttcatcaagaacttgacaccgaaactggatgcggaaaagcaagagtccttcaagaaaaacattgagggagcaaccaagtttttgctttcaaaattgaaggaccttcaatttttcatcggagagagcatgcacgatgatggatgtttggtatttgcttactacaaggatggtgctgttgacccgacatttttgtactttgcgtatgcattgaaggaggtcaagtgctgaggtttgaagcaaagaaaaaaaaatggttgctgaagatttagtcctttttattattgcttttgtctcttattttcagtactctgctaaagacataatatttat

SEQ ID NO: 5457 - DNA, 656 bp, Gossypium hirsutum
  Clone ID: LIB3828-001-Q1-K6-C3
cccggtcgacccagcgtccggttaaggatccactgttgcttattaaagagaagtttcgctctcttgttgccattcctaggttcccaaaaggggtagttcaaagaaagatgcagataataatgaagaaagcaacatgcaagaggaggcaagtgatgaggaagaagaaggatattctgatatggatagttatctgagtgatggtgggtttggtgatgatgagggtggcgaagatgatgactatgcggatgattggagcgatgatgatgatggtgatgcaccaccagattttgatgacgacgatgagcttgttaatgttgggtcgagcaaaccaactacacaagcagctttctcagccaagaaagaagaagaaaggcgtgttcctgtatttcctgatggtcggccaagagagcgttggtaaaaagataccaaatttgctatagaatgaagaccccactccttttgacacctaaatagttgcttatcgttgcttggcttcaaaaggttaggtttttttctggagaaagaatccagtttagtatttggtgagatgccaaatcttatttcttaaaagcttggagcagttcatcactttgttaatacatctgagacatcaccattgatctaaatagaaatgttctagtgatttgttcttgttt

SEQ ID NO: 5458 - DNA, 630 bp, Gossypium hirsutum
  Clone ID: LIB3828-001-Q1-K6-C4
gttagctttcacaaaaccctagtctctaactacttctttgttttgcctaagccatgtcgaggagaaggttagagagcccaaggaggagaatactaacctaggacctgctgttcgagagggcgagcatgtttttggggtggctcacatctttgcttcatttaatgacacattcattcatgtgactgatttgtctggaagggaaacaatggttcgcattactggtggcatgaaggtgaaagctgatagggatgagtcttccccttatgcagccatgcttgcagcccaagatgtttctcaacgctgcaaggagttgggtattactgcccttcatataaagctaagagctactggagggaataagaccaagacaccaggtcctggtgcacagtcagcacttagagcccttgctcgttcaggcatgaaaattggacgcatagaggatgttactcccattcccactgacagtacccgtagaaagggaggcagacgtgggagaaggctgtgattctttgcttcgtatctgttgctcactgttgctgctcctccaatatgcgtggaatttcttttttaaacaatttttggtttagattgaagcttgttttgccctgttatgttgttgcacattagttc

SEQ ID NO: 5459 - DNA, 645 bp, Gossypium hirsutum
  Clone ID: LIB3828-001-Q1-K6-C5
gttgcaaggcaaaagagggaaaaacaggcgtgaagtttggtagaatcggcgaagatggaagtggaagtagacgagaaagacctaaaatcggcgggagccgagcttttgaaagatggaaggcgcggtttacgtatccatggatgggagatcgagtcccttaagcgctctattctcaattcctccactctccaacaatgggagcaaaagctccatacctctcactttccggaaatgattttcggtgaaagttgtttggttcttaaacacctcggcagcggcaccaaaattcatttcaatacattcgatgctttggccgcttggaaacaggaaggtttgcctcccgttgaagttcctgccgctgctaaatggaaattcagaagtaaacccttccagcaggtgatattggactacgactatacgtttacaacgccttattgtggaagtgaaacggttgagctggagctggattcagacaagcatggaagtgggggaatttctgggggggactcgggcctccattgggaagattgcaaagagcagcttgatatggcagcactcacattaagggaacctattttgttctatgatgaggtagttttatatgaagatgaattggctgatagtggagtgtcacttctaactgtg

SEQ ID NO: 5460 - DNA, 491 bp, Gossypium hirsutum
  Clone ID: LIB3828-001-Q1-K6-C6
cccagcgtccggactacctcccggtgaaggacaagagcaagacgtatcttggtcgtccttggaaagctttggcgaggaccatcataatgcaaagcaatattgatgacatcattacaccagagggttactcccccatggaaggaaccgtaggactagacaccggttactttgtagagttccaaaataggggaccaggggctaaaaccgaaggcagggtcaaatggccagctatcaagacaatcgatataaatgaagccaagaaatggactcctggcgtctttcttgaaactgaaactgacaaatggatttcgcaaaccggcactccttgttatcctgacatggtccctggagtgtaaacttccaaaaccatcgccattagtattcttttattatcattattagtaatcatgttgtcaattattgattaagttaaacaattttttcctatgttttatttatattaataagatattctttattatggaaggtgc

SEQ ID NO: 5461 - DNA, 640 bp, Gossypium hirsutum
  unsure (1)..(640): unsure at all n locations; Clone ID: LIB3828-001-Q1-K6-C7
aaaggaaagaaggaggaggaggaaatggatggaaaaagaatcgagggcaatgaagtttatgctctagcaatgtgtgtaagtattctcctctttgctccgattgttgtgtcacaaccaataccggcagataaatcccaagtggaagcttggtttaatggcattatcaagccggtgaaggaaaggggtacaattttagaccctgaattggttcaagccgagacagaacctagaatcataaaggtgatgcaaggtgggggtggagaattcgataccataaccaaagccatcgagagcgttccatcagggaacgccaaacgcgtgattatatccatcggacctggatcttacaaagagaaaattagaattgaaagaaataagcctttcattacattgttaggagatcctaaaaacatgccaaatttgacatttgacggcaccgccaagcaatatggaaccgtagatagtgccactcttattactgagagtaattactttgtgggtgctaatctcaatatagtgaactctgctccaaggccagacgggaaaatggtaggagcacaggcggttgctctgagagtctncggcgaacaggtcgctttctataactgcaagatcattggcttccagnacactttgtgcg

SEQ ID NO: 5462 - DNA, 664 bp, Gossypium hirsutum
  Clone ID: LIB3828-001-Q1-K6-C8
gtgacacaaaacaaaggtaagagacagcagtgatgttacaattatgcataatggttacacaattgatgtttacactcatccgtattaggaatttgggtttggggaaccccgctagaagtggatattgatggagtaagaacttctgttttctaccttgacaccgagggttttgaaagtgttgggaagtcaaatgtatacgacgataggatttttgcattggcaactgttatgagctctgtactaatttacaacctgcctgagacgattcgtgaagctgacatatctcggctgtcatttgctgttgagcttgctgaagaattttatggaagagtgaaggggcaagacattgcttttgaacctgcaaaacttttgtggcttatccagcgtgattttctgcaaggaaaatcagtgaaagaaatggtggatgaggcacttaggcatgtccctaacagtgatggggacaaaaatattgatcaggtgaaccagattcgggactcattagctgtaatgggggataacagcacggcatttagcttaccacaacctcatctcatgcgaacaaagctttgtgacctgaaggatgacgaccttgatcccatgtatgttaagaaaagagggcattgaaaaagctgtggctagtattatacgcccaaaaatcgtgcag

SEQ ID NO: 5463 - DNA, 612 bp, Gossypium hirsutum
  unsure (1)..(612): unsure at all n locations; Clone ID: LIB3828-001-Q1-K6-D1
ggtaaatggaggcaccaaanacgattcagcacgaaattggaggagtccagaacgacgccctgcgattcggtctccacggcgttaagagcgacctcgtcggatctcaccctctccaatctgcttacgaatcagcaaagaaaacgcagaagagatgaagagaaaagttctggccaatacttatgggacagcaatgccactcaaaatggatctcgataggcaaattctctggcggtttcagaggccattgctaccatcttcgatgctagggttggaagcggtgacaggaactttagatgattttggctttgaggattatctgaatgatcctcgagattcggagactgttcggccattggacttgcaccacagcatggaagttcgtctcggcctctccaagggaccagtctgtcctagttttatgtgagattttcattgactacttcagtgttgtcccatgaaggaagtcactgctgaactttttattttcccttaatgaatttagccgttctggcctttgtataatgcacatcagctttttttattgtgttgggttgaacttcttgaaaaccaactgctntgacaactatttaatccaataccaaggccaatact

SEQ ID NO: 5464 - DNA, 514 bp, Gossypium hirsutum
  Clone ID: LIB3828-001-Q1-K6-D10
gtcgacccagcgtccgaatctttcttattcgatctgcatgtatagtatgcgttcgtagtttttacaaaaggaaaggttcttggctttataaccgaaccaaagaaaatgaaaaagaaaaatcaattccttttctttttttctcattgctctgcctgttttttgctattgctgttgtggtcgtcctttgcttgtcttcatttgcaggtacggaggcaacgtggtgggggtagctgacgcgtacagaggctgctggtggtgtcgacgtggaggcgcgagccatggtagtgctggaggctactgcggcgctgagcgaatggggctagggttagggccattgtatttgggccgtgtaattggattttggaactggacccggactattgattggtttttatttttatgggttttagatttattttggtattttggctttgacatgggcccgggcaaattgactcgtttacattatttattcaaatcttatatttaatataaatatttatatttgttgact

SEQ ID NO: 5465 - DNA, 627 bp, Gossypium hirsutum
  unsure (1)..(627): unsure at all n locations; Clone ID: LIB3828-001-Q1-K6-D11
cccacgcgtccgttttcttccgtttggctcaaattcaaaattctctcgcggatccctctgcgattatctccaaagggatcaacaggtagagaggataaatggggctgtcattcgctaagcttttcagccggctttttgccaagaaggagatgcgaattttgatggtgggccttgatgcagccggtaagactaccattttgtacaagctcaagcttggagagattgtcaccactattcccaccatcggatttaatgtggaaactgttgaatataagaacatcagtttcactgtctgggatgttggtggtcaggacaagattcgtcctttgtggaggcattacttccaaaatacacagggtctcatcttcgtggttgacagcaatgacagagaccgtgttgttgaggccagggatgaattgcatagaatgttgaatgaggatgaactgcgagatgctgtgttgcttgtatttgcaaacaagcaggatcttccaaatgcaatgaatgctgctgaaataactgacaagcttggcctccattcccttcgacagcgtcactggtatatccagagtacatgtgcaacatctggtgaggggctntatgagggcctagattggctntccaacacat

SEQ ID NO: 5466 - DNA, 647 bp, Gossypium hirsutum
  Clone ID: LIB3828-001-Q1-K6-D2
aaggagtagaagtgaagaagaagaacacacagaagatctctttctctctctctctctctagctggtgttttagcgatgtttcgttaagaatcatttggaggttgatgtatgaaatccagcactggggaataatgggtaaaacaatggaggttcagcgtatgagggaattgttgttactttggtcgaggttccaaagtaatcgtgtggctctcgtgggtggaaatcacactgccgctcgattttgcactcgctaagttttgccttcttcattcctctctttctcgcctgttataatctcttccttgttttactttaatatgctatctctcgattttcttttccggaaaagttttctatttttcttctcgtacaatctaccttgcctttgatcacctttgttttctgaatttttgtgattggatttgtaagccctttttttctttgtgttttaatcgatcatttggatcaatggctgtccatattatttatggacttctaaacaaattccataaaaacaagcataaagccttgaaaaatggcattaatttgcagtctggtgcacgattgatcgtcaaagttcctcgctctagggtttttaagcttcttgctcgggtcttgacggttttggctttgaccttatttttgct

SEQ ID NO: 5467 - DNA, 631 bp, Gossypium hirsutum
  Clone ID: LIB3828-001-Q1-K6-D4
gttatacattcagtccaaggagaacattcaagtacttgaagctattgaggacaccagtccaatagctagtatgctttccccacaagactctgccggtcgtagtggtgttacactgtttacagcacaaaaggatacatatgtgtccccacgtattggcattgctgtggctctccgagattctgaaatctacagtcctgggatttctcttcttgagcttgaaaagaaggaacgttttgatgtaaaggcattcagttcagaggggtactactataagctttcagctctagttaatatgaccacagacagaacaaaggtcattcatcttcagccatacatgttgtttgtcaatagggttggtttaagtttttgtcttcagcagtgttattctgagacagtggaatggatccatcccactgatcccccaaagctcttagggtggcagagttcttcaaaagttgagttgttgaagttgcaggtagatggatacgggtggagtaaaccttttagtgtttctactgaaggtgtgatgcgcatttctttgaaaaagacactggaagtgatcacttatttttaaagattgaagttaggagtggcacaaaaagctcacgctatgaagttacctttcgcccaa

SEQ ID NO: 5468 - DNA, 596 bp, Gossypium hirsutum
  unsure (1)..(596): unsure at all n locations; Clone ID: LIB3828-001-Q1-K6-D5
gtaactcagcctccattattgccattacctgtttcttcacatgttgccccaaagccaaatggagcttcctttcaacctcgctatggttatagaggatatgaaagaggaagaggaagaggaactgggagttcacgtccagtgacaaaatttactgaagactttgattttgtggcaatgaatgagaaattcaagaaagatgaagtatggggtcatcttggtaacagtagcaaatctcatactaaggataaagaagcagatgccgttgaagaatatggttctcaagatgaagatgatgctgaaatatctaagattcaaacgaagcctgtttacaataaggatgacttttttgatactctctcctgcaatgcacttgatagtgacttgcaaaacggaaggccgagattctctgagcaaatgaagttagacacagagacttttggtgatttttcaagacatcgaggtggacgtgggcgtggacgtggacgtggacgtggtggtcgttttcgtggtgggtattatggaagagggtatggatatgtggggaggggggtcgnggggtaaacatgcatnngnatgctncatagntgtgcttgatg

SEQ ID NO: 5469 - DNA, 604 bp, Gossypium hirsutum
  Clone ID: LIB3828-001-Q1-K6-D6
gtaatcttctgcttgtttgagggagcccttgataacttggggagtttaaagcagcaatatggtctggcaaagtcggcaaatgaagtgattttggtcattgaagcttacaaggcccttcgtgaccgagcaccttatcctccaaaccatgtggttggccatctaattgggagctttgctttcattgtctttgacaaatccacctccactttgtttgtggcttctgatcaatttggtaaggttcctctctattggggaatcaccgccgacggatatgtggcctttgctgataatgctgaattgctgaaaggtgcctgtggcaaatctcttgcttcttttcctcaaggctgtttctactccacagcagtaggaggattaagaagctatgagaatcctaagaacaagatcactgcagtgcctgctgaagaagaggagatatggggtgctaaattcaaggtggaagggccaacagttgttgctgccacagagtagtcctttgctttctccttctaaatctatggatccatgggaatataggagctgcaaatgcatagcatatggatcagtctccatgtgaataactgagtcccagtacttgtagaatggg

SEQ ID NO: 5470 - DNA, 222 bp, Gossypium hirsutum
  Clone ID: LIB3828-001-Q1-K6-D7
ggtatactgcagaaaacctaggtttagattgtgttttggtgcattagttttgctccaaactgtggaactatattgtttattgtgtatgatcatgcaccggatcacgagaagagtgaatatatattgtcaagaaaggtatttagcctacatgctatatcttatgtaagatttcatgttggaagggttaggacatggaagtaaaaggaaaaggcttttcattgg

SEQ ID NO: 5471 - DNA, 678 bp, Gossypium hirsutum
  unsure (1)..(678): unsure at all n locations; Clone ID: LIB3828-001-Q1-K6-D9
ccggngtcgacccacgccgtccgggtagctcatagcaatagctacgggtggaaggattgtaccaaggttccaggagttgaccccagaaagttgggaagggctggtttggtgagagagaagtcttttggcaccacaaaagataaaatgttgtacattgaacattgtgcaaattccagggctgtaaccatatttattcgtggaggaaacaagatgatgatagaagagacaaagcgcagtatccatgatgcattgtgtgtggccaggaatctcattcgcaacaattctattgtctatggtggtggctcagctgagatttcttgctcaattgctgtggaggcagctgcagataaatatccaggagttgagcagtatgcaatccgggcatttgctgatgctttagactcagtccccatggccctggctgagaatagcggactccaacccattgagacactatcagcagtgaaatctcagcaaattaaggacaataatccacactatggaatagactgcaatgatgttgggactaatgatatgcgggagcaagacgtctttgaaacactgatcgggaagcagcaacagatcttactggcaacgcaagttgtaaagatgattttgaaaattgatgatgtcatttcttcattcgnactactgagtataaattctgtactgcttcac

SEQ ID NO: 5472 - DNA, 658 bp, Gossypium hirsutum
  unsure (1)..(658): unsure at all n locations; Clone ID: LIB3828-001-Q1-K6-E1
cgacatcttagtccccagctttcaagacaggtaatcagagcaatttcaagatgccggagagaagctatgggattagaagaagaaaacaggggttcatggaaacaagaatccaaccactttcattaaagttggaagagaaagttacaatggaatcaaagttgaatggattcaatggcttccgaggagttttatatgcaatgaggaatgtaagttcattgctactaatgatgttactatatggcggggttcatttttggccagaatcaagtatggtaagagggggaaacgaaggttgtgtgtgttttggatcaacattcatgatatcaacagcaagattgcaacaaagagtagcagaagagataaacgggatgaatgggaaagcagggatattgttgtatgagtttaggaggtcaaagatggcaatggaagaggtgagaggggagctggagaggagaggaggaggagaggggtgggtngnantgnnaaacagaagtggggttgagggaaaaagtagacaacatgagagggtgttttgggatattgagatctggggttgaaaatattgttggacaaattgatgatttctttgatgagatattgaagggaggaagagctttggactctgcagcacagtaagagattgggtaaaatgtaaggg

SEQ ID NO: 5473 - DNA, 606 bp, Gossypium hirsutum
  unsure (1)..(606): unsure at all n locations; Clone ID: LIB3828-001-Q1-K6-E11
gtacccttgncagtatgaccgacatagatccatctgtatatgctacctattactgggtttcatctcaataccataaatttcgccaagaatttgctgagttctacagaagtgctctcctttatcttgcgtacacatcagtggagtctctctcagaatcttttaagctggatttagcatttgatctgtccctttctgctcttttgggagataacatctacaactttggagaactccttgctcatccaattataaagagtcttctggggaccaaggtggagtggctttattatatcctccaatcctttaactctgggaatttggttcgctatgaagaattgtgtcgcgtgcacaatgctgcactgagtgctcaaccagccttggttgagaatgagaagaagctcttggaaaaaataatattctgtgcttaatggagattatcttcagccgcccatctgatgatcgaactattcctttaaaagttattgctgagagaacaaaattgtcaattgaggatgttgagtatcttcttatgaagagcctgtctgttcgtctgattgagggtataatcgatcaagttgagggaacaattcatgtctcttgggtgca

SEQ ID NO: 5474 - DNA, 336 bp, Gossypium hirsutum
  unsure (1)..(336): unsure at all n locations; Clone ID: LIB3828-001-Q1-K6-E12
gtgcttttattattattcatttcagcctctaagttcaatcagcgctattgatgttgttgccaagtttggcgcaaaactgcgggaaaacgatctgagtaagccatttttggatgcttgngaaagaagcatgtgcctctgtaaccccatcaacagttgtgattcctaaagggacatatttattatcaaaagtaaacttagaaggtccatgcaaggctcctattgagattaatgttcagggcactataaaggctccggctgatcctggtgctttcaaggaccctaattgggttagattctatagtattgaaaattcaaaagtccggcggaaggaatttc

SEQ ID NO: 5475 - DNA, 617 bp, Gossypium hirsutum
  Clone ID: LIB3828-001-Q1-K6-E3
ccggtcgcccacctccgggaaggccaatgccgaaacaaagaagggaggaaagaaccgtaagaggggaaagaacgaggccgatgacgagaaacgtgagcttatcttcaaagaagatggccaagaatacgcccaagtctcacgcatgttgggtaacggccgctgcgaagctatgtgcatcgacggcaccaagcgcctctgccacatccgggggaagatgcacaagaaggtctggatcgccgccggcgacatcatcctcgtcggccttagggattatcaagatgacaaggctgacgtcatcttgaaatacatgcccgatgaagctaggcttctcaaagcttatggtgagctacccgagaataccaggttgaatgaagggattgctggcggcattgatgaggaagatgatggtgcaggcgatgactacatcgagttcgaggatgaggacatcgataagatttaaatttctcttcttcttttttgtcatttttgaatttattttaagatatggtggtgatatttgccgtatggtcatgctttattaagcacaatggatgctggatttatgttattacacatggatttaccttttattatgttaatggcattggtttctcttt

SEQ ID NO: 5476 - DNA, 621 bp, Gossypium hirsutum
  unsure (1)..(621): unsure at all n locations; Clone ID: LIB3828-001-Q1-K6-E4
tataaacanaaacagaggagagcgagagacagctttttagtggcggatgatacgtcgtcactgaaagtgttggctaaggtcttggtttaagccaagatttgattagttatggctgcctcttcttctcttctctttacactgcttttggttcttctcactttctcagattcatcagtacaaacccttggtcttgaagttggaatcaactatggccaaattgcaaacaatcttccatctccagcccgtgtctcatacctcctcagatccctcaacatcagcagagttaaactctatgatgcagatccaaatgttcttcttgcttttgccaacacaaatgttgaattcattattggattagggaatgagtaccttcaaaacatgactgatcctataaaagcccaaaactggattcaacagcgagttcaaccctaccttacacgcaccaagatcacttgcatcactgtggggaatgaggtctacaaaacctatgatcatctgctatggtctaatctccttccagcaatgcaaacagtttataatacccttgttaatcttggccttgataaacaagtaaccgttactaccgcgcattcgctcgatatcttaagcgtgtcgttccct

SEQ ID NO: 5477 - DNA, 338 bp, Gossypium hirsutum
  Clone ID: LIB3828-001-Q1-K6-E5
ccgggttcgcccagcgtccgcggtcgcgtggggcgaatcgaaggtgctgtgaaatcgtggaggaagagtgcatgatcgtgcaacgtgcgagctaggaattcgttcgtgggtgttgaagtgtgggagttgcggcgtgggcaaatggaaccctagggtttgctattttttgaaaaaatttgggtcgttgggcttgtaatcgggccttttaattttagtgatttgggtctgtatcttgggtcgggcaaaatttgggccctacaccagtaaataaagttttaagctgtccatctctgtaaataaagttggaaatcagccttttttttagtaaaatagttgtg

SEQ ID NO: 5478 - DNA, 649 bp, Gossypium hirsutum
  unsure (1)..(649): unsure at all n locations; Clone ID: LIB3828-001-Q1-K6-E6
ggtgacctatttacctaactagctttttttttacctgtattttgttgtatagccaagtatctcagttggaaaggttgtaaattcacaagatggagctaggtcagaaactttgcagaagccagtgatgaggcatgtgttttttggaacttctattttctttatgcaaattatgatctctttatgctgttctttttttttttttttgatttatttatagcaggttgagtttgaagtcaacggcataatgtgttgtagatgaggcgtcgggagaaacatttgttgccccaaggagtaaggccagtacacctcagtaagtgtcccattatttgctggcttacattatggttttacaggtataccgagtgtgagtggacttggcagcatgttcgatccgtgcggtggagagctgcgttgtttggcttatacttttaggtttggttgtggtgttttgggttttatttttagctttggaggagagccaagaagctactaaagtgcctctggttctttgtaagactttgccatctctgntttttttatatatatatttgctacttaagtgttgtcgcatgcttcttgcctcccattcaagaatgaacaactcttcatcaagaaaattgtaaatcaaactggagtgttgccgtgtaac

SEQ ID NO: 5479 - DNA, 496 bp, Gossypium hirsutum
  Clone ID: LIB3828-001-Q1-K6-E7
gtgtgcttttcgacacgcaattgcttccgctccgaagctgaggaaaccctttgatgaacctccgaacaagatttactccctttgttatgcagtctgttattcctatctccccaaatggcccgtactgcaacacagaaggtccgacgctgggatgccgagctttgtgtaaaatcccagaataaccactgtagaaaccccatctggttttcctgcacatatttatgaacactgatattgtaacaggacattctcgaaaaagatgttccatagattcagatccagagccacaacgaggacacattgatgtattcgttagtcgtctaagtagcatattaacgtgagtagctaggaaattccaagagatcttccaaactgtaatttttatttttgaaggtagatcaagtagccataatttcctgtagaagtccttatagtcaacttgtaaagcataagttctaggatcatttgcagtactttgtaatagtttataggcgct

SEQ ID NO: 5480 - DNA, 518 bp, Gossypium hirsutum
  unsure (1)..(518): unsure at all n locations; Clone ID: LIB3828-001-Q1-K6-E8
tttggattcgtcttggttacgatggcagtggtcctagcaaccaccctgcctccaatggcaaccgccgctcgcaaagaggcagtggctctcctcgtcgactcaagctcaaccaccgctttggccaacattttcgacgttaaaggaaaacctgatgcgaattgcatccctaagtatgagttttgcttgtttgcgaaaaaggaatgttgtagtaattgcacatgcttcggactatgcatccccgtataatgtaattgtttatattgtataangaaaaaatgatgaagggggtgtctcattaatcaaatggtttttacagctaaataatgatatttattgtgtttcatgtctggtttaataatctaattacttatttcaaaagcggtaaatgttaattgccttttgttggtcgtaaaaagacttggtatttgcccttcttactgtggtcatgtattgtcgatgttgcaatgataaatattatcaataataacatattatttgctatgtttttaagagacgtg

SEQ ID NO: 5481 - DNA, 662 bp, Gossypium hirsutum
  unsure (1)..(662): unsure at all n locations; Clone ID: LIB3828-001-Q1-K6-E9
gccaatttgataggcttcatggaacgtgcttcaagatcaaatcatggattgatgctgacttctccccttaggcatgttaatgatgccagtngagaaacccaacatgatggataaatccaatgtccctctgctgcgcccgcaagatcttaggctagctatcatggcttcagaaagattgttgattctgcagccacataattgggcgctgaggagggaccatggcatgatgctgtattataatagggaatatggaaaggcagtgcaagagctgagcatttgcatggcctttgcgccggaagaagaggcagagatttttgaaccatttgttgagaaattgcatttgatgcggctggagtcatcatggaagtctttgggacacacaggtcgactcactgtgccttgaattttgtacataaccttctgtccatctgaaatcctccttgtattaagggatgagaacaacaaagcggcacttggtgtttgccaagaggtgttggacttagccattgatgactttcaaaagtcattcgacatgctaggggaatacgacatgagcaagataggaaaataccttttagaactaaagacctggctaagcggtgcattcacgagtcaacaaacatgtatagactcattcgcgcaatcaagcaacgaatcatcgc

SEQ ID NO: 5482 - DNA, 253 bp, Gossypium hirsutum
  unsure (1)..(253): unsure at all n locations; Clone ID: LIB3828-001-Q1-K6-F1
gtatttttgcagtttcttcatttaaagctcacatcacatttgctaaacaaaattttagttagtttatcgcaactaaatttcatttcaaatacccccttgattctccgatgtcgatcttcgagtataatgggagtgccctcgtagccatggtaggtaagaactgcttnncgctnatnncgccaggtgnatncggnagnacctcggnagtntnncaactccaaacaatcgccaccgatttccagaggatttcaaa

SEQ ID NO: 5483 - DNA, 670 bp, Gossypium hirsutum
  Clone ID: LIB3828-001-Q1-K6-F10
ctcctctgaaactaatggagacaggcggataatcagatagaagagaaggttgatcaaaatgataataaggagttggaaaaaagctctgatgaaccaaaagatgatggtcagtctgaaaaaccagagctcaaatgaagttttcccatctggtgctcaatctgaacttttgaatgaaaccgtgacccaaactggatcgttctctactcaggcgacagaatcaaaggttgaaaaggaaactcagttatcatccaagaaatatagttggaagctgtgcaattccactgcggggcctgattatatcccatgccttgacaatttggaagcaatcaggcatcttccttctactaaacattatgaacatcgagagaggcactgtccagaagaaccaccaacctgccttgttcctcttcctgaaggatataagcgtccaatcgagtggccaaaaagcagggaaaagatttggtactacaatgttccccataccaaattggcacaaattaaggggcatcagaattgggtgaaagttactggagaatacctcacatttcctggtggtggaacccagtttaagcacggtgcgcttcattatatcgacttcatagaagagtctgtgcctgatgtagcttggggaaaaggtctcgcgtagtattggatgttggatgtggggttg

SEQ ID NO: 5484 - DNA, 203 bp, Gossypium hirsutum
  unsure (1)..(203): unsure at all n locations; Clone ID: LIB3828-001-Q1-K6-F11
gtaactttctcaccaaccataacgatgaaccaaacttgataaaaaaggaacagggcagataggttcgctaagacttatatctctgaataggaacatccatgtttttaaattattagcttttgttgttgatttgtatctgttttcgtttgaattattgcggaaccttagtgtcatacccatttgctctgttttttgttcagtng

SEQ ID NO: 5485 - DNA, 652 bp, Gossypium hirsutum
  Clone ID: LIB3828-001-Q1-K6-F12
cggacgcgtgggcggacgcgtgggtttggtcggtactataaaacagctcataagcatgtatggttgtttcccatcgcttcgaaacctgtaagttgacaataacttcactcaaaccgttaccaccttcattaaatccaatgaatggataattgctgcgacttttgttcaaaacatttgcctgcagttacctaaataataactacttaactggaggatttccggcaaagatagcaggcttgaccaacttggaaatcttgtaagtatggtgctttttaacctttgggatatggtatggagttcgccttattatcggatacccttttagctatgttagaatactctggtctaactcggattttcgttattcaacatactggtcacaggtacctatcctacaacaaactttcaggagtaataccacatgaaatcattcatctcccccggttgacatccttgtaagttcattgttagacattgttgatacttctttagtcgcaatttacataaagtgtgtagctgaagtagggtttcattgtattaagccagaaagttgatttaatttgcttcttgaacataacttggcctttctttagagcttcgagtatctagacatcgctcgttgcctctttcacactgcattcgcagtttattc

SEQ ID NO: 5486 - DNA, 629 bp, Gossypium hirsutum
  unsure (1)..(629): unsure at all n locations; Clone ID: LIB3828-001-Q1-K6-F2
ccccatccaanaaaaaaacccaaagcttattcaactctgtgtatttcttcccaactgaagccaagccagttcttgtttgttcttcctcttaaaactctcaaatggataaaaatcaaagaacccagaaccaggaaaccaaggaaacgatgataaaaagagcaaaaaggattggaaattgaagggtaccgagtggaagggttgccaataggagggcatgaaacttgcattatttttcccactcttaacctagcatttgatatcggtcgatgcccacaacgtgccctttctcaagatttcctttttatttctcatggccatatggatcatattggctttgggatgtagaaagcgacaatgatggccaacaagaaggctgcgttttgcgggtttatgttaatgtggcttttagcaagaaaactgtttggaaagaaggccgtagccctaccatctcaaccatgaatacctatgaagcaagtgaaagcaataccattgaagttggccaaggaagtttaaagcttctttactcagcaaatgaaggaaaacttactcgttatgttaataccagaaattcggttacggcctttgctgagcaatcctatggttattactcgggaaatgatggaactgat

SEQ ID NO: 5487 - DNA, 524 bp, Gossypium hirsutum
  Clone ID: LIB3828-001-Q1-K6-F3
aaaacacaataaattttgtttttttcatcacatcaggtctctttactctcactaacctttattcttcaataccatggacatgaagaagatctcatgcgccgtcattgtcgccgccgcctctatgagcgaggtcctggctgctggcgccgctccagctccatctccagcttcagctccagctgcagctgcagcttcagcttcagcttcagcatctgccccaggcccagattccagcgtcgcaatctcaacaatgcctgttattgagtccttggttggagctacactcgtttctttctttgcctactttttacagtaagccacagcaaaaaaatggatgaaaccatgaagtattgaagaatcaaaaaaagaaatggtggattaataaatgtaaaaatattacttggcgttcattccattgaagatgctttctttcttttttttcattgttgaagatggctttcttcactttacttgtttgtacgtttatgatacatgtttgaattccaagtgatagtttgcactac

SEQ ID NO: 5488 - DNA, 626 bp, Gossypium hirsutum
  Clone ID: LIB3828-001-Q1-K6-F4
cccacgcgtccgttttcttccgtttggctcaaattcaaaattctctcgcggatccctctgcgattatctccaaagggatcaacaggtagagaggataaatggggctgtcattcgctaagcttttcagccggctttttgccaagaaggagatgcgaattttgatggtgggccttgatgcagccggtaagactaccattttgtacaagctcaagcttggagagattgtcaccactattcccaccatcggatttaatgtggaaactgttgaatataagaacatcagtttcactgtctgggatgttggtggtcaggacaagattcgtcctttgtggaggcattacttccaaaatacacagggtctcatcttcgtggttgacagcaatgacagagaccgtgttgttgaggccagggatgaattgcatagaatgttgaatgaggatgaactgcgagatgctgtgttgcttgtatttgcaaacaagcaggatcttccaaatgcaatgaatgctgctgaaataactgacaagcttggcctccattcccttcgacagcgtcactggtatatccagagtacatgtgcaacatctggtgaggggctttatgagggcctagattgctttccacaacat

SEQ ID NO: 5489 - DNA, 554 bp, Gossypium hirsutum
  Clone ID: LIB3828-001-Q1-K6-F5
ccccgcgtccggaaacccaagattccagaatcccacaaatcccaagatcccacaaatcccacaaattccactaatcccacagatcccacaagtcccacagatcccacaagtcccaaaaatcccactaatgccaggacagtcgggatgtgagagtggagagtgttgccgtcagggttgtggtgggacttgtgctgagtgtggtcagcccaggtgcgcatcaggatgttgccaggctgaaactgtaaagagcaaagggatagaagaggttatggacagtgaacccagtccaccaaagtagagagatgataccatattaagatgaaataacgaggaagagttggttgtcgtcttattaattatacaaaataagaagtaatgatgttgcagaagggtttgctataaaatcctcttggacaaaaagagtaattatgaagaataaatagctcaaaacaatattcgatttgcaatatcctaaagttccttgaatcttgttttgtagccatatgtaattaatgcatgtgcatgctaatatatatgattttctttgttatata

SEQ ID NO: 5490 - DNA, 618 bp, Gossypium hirsutum
  Clone ID: LIB3828-001-Q1-K6-F6
ggtggttatgcctaaaattatccggtcgtgagcgaggattacaagaagccattgaaaatgcgagggggaagctcagaggtctcatcgctgagaagaattgtgctccgatcatagtccgtttagcgtggcactcagctggaacttttgattggaagaccaataccggaggtccgttcggtaccatgaagcatgccgctgagcttgcacacaaggctaacaccggtctcgatattgccatcaatcttctcgagccgatcaaagagcagtttcctatcatctcttacgcagacttttatcagcttgccggcgtcgtcgctgttgaggtcaccggtggacctgaaattcccttccatcccggaagaccggacaaggaggaagtaccacctgagggccgtcttcctagtgctaccgatggagcggatcgtttgagggagatctttattaatcaaatgggtttaaccgataaggatattgttgccctttctggtgcccacacgctgggaaggtgccataaggaccggtctggatttgatggagcatggactaccaacccacttaccttcgataattcttatttcaaggagctattgtccggaacgggggcagatattatgcagc

SEQ ID NO: 5491 - DNA, 643 bp, Gossypium hirsutum
  unsure (1)..(643): unsure at all n locations; Clone ID: LIB3828-001-Q1-K6-F7
gtttttatctgtaagcttcagttcgggtgttaggttgctccaggaacagcccaatgatgacctcaaaaacatggacgctattcctcccattgatgcactcaaccctaccgagttcaatggacccggtgttggcattcacgaagatcatgttgtcccaaaagttccgaaattggtactcttggttttggttttgaaggtggtcctngaaaaatgttgttcttctggatgttccggtaattgtaatcctggtggtttcgttctaccatttcctcaaattccagaaatcccaagaattccacagatcccacagatcccacaaatcccacaaattccactaatcccacagatcccacaagtcccacaaatcccactaatgccaggacagtcgggatgtgagagtggggagtgttgccgtcagggttgcggtgggacttgtgctgagtgtggtcagcccaggtgcgcatcaggatgttgccaggctgaaactgtaaagagcaaagggatagaagaggttatggacagtgaacccagtccaccaaagtagggagatgataccatattaagatgaaataatgaggaagagttggttgtcgtcgtattaattatacaaaataagaagtaatgatgttgcagaagggcttgc

SEQ ID NO: 5492 - DNA, 624 bp, Gossypium hirsutum
  Clone ID: LIB3828-001-Q1-K6-F8
atatgattgggcgccttcagtacttccaatccagatccttcggatagggcagtttgtcattctcagtgtaccaggagaatttacaacaatgtctgggaggcgtctccggaatgctgtgaagacagtgcttacaaggagtggtaatggggaatttggtagtaacactcatgttgttatagctggcttgactaatacgtattcgcagtatgttgctaccttagaagagtaccaagtgcagagatacgagggtgcctccacactctatggtccacacacactcagtgcctacattcaggagttccagaagcttgccactgctcttatcaaaggtcaacctgttgaagccgggatgccgcctccagatcttctacagaagcaaataagcttactcactccagttataatggactcaacccctgctggtaaaaacttcggggatgtcagctccgatgttccagctaactcaaccttcaagagaggcagcaccgtgaccgttgttttctggtcatcttgccccaggaatgatctcttgacagaaggtactttcgcccttgttgagatgctccaagggaaggatacatggaccccaatgtacgatgacgatgatttctgccttcgctttaa

SEQ ID NO: 5493 - DNA, 646 bp, Gossypium hirsutum
  unsure (1)..(646): unsure at all n locations; Clone ID: LIB3828-001-Q1-K6-F9
cccacggaacgaagacaaacagaaaaccttgtgaagaaaaaatgagggaaatcttgcatatccaaggaggccaatgtgggaaccagatcggggctaagttctgggaagtcatatgcgatgagcatggaatcgacaacactgngaaagtataacggtgactccgatctccagctggagcgtatcaatgtctactacaatgaagccagtggcggtaggtatgtccctcgcgctgttctcatggatcttgaacctggcactatggactccgtcagatccggtcttttcggccagatctttcgtcccgataactttgtcttcggtcagtctggtgctggcaacaactgggccaagggtcattataccgagggagctgagctcattgattctgttctagacgttgtcagaaaagaggcggagaattgtgattgtttgcagggttttcaagtttgtcattcattgggtggcggtactggatctggaatgggaacccttcttatttccaagatcagggaggagtatccagatcgcatgatgttgacattttcggtcttcccttcgcccaagtatccgatacagttgttgaaccatacaatgctaccctttctgttcatcagcttgttgagaatgctgatgaatgcatgggtgt

SEQ ID NO: 5494 - DNA, 634 bp, Gossypium hirsutum
  unsure (1)..(634): unsure at all n locations; Clone ID: LIB3828-001-Q1-K6-G1
cggacgcgtgggngaaaaggcaggtttttgctgctccgccagaagaaagggtctttcttcctcttccattaccaaggatcctcctgctactccttcctggttcactcccgagaggttattgattctattttgtgtaattaacatgataaattatgttgatcaaggagtaatagcgagtaatggtgtgaatgggagtattaggacttgtgatgacaagggaatttgcacatctggtagtggaattcagggggagtttgacttgactaactttcaagatggtctcttatcatctgcattcatggtcggacttcttgtggcgtccccaatatttgcctctttaacaaagagccaccatccttttaggcttattggagttggattatctgtttggaccttagctgcagctggatgtggtagtgcattttccttttggtttattgcaatatgccgcatgttggttggtgttggggaagcttccttcataagtcttgcagctccatttattgacgacagtgctcccgtttctcagaaaacagcctggcttgcgatgttttatatctgcatacctacaggaattgctgttggatatgtttatggtggatttgttgggagccagtttactggcgctatgctt

SEQ ID NO: 5495 - DNA, 627 bp, Gossypium hirsutum
  unsure (1)..(627): unsure at all n locations; Clone ID: LIB3828-001-Q1-K6-G10
cccatttccaatctccagctcccaaggtaaatatgccgatcagaaacatagcagttggccggcccgaagaggcgactcaccccgatgctctcaaggcagctttggctgagttcatctcaaccttgatcttcgttttcgctggatcgggctcaggaatggcttttaacaagttgaccgacaacggagcaacaaccccggccggtctcgtagccgccgctctagctcatggcttcggtcttttcgtcgctgtctccgttggcgccaacatctcaggtggccacgtcaaccccgccgtcaccttcggtgctttcgttggcgggaacatcactctcttgcgcggcattctttactggatcgcccaactcctaggctcaaccgtcgcttgcctgttgcttaagttcgctaccggcgacctggctgtaccagcttttggattgtcatcaggtgtgggcgtgtctaacgcattggttttcgaaatcgtgatgaccttcggattggtgtacacagtgtacgccacagccgttgatcccaaaaagggaagcttgggaacaatcgcaccattggcaattggtttcatcgtgggggccaacattntggcaggaggtgccttcgatggagcctcaatga

SEQ ID NO: 5496 - DNA, 617 bp, Gossypium hirsutum
  unsure (1)..(617): unsure at all n locations; Clone ID: LIB3828-001-Q1-K6-G11
caaccaccacctctgcctttttctcctcaattccctctaaactaacccctacccacctctcctcttccttcctccctcctttcctcactaccgttgccaccacttacgtattccctcgccgtcgcgattctttcaccgtcaaagctgcccgtgggaaattcgaacgcaaaaagccccacgttaacatcgggaccatcggccatgtcgaccacggcaaaaccaccttaactgccgctctaactatggccttagcttccatgggtaacagtgccccaaaaaagtacgacgaaattgatgccgcccctgaagagcgtgcccgtggcatcaccattaacaccgccactgttgaatacgaaaccgaaaatcgccattacgcccacgtcgactgcccagggcacgctgattatgtcaaaaacatgattaccggagctgcccaaatggacggtgctatcttggttgtttccggagccgatggacccatgcctcagactaaagaacatatcttgttggctaaacaggtcggtgtccctaacgtggttgtgtttttgaacaaacaagaccagntagatgatgaagagcttttgcaattagtggaatgggaggtgcgtgaattgctc

SEQ ID NO: 5497 - DNA, 634 bp, Gossypium hirsutum
  Clone ID: LIB3828-001-Q1-K6-G12
ggaaaatagggtgccaaagttcttttcttctttgctttgctttccttttcagctgtctcggcatttgcacaggatgaggaagaccaaggtcttgttatgaacttctacaaggattcttgtcctcaggctgaagacattatcaaggagcaagttaagctactgtacaagcgacacaaaaacactgctttttcttggctgagaaacattttccatgactgtgctgtccagtcatgtgatgcttcactgctgctggactccacaagaaggagcttgtctgagaaggagacagacaggagctttggcctaaggaatttcaggtacattgagaccatcaaagaagctgtagaaagggaatgtcctggagttgtttcttgtgctgatatccttgttctgtctgctagggaaggcatcgtttcgttgggaggcccttatattcctctcaaaactggaagaagagacggtagaaggagcagagcagatgttgtggaggagtatcttccggaccacaatgagaccatctctggcgttcttgacaggtttgccgccatgggtattgacacccctggagtcgttgccctcctaggagctcacagtgtcggcagaactcactgtgtgaagctggtgcatcgtttgt

SEQ ID NO: 5498 - DNA, 366 bp, Gossypium hirsutum
  Clone ID: LIB3828-001-Q1-K6-G2
ggattccgtgcttcctggcacaagtgaagctgcatttctggagacactctctcagatcatggatcgacatcttgatgagattactgggctatgaaaatgctaacccaaaacacttttaatagtgatgaacatctttagagaatgctggtttttatagttgctagttaagtagttgcacataccttctattcagcagaatgcacaatggtctattctttcttctcctccctttgatgcgattctctattctttatggcactttacagaatgccacttagttagaggttcacaatcatttcaattgtttatcaagatgtttttttgttggttttttgaaatttgaagtaaagacacgagtttcttctc

SEQ ID NO: 5499 - DNA, 423 bp, Gossypium hirsutum
  Clone ID: LIB3828-001-Q1-K6-G3
tgaaattagggctgaaggtaaaagttgatatcttggtctgtcctttttgcttgctataaagctgctgtccatctagttctggtaaaggtttttcgtaagggtcgggaaccgaaagtggtttactacatgtagctgtgcatttattatttgcagattcgggttttgaatttatcagggttttcttaatcctcatgtgattgggtaagagaaagtttaagtgctggcattgttcgaggcctttatgtgaaggtggtccaaaaaaaacttgtgaaacagtttttttttttttaattatctaaatgcatcctctaaaaaaaaaaaagaaagataaataaaaatgaaaaaacaaaaatgaaaatcaacatgaactatgattaccaaaatcaactggaaaataaaaaaaataaagggggggggcctttt

SEQ ID NO: 5500 - DNA, 184 bp, Gossypium hirsutum
  Clone ID: LIB3828-001-Q1-K6-G4
ggtttttgaaccaattttcattataagatcctccttatatttaaatcacagtccttgcaatgttttagcttatgatctttggaagaggagattgttccaatttgaggcattgttacttttcattatgaaaaatgctgatatgaactgaaacatttttctaattgttatttatatatacattctg

SEQ ID NO: 5501 - DNA, 464 bp, Gossypium hirsutum
  unsure (1)..(464): unsure at all n locations; Clone ID: LIB3828-001-Q1-K6-G6
cttgnttgtacttgacctttgtaccgatttctgtttcttgtgcagatcaaaatagtattcaaagtgattttagcaaacagaatgttgattggagagaaaggttggatctgcaatctatcaaaaaccttttcactaaggagaattttggttttgatggaaaactggtggttaattatgcctgttctatggcatggggctaactcttgatgatggatcttcaaagagattagataaaaattgtcaactctgtaactgtttcctacaattctccattatgcatattcctcatagaaccatcttctataatttcccccccccctttttctctgagaaactggtgatcctgtaacagatactaacttcttgcttctacttaagcaagggaatattggtgttctgaagattctgataatggcgacatcaatttgaaccaaanaaaaaaaaaaaaaaaaaaaaaaaanaaa

SEQ ID NO: 5502 - DNA, 122 bp, Gossypium hirsutum
  Clone ID: LIB3828-001-Q1-K6-G7
ctttttttttttttttttttttttttttgcacaaatccatgttatcattcatttttctatgatgatgatcatcatcaaagtttcaaagatacctgagatttgaatgtaacatatgcttgcag

SEQ ID NO: 5503 - DNA, 630 bp, Gossypium hirsutum
  Clone ID: LIB3828-001-Q1-K6-G8
ataaaagtgagaacgaaagaaaggcaaatattcccataatcgctcttttctgcttcaccatttttgtttcgtcctcactcaatttcgtctatggggctgaaaatatgagctacgtcgtcgtaggccatgtttactgtgacacttgccgtgttgagtttgagaccaaactcagcgaacccatcgctggagcagtagtgaaactggaatgcaggaatcgtacagacaatcaccttaccttccagagccaagaaatagtgactgacgaacgtggagactatcacattgtagtggaaggcgattatgaggaatcagactgcgacgtcgccttggtgaggagtcccaacccggattgcaatgatccctccgaaatgtggaggatatccagggtggttctcaccacacttgacggcgtcagcggtgaacttcggtttgccaacaatcttgggtttaagaagaaggttgctcttcctcagtgtactcaagttcttcaagagataggctattatgagcttagccaagaagctggagacattgccccttggtcagaactataatatgtattttcacttcaactttttctagaagctcggcattagcctataataaaaaatgaatcattattattctact

SEQ ID NO: 5504 - DNA, 525 bp, Gossypium hirsutum
  unsure (1)..(525): unsure at all n locations; Clone ID: LIB3828-001-Q1-K6-G9
gaaaaaaaagcttaacatttgaggcacaccgcagnanaaagagagagagcatttgttcacttataaggaagaatggcagttcccaaggtttgtttcatggctgtttttgcagctcttgtttttgccacggctgttgatgcccagtcttctgctcccgcccctgctcccacaagcgacgggaactcaattgatttagggattgcgtacgtgttgatgctggtggcgttggtgctcacttacctcatccacgctgctgatttctgttttagcttttgattttgattttttaatttttgcatttgaacaatttatgtgaaacaatggttggttggtctcgatttgagtcctaaaagggttgttttttgtgagtttagatattaattgttgggattcgttgataatgtcaatttttttttaatctttggtgttagtctctttaatcttctatcatttgctaattctctttttgctgctgtatcttccatttttcgtctctcaaatcctaatggatttagcttattctgg

SEQ ID NO: 5505 - DNA, 623 bp, Gossypium hirsutum
  unsure (1)..(623): unsure at all n locations; Clone ID: LIB3828-001-Q1-K6-H1
ttttggttcccctgntggcaaactagactggggcatacagggnagaagagctaaacaaactaagaaaatctgcttccttcgggttccgaagcagtggcagcaatttgggaaatgcgcctcgttctatatcatcaactacagatgagcctgatgtgtcttggttccagtctctggtggtggaccctccttctgccgggcagttaagttttgaggaggagcagtgtcatcgtaaccctgggggcgcggagctgcttcctgcttgggtggagcaaatatacatggaccagaaacagatggtggcctgaaagcacaaggctatccccaccattatctcctaagttaacttttaactagtttttgtatttttgcccatttctttgaatttttatcaaatactcagcatctgtaattggaatgaaatggaccaggagagaatacaaggtgagcagaagaaaaaggtttctgccaaacctactctgaggttctcaagaataatgtctgttattcgtttttgtcacaatattgggttttcttggataggtcggtctaaagcaggagaagatagttaggccaattgtcaacacttcaattagtcaagtttcagggttacattcatttcaatt

SEQ ID NO: 5506 - DNA, 643 bp, Gossypium hirsutum
  Clone ID: LIB3828-001-Q1-K6-H10
cctttacagattagatataatagatagagcagtttttgataagaaaagagagggaaaaaggaaattaaagatgtcaacagcttcttcattttgttcatcaactcaagttaatggctttggagggggacttaggcttctaagaacccatctttctcaacccaagtccttttcttttactaggaggagaactgctacagtagtgaaggcaactgctcgagtcgataaattttcgaaaagcgatatcattgtttccccatctatactctctgctaatttcgctaagttgggggagcaggtgaaagccgtagaagtggcaggctgtgattggatccatgttgatgtaatggatggccgatttgttccaaacattacgattggacctcttgtggttgatgccttacgacctgtgacagatcttccactagatgtgcatttgatgattgtggaaccagagcagcgagttccagattttattaaggctggagcagacatagtcagtgttcactgtgagcaatcatcaaccattcatttgcatcgtacacttaatcaaataaaagatctgggcgctaaagccggagtcgtcttaaaccctgcaaccccgcttagtacgatagaatatgtactagacgtggttgatctaatc

SEQ ID NO: 5507 - DNA, 643 bp, Gossypium hirsutum
  unsure (1)..(643): unsure at all n locations; Clone ID: LIB3828-001-Q1-K6-H11
ctccttcaactctcacanagcttgcagggaaggaaaccttacaggcaagctttgttcgtgatgaagatgagcgtcctaaggttgcttacaaccaattcagcgatgaaatccctgtgatctctcttgccggtatcaattatgtaggtgaaaagagggcggagatatgccagaaaatcgtcgaggcttgtgaaaattggggtatcttccaggtcgtggatcatggtgtcgacactaaactcatttctgagatgacccgtcttgccagagagttcttcgctttgcccgccgaagataagcttcggttcgatatgtctggtggcaagaaaggtgggttcatcgtctccagtcacctccagggagaaacggtgcaagattggcgggagattgtgacctacttctcgtacccaattaagagccgggactattcaaggtggcctgatatgccagaggggtggattgaggtgacaaaggagtacagtgataaattaatgggcctagcttgcaagcttcttgaagtgttatcagaagcaatgggattggagaaagaagcattgagcaaggcatgtgtggagatggaccagaaagtggtggttaacttctaccctaagtgcccacaacctgatctcactctgggactcaagcg

SEQ ID NO: 5508 - DNA, 595 bp, Gossypium hirsutum
  Clone ID: LIB3828-001-Q1-K6-H12
cggacgcgtgggcggacgcgtgggcggacgcgtgggcggacgcgtgggtttattgtgggaaagtgaatgtctatgataatatacctggttgtaaggcggaagcaatcttgcagtttgctgcaagcccagtctcatttccacaggaaactctagttgatcaaaggacctcgccattgtccattccatgccatgtacaggctgcaggtgataaagtaagccaacgttcaccaggggttatattgtcatcaatgcaagcagtgaaggttgcagaaaactgtcgatttcctcgagatgactgcaatgtatcttatgaagacagccttgaaggtgccactagcagaaacgcattgttgcaaagatatcttgagaaaaagaaagacaggtgaaggtttaagaacaagagaaaattggcaacatcttcatctcgtaccttagacatctacttgaatcaaatgggggatcagttctcaaatgagcagtcgaagcaaagtgaatcatattcttctacttaagctcgaccacctcacacaccgctttggtgcagctccatggaaaatctcccaagattgccaatgtcactactcatcctgatggc

SEQ ID NO: 5509 - DNA, 615 bp, Gossypium hirsutum
  Clone ID: LIB3828-001-Q1-K6-H2
ataatctgcaatcttaattctgtcggtgtttttatctgtacgcttcagttcgggtgttaggttgctccaggaacagcccaatgatgaccccaaaaacatggacgctattcctcccattgatgcactcaaccctaccgagttgaatggacccggtgttggcattcacgaagatcatgttgtcccaaaaggtgctgaaattggtactcttggttgggttttgaaggtggtcctgataaatgttgttcttctggatgttccggtaattgtaatcctggtggtttcgttctaccatttcctcaaattccagaaatcccaagaattccagaaatcccacaaatcccacagatcccacaaatcccacaaattccactaatcccacagatcccacaagtcccacagatcccacaagtcccaaaaatcccactaatgccaggacagtcgggatgtgagagtggagagtgttgccgtcagggttgtggtgggacttgtgctgagtgtggtcagcccaggtgcgcatcaggatgttgccaggctgaaactgtaaagagcaaagggatagaagaggttatggacagtgaacccagtccaccaaagtagagagatgataccatatta

SEQ ID NO: 5510 - DNA, 618 bp, Gossypium hirsutum
  unsure (1)..(618): unsure at all n locations; Clone ID: LIB3828-001-Q1-K6-H3
cccacgcgtccgttttttttaagaggtgagggngaaaaaaatggaagattcatcatcaaagtcgttcttgagaaagcaatgggatgaatacaaagaattatgggccgatcgatttccgttcactaatgtctattcaagatacatcggccgtgaacagtcccttccttcatggtctgaatccgatgttaacgagttcatcgcttctgatccggtgcatggacccatcttgaagactgccagggaagcagccaacatcgccttatacggaagtgcaatcggagctatcacaactgcaggttttgcctggaaatactcgaagagtttacatggtgctggactgtctttcgtaggaggagccgtttttggttggacatttggacaagaaatcgcaaatcacgcatatcaactctacaggttggacacaatggctgcacaagccaaatttatggattggtgggaaaacaagtgccggaggtgatctttaaaaagaactttttgtgatgtcgaaagcagcacctggactcgctttccatttggttaaataatggcggcatgtcgaaacataacgtttggtccaatgctttggcttttgttataaactttcgcatctgagtttga

SEQ ID NO: 5511 - DNA, 406 bp, Gossypium hirsutum
  Clone ID: LIB3828-001-Q1-K6-H4
gcaattttctcaacaaactgaaaagtcttgctgttcaggaaaatgtggctgcggcgctgattgcaagtgtggcagtggctgtaacggatgcagtatgttccctgacataatagagaagactacaactgagactattgttcttggtgtggcaactcagaaaatgcactttgagggatctgagatgggagttggggttgagggtggatgcccgtgtggagacaactgcaaatgcaacccttgcacttgcgggaagtgaacaacaaagagaagcagagtggcctttgtcattttaactaaataaattctattactttagtatgtatcagcaaatcttcatgaggatttggttcttaattatgtgtaatgtggcttttctgctatgtcagaatgtattatgatatttaag

SEQ ID NO: 5512 - DNA, 614 bp, Gossypium hirsutum
  unsure (1)..(614): unsure at all n locations; Clone ID: LIB3828-001-Q1-K6-H5
ttgctgccgtatgacagccttgaagggcggaattggcattagggtggaacttaacggtggcagagagattatggtttagttattcagctcataaatccgattacatattgtatacacataattgtttatttgtgtttttggtgttttctttggtaccgttgccctgggcattggtggagttgtattggttcgacgccgtagatagattcaagcttcaaccgagagtgaagagatcgttcccggagttgtttaaatgttataaagatgttcttcatcagtttatctttgtggttgcccctctcattgctgtttctttccctgttctagagtgggttgggattcgtacgagcttgccactgccaacaaaatgggaggtaattagccaattgatagtgtattttctagtggaggactacaccaactattggattcatcggttcctacatagtgaatggggctacgagaaaattcattacatgcaccatgaatataatgctccaatagggtttgcagcactttatgcccattgngctgaaatcttaattttggggatcccaacattccttggtccagctatggttccatgccatatgaccacattgtggctatggtca

SEQ ID NO: 5513 - DNA, 586 bp, Gossypium hirsutum
  unsure (1)..(586): unsure at all n locations; Clone ID: LIB3828-001-Q1-K6-H6
gggctatggnccgaaccattgccgacggcggatggggtgaaggagaacaaattatggaaatgggtctttgctgtcagtggaatcttgattactcttgtcatctatggggttttacaggaaaagatcatgagagttccttatggggtaaacaaagaatattttaagtactcgttatttcttgttttctgcaaccgcatcacaacatctgcggtctctgctggttctttagtggcaagtaagaaggcattggatcctgttgctccggtctataagtactgccttgtatcagtaacaaacatcctaaccacaacatgtcaatatgaggccctcaagtatgtaagctttccggttcagactcttgctaagtgtgcaaaaatgatacctgttatgatttggggcactttcatcatgcagaagaaaataagggttttgactatttggtggcttttctggtgaccctaggttgttcgatatttatcctatttccggcaggaactgattttagtccatatggcaaaggaagaagaaatactgtttggggcatttctctgatggttggttatcttgggtttgatggctttacaag

SEQ ID NO: 5514 - DNA, 612 bp, Gossypium hirsutum
  unsure (1)..(612): unsure at all n locations; Clone ID: LIB3828-001-Q1-K6-H7
gttgcttctggagatatggatttcaaggttgcntggaaatgaagatggcataactgcatttcagatggacataaaggtagaagggataaccttacctgttatgagagaggcactcctacaggcaagggatgggcgcaggcgtattcttgctgaaatgatgaaatgttcccctccccctgcaaaaagtctctcgaagtatgctccacttattcatatcatgaaggttgctccagagaaagttaacatgattataggttctggtggaaaaaagtaaaaagcattattgaagaaactggagtagaagctattgacacgcaagatgatggaattgtaaaaatcactgcaaaagatctgtcaagtctggagaagtccaaatccattattagcagcctgacgatggttccaactgttggtgatatatacaggaactgtgagatcaaatcaatagttccatatggggttttcgttgagatagctccaggacgagagggactttgccacattagtgagctgacgtcagactggttggccaaggctgaagatgcttttaaggttggtgaacgtgttgatgttaaacttaccgaggttaatgataagggacaacttcgcctt

SEQ ID NO: 5515 - DNA, 95 bp, Gossypium hirsutum
  Clone ID: LIB3828-001-Q1-K6-H9
gttctgtgttctcttctgtttaaacataattgaatcggttactttatagtctttatgacttacttccttatgttcaattttttttttaagacaac

SEQ ID NO: 5516 - DNA, 273 bp, Gossypium hirsutum
  Clone ID: LIB3828-001-Q1-N6-A1
tcgcgcccacgcgtccggcaggcatgagcattaattatataaagatggttccttctgtggcagttggatttgcatcatacgacatgatgaaggtttggcttcgcataccacctcgacagaaatcacagacagtatcttcttaataaacggagatggatttacaatggggccacctgaaatcctaaaacgcttaaataagaatttcaaccaaactttagttccttgattttatgatgtttatttttcagattgtttatatcatataacaaggaa

SEQ ID NO: 5517 - DNA, 597 bp, Gossypium hirsutum
  Clone ID: LIB3828-001-Q1-N6-A10
acttcaagtgccattaatatattatagcaaaattctcatacatttttgcaatacgacactgatacaggacacaaactcagaataaccaaaaaaaaaaaatcaagggagaaaaaggataatgattagggcactatatgaatgagattagaagcattctggggatgaaaatagagagtataggtgagcagcaaggcaatattattcagtactatgaataagcaggcactgagacaggcagcagagctgaacttaagattggggcttgtcccacttgaggggcttcacagcttcccaggtgaagtctgggtcgtcccttccaaagtgtccgtaagcagctgtcttcaagaaccgactattgccacctctcttgaggtccaggttgatggtgatcataccaggcctaaagtcaaagttctccttcacgatttggagtatttccttgtcgggaatctttccggttccgtaactgtccacgaagacagataagggctcaggcacaccaatagcataggaagacttgtacgatgcatctgcgggcaagtccatttgctacaatgctcttggcagcctgcctaaacatgtaagcaccactcctgt

SEQ ID NO: 5518 - DNA, 563 bp, Gossypium hirsutum
  Clone ID: LIB3828-001-Q1-N6-A11
gaaacctgactaatgagttttttcataaaacagagtagtaaaataggataaattaataaaacccgtaacctgctttatataatcaatacatactacatatatggatctaaattccacgactacccctacctcgccatcaaatttacaccatctgcaaaggaaaaaaaggaaggaacaaaaataaaaaagaacaacctcctacaaacaaacactcctttcgattcacttctttgccttctttggcgccgctttcttagccggagatttaacactcttcggcttcttgacagcgactgtcttctttgctggagcctttactttcttccctggcgaactcttcttcgccgtcttcgctaccttagctggcttagccgctggtttagctttggccttacttgtagtagccttcggtttcgccgcaactttagcctttgccttcacaggcgttgcaactttagctttcgctttcgctttcgacgcggttttagtcgccttcggcttagactttgcggcggtagtggtagttgcagatttaggcttcgcggcggcaggtttcttagcta

SEQ ID NO: 5519 - DNA, 636 bp, Gossypium hirsutum
  unsure (1)..(636): unsure at all n locations; Clone ID: LIB3828-001-Q1-N6-A12
aagtacaaaaattaaattggacatttntgaaaatataggtattacactagaacaaacacttaagtatagggtctttcgtgccattatccctattttaaacagagcacttaatattatgattccgtacagcaaagtggttgaatgttgcagccaactagtttgagttaagacaagacagtatcggatatctaatgcatacgtctctataagtaacaattaattagtattatttttctgaaactttaacataaaaaacatttttaaacatcagaagaggcgcacgagccacgttccctcccttaattttggtcaacctgaatttggagagccagacatgcaaaaagacagcaactagaaccctgctgaactctgctcctgcacatgccctattccctccaccaaatggtatgaatttttttgccatcgtattgcgctcaatgttcttccatctccaagggttgaaggcaagaggatcttcataggtattaggatcaagatgaaggacagcgggaataatcaatagaacccaaccttttggtatggtatacccgttaacgggaatatcagctatggttcttctgaagacccaggaaggaaatacctaacctaagtgtctcgttaatgacgtaatgagta

SEQ ID NO: 5520 - DNA, 575 bp, Gossypium hirsutum
  Clone ID: LIB3828-001-Q1-N6-A2
ccagaagatattatatataacattcagttgcatctttcaatgaatcctaataaaacagaaaattcatttgataatatgtccagaaataaagaaaataacttcattaccttggacttcgaaattcccaaactacgcaatttctactctgctctaattcaaagttggtagccctcaagactcatgccctacctaccactagcttatcggcaaccaaaataacggaaaacaccaaaggagcacaagttataagatgggtcagtcatcagtgtaggaaattttctatggctatcttgttgatagtattaccttaaaaacagggtggcgaatctctaactcaagaagctgagatttgattgcatttgagtgttgagacttggaagcctgactcaaggagaatggtccacaacccttggattaagggaaagaaggacaatatatgctacagtgataagcttttctggtggaacggacaagcctctcacctcagggcagtaaaggagggaactcaatctttcctatgtcttgcccaaaaccctttctttctggcagaatcattttctgatactgatctgccc

SEQ ID NO: 5521 - DNA, 123 bp, Gossypium hirsutum
  Clone ID: LIB3828-001-Q1-N6-A3
cgagaatcccactcttatgcaattatgttcaaaaacagggcgtgctggccggccgaaaatccaaaaaaggggaattttggcaagaacagccttttcatccatcacatgaggggatccaaggcc

SEQ ID NO: 5522 - DNA, 572 bp, Gossypium hirsutum
  unsure (1)..(572): unsure at all n locations; Clone ID: LIB3828-001-Q1-N6-A4
ggttgcaaagggcctggttttaattatctaagagttatggagtttttttaagtttaacccttttctcctaggaaatgagtgtgatggggcaccagaggcatactcccaaaacttcctggtaacatacaaatgacactcttacaagcgaagcaggcttttcagagcacccctcaaactgcactacatcttcatgctttaatataaaggttccattagagaatctcatgtgccttcccgtaatacctgtttatgaaaggagcctttacatttgacacatcaggagtatccggagtgtgaacaggatagaacttgtaaaatctcatgttctgaaatgctgctttagtttcctcactcatttcttcaagggcttttctgcgagcttctcttgcctgccgattagctttttttgcttctcgaactttctctttgacaaaatccttaaaagcatcctttntgatctttatctaattcatctgcttctatcagtttatcagtaaactcatcaagttcatccaactcccaatcaaattcacaaaaaaccggcttttgttctgctggaaaaatatttgaac

SEQ ID NO: 5523 - DNA, 523 bp, Gossypium hirsutum
  Clone ID: LIB3828-001-Q1-N6-A6
caatcaagcttactttaaatctcttttattcatataataattaaagataaaaaaaacagctagcacattgtaattcaatcatatatcaagctgcttggttattctttattttctttctctttgtatagaatccgtagtttctataatctatatataaatctatgaagattctggcgccatagcttgtatattcatggccttctttttccctaaaagaccattggcatcaagtttcatggtaaggtccttaatcgttcgtttgagttcatccatataagcgataccaccaccacacccattattgaacctgcggtaagggcatccgtaattgcaggtgccgcaaaagctgccgcccatgatatccacatcgtcgcagtcgatacagtaagggcttctttcataacctatacctatgccagcaccgaatccggtaggatcaggatcgatagaggttgaagaatcaggatcagcttcatgcggaaaaccgttgcttggttgaaacccatcggctccgtcagccatg

SEQ ID NO: 5524 - DNA, 388 bp, Gossypium hirsutum
  Clone ID: LIB3828-001-Q1-N6-A7
ggttctggaatggggttgggtggtttcgggggggggggcagcaaaatggttcgaaaaggtgggccgtgaaaaaggtcggaacagagaaaaggaaaagaggaaaaaaaatgggggggggccgggaaacaaaaaaaaagggaccctcggccaacccccccaaggcgggggggggggaaaaaaccccaacgggcccaaaaaaaaggaaaaaagggggggccaggaaaaaggcagaaaaaaaggggggaacaagggggaggggaaatgggggggaccaaaaaaaaaaggaattttttttttttggaaaacccggggggggccggggggagagaaaaaccccacctggagggggaccaaacctggccgaaaggggggttaaaaatggaagggg

SEQ ID NO: 5525 - DNA, 394 bp, Gossypium hirsutum
  Clone ID: LIB3828-001-Q1-N6-A8
aaggcctggtttaaaaaaaaaaaacccaggggggggctttttttttccatgggaaccccagggggaaaaaccccccaaaatttttaagccggggggggggccccaattttccaaaaccccggccaaaaaaaaaaaaaaaaaggggcccttggtcccccgggggaatttaacccccccctgggattggtttttacccaaaaacccaaaatttccccccccccggcttgggggggtttttttttgaaaaccccctaaaaaaaaaaaacccggttttgggaagctgaaaaaaaatgggggtccccggggttaaaaaactggggggggaaaaaaaaacctgggaaacctgggggggaagccctaaagggttgggggggctatttttttaaaagggggg

SEQ ID NO: 5526 - DNA, 503 bp, Gossypium hirsutum
  unsure (1)..(503): unsure at all n locations; Clone ID: LIB3828-001-Q1-N6-A9
atgcccaacaaaataggagagttttatcctatagattctgtagtttagtttatattgcatctatccttgcatgataagtatcgaaaagaaaagaaaacgaaacatgacatacatgcacaacacatgtatacgagagatggaaacagatgtaagctatgcagcactgttcaaataaaacttggtcaagtgaacaaatggagaaacctttgtgttgcagtttagagagcataaaacagctaaaaccctcataatgattgatgatatagaagccttgtatgtttaaaacgattttttcttacgaccacttagtgagattcgttttagctcttgtgacccacttttaattcccctttggtacaagtaaatgaagaagtagaaaagaggcagcagcatcaaagtcaaaacggatagagaaatgtaaagcatacttgnttcggttcttttgtcctttaggaaaaggttttggaccaccgctgcaagtgtgggcatcacagaattgccgc

SEQ ID NO: 5527 - DNA, 395 bp, Gossypium hirsutum
  Clone ID: LIB3828-001-Q1-N6-B1
aacatcttcaaacctatactatcatttttattgaagagaattaatgcatgaaaaagtaagtaaatattaaattaaaacacaagtgagaatgtgaaactacaaaatttaatctgaaacctagagattaaatttcatggatcaatgctacaaaaaggaaaaaaaaaaggaaacactgaaagaagatttggagggggttgaattgtggtttgaaagtataaaaaaaaataaggcaggctaaggctaagggataaggcaaacaagattgtgaacacccacacacacactaagctctagctgaacaatctctgattcatgagggttgatcaccgaataatttgtgaatggtgtattggcgaatgaagcagctgcacagttatggggagaaggggactgag

SEQ ID NO: 5528 - DNA, 304 bp, Gossypium hirsutum
  Clone ID: LIB3828-001-Q1-N6-B11
atccatcaaaagtcgagcatatcggctgcgtcgcacaagggaagttgccatggcttcatcagaagatcggggatctccgggatatcgacgtcgtacccgcttatgtcttccaccatatgcagcatcgagttcaaggactgcaagctctcggtcaattcaattacttgagctcttaagacactgttggaagcttccattttgacgaagcgttgggttgtgaacttgatcttttcacagatctgggtgttatttttctgcaatgcactcacttcgttaactaaatcttcgagtagcttttgtttct

SEQ ID NO: 5529 - DNA, 581 bp, Gossypium hirsutum
  Clone ID: LIB3828-001-Q1-N6-B2
aaaacaaatttattatattttcaatgtataatcttatgatcttttttgagtaagataaataatttaaagagaccacatatatgttgggtggctagtgcctgaaccaaatttctctgctatttgatgagagctgcatgcagaagtagattccatgtatcggggaggccggcaatgcaccagtgggtgcaatccatgccgttgaagtcattgtaagtactaggatgtgcatcttttcttaattgagagagcattgtaatatcaagcaaatgaacaggtttcttgatgttccttatgacctctttaactacgtactctgccagaggcaaaccggttggataactcgatcccttagatggtgttgtctgctttgaacaattccttactcctggctcattccaatctctgccattgtagtgagaaggggaaattccttgaaatataactttagtcctattggtatccacatctgaatcaacccatttagcccatgttctcaaagctgtacgaaaagcaaccgtgcgatcaatgtccttacgaatctttccatcaaattgcacataatcccattgttgcttcagtcc

SEQ ID NO: 5530 - DNA, 471 bp, Gossypium hirsutum
  Clone ID: LIB3828-001-Q1-N6-B3
gtcccgtgaaagattgttattataaaatgggtctactacatttcactaccaaaagaattggccggtgatctaacataacaaactcagatatatatcatatatatagtttttcaaggccagaacactccattacaggattctgtcctggaaatcgctcataaaagtggacgcaaaggagctcagcttctttccggtctctcctgctatgttcttaaggcttgagatatcctgctgtgcctggaaagagagtcggttgatgaggtcactagcagtaaggtcaagagcattatctgcaccttgaccaaatagatcagagctggagatggctgttgagcttgagaatttctgcaaagtaacttgagcttcattgtcagctgctctggtttggtcaccaaaaaattgggctgatgaaatagatttagcatttgagaattttttcctagcttcatcagtttcctgaatctgcacttt

SEQ ID NO: 5531 - DNA, 536 bp, Gossypium hirsutum
  Clone ID: LIB3828-001-Q1-N6-B4
gacagggtaacaatcatcttatctcacatcaattaaactttaaattaaaaactacatcttttcttttatattaaattaattttatttaaaaagaaaaaaccctagaagccaagagtgctatccctggtgtcctagcaaaaacagtagctgctgcagcttgggatgacggagagtggtgacaacgatgggtttgggggagacgagatctccctagaggaactcattcaactatctgtcaagagtttgatggtggaggcaaatggtaaaccttctctgatctgttcttcacaagaaaagacgttgcaaggatcctccgaatccctctggcactaacaccgcatgaagattttcttatttggggaggtgagacgtcgagcgaattcaaagtccgcagtgcttataaactattacagagatcgaatggtaatcctagagcttatgctttacataccatctacaggaaattctgtaaacaactctggagcctgaatctaccaacaaaagtaaagattacaatatggaggctgtcatggaac

SEQ ID NO: 5532 - DNA, 572 bp, Gossypium hirsutum
  Clone ID: LIB3828-001-Q1-N6-B5
agaataataatgattcaatttttattataggctaatgccgagcttttagaaaagttgaagtgaaaatacatattatagttctgaccaaggggcaatgtctccagcttcttggctaagctcataatagcctatctcttgaagaacttgagtacactgaggaagagcaaccttcttcttaaacccaagattgttggcaaaccgaagttcaccgctgacgccgtcaagtgtggtgagaaccaccctggatatcctccacatttcggagggatcattgcaatccgggttgggactcctcaccaaggcgacgtcgcagtctgattcctcataatcgccttccactacaatgtgatagtctccacgttcgtcagtcactatttcttggctctggaaggtaaggtgattgtctgtacgattcctgcattccagtttcactactgctccagcgatgggttcgctgagtttggtctcaaactcaacacggcaagtgtcacagtaaacatggcctacgacgacgtagctcatattttcagccccatagacgaaattgagtgaggacgaaacaaaaatggtga

SEQ ID NO: 5533 - DNA, 570 bp, Gossypium hirsutum
  unsure (1)..(570): unsure at all n locations; Clone ID: LIB3828-001-Q1-N6-B6
agcaaagaaaatcatatatattagcatgtacatgcattaattacatatggctacaaaacaagattcaaggaactttaggatattgtaaatcaaatattgttttgagctatttattcttcataattactctttttatccaacaggattttatagcaagcccttctgcaacatcattacttcttattttgtataattaatacgacgacaaccaactcttcctcattatttcatcttaatatggtatcatctccctactttggtggactgggttcactgtccataacctcttctatccctttgctctttacagtttcagcctggcaacatcctgatgcgcacctgggctgaccacactcagcacaagtcccaccgcaaccctgacggcaacactccccactctcacatcccgactgtcctggcattagtgggatttgtgggacttgtgggatctgtgggattagtggaatttgtgggatttgtgggatctggggggatctgntggaattcttgggatttctggaaatttgagaaatggtagaacgaaaccccagnattacaattaccggaaca

SEQ ID NO: 5534 - DNA, 585 bp, Gossypium hirsutum
  unsure (1)..(585): unsure at all n locations; Clone ID: LIB3828-001-Q1-N6-B7
cttaaaatatgacatacgttccatacaatcaatcaccctacctaattcctttctgattttttcgttgatgacaaggaatcagaaaatcccaccacctccatttacatataatttttgtcttacaacatttcattaaacatatatatggtgaagggcactaaagcagcaaaggttggaaaattgtagtcagagaggatgaaacccgggagtctcaccttctttttgagaggggcttctccaaaatccagtaccgtaaaacctttgccacatttcattttccagttccactgcagctttctcagtttcttcggaaacctctgcgtcttggaaatagtcctcgagagagagtaattcgggatcattacatcggaaatgggcgccgtggttctttggttgaagtaacccttttttgtgcaacttgcgcagccgtttctggcggagagcacggcggtacagccctgcaggaaccttgtatattgctagaaccataaggttggctaacccacatgggcaacagcaacagacagccgcaacgtcgngcggtagtaccgccgcaaacctccccgaacctgagattggtgttcc

SEQ ID NO: 5535 - DNA, 578 bp, Gossypium hirsutum
  unsure (1)..(578): unsure at all n locations; Clone ID: LIB3828-001-Q1-N6-B8
gacagaggagtgttgttacttggcctatttctttctaatgaaaaatgctaacaaaaacacacacatagacacaaccgacaccatcattacaagctagatttgcaatatgtctggtcataaaacctcaacttccaagttgcattaacaccttattcaatatgaatggtggactagccacaactaataaaaaaaccctcctcaagcaccaatgttctcaatctcagcacttttatccattctcttcacaatgccagctatgacctttccaggccccaattcataactctttttcatccctttggttagcaaagttttcactgtggtttcccactgaacaggagaagtcgcttgacgtgctagtattttctttatagtctcaggatctgcatgaggctgagcatcgacatttgatatgacaggtattcttggagttctaatctgggttgctgccaatgcagcctccaatcttgagactgctgggtccatgaaactagtgtgaaaagcaccagcaacagctaaacgtaccgtcatccgagccttgaatgactntgctttagcttccactgcttccactcctt

SEQ ID NO: 5536 - DNA, 531 bp, Gossypium hirsutum
  unsure (1)..(531): unsure at all n locations; Clone ID: LIB3828-001-Q1-N6-B9
actgttaacccatgtcatgcagttcaggaattacttcataaataaattcagtctataaaaatcaactgtcataaacactacaaatcacaaagaatcatccaatacaaagctccaacttccaaaagaattcttttctctttggatatcatgaatgttgaattaaatatattcaaatttgaatgctacaacatatatatatagtgtagtagatgaaacacaagtgagggcatgagttgcagaataccaacttggacgaatgaatcataattatgcaatattctagccaacaactaacaatttcacttttcgttctgccaattttgctttaggatgatgtgcaagtctcaaattccaactaaagaagcctaagatgtgcagtatcattcaaccgttttatctgccaacctgttttccaggaatgctgtaatacagtgacagaaagagtcttctatgcacaccttatgtgacattacggngctgcactcaaggagggcctgtgataagacatttaattggcagggaatgagtaaa

SEQ ID NO: 5537 - DNA, 212 bp, Gossypium hirsutum
  unsure (1)..(212): unsure at all n locations; Clone ID: LIB3828-001-Q1-N6-C1
aaataaataaacacttcgccaaagtcttggttatttaattattaattttatttcaaaggaaatggttttaaacaaaatttttttttttttgggccccccggggggggtttttttttttttccccccggggggggggccccaaaaaaaaccccctttttttttttttntnagaccccttctctttttttttttggggggggggggggggggaa

SEQ ID NO: 5538 - DNA, 539 bp, Gossypium hirsutum
  Clone ID: LIB3828-001-Q1-N6-C10
gactaagaatcagtagtaaacatcagctgcaacaccaaatgcagaaagcagagttgttttaaacaagtccaaaaacataaatatatagttcatatatagttaactgtttcaataaactaaagaagagaagctagatagcacagccatcgaatatcaagcatttctctgaagaaatgaggcgacaggcctcacataggtgaaccccttaaagggattctcaccgaatgtaggactggcaacgggagaatcaataaccagcatgctagtccagcactcctcaaaattagctacgcagtggtttcctgcaacatcagggagaaaactcggcctaacctcccgagcctctaatttcttccagttaatggccttgaaccatttatggcgtttgatctcctcactacctccttttccacaacccagacgcttacttgcttctttctgcagcagccccttgagggattgagtgtgcttcacttgacaaaaaagctggcagcttaatcttttcctttattattttatcctggaccttttgtctgttt

SEQ ID NO: 5539 - DNA, 591 bp, Gossypium hirsutum
  Clone ID: LIB3828-001-Q1-N6-C11
cctactaataaaatttccagattaatgagtactagtactttataacatgcataccaaacaccttcaaatggccaggccaatacatttaaccttcaggaaacaacagttagaaccaaaataatataactcatgaaacaagagagtgggaaacccgaaactgatacaagatgcatgctcctcatgaacgaaaatagcggctgctacaacagcaattaactactacatgtaaggcaaagcttctggcaagcattctcttcagactaaaacatgggaaacaagttagaaatttaaaaggcacctcggcatcccgtttgcgtatataatcaggttgctgttttttatttctgcccgggtgctgcaggggatctatcggaaagtgccctgtatatggctttgatagtatttggagtagttctacaacaacctcctacaagtgaagccccaatctcgcaccatttgtttacgtaagagacaaaatcttcatctgagactcctgtattttccacccattccttccgatcagcatcatacctctcaccactattgggatattaactatgggtttgggtagtgaccttcttaattgctaaa

SEQ ID NO: 5540 - DNA, 511 bp, Gossypium hirsutum
  Clone ID: LIB3828-001-Q1-N6-C12
atataacaaagaaaatcatatatattagcatgcacatgcattaattacatatggctacaaaacaagattcaaggaactttaggatattgcaaatcgaatattgttttgagctatttattcttcataattactctttttgtccaagaggattttatagcaaacccttctgcaacatcattacttcttattttgtataattaataagacgacaaccaactcttcctcgttatttcatcttaatatggtatcatctctctactttggtggactgggttcactgtccataacctcttctatccctttgctctttacagtttcagcctggcaacatcctgatgcgcacctgggctgaccacactcagcacaagtcccaccacaaccctgacggcaacactctccactctcacatcccgactgtcctggcattagtgggatttttgggacttgtgggatctgtgggacttgtgggatctgtgggattagtggaatttgtgggatttgtgggatctgt

SEQ ID NO: 5541 - DNA, 482 bp, Gossypium hirsutum
  Clone ID: LIB3828-001-Q1-N6-C2
ggcccaaaaacctccttccaataaaattaagtagtaatagaacaaagagttaaattcttgtttagtcaacccataaaaatagaaaccattccatgataaaacaacaaacaattaaatcaaaaacatcaaaaaccataaataatttatgtctttagcagagtactgaaaataagagacaaaagcaataataaaaaggactaaattcttcagcaaccactttttttttctttgcttcaaacctcagcacttgacctccttcaatgcatacgcaaagtacaaaaatgtcgggtcaacagcaccatccttgtagtaagcaaataccaaacatccatcatcgtgcatgctctctccgatgaaaaattgaaggtccttcaattttgaaagcaaaaacttggttgctccctcaatgtttttcttgaaggactcttgcttttccgcatccagtttcggtgtcaagttcttgatgaacttcttcatgaaca

SEQ ID NO: 5542 - DNA, 593 bp, Gossypium hirsutum
  Clone ID: LIB3828-001-Q1-N6-C3
aaacaagaacaaatcactagaacatttctatttagatcaatggtgatgtctcagatgtattaacaaagtgatgaactgctccaagcttttaagaaataagatttggcatctcaccaaatactaaactggattctttctccagaaaaaaacctaaccttttgaagccaagcaacgataagcaactatttaggtgtcaaaaggagtggggtcttcattctatagcaaatttggtatctttttaccaacgctctcttggccgaccatcaggaaatacaggaacacgcctttcttcttctttcttggctgagaaagctgcttgtgtagttggtttgctcgacccaacattaacaagctcatcgtcgtcatcaaaatctggtggtgcatcaccatcatcatcatcgctccaatcatccgcatagtcatcatcttcgccaccctcatcatcaccaaacccaccatcactcagataactatccatatcagaatatccttcttcttcctcatcacttgcctcctcttgcatgttgctttcttcattattatctgcatctttctttgaactacccctttttgggaacctaggaatggcaaca

SEQ ID NO: 5543 - DNA, 600 bp, Gossypium hirsutum
  unsure (1)..(600): unsure at all n locations; Clone ID: LIB3828-001-Q1-N6-C4
aacttccaagagttccacatgtaaattacgatcaaaatccattctggaactaatgtgcaacaacataacagggcaaaacaagcttcaatctaaaccaaaaattgtttaaaaaagaaattccacgcatattggaggagcagcaacagtgagcaacagatacgaagcaaagaatcacagccttctcccacgtctgcctccctttctacgggtactgtcagtgggaatgggagtaacatcctctatgcgtccaattttcatgcctgaacgagcaagggctctaagtgctgactgtgcaccaggacctggtgtcttggtcttattccctccagtagctcttagctttatatgaagggcagtaatacccaactccttgcagcgttgagaaacatcttgggctgcaagcatggctgcataaggggaagactcatccctatcagctttcaccttcatgccaccagtaatgcgaaccattgtttcccttccagacaaatcagtcacatgaatgaatgtgtcattaaatgaagcanagatgtgagccaccccaaaacatgctcgccctctcgaacagcaggtcctaggttagtattctcctncttgggc

SEQ ID NO: 5544 - DNA, 601 bp, Gossypium hirsutum
  Clone ID: LIB3828-001-Q1-N6-C5
aaaacaaatattagatagagaattcttattcttgcttacactcaaaatcacatcataaattttgcttgttaatggtacatcaagtgcatgaacatgattttttttgcttatgaatccaccgaaatggatcaaattcgcaatgtctacatattcaactaatgaatctgttgcgcgtggcaatttacattaccagggactacaagcttttgggtctgatgcatgatgacaggtagcctttggctgatgatgcttggatcactatatgaagcagaatcagtaggatatcctttagcagacaaagcttcaaatgttccttccctccaacatctttctctaagaatgacaggatttgcactctcgtcaaaaacacaatgcatgcgagtgtcccttaatctcattagcactccgtcaactcgcagccaaaatcgcaagagtagaaaccaagaacttggcatgactctcactttcacagttagaagtgacactccactatcagccaattcatcttcatataaaactacctcatcatagaacaaaataggttcccttaatgtgagtgctgccatatcaagctgctctttgcaatcttcccaatggagcc

SEQ ID NO: 5545 - DNA, 491 bp, Gossypium hirsutum
  unsure (1)..(491): unsure at all n locations; Clone ID: LIB3828-001-Q1-N6-C6
gcaccttccataataaagaatatcttattaatataaataaaacataggaaaaaattgtttaacttaatcaataattgacaacatgattactaataatgataataaaagaatactaatggcgatggttttggaagtttacactccagggaccatgtcaggataacaaggagtgccggtttgcgaaatccatttgtcagtttcagtttcaagaaagacgccaggagtccatttcttggcttcatttatatcgattgtcttgatagctggccatttgaccctgccttcggttttagcccctggtcccctattttggaactctacaaagtaaccggtgtctagtcctacggttccttccatgggggagtaaccctctggtgtaatgatgtcatcaatattgctttgcattatgatggtcctcgccaaagctttccaaggacgaccaagatacgtcttgctcttgtccttaccgggaggtagtccgnacgcgtggg

SEQ ID NO: 5546 - DNA, 571 bp, Gossypium hirsutum
  Clone ID: LIB3828-001-Q1-N6-C7
aagactaaattctgcttcttattgacatttggctatttgttaaaatacaagccatgggaagggaaaataaaataaataaaataaaatggatggctagttatttccacccagcaaagaggtagacgagagtctgcttgaattagcaatactgtgaggatatgttgccggcatgaaaaagttgggaatgaatgaattatttaggtaccgtcggaggaggaagcaaccatttggtaccttcaacgtagtcaagaaccaagaatggtttagcttccgcatccgatagttgtttgacgaatttctctcgtgtagcaggagtcgcgcctttccccgtgcatttgtattctccgtagtacacagtgtcggctcgttcaggttggcgattactagaccatccaccaggatggacgatttcgtccatttcagtataagaataaacaaccctcggactgctcttccaggccctgcccaaaaatacgtccttcgctgttcctgtaattctgccatgcacgaacgaataacccgtgtcctccgatgaactttctcgcgcatgtgctgtaattattgccatttc

SEQ ID NO: 5547 - DNA, 554 bp, Gossypium hirsutum
  Clone ID: LIB3828-001-Q1-N6-C8
ttttttttttttttttttcttttaaaaaaaaaaaaaaaaaaaaaaaaaaaaaaaaaaaaaaaaaaaaaaaaaaaaaaaaaaaaaagggcggcccccctttttttttttttttattaaaaaattgactttttaatcaaattaaaaaatttttttttaaaacaaatgattttgggtaaaaaatgttcccgtaaaaaaatcctttaaagtttgcctgcccgccttaaaattttttaattttttcccaaactttgatttgacaaatcgaagttaaacctaaccggccggaacctttccaaaaaaaaaaaccgattgggggccttttttaccttaataaaaaatatttaaaaagctccccaaaaatgattgttcaaaaccttcccaaaccaaagggcttaaacatctctttattaatcggaccttggcctatttaaaccacctttttgatggttgtccaggggaaaaagccctgggacccgtgtttccgttttccataacaccggcaataaagtatccctaatgctgccatacaaccaatgggaattgcccacctttcc

SEQ ID NO: 5548 - DNA, 602 bp, Gossypium hirsutum
  unsure (1)..(602): unsure at all n locations; Clone ID: LIB3828-001-Q1-N6-D1
agtattggccttggtattggattaaatagttgtcaaagcagttggttttcaagaagttcaacccaacacaataaaaaaagctgatgtgcattatacaaaggccagaacggctaaattcattaagggaaaataaaaagttcagcagtgacttccttcatgggacaacactgaagtagtcaatgaaaatctcacataaaactaggacagactggtcccttggagaggccgagacgaacttccatgctgtggtgcaagtccaatggccgaacagtctccgaatctcgaggatcattcagataatcctcaaagccaaaatcatctaaagttcctgtcaccgcttccaaccctagcatcgaagatggtagcaatggcctctgaaaccgccagagaatttgcctatcgagatccattttgagtggcattgctgtcccataagtattggccagaacttttctcttcatctcttcctgcgttttctttgctgattcgtaagcagattggagagggtgagatccgacgaggtcgctcttaacgccgtggagaccgaatcgcagggcgtcgttctggactcctncaatttcgtgctgaatcgtctttggtgc

SEQ ID NO: 5549 - DNA, 499 bp, Gossypium hirsutum
  Clone ID: LIB3828-001-Q1-N6-D10
agtcaacaaatataaatatttatattaaatataagatttgaataaataatgtaaacgagtcaatttgcccgggcccatgtcaaagccaaaataccaaaataaatctaaaacccataaaaataaaaaccaatcaatagtccgggtccagttccaaaatccaattacacggcccaaatacaatggccctaaccctagccccattcgctcagcgccgcagtagcctccagcactaccatggctcgcgcctccacgtcgacaccaccagcagcctctgtacgcgtcagctacccccaccacgttgcctccgtacctgcaaatgaagacaagcaaaggacgaccacaacagcaatagcaaaaaacaggcagagcaatgagaaaaaaagaaaaggaattgtatttttctttttcattttctttggttcggttataaagccaagaacctttccttttgtaaaaactacgaacgcatactatacatgcagatcgaataagaaagatt

SEQ ID NO: 5550 - DNA, 521 bp, Gossypium hirsutum
  Clone ID: LIB3828-001-Q1-N6-D11
aaaacccaaaaaactctgaaatagatcagtcgcaaagaaaattatccaaaggaattatatatccaaccagccagttttttagttacaatttagccataagttcccaactaaattaatgatcatcacaaaatgcaaataaaggcataacaacaatccgactgtctcagatgaaaaatgagggggaaaggagaatgattgaaaaataataataataagacgagataatgctcccccctgcttccagaacttcccacatagcaaaaatcttcttaatagcttcaggccttgttagctatgttgttggaaagccaatctaggccctcataaagcccctcaccagatgttgcacatgtactctggatataccagtgacgctgtcgaagggaatggaggccaagcttgtcagttatttcagcagcattcattgcatttggaagatcctgcttgtttgcaaatacaagcaacacagcatctcgcagttcatcctcattcaacattctatgcaattcatccctggcctc

SEQ ID NO: 5551 - DNA, 602 bp, Gossypium hirsutum
  unsure (1)..(602): unsure at all n locations; Clone ID: LIB3828-001-Q1-N6-D2
catgaaatcgtattggaacataataatattatatatacatatcgatctctctctcacaccttaaacatgtttcactctgcttaaacaaacttcccttcaaccccaccattgatgcactgcgacaccttcatcccttaacttcccatacaaagccaagcattcccagtaagcccttctgctcatgttctttcttccaccaagtcctttaggtttgcattccaagaacagctcatcaaccaatctaatagccttgctcttcaccatatcttcaaccacttcagcctcagccttcatcactacatactcttcctcctgcacgttcttcctcagccaacccgacatcccagtctccgccgcagtctgcggcacctctttcttggtagagtccttggtcagtgtctcgatcttgtacatctcgaacttcagattccttgtgggataattcttgacaaaccaggtggtggcactgccgccatctttcttaggcaagcctacatcaatgaaaacccgacgggggtagctntcgagtgagtcccccaatagatctggcaaatatttcgttcgtttaaggtaagttctggacgtccttgaggatgctcttg

SEQ ID NO: 5552 - DNA, 627 bp, Gossypium hirsutum
  unsure (1)..(627): unsure at all n locations; Clone ID: LIB3828-001-Q1-N6-D4
tcctattatgccttttccaacaccctgaacaaagccctcgacaccagagctttttgcgccttcaagaggctttgttaatatgcctgtaactcctctgaacaacccttttgctagtgctccacccccttctctaataacatcacctaagtcctctacactcttgctctcctgtctctgtcggctttgaatgaatttcttatccattgataaagcagccactcctttactcatatgtccaagagcactacttgcgttgctcaatatatcaagaccagagagcaaccgaagtggttgaccaagaagatcatttttgatgtttgaaatagcattattaatcatcatactctgcctcatgcacaaattctcatgaaatctttgatttagcttgacagtcatattctctgtgttccctaatgcagtcattaaggatgaccaaaagccaaggactcccctagggcgttggctaggcgacatagccattgatactttcagtctaacttctgagatgttgagaatcccaatatgaatgataggatcaaatgacacangctgttgtgttactatcagataacctactgagattgacctgctgcatcatctcatgaatgcgccatataataggttcat

SEQ ID NO: 5553 - DNA, 600 bp, Gossypium hirsutum
  Clone ID: LIB3828-001-Q1-N6-D5
agtaaaaatattgcctacttttttttatttctggagaaataagaaagagaacaaattccgagcatagccctatttaaatccgatgtttgccaggccggatggttttgactgtgcattgtaacatttcaaataaaagagaacaatttcacatggcccgctaacagccgtaaagattttcaaacatcaagcacaactatggagcatgcaaatgcatgtcttacccacgacccctccccacatatccataccctcttccataatacccaccacgaaaacgaccaccacgtccacgtccacgtccacgcccacgtccacctcgatgtcttgaaaaatcaccaaaagtctctgtgtctaacttcatttgctcagagaatctcggccttccgttttgcaagtcactatcaagtgcattgcaggagagagtatcaaaaaagtcatccttattgtaaacaggcttcgtttgaatcttagatatttcagcatcatcttcatcttgagaaccatattcttcaacggcatctgcttctttatccttagtatgagatttgctactgttaccaagatgaccccatacttcatctttcttgaatttctcattca

SEQ ID NO: 5554 - DNA, 588 bp, Gossypium hirsutum
  unsure (1)..(588): unsure at all n locations; Clone ID: LIB3828-001-Q1-N6-D6
cccattctacaagtactgggactcagttattcacatggagactgatccatatgctatgcatttgcagctcctatattcccatggatccatagatttagaaggagaaagcaaaggactactctgtggcagcaacaactgttggcccttccaccttgaatttagcaccccatatctcctcttcttcagcaggcactgcagtgatcttgttcttaggattctcatagcttcttaatcctcctactgctgtggagtagaaacagccttgaggaaaagaagcaagagatttgccacaggcacctttcagcaattcagcattatcagcaaaggccacatatccgtcggcggtgattccccaatagagaggaaccttaccaaattgatcagaagccacaaacaaagtggaggtggatttgtcaaagacaatgaaagcaaagctcccaattagatggccaaccacatggtttggaggataaggtgctcggtcacgaagggccttgtaagcttcaatgaccaaaatcacttcatttgccgactttgccagaccatattgctgctntaaactccccagttatcaagggctccctcaaa

SEQ ID NO: 5555 - DNA, 223 bp, Gossypium hirsutum
  Clone ID: LIB3828-001-Q1-N6-D7
ccaaggaaaagccttttccttttacttccatgtcctaacccttccaacaggaaatcttacataagatatagcatgtgggctaaatccctttctggacaatatatattcactcttctggggacccggggcatgatcatccacaataaacaatttagttccacagttgggagcaaaactaaggccccaaaacacaatctaaacctaggtttttttgcagctctcc

SEQ ID NO: 5556 - DNA, 574 bp, Gossypium hirsutum
  Clone ID: LIB3828-001-Q1-N6-D9
aatacgaagggtttatcattctatttccaaccaacaaagagcttggcagttgaaaaatacataagcaaaacatgttcctcacaagtgaacaattgttctggagtgaaccatacaaaacaatcaaaacacggtaaccttcagagtgaagcagtacagaaattatacctcagtagtccgatggagaaatgacatcatcaattttcaaaatcatctttacaacttgcgttgccagtaagatctgttgctgcttcccgatcagtgtttcaaagacgtcttgctcccgcatatcattagtcccaacatcattgcagtctattccatagtgtggattattgtccttaatttgctgagatttcactgctgatagtgtctcaatgggttggagtccgctattctcagccagggccatggggactgagtctaaagcatcagcaaatgcccggattgcatactgctcaactcctggatatttatctgcagctgcctccacagcaattgagcaagaaatctcagctgagccaccccatagacaatagaattgttgcgaatgagattcctggcccacacaatgcat

SEQ ID NO: 5557 - DNA, 411 bp, Gossypium hirsutum
  Clone ID: LIB3828-001-Q1-N6-E1
attacactctaatattctcccttttttattatttcttaattcaagatagcagaaacttctatgtcctttttttttaattcaagataccaaaaacaacattagagaaagccctgcatgagaaattcctctttttgggggattcttcaagatttttgaagcccaaatccatctgctttgctccccagcatccatatgaagagaaaaaataaactactatctccatggtagaagcaataaaatgcatgaaaataaaaataaaaattagaaggaagagaagggttaaaagaaacaacaactgattccctttacaatttttacccaaatctcttacctgtgactgcagaagtccaaaagcttcttcctcccttcaataatctcatcaaagaaatcatcaatttgtccaacaatatt

SEQ ID NO: 5558 - DNA, 522 bp, Gossypium hirsutum
  Clone ID: LIB3828-001-Q1-N6-E11
ccacataaaaatggatcatatctgattgtatctaatgaaaaatcccaatacaaaatgaaagataaggatgatgtttgcagttttaaccgtatcctcaggcactccagtaccattgtagatccaacaaatgccaaaaagtgaaaagtttaatacatgagccgctcctttcagaacaaagatttaaggatcgagcaatacctactaaaggaatcatacaaagatggccctacccgcaaatgactaacgcttatctctatcctcattgctcatcgtttcactttccctttttcttgcccttttcaaataacgaaattgttacaatggcagaaaggaactggagaaaaagagtcatgatgcaacgagatcaggtgtttcagcctcaattgataaccaagcgttatgtactttgcccatccaattatccaaccggtcacgcaaggatttgtatctgtgaaatccccagaactcttggctgcacccaagagacatgaattgttccctcaacttgatcgattataccct

SEQ ID NO: 5559 - DNA, 507 bp, Gossypium hirsutum
  Clone ID: LIB3828-001-Q1-N6-E12
atgcatgaatcatcataacttttaaatcattgaaattcatgcatcatacacagtcaacaccatccttacatacatatattacatccatccctacatccaccaagcccatgaccaacattaagagaaggcaacctggcttatgctaaaagaaaaatgcaatggatcgatcgttacaaaccagtaccattgcaccattactcacctgcacattaacaaactcgtctcttggaaaagaaactgagtaaacaaacattttattcggccacactcggctttctctttggcgaggcattttagtgaagcttgtttgcaagattgcattgcttcctgatctcacccttgctaccagtgagaggattgttctcagagaggagagtaatggcccttgaaaactccttgaagaaatagtcttggctcttggccattttcttcacataaggtctggtccttttgtcgtacgccagttggtgatccacaatcaacaaacccttgttgtccaatatgttc

SEQ ID NO: 5560 - DNA, 583 bp, Gossypium hirsutum
  Clone ID: LIB3828-001-Q1-N6-E2
attattgatatagttcataaattagctacagtgaaaaaaataccggaaaacaaagcgtggatttacatggacactttgcatctctgtagtagtaggaaaattatacaatgtaataagttctaaatcttctgttttgaaaatttaggctttttgaatcatgattgctaataataaactactatatgtggcagccaaagcccgtacaaatgagaaaaagaactcaaaaacctgtttggcaaagcagttcttctatatctcatcaccagcatatccatttatagggaatttgtatatcctgtgggtgcttggcttgatggtagggtggtgtggcaactaagcatccaaaacaatttacagtttgactatagatgctggtctcatttgatcttatgcccttgcgtgttccggaataagacgttgacgtagttcgggagatgcaccagccaattcttgagccgtgaaatcgaatagaggaggtagagctcgcccgttaggcaaacatgcagtggggtctctcaaatcatcaaagaaagggtgtgcacaagcctcaatagcggtgcaacgtaagtttggcgaatactga

SEQ ID NO: 5561 - DNA, 600 bp, Gossypium hirsutum
  Clone ID: LIB3828-001-Q1-N6-E3
aaagagaaaacatgccattaacataataaaaggtaaatccatgtgtaataacataaatccagcatccattgtgcttaataaagcatgaccatacggcaaatatcaccaccatatcttaaaataaattcaaaaatgacaaaaaagaagaagagaaatttaaatcttatcgatgtcctcatcctcgaactcgatgtagtcatcgcctgcaccatcatcttcctcatcaatgccgccagcaatcccttcattcaacctggtattctcgggtagctcaccataagctttgagaagcctagcttcatcgggcatgtatttcaagatgacgtcagccttgtcatcttgataatccctaaggccgacgaggatgatgtcgccggcggcgatccagaccttcttgtgcatcttcccccggatgtggcagaggcgcttggtgccgtcgatgcacatagcttcgcagcggccgttacccaacatgcgtgagacttgggcgtattcttggccatcttctttgaagaaagctcacgtttctcgtcatcggcctcgttctttcccctcttacggttctttcctccctttcctttgttcttcggcatctttggc

SEQ ID NO: 5562 - DNA, 599 bp, Gossypium hirsutum
  unsure (1)..(599): unsure at all n locations; Clone ID: LIB3828-001-Q1-N6-E4
gcaaccaaatagtgtctacaattaaacttggacccagatataggaattgtgaactttaactcactctccattaagtacataaattagaaatttttaattactaatgtacaaagtgaaataaaaaaaaaagtatcagattaagtgaagacaataaagttcttaatgttgcttatataacaatactaaatacaatctattttggtatacaacaatatttccaaccactgtagtgtagacaacaacatcaaaaccttttttttattaagaattttttgttaaagaatctaaatatatttgacttaaattcaactatcaactgttagtgattttcactgtctcggcaatagtctcctggaaattactcgtcccctgaaagtttcatcttctccgtaatttgaattaccaccagcaatactgttttcccttagggataccctattaactagccaaattcacatcttttcaagaggagatcaagtatgctatagccaagaccagaagactgcagataaagaatccattatnttgtagtagctgatgaatatatcaactcaggaagaaaaccctgaactccaatgttataaactggggtaccatca

SEQ ID NO: 5563 - DNA, 302 bp, Gossypium hirsutum
  Clone ID: LIB3828-001-Q1-N6-E5
cacaactattttactaaaaaaaggctgatttccaactttatttacagagatggacagcttaaaactttatttactggtgtagggcccaaattttgcccgacccaagatacagacccaaatcactaaaattaaaaggcccgattacaagcccaacgacccaaattttttcaaaaaatagcaaaccctagggttccatttgcccacgccgcaactcccacacttcaacacccacgaacgaattcctagctcgcacgttgcacgatcatgcactcttcctccacgatttcacagcacctttcgat

SEQ ID NO: 5564 - DNA, 586 bp, Gossypium hirsutum
  unsure (1)..(586): unsure at all n locations; Clone ID: LIB3828-001-Q1-N6-E6
gtatctcaagtgtacatagaattacataagattaagaaaaaaaaaggtctaactgttacacggcaacactccagtttgatttacaattttcttgatgaagagttgttcattcttgaatgggaggcaagaagcatgcgacaacacttaagtagcaaatatatatataaaaaaaacagagatggcaaagtcttacaaagaaccagaggcactttagtagcttcttggctctcctccaaagctaaaaataaaacccaaaacaccacaaccaaacctaaaagtataagccaaacaacgcagctctccaccgcacggatcgaacatgctgccaagtccactcacactcggtatacctgtaaaaccataatgtaagccagcaaataatgggacacttactgaggtgtactggccttactccttggggcaacaaatgtttctcccgacgcctcatctacaacacatntatgccgttgacttcaaactcaacctgctataaataaatcaaaaaaaaaaaaaaagaacagcataaagagatcataatttgcataaagaaaatagaaagtccaaaaaaacatgcctcatcactggc

SEQ ID NO: 5565 - DNA, 497 bp, Gossypium hirsutum
  Clone ID: LIB3828-001-Q1-N6-E7
agcgcctataaactattacaaagtactgcaaatgatcctagaacttatgctttacaagttgactataaggacttctacaggaaattatggctacttgatctaccttcaaaaataaaaattacagtttggaagatctcttggaatttcctagctactcacgttaatatgctacttagacgactaacgaatacatcaatgtgtcctcgttgtggctctggatctgaatctatggaacatctttttcgagaatgtcctgttacaatatcagtgttcataaatatgtgcaggaaaaccagatggggtttctacagtggttattctgggattttacacaaagctcggcatcccagcgtcggaccttctgtgttgcagtacgggccatttggggagataggaataacagactgcataacaaagggagtaaatcttgttcggaggttcatcaaagggtttcctcagccttcggagcggaagcaattgcgtgtcgaaaagctctc

SEQ ID NO: 5566 - DNA, 55 bp, Gossypium hirsutum
  unsure (1)..(55): unsure at all n locations; Clone ID: LIB3828-001-Q1-N6-E8
cacgtctcttaaaaaccatagcaaataatatgttannttattggataatatttat

SEQ ID NO: 5567 - DNA, 588 bp, Gossypium hirsutum
  unsure (1)..(588): unsure at all n locations; Clone ID: LIB3828-001-Q1-N6-E9
aaagattaaaaaatctgtttaattaattagtaaaaaacgacataattagaacaatgatatgataataagcatactaatggcgttggtatcgataataagctgtctagactccagggaccatgtcgggactatagggaatgccggaactcgggatccaagtctcagattcaagatagacgcgaggagtccatttgttggcttcatttatatctatctttttgatacctttccatgctaccctacggctggtatcggcaccgggtcccctgtttccaaactcggcaatgaaagaagtgtctattcctatggtgcctgtcatgggggcataaccctctggttgaatgatgtcgtcgatctgagattgcattatgatagacctagcgaattgtttccagggacgccccaagtatgccttgttcgtatccttcactgggatgtaatcaggggcgcccgagatggtgcagttttgaagcacaatggctgagtttgttccaagatcattccttccctgtgcagtaaccatgcaattntggccaggccctggcttcctcacgatgagcatacagttctggaaaatgctcgtcgcat

SEQ ID NO: 5568 - DNA, 614 bp, Gossypium hirsutum
  unsure (1)..(614): unsure at all n locations; Clone ID: LIB3828-001-Q1-N6-F1
aaagggataatttctcaataataataataataataataataataaatcagttcctgcatctcatttaaactttgggttaatgcatgcattgatccaacaaattttaccccatcacatgcaccagagattcacccctgctgccaataatgtacacaacttggtcaatcaaacctaacgactaatcaacctaaagttccacagttcagcgatgaagaatcttacaaacacttggtcccactcaatccatccttcctttcaaaatcctttcctttacttctgtaggtgttacaacatacacatgccctccccacccactcaaacagtcacgatctactgatgcaaggagagcttgggagaccgtttcaaacaattcctcaggttccatgttctccttgaacatagactcgcaggcaccataaagagactctgaggcagtgccagctacaacaaaatcttttgccagctccttggctccaatggaatccatggtgcaaatgaagggcttgtcttcatctcccaatccagcaattactggttggcagaagtatggaccaaaccttntctcgtaaaaatagcagaaacaagctagcaaagtctcaggttcatgtccctct

SEQ ID NO: 5569 - DNA, 588 bp, Gossypium hirsutum
  Clone ID: LIB3828-001-Q1-N6-F10
aaatgagtccaaaaggaattaaattaaaagtctacagtacattacatgaagatttggacaccaaacttataagataaaggaataaaaaacaaaagaagcaacgtatgcaatactaaagaaaagccctatttaacatgatacaagcaccatgaatttcaattagcaaaaccttaacaaaaagaataactaatcgtgccgacaaacatcatcaattaacagatagcatttgcctaagcaatggcatatttgatcgtctctacctccttaggtcgccacatggatttctggacgcagagcaggccttccttgtccttcgagtatgtcatacgcacttcccactgcatagactttaacatattctctagctcgttcatggtctcaacgttgtctcgaacaataagtttcccttctggtcttagtattctgtcaacctccgcaacaatggccaccaaattacacctcttgttaagctttgagaatagatggtcggcatggagaagatcgtaagaccttggataggtgctaaacgattcacaccaatcatgatacatgccaaatagacctctttcatatattatggggaagtgt

SEQ ID NO: 5570 - DNA, 205 bp, Gossypium hirsutum
  Clone ID: LIB3828-001-Q1-N6-F11
ctactgaacaaaaaacagagcaaatgggtttgaccctaaggttccgcaataattcaaacgaaaccagttccaaatcaacaccaaaggctaataatttaaaaacatgggtgttcctattcaaagatataagtcttagcgaacctatctgccctgttcccttttttatcaatgttgggttcatcgttatgggtggggaaaaagttac

SEQ ID NO: 5571 - DNA, 589 bp, Gossypium hirsutum
  Clone ID: LIB3828-001-Q1-N6-F12
ataatctaaatttccaaaattgatatcaacaatagagaatactacatagctattttgactctaaactaggaactctgagtcagcaagttccaggatcctagggacaccgatggattttgctcctttctggaatgaatttcctgcaatgtacctgtcaacaatttctatgaactgtcaattaacagaccttataagagttgtaacttggccagaactgagagtagaagaaaacttgcatttctttcacaaagggatgtctatagagtgcttcaggaattcttcctgcaaattggttgtgatctaaatgcctgcagttccaataagatccaataaaagaacatgtatggagacgagttgatgaacgcattgatgctaaattagctcagaaagctggaataaactgcgaatgcagtgtgaaagaggcaacgagcgatgtctagatactcgaagctctaaagaaaggccaagttatgttcaagaagcaaattaaatcaactttctggcttaatacaatgaaaccctacttcagctacacactttatgtaaattgcgactaaagaagtatcaacaatgtctaacaatgaactta

SEQ ID NO: 5572 - DNA, 645 bp, Gossypium hirsutum
  Clone ID: LIB3828-001-Q1-N6-F2
ataaaagaagctacaaaacacgtaataattaacaatcatgattaaagaagctagtacacaaggtagctacaaaaccctgtttcaataacacctaattcaagttccgactaagatatacgaccatggaatgcaacattaaataacactctacttgaagaagtgcttagccttggcttttccagcttgaagagattgaatcctccactacaccttcaatatcttggtcaagcagtatatcgccactcgtcttgtcagccaacatagcaagtggagcctgtttgttgccttcctcatcaaagacaacccttgtccccacaggcctatgaacattgatcttcagcttttttttcttcaagatccgtgttgctgacctagtttgattggcaaaacttcattttctttggtaggctgaaaaatgtagctgttgatgtacttcatccaacaggggaccccgcacaacagttaaagaagtctgaggatctttatcagttccatcatttcccgagtaataaccataggattgctcagcaaaggccgtaaccgaatttctggtattaacataacgagtaagttttccttcatttgctgagtaaagaagctttaaacttccttggccaacttcaatggtattgctttcacttgctt

SEQ ID NO: 5573 - DNA, 472 bp, Gossypium hirsutum
  Clone ID: LIB3828-001-Q1-N6-F3
gggggggcaaaccatcactgggaattcaaacctggttcataaacgcccaaacaaggaagggggagaaggccctcttcaacaatgaaaaaaaagaaagaaagcctcttcaaggggaggaaccccaaggaatatttttacatttattaaaccaccctttcttttttggattcttcaaaacctcaggggttcaaccatttttttgcgggggcttaccggaaaaagggggcaaaaaaagaaacgagggttgctccaaccaaggacccaaaaacaggcattgttgaaaatgccaccctggaatctgggcctggggcaaatgctgaaactgaaactgaaactgcaactgcaactggagcttaaactggaaaaggaactggagcggccccagcaaccaaaacctttcttatagaggggggggggacaatgacggggcatgaaaactttttcatggccatgggattgaaaaaaaagggta

SEQ ID NO: 5574 - DNA, 520 bp, Gossypium hirsutum
  Clone ID: LIB3828-001-Q1-N6-F4
aaaacccaaaaaactctgaaatagatcagtcgcaaagaaaattatccaaaggaattatttatccaaccagccagttttttagttacaatttagccataagttcccaactaaattaatgatcatcacaaaatgcaaataaaggcataacaacaatccgactgtctcagatgaaaaatgagggggaaaggagaatgattgaaaaataataataataagacgagataatgctcccccctgcttccagaacttcccacatagcaaaaatcttcttaatagcttcaggccttgttagctatgttgttggaaagccaatctaggccctcataaagcccctcaccagatgttgcacatgtactctggatataccagtgacgctgtcgaagggaatggaggccaagcttgtcagttatttcagcagcattcattgcatttggaagatcctgcttgtttgcaaatacaagcaacacagcatctcgcagttcatcctcattcaacattctatgcaattcatccctggcct

SEQ ID NO: 5575 - DNA, 457 bp, Gossypium hirsutum
  Clone ID: LIB3828-001-Q1-N6-F5
aacaaagaaaaacattttttttagccggcccatgccttaattccctttgggtccaaaacaagattcaagggactttagggttttgcaaaacgaattttggttggggccatttattcttcaaaattccccttttgggccaagggggttttatagcaaacccttctgcaacaacattacttcttatttgggataattaaaaagacgacccccaactcttccccggtatttcatcttaaaaggggatcatccctctacttggggggacgggggtcactggccaaaaccccttctatccctttgctctttacaggttcagcctggcaacatcctgatgcgcacctgggctgaccacactcagcacaaggcccaccacaaccctgacgggaacactttccactttaacattccgactggcctggcattagggggatttttgggacttgggggaactgtggga

SEQ ID NO: 5576 - DNA, 481 bp, Gossypium hirsutum
  Clone ID: LIB3828-001-Q1-N6-F6
actctcatcggaaatcattccggattctttttttttttttaccaaaaagaaaacacctgaaaaccaccctagaggcgaaaaatgttcgagcaacaactgcctagcaattatgtttctttcgagaatttattttttaaaaagaaaaaaagaaaaaaaaacgaatgtttctttgggaggcaaatgttggctgctctcgtgcctactctgcaaaccaaactggttttgtttagtcatcagcaaatcctagctcaaagagccttaagtgagcattagcgtaatcagcaaagaattcaccctcatcagcagcatatttctcaacgaatggacggaacactgggtcagagacgaaaactttgtcggatggcagctgcataatatctgcccccgttccggacaatagctccttgaaataaaaattatcgaaggtaagtgggttggtagtccatgctccatcaaatccagaccggtccttatggcacct

SEQ ID NO: 5577 - DNA, 547 bp, Gossypium hirsutum
  Clone ID: LIB3828-001-Q1-N6-F7
agcagaaatttatatagcaaagaaaatcatatatattagcatgtacatgcattaattacatatggctacaaaacaagattcaaggaactttaggatattgtaaatcaaatattgttttgagctatttattcttcataattactctttttatccaacaggattttatagcaagcccttctgcaacatcattacttcttattttgtataattaatacgacgacaaccaactcttcctcattatttcatcttaatatggtatcatctccctactttggtggactgggttcactgtccataacctcttctatccctttgctctttacagtttcagcctggcaacatcctgatgcgcacctgggctgaccacactcagcacaagtcccaccgcaaccctgacggcaacactccccactctcacatcccgactgtcctggcattagtgggatttgtgggacttgtgggatctgtgggattagtggaatttgtgggatttgtgggatctgttgggatctgtggaattctttggatttctggaatttgaggaaat

SEQ ID NO: 5578 - DNA, 578 bp, Gossypium hirsutum
  Clone ID: LIB3828-001-Q1-N6-F8
gataggattgcaatatctttattatttttctttatttcttatattataaaggcaacagattcatgtactgttctttccacacaaaatacaatttgaatacattgagctaatgagttgaggcagcattataggaacattgttggattcgaccgtgtttgaacttataacctaaaggcaattcaatacataaatagcataaaaataattaaactttgaagacgctgtgccataccatgtataaatagctttgagctttaattttctcatgccactacaaaagcacttgatgaaccagtgaaatgccgaattgatcccataagcccttttgaagcaccgaaatgtcttattctgtatactcccggtgaggaagacgatgggattatccattcgattgttgccttactctgggggcttagctttgaaggtcttgaccatttaaagcgaaggcagaaatcatcgtcatcgtacattggggtccatgtatccttcccttggagcatctcaacaagggcgaaagtaccttctgtcaagagatcattcctggggcaagatgaccagaaaacacggtcacggtgctg

SEQ ID NO: 5579 - DNA, 592 bp, Gossypium hirsutum
  unsure (1)..(592): unsure at all n locations; Clone ID: LIB3828-001-Q1-N6-F9
caaaaaaataagttttatttcttaaatataaaaagaaatagtatttgacaaaaaatatgtccttcaaatcttatcattcatcataagctttggaagcaaatgcagagacacaagaaatcaatccatcaaagatacaaggaagaacccacaacaaccatacatattatgttatgtcaatcttgatttgacaacataaacatcacccaagaaacatatacatatcgttattcactcaagcagcttcctcttcttcttcctctccttcctcatactcgtcgtcagcagttgcatcctggtattgctggtactctgcaactaaatcattcatgttgctctcagcttccgtaaactccatctcatccattccctcaccagtgtaccagtgcaagaaagctttcctcctgaacatagctgtaaactgctcactaaccctcctaaacatctcctgaatcgaagttgaatttccgatgaaagtagatgccattttcagacccttaggtggggatgtcacacacgctagacttcacattngttagggatccactcaacaaagtatgacgaattcttattctggacattaatcatttgttcg

SEQ ID NO: 5580 - DNA, 619 bp, Gossypium hirsutum
  Clone ID: LIB3828-001-Q1-N6-G1
gatccaacaggacagaaacttattatttaaagttcagtaatgcaaatgttcaacacttaaattgttgtgagataataagacataaaactctggaatgcagacgacgcatataaacaaatacctttcaactgtaatggttcaaacgcaaagccaaaaaccgcgaatggaagcattaataatgcctctccccagaaagcatagcgccagttaaactggctcccaacaaatccaccataaacatatccaacagcaattcctgtaggtatgcagatataaaacatcgcaagccaggctgttttctgagaaacgggagcactgtcgtcaataaatggagctgcaagacttatgaaggaagcttccccaacaccaaccaacatgcggcatattgcaataaaccaaaaggaaaatgcactaccacatccagctgcagctaaggtccaaacagataatccaactccaataagcctaaaaggatggtggctctttgttaaagaggcaaatattggggacgccacaagaagtccgaccatgaatgcagatgataagagaccatcttgaaagttagtcaagtcaaactccccctgaattccactaccagatgtgcaaattcccttgtcat

SEQ ID NO: 5581 - DNA, 389 bp, Gossypium hirsutum
  Clone ID: LIB3828-001-Q1-N6-G10
gagttacttatattccattttttcagggcatgcatttgtaaacatttgccattcaaaaagaacatgatagaggatgggcccgaaaaagggcaaaaaagttaacaagaaaaaaggccacaaaggaaacacaaaatcacggttagtagagggagacccaaatgaaaacggagaaaatccggtttcaaagtgacagacagggcaattaaaaaaaagaaaaggcttaataatgggggggggggagctgttcccaaaagttgctgaaaaaagatgaactcccaaatgagaccagcgagaaaaccaccgttaaagggtccgacccaataaatccaacccttgtcccatgtaaaaataaccgaggctggccccaatgaagcagctgggttcaaaaa

SEQ ID NO: 5582 - DNA, 604 bp, Gossypium hirsutum
  Clone ID: LIB3828-001-Q1-N6-G11
atcgaattgtgacatgaatattaccaatccaactagattagacatgagtctgaagcaaaagaaatacaaaactccaaaatatgacattggaatgaaagaggttctataaatggtgacgaaactaattgcatgaccttgacatttggcatatgaaggttctttgacatcactgcaacagcaataacatatcctgcaacgccaaagtatcctaagatcactcaataatagactgaataaccccggctccaactgtcttccctccttctctaatagcaaaccgcatcccttgctcacaagccacaggcatgataagctcaactaccatctttacacggtcaccaggcataaccatcttagactcctcatccttatcattcataatggaagccacccttccagtgacatcagtggtcctcatgtagaactgaggtctataacctgcgaagaagggagaatgtctgccaccctcttccttcttcaacacatagacaatggcgctgaacttggtatgcggagtgattgtcccttggtttagccaaaaccatccctctctgaatatcggccttttgaacacctctaagtaacaacccaacattatcaccag

SEQ ID NO: 5583 - DNA, 520 bp, Gossypium hirsutum
  Clone ID: LIB3828-001-Q1-N6-G12
atgcatgaatcatcataacttttaaatcattgaaattcatgcatcatacacagtcaacaccatccttacatacatatattacatccatccctacatccaccaagcccatgaccaacatcaagagaaggcaacctggcttatgctaaaagaaaaatgcaatggatcgatcgttacaaaccagtaccattgcaccattactcacctgcacattaacaaactcgtctcttggaaaagaaactgagtaaacaaacattttattcggccacactcggctttctctttggcgaggcattttagtgaagcttgtttgcaagattgcattgcttcctgatctcacccttgctaccagtgagaggattgttctcagagaggagagtaatggcccttgagaactccttgaagaaatagtcttggctcttggccattttcttcacataaggtctggtccttttgtcgacgccagttggtgatccacaataacaaacccttgtgtccagtatgttcctgtagtagttgttat

SEQ ID NO: 5584 - DNA, 319 bp, Gossypium hirsutum
  Clone ID: LIB3828-001-Q1-N6-G3
gggggggggcctttagataattaaaaaaaaaaaacgggttcacaaggttttttggggcccccttcaaaaaaaggccccgaacaaggcccgccctaaaactttttttccccaatcacaggggggttaaaaaaaccctggtaaattcaaaacccgaatctgcaaaaaaaaaaggcccagctccctggggaaaaccactttggggtcccgacccttacaaaaaacctttaccaaaactaggggggcagcagtttttttgcaggcaaaaggggccgcccaagatttcaacttttcccttcagccctaaatttcacgggcccgg

SEQ ID NO: 5585 - DNA, 183 bp, Gossypium hirsutum
  Clone ID: LIB3828-001-Q1-N6-G4
cagaatgtatatataaataacaattagaaaaatgtttcagttcatatcagcatttttcataatgaaaagtaacaatgcctcaaattggaacaatctcctcttccaaagatcataagctaaaacattgcaaggactgtgatttaaatataaggaggatcttataatgaaaattggttcaaaacc

SEQ ID NO: 5586 - DNA, 420 bp, Gossypium hirsutum
  Clone ID: LIB3828-001-Q1-N6-G6
ggggaaaaaaggggggggccattttaaaaaccctaaaaaaaccaaaaaaccggggggggaagaaaaaaaaaaaaggggggattggggaaagggacaccgggggctaaaaaaaaaaggggggggggaaaaaaaaaaaaaggggtttttggggaaaaagcaaaagggaaaattgggggaaacagttacaaaagggaaaaataatatccaaattttttgaaaaacccacatcaaaaggtgggcccaggccataaaaaaggggtaataaaaccccaattttccaaaaaaaaaaaaagtttccttaaggaaaagggttttgattgatgggaaaaccaacctttttttaaaaaaaaaaatgtggtggcaaaaaaactttgaaaaccatttggaacgggaaaaaaaaaaaaaaacgggacaaagggc

SEQ ID NO: 5587 - DNA, 102 bp, Gossypium hirsutum
  Clone ID: LIB3828-001-Q1-N6-G7
ttttttttctgcaagcatatgttacattcaaatctcaggtatctttgaaactttgatgatgatcatcatcatagaaaaatgaatgataacatggatttgtgc

SEQ ID NO: 5588 - DNA, 620 bp, Gossypium hirsutum
  Clone ID: LIB3828-001-Q1-N6-G8
agtagaataataatgattcaatttttattataggctaatgccgagcttttagaaaaagttgaagtgaaaatacatattatagttctgaccaaggggcaatgtctccagcttcttggctaagctcataatagcctatctcttgaagaacttgagtacactgaggaagagcaaccttcttcttaaacccaagattgttggcaaaccgaagttcaccgctgacgccgtcaagtgtggtgagaaccaccctggatatcctccacatttcggagggatcattgcaatccgggttgggactcctcaccaaggcgacgtcgcagtctgattcctcataatcgccttccactacaatgtgatagtctccacgttcgtcagtcactatttcttggctctggaaggtaaggtgattgtctgtacgattcctgcattccagtttcactactgctccagcgatgggttcgctgagtttggtctcaaactcaacacggcaagtgtcacagtaaacatggcctacgacgacgtagctcatattttcagccccatagacgaaattgagtgaggacgaaacaaaaatggtgaagcagaaaagacgattatgggaatatttgccatttctttcgttc

SEQ ID NO: 5589 - DNA, 525 bp, Gossypium hirsutum
  Clone ID: LIB3828-001-Q1-N6-G9
ccagaataagctaaatccattaggatttgagagacgaaaaatggaagatacagcagcaaaaagagaattagcaaatgatagaagattaaagagactaacaccaaagattaaaaaaaaattgacattatcaacgaatcccaacaattaatatctaaactcacaaaaaacaacccttttaggactcaaatcgagaccaaccaaccattgtttcacataaattgttcaaatgcaaaaattaaaaaatcaaaatcaaaagctaaaacagaaatcagcagcgtggatgaggtaagtgagcaccaacgccaccagcatcaacacgtacgcaatccctaaatcaattgagttcccgtcgcttgtgggagcaggggcgggagcagaagactgggcatcaacagccgtggcaaaaacaagagctgcaaaaacagccatgaaacaaaccttgggaactgccattcttccttataagtgaacaaatgctctctctctttctctgcggtgtgcctcaaatgttaagctttttttttc

SEQ ID NO: 5590 - DNA, 484 bp, Gossypium hirsutum
  Clone ID: LIB3828-001-Q1-N6-H1
aacagaaaatagatatataaattaaataatgcagtagtttttaatacataaaatatgaacaagcccccaccaaaagaaaattactaaaagaatcagtgctgcgcttgcttccctttgcaaattgaaatgaatgtaaccctgaaacttgactaattgaagtgttgaacattggcctaactatcctctcctgctttagaccgacctatccaagaaaacccaattttgggacaaaaacgaataacagacattattcttgagaacctcagagtaggtttggcagaaacctttttcttctgctcaccttgtattctctcctgggccatttcattccaattacagatgctgagtatttgataaaaattcaaagaaatgggcaaaaatacaaaaactagttaaaagttaacttaggagataatgggggggataggcttgtgcttttaggccaccatctgtttctggtccatgtatttttgctccacccaag

SEQ ID NO: 5591 - DNA, 555 bp, Gossypium hirsutum
  Clone ID: LIB3828-001-Q1-N6-H10
catggtgtagtcagttaccatacatcacgcagatacctgccggtcgtatgcagatttttcaccatgctctcagcctttgagctgtctagacatccctgctcttgcaaaatagcgagtagggttcgatgcacgtctctagccatgcccttggcatcaccacacacatataggtaacctccttcagaaatcatgttccagatgtccgaggccttctccatcattttatgttgcacatattccttggtaggtccctcgcgtgaaaaagcaaccacaagctcagaaagtgcaccactgttgacaaagttgttgagctcatcttcataaatgtaatccattttccggttcctgcagccaaagaacaatacagatggacccagatcagctccagcttctttaagggcaagtctttcctgaaggaatcccctgaaaggagccaatccagtaccagggccaatcataataattggcactttagtgtttgaaggaagtttaaagtttgattgcctgacaaaaataggtgcccagctgcagtcatggctattgtccaatggtgtg

SEQ ID NO: 5592 - DNA, 596 bp, Gossypium hirsutum
  Clone ID: LIB3828-001-Q1-N6-H12
aacctgaactaaattcctcatttagattaataataatggccgcaacaaatacaacatgtcttaacataatgctacgaactcttacaaggaagacagctactctgtcggcactccagcgccatccatgtcaacatgggctataatcgctgaatgctggtccaacatcatacttcgaatatatctttgccatcaggatgagtagtgacattggcaatcttgggaagattttccatggagctgcaccaaagcggtgtgtgaggtggtcgagcttaagtagaagaatatgattcactttgcttcgactgctcatttgagaactgatcccccatttgattcaagtagatgtctaaggtacgagatgaagatgttgccaattttctcttgttcttaaaccttcacctgtctttctttttctcaagatatctttgcaacaatgcgtttctgctagtggcaccttcaaggctgtcttcataagatacattgcagtcatctcgaggaaatcgacagttttctgcaaccttcactgcttgcattgatgacaatataacccctggtgaacgttggcttactttatcacctgcagcctgtacatggca

SEQ ID NO: 5593 - DNA, 598 bp, Gossypium hirsutum
  Clone ID: LIB3828-001-Q1-N6-H3
gatagaactgcatcaaatttattcaaagcactgtaatgtaaacaactggttccatcaagttgcttccaaaagggaaaaaaagtaaactccaaatccttcaaactcagatgcgaaagtttataacaaaagccaaagcattggaccaaacgttatgttttcgacatgccgccattatttaaccaaatggaaagcgagtccaggtgctgctttcgacatcacaaaaagttctttttaaagatcacctccggcacttgttttcccaccaatccataaatttggcttgtgcagccattgtgtccaacctgtagagttgatatgcgtgatttgcgatttcttgtccaaatgtccaaccaaaaacggctcctcctacgaaagacagtccagcaccatgtaaactcttcgagtatttccaggcaaaacctgcagttgtgatagctccgattgcacttccgtataaggcgatgttggctgcttccctggcagtcttcaagatgggtccatgcaccggatcagaagcgatgaactcgttaacatcggattcagaccatgaaggaagggactgttcacggccgatgtatcttgaatagacattagtgaa

SEQ ID NO: 5594 - DNA, 409 bp, Gossypium hirsutum
  Clone ID: LIB3828-001-Q1-N6-H4
cttaaatatcataatacattctgacatagcagaaaagccacattacacataattaagaaccaaatcctcatgaagatttgctgatccatactaaagtaatagaatttatttagttaaaaggacaaaggccactctgcttctctttgttgttcacttcccgcaagtgcaagggttgcatttgcagttgtctccacacgggcatccaccctcaaccccaactcccatttaagatccctcaaagggcattttctgagttgccacaccaagaacaatagtctcagttgtagtcttctctattatgtcagggaacatactgcatccgttacagccactgccacacttgcaatcagcgccgcagccacattttcctgaacagcaagacattttcagttttgttgtgagaaaattg

SEQ ID NO: 5595 - DNA, 577 bp, Gossypium hirsutum
  Clone ID: LIB3828-001-Q1-N6-H5
gggtccaataaccaaatacagatatatttatttttgagattcttcagtggagatcactccaagtgcttcttcacttgctccttaagctttttttaacggcttgtttgtggcgacgataacccttgtctgttccatatagataatcacaatatgtaaatatagatgcaaaattgctttggcattgtctcccaacaaaatgatgaaaatcatgatactctggtcctccataaaatggtatcaatttggtgggactccaaggaaaattatacccgctgtgggtctcgatggcttcaacttggcgtagagatgaccatagccacaatgtggtcatatggcatggaaccatagctggaccaaggaatgttgggatccccaaaattaagatttcagcccaatgggcataaagtgctgcaaaccctattggagcattatattcatggtgcatgtaatgaattttctcgtagccccattcactatgtaggaaccgatgaatccaatagttggtgtagtcctccactagaaaatacactatcaattggctaattacctcccattttgttggcagtggcaagctcgt

SEQ ID NO: 5596 - DNA, 581 bp, Gossypium hirsutum
  unsure (1)..(581): unsure at all n locations; Clone ID: LIB3828-001-Q1-N6-H7
aaaatcagtaactttgcaaccatcaaaatgttatttcttttctctgaaacagaacttgagatccagcttgtggcagccttacctgccttaaccatcttacataaaaatatgagacgaagactagcttctgaatcacatttcacaagtgtaggtctccagttatgatgaaatgtacctctgtttcttctatgtgaggaagctattctgtcacctttcgtacaatggtcattggatatggaaattcttgtcagcatattataagcacaataaaactcccattcagttattgactactccccatcattgctggagacaccagtgacagctttactgccactcttctttaccctcttaaaaaccttcttccgtggaagtagagtggtctccgcagaattacttttggatgaggttgcaactttggtagcactacttttaaccttggccctatcaatcttctcttcagctaaaccctctgctttggggacactcnacatatttttgaggtgcaccttcgtcagatgctttaccagaatcagcaataacaacccacatctgggttgccagtaagctgctttgaactg

SEQ ID NO: 5597 - DNA, 94 bp, Gossypium hirsutum
  Clone ID: LIB3828-001-Q1-N6-H9
gttggcttaaaaaaaaaatgaacataaggaagtaagtcataaagactataaagtaaccgattcaattatgtttaaacagaagagaacacagaac

SEQ ID NO: 5598 - DNA, 635 bp, Gossypium hirsutum
  unsure (1)..(635): unsure at all n locations; Clone ID: LIB3828-002-Q1-K6-A1
gngnatacagacatgtggtaaaccgattgattcgctgttagagaaggtgctttgtatgaatatattatcctctgattatttcaaagagctttaccgactaaagacttaccatgaagtcattgatgaaatttacaatcaagttgatcatgtcgaaccgtggatgactgggaattgtcgtggtccttctactgcattctgccttctttacaagttttttaccatgaaacttactgtcaagcaaatgcatgggctactgaagcaccctgattctccttacattagagcaattggattcctctacttgagatatgctgccgatccgaagactttatggagttggtttgaaccatacatcaaagatgaagaggaattctcccctggatctagtggacgaatgaccacaatgggcgtgtacgtgcgtgatttacttcttggacagtactattttgatactcttttcccccgaatccctgttcctgtgttgcggcaggtgacatccaatcttgagaagatgaagctgcctactaaaccttcaggttcaactggggataataaccgtcatggatctgatgacactgctcgccgcccaccttctgtaaaagcagcactttctgtctnctttggtcagcgtgccc

SEQ ID NO: 5599 - DNA, 658 bp, Gossypium hirsutum
  unsure (1)..(658): unsure at all n locations; Clone ID: LIB3828-002-Q1-K6-A10
aaccctagttgttagcgagcagaagcaaanagcctccaaaaaacacttcaaccctctagccatgacattcaagcgtaggaatggtggnccgaaacaaacatggccgtggccatgtcaagttcatccgctgctctaactgcggtaaatgttgccctaaggataagtcaatcaagaggtttcttgtgaggaacatcgtggagcaagctgctgtcagggatgtccaggaagcctgcgtctatgacacgtacactctgcccaagctgtatgtgaagatgcaatactgtgtttcatgtgcgatccattcccacgttgtgagggtccgatcccgcactgacaggaggaaacgtgacccgcctcagcgcttcattagacgcagggatgatatgccaaagcccggtcagcctggtcaggctcctcgtcctggtgttgcggctcctgctcgtgcataaggcttttgaagtttaagatgaatttgtatttcgtgttttgctttgagatatggttgcttgaattttgagaacttggatcatgtagggagtttttttttattgttttaaagttcgatactttgttaaatcttggaaggtattgagtggttgggaatacttgttggaacttgnaactncataatttctgtttagttgcatatgattatcca

SEQ ID NO: 5600 - DNA, 664 bp, Gossypium hirsutum
  unsure (1)..(664): unsure at all n locations; Clone ID: LIB3828-002-Q1-K6-A11
cggagtcccactcgtggnaaggaagaggtacgacgatgaacctcgcgatcgccagcaatctcaccgtgaccaccgtcgccgctcccctctcccttctggtttgctcattcgcaatctccctctcgacgctaggcctgaagatcttagggttccctttgaacggtatggtccggtgaaggacgtttatctgccaaaaaactattatacaggggaaccacggggctttggttttgtgaagtttcggtatggtgaagatgctgctgaagcaaaacaacgaatgaaccatcaagttattggtggacgtgagataagaattgtttttgctgaggagaatagaaagactccccaagaaatgcgtctgactgcccgtgtaagtggtcgagataggggaagcaggagaacaccgcctaggtccccaagacgccgatatcgctcttactcttgctcaccttcacctgctgggcatgattcaagatagtaaagtgaaaagagattcctaaagacttctggattaataaagattaaagagatcataaagtgatggacaacttgattttctatcaaagcttctccataagtattatccataatcccaccttcaccagccattgactacaaattgcatgaggtcttgttttttgacccttgggttgtcaggcttgct

SEQ ID NO: 5601 - DNA, 574 bp, Gossypium hirsutum
  Clone ID: LIB3828-002-Q1-K6-A2
cccacgcgtccgggggataattaataaattactgtcgggcgaaaaaaagggtaagagatggctcgattgatgttaatatcgatgctatttctcttggcaggatcaatgcttatggtccagggcggagatcccaccctttttttcgaatggaacgtcacctatggcaccattgctcccttgggagtgccagtaaagggtattcttattaacgggcaattcccgggaccaaatcttaactctaccaccaacaacaatatcgtggtcaatgtgttcaataaccttgatgagccattccttgtaacatgggacggcgtgcagcataggaagaactcttggcaagatggtgttctgggaaccaactgtcctatcccccctgggaagaattacacctataaattccaggtgaaggatcagattggcagctacatgtactatccggtgacggctatgcacaaggcggttggtggtttcggtggcctccgtgttaacagccgtctactcatccctgttccctacgctgatccggctgatgactatactctcttagtgggagactttttcaacaagggacaca

SEQ ID NO: 5602 - DNA, 472 bp, Gossypium hirsutum
  unsure (1)..(472): unsure at all n locations; Clone ID: LIB3828-002-Q1-K6-A3
gtggaatttggatttcnaccgacacagcgagcaggnagataggtaccgtgaactagctagtcgtgtggatgaggccctcggattcatggctgcagctggacttacagttgaccatcctatcatgacaacaactgaattctggacttcccatgagtgcttgctcttaccttacgaacagtcacttacccggcttgattctacttcaggccgttactatgattgttctgctcatttcctgtgggtcggggaacgaacaagacagttggatggtgctcatgttgagtttttgagaggagttgctaatccccttggaattaaggtgagtgataagatggatccgaatgaactagtaaagctgattgaaattttgaaccctcagaacaaagctggaaggattacagttatcacaagaatgggtgctgagaatatgagagtgaagcttccccatctaattagggcagtgcgtcgtgct

SEQ ID NO: 5603 - DNA, 663 bp, Gossypium hirsutum
  unsure (1)..(663): unsure at all n locations; Clone ID: LIB3828-002-Q1-K6-A4
anaaaaggataagngttagaagaaggaaaatccgaagagaaaaaaaagaagaggaggagaaagaagaagaaggataaaggttcttcttcctcatcgtcgtcatcgtcatcttcttcttcctcgtcatcatcttcatcttcttcgtcgtcttctgattcggattcagataagaaaaagaaaagaaaagagaaaaagaagcaagagaaggaagacgataaagagccgaaagaagatgaacacaaagagaagaaagatgacgagacaaaagagaaaaagaagaaaaagaagaaggataaagatcatgaagaaggtgagggaaaaggcaaagtcaaagatcttagcaagctaaatcgaatgctagagagaactaataagagattagaaatccttattgcaagaaaggcggacatcgaaatgcggattaaagaagccgaggagaaaaagtgcagtgaagctgctgctgctgctgctgctgcagctgcagccgcagccaaagctgcagtcgaggaacagatcaccgaagccacactctgagtaagtggctccgacaaaccaatatgctatagacgtattcaatttcaaacaataacatacgtccattaatgtgaaaaaaagaagctacaaatttacagaaaactatttgtagcagtccaatattatttg

SEQ ID NO: 5604 - DNA, 555 bp, Gossypium hirsutum
  Clone ID: LIB3828-002-Q1-K6-A5
cagagaagcaaaaaaaaacattcttcattgaacaaaacagtaacaatagtaacaatgtggtttcaactcttttcctagattgaccataatcatcatcatcatcaacaacaacatcaatgtcgttgttacaaagggtaaacttttactaccaatatgactttaaagaggaaatgatctctagagtcaaaatgtgctacgacctaaatatacttcaaaatgaaaattataagagaataacagacaggtatcggaaatggtagactagtagccgatgtttgtcttcacttaaaatatcttaaaaagcagcccaccatgtgtagcaaagaagggagcaaagacaagagattcaacagccattagcttgatgaggatgttcagcgatggcccagatgtatcctttaaagggtcaccaatggtgtcaccaataacggcagccttatgtggatctgaacctttgggaccaagagtttttgcatgttcagaagcaccagcctcaatatacttcttggcattatcccaagcacctcctgtgttggatgcagagatagcaatctg

SEQ ID NO: 5605 - DNA, 632 bp, Gossypium hirsutum
  Clone ID: LIB3828-002-Q1-K6-A6
ttgagtttgtgcaaaaggctctattttgggggtttcctactactctaaagctgggtccagatcaacaggctatagtctggcaacaacctggaacttcagcctgtgcagctttcttggccaacaataacacccgtctggcacaacatgtgaatttcaggggccaggacattcgcctgccggctcgttccattagcgtcctccctgattgcaagaccgtggttttcaacactcaactggtcacaactcaacataactcaagaaactttgtaagatcagaaattgcaaacaagaactttaactgggagatgtacagggaagtccctcctgtcggacttggatttaagtttgacgtgccaagggagctttttcatttgaccaaagatacaaccgactatgcttggtacacaactagccttttgttgggtcggcgtgatttaccaatgaagaaaaatgtccgaccagttttacgggttgctagtcttggccatggaatccatgcctatgtaaatggtgaatacgccggttctgcacatgggagcaaagttgagaagagctttgttttgcagagagctgtaagcttgaaggaaggggaaaaccatattgctctcttgggctacttagtgggacttcct

SEQ ID NO: 5606 - DNA, 621 bp, Gossypium hirsutum
  unsure (1)..(621): unsure at all n locations; Clone ID: LIB3828-002-Q1-K6-A7
cagcttctgcgctaacagnagcgtctcaatccaagccaactgggaggaagggatgaagaactggcggnaaagcttcaaaagatnntgaaatctgaaatggaaaaaataagcgaggaacaaaanaatatcagggaagggcaaaggcaagttaaagaaaaatcggaatcatcgaatccgagtgcgaggaattgaagagggaaactaggctcataatccagcaaagtgcgagaactcaggttaaacttgctcttatgttccgcatactgaaagcaagggaagccggcgagttgaataccgctgccactctcactgaaatgctccgtgaaatagtaggaagagagagggaggaaagcaaagctgacatctgaatgactatgataagcttctcggtgcagctgctccaaatgttaagaaataaaagtgtgtgacaattaagcgcgtgttattaagtactgcaacttatatttcctatctacttcgtttcatgtttggtatgttaaactttgaacttatcaaaccttttttctgttgtgtgtctaaggttgaataaacaaaatctggtgacttgaaacaacagaagttaaaagtaaactagttattgttatgctgaacatatacctt

SEQ ID NO: 5607 - DNA, 656 bp, Gossypium hirsutum
  Clone ID: LIB3828-002-Q1-K6-A8
attttagggattaattgtgaacattgtaaattgaggggttgaaatgtgaaataaatgaaaaatatgggctattaggggcactatggtaatttagccaagtatgggtcttgtagaattgtgtgaattgtgtatttgtgaaatagggactaaactataaaaatatggaactttaagggataaagcgtaaaaatttccaaatgtgtttgtggactaaattgagtgatttgatgaataaatgagttaatttttaatgtatatagatcaagaacgaaagaaatttagatcggggaatatcaaagattattgaatagtcgatccagtccctctattttgtcttcgacgtaagttcatatgcaaataaatgtttttaaatatttatttttcattgaattgttatgaatgttgaacgagtaaatacaagcaagtatcgacaaagtaatgttaaccgaaagtctcatacgaaccctgagaatagtataagatacgaatgtcatgacattaggactgccgagatgtgattacatgtaagaccatgtctgagacattggtattgtatggtgattacgtgtaagactatgtttgagatattggcatcgttatatgatttcgtataagaccatgtttgggatattggcatcgatatgtgataacatgta

SEQ ID NO: 5608 - DNA, 658 bp, Gossypium hirsutum
  unsure (1)..(658): unsure at all n locations; Clone ID: LIB3828-002-Q1-K6-A9
attcactatctctttgcatccttttttatttacttaacaagaacaacaacaataaattaatcaatcatgagggttttcccagcgctttttcttgcatctcttgctttagtgttgggcgcctctcgtgctgatcctgacttgcttcaggatgtatgtgttgccgatctttcttctggaataaaattgaatgggttcccctgcaagcacccttcaactataggagcaaatgacttcttctttgccggtctagccaatccaaacttccctaacaacactttgggatcgcttgttacggcagctaatgtggaaaaaatcccaggtttgaacacccttggagtctccatgtctcgtatcgactatgccgttggtggggtcaaccctccccacacccatccacgagcatcagagattgcattcgtgttggaaggagaattagaggttggcttcttcactacatccaatgtgttaatatcaaagcatatcaagaagggagaaatatttgtgttccctaaaggattgatgcatttccaaaagaacattgngaagacacgtgcatctgctattactgcgttcgatagccagttttcaggaacacagtccattgctactaccctatttgcagcctcaccaacaattccaaatgatgtattgagcaagg

SEQ ID NO: 5609 - DNA, 640 bp, Gossypium hirsutum
  Clone ID: LIB3828-002-Q1-K6-B1
caatcttaattctgtcggtgtttttatctgtacgcttcagttcgggtgttaggttgctccaggaacagcccaatgatgaccccaaaaacatggacgctattcctcccattgatgcactcaaccctaccgagttgaatggacccggtgttggcattcacgaagatcatgttgtcccaaaagtgctgaaattggtactcttggttttggttttgaaggtggtcctgataaatgttgttcttctggatgttccggtaattgtaatcctggtggtttcgttctaccatttcctcaaattccagaaatcccaagaattccagaaatcccacaaatcccacagatcccacaaatcccacaaattccactaatcccacagatcccacaagtcccacagatcccacaagtcccaaaaatcccactaatgccaggacagtcgggatgtgagagtggagagtgttgccgtcagggttgtggtgggacttgtgctgagtgtggtcagcccaggtgcgcatcaggatgttgccaggctgaaactgtaaagagcaaagggatagaagaggttatggacagtgaacccagtccaccaaagtagagagatgataccatattaagatgaaataacgagggaagagtggttgtcgtc

SEQ ID NO: 5610 - DNA, 427 bp, Gossypium hirsutum
  unsure (1)..(427): unsure at all n locations; Clone ID: LIB3828-002-Q1-K6-B10
gtaaaaccaaccctcttctcaactccaggaaattctggaggctcgcgagaaagctgagtctcatatttggacattttgngacactcgaagaagcacaagcttattggaagcaagaatttcgacatttaaatggtcgagaattgaaataatcgaaatagactttaattaagctgcatgttgcagacttacagctgagttttcttgttcttttcccctttaagttccagttgttaccttttaactattacaataaatcaataaatcagtgcaacagagagtagaggttcttttgtttgtgttaaaaaaaaaaaaaaaaaaaaaaaaaaaaaaaaaaaaaaaaaaaaaaaaaaaaaaaaaaaaaaaaaaaaaaaaaaaaaaaaaaaaaaaaaaaaagaaaaaaaaaattaaaaaaaaaagngtttttttt

SEQ ID NO: 5611 - DNA, 420 bp, Gossypium hirsutum
  unsure (1)..(420): unsure at all n locations; Clone ID: LIB3828-002-Q1-K6-B12
gcgagcgggcccttttttttttttttttcttcacgggattggcccaaccaacactcccaccacaaccttttgagggatgaccaggctgattgggcaaaccttgctgatggctactctgttgggtaagacttgcatccttggagactgatcctggaccctgactcctcatgttgtggcctatactcgggggagaaacagggccaactgatccactcctaggctttgctatagacttttccctttctttcctctttttcttgcaaataaccagctcccctggatgagnnngaggagaatcatcctgctgatgttccttgataatacctcttcctttcccaagtctcgattccttttggggcatgtgccctctgacccttgtttcctcacccgcttgagggaacccacgttgcgttgcctttt

SEQ ID NO: 5612 - DNA, 533 bp, Gossypium hirsutum
  Clone ID: LIB3828-002-Q1-K6-B3
gccaaaatgacttggcatgtcaaactcccatggttcctgggcatgaagtggttggtgaggtgttggaagttgggtcagatgtaagcaagttcagagttggtgatattgttggcgttggttgtattgttgggtgttgcagaaactgccgaccatgcgactcagacaatgaacaatactgtcttaagaagatctggtcgtacaatgatgtttacactgacggaaaacccacccaaggtggctttgctggttccatggtcgttgatcaaaagtttgtggtgaatatcccagaaggaatggcaccagaacaggtggccccgctgttatgtgcaggggtgacagtttacagcccattgaatcactttggtttaatggggagtgggttaaggggaggaatattgggacttggaggtgtagggcacatgggggtgaagatagccaaagcaatggggcatcacgtaacagttataagctcatctgataagaaaaaagtggaggctttggagcatcttggtgctgatgactacttagtcagc

SEQ ID NO: 5613 - DNA, 634 bp, Gossypium hirsutum
  unsure (1)..(634): unsure at all n locations; Clone ID: LIB3828-002-Q1-K6-B4
cttcgctttgngaatagatccaaaattcccctttcatcatatttccgattccccaatttttcctggaaaccctaatcctaatcccggattcttctcgtctacatcgtctagcaaatggcaaccgaggagccggcagtcgtggcagaccccgcaccggagacggaggaggacaagactgctgagaccaaagctacttcaaaatctggcagagcaaagaaaaccaaagaacccaaaaccaagaaagctgcagctcctcgngaaaccacgggctgctcctactcatccaccttacgaagagatgatcaaagatgcgatcgttactttgaaagagaggacaggttcaagtcagtacgccattgctaagttcattgaagagaaacagaagaatcttcctgggaatttcaagaagcttcttcttgtccatttgaagaagcttgtggctgctgggaagttggtcaaagttaaggcttcgtataaacttccatcggctagatcttcgaagacggctactgctgcttctgctcctgcaaaaaagaaacggctactactaagtcgaagtctaagcctgcctcaaagcctaaggaagggaagagtacaaaagctactcctaaagcgaagccaagacaaaaactac

SEQ ID NO: 5614 - DNA, 641 bp, Gossypium hirsutum
  Clone ID: LIB3828-002-Q1-K6-B5
ttcagctttatcggcaacgttttcggcggcgcaagcttcaatcccgcggcttctatgactttccacgttgcgggtctcaagaaaaacgactccatcctctccatggccgtcagattcccagctcaagccgccggtggagtcgcaggcgtcaaggcagctctgggtttgattcccgcggaatacagcaacaccctgaccggaccttccctgaaagtggacttacacaccggagccgtcgcagaaggactgtttacattcggacgaagccttgcactgctgctgataatgtttatgggtccaaagaacgggtgggttaagcaatggttggtgtctttagcgacggcgattttggttctaacgggctccagattcacgggagctcccatgaatcctgcaagtgcatttggatgggcatatgttaataatcgacataattcatgggaactgtattatgtttattggattggtgctttgtttggggcaactttgggagcttgggttttcagattcatggtttctttgccacttccaccaccaaccaagcagaaaaaagcttgatttttaggtaaatgattgactagttttattaaaaataaaaaaccttcctttattaataaatcctggcatttatgattcaaaaa

SEQ ID NO: 5615 - DNA, 617 bp, Gossypium hirsutum
  unsure (1)..(617): unsure at all n locations; Clone ID: LIB3828-002-Q1-K6-B6
tacgnatggttttttaggcttaaaaggacaagcatgagggccaaaagcaacccattttcattccactttttctcatattttcagttctgtttctctgcttctctgcttctgttgcccacaacgatgaagaagtagaggatgagagggaattcgattacaaggagaatagttcgaagggccacttcattggggagatcttaagacagaatgggccgcttgcaaaaatggtgctatgcagtccccaatcgatttaacaaatgatagagtgaaaataataacgaaacctgtagagctagagaagaattacaagcctgcagaatcaattatcaaaaacagaggccatgatatttcgcttcaatggccggatcataaagcgggttcaattataatcgatggaattgaatatgttctcctacaagttcattggcactcaccttctgaacataccattaatggcaaaaggtatgccttggaggcacatatggtgcataaagccgcggaccctaatgtgaagagcagtttagctgtttctgcactactttacgaagatggtttacctaatgatttcctacacaagctcataagcaacattacagatatgattgatgtggtccaac

SEQ ID NO: 5616 - DNA, 663 bp, Gossypium hirsutum
  unsure (1)..(663): unsure at all n locations; Clone ID: LIB3828-002-Q1-K6-B7
ctcttcaatanaaaaagtatggtggtataaaattcctaaaactttttgaatagcaaccagtctcttcttttcccattcttttatatttcaaaatattcttttggctgaagctatattttctacaacgttttcaaaaagcagcaatcaatgtagacttatctctggaacagcggatttggtcatacgcaattaatcaaagctggcactattttctaccaggaaatgctgcagagtgcagtagccaaactaggcaggctcgttcttgatatttttcggccctaagtgaaataataaattttgaacccctttcaaccctgggttttggacggccgtacttctagacgacccccagggtcgggcctgcaactaggtgatatcacattgctcatacgccacagatcgtccaaattgaatcagttacatatgtgataaagtgagttcttatgaatcttttatacatatgaaacttctcataaattttgattatggataattttcttagagtttcaaaaccgtcttttccggtaacactaagggcacgtttggttcgctgtattggattagaggtgtaatggaatagaggtgtaatagcaaatcaactgtttggttgaatgtaatggaatagaggcgtaatagtaatcttgtgtttggttgaatgaaaaa

SEQ ID NO: 5617 - DNA, 637 bp, Gossypium hirsutum
  unsure (1)..(637): unsure at all n locations; Clone ID: LIB3828-002-Q1-K6-B8
gctcagacttaagccccggctttttcactgttgagtactgcgaaagtcgtatctccgtaatgagcangaagcagatgggaaaatgcttacttctttggaaaagtggtagaatggtttgcgttgcagaccaatgtgcaaggcgatcaagtttatatcttaattctcccctctgattggaaaaggatcatgttctgctcatgcccgaaaatagtttctagcatatgttgaaaaagcaaagactaccggatggttggattcatcatttcattacggcaattccataaacggtaaagagaatggggcctgccaataataatgagagtttcttcagttcacaaccgttacatttcaaagctgttacaaacttaaaaaaagtgacctttcaagtgctatctgaacacaaatgaagtagctgttacaaagggggttaatacaccattgaaggacgttttaaagagcattttatactccttacattcggcagcaaccttttaagctacctgctattttgttctttttaaaaagaataaattaagcaatcaaatcctcattaaggagatgatgtttattcggctagccatgggacagttcaagagtcaatttcaagctttcatgaacattcattcagttgaattga

SEQ ID NO: 5618 - DNA, 632 bp, Gossypium hirsutum
  Clone ID: LIB3828-002-Q1-K6-B9
gtccctccaagcatcaagctgttgccctccgtgttggctctgatctctcagcattctacaattgtgacatgctagcataccaagacactctctacgtccactccaatcgtcaattttacgttaactgcctcgtagcaggaacagttgacttcatcttcggaaatgccgcagccgtgttccaaaactgcgacatccatgctcggaaaccaaactcagggcagaaaaacatggtgacagcccaaggcaggaccgaccctaaccaaaacacgggcattgtgatccagaaatgtaggataggtgccacttctgatttacagcctgttcgtaaaaacttcccaacatatcttggcaggccctggaaggagtactcgaggactgtggtaatgcaatcaacaatcagtgacgtgattcaacctgctggttggcacgagtggagcgggagtttcgccctgaaaacactgttttatgccgagtaccagaacaccggggctggtgcctcaacttctgcgagagtgaaatggggagggtacaaggtgatcactagtgcaagtgaagctcaggcttttactcctggcaggttcattgctggaggaagttggttaagctctacaggctttcctttcgctcttggg

SEQ ID NO: 5619 - DNA, 647 bp, Gossypium hirsutum
  Clone ID: LIB3828-002-Q1-K6-C1
gtttcatccaaaaaagagaagagacctggaggtcaaccatttcatcctcgcccttatctctctctcttgtctcttctctgtctctgctaatgcccctccacccttttccaatgcttctagccctgcttcttcagaactttatgatatgatcgaggtcatgtctgaatcaccgtcaccatttgcattcgatggtacaacattggaaagcattgatgatttattgagcatactacctggtggtgtcgaccctgcccttcagcaaatctgtgggaacaccgatcaccccgtcgaatgtatcatagcaactatgccattcctagatgagaatgctcctattgagcctctttctatccttaaagctgggattaaagcaatggataaccagaccaaaaatgcattggcggaggttacaaagctttcaatggaccccactacccctaaaactattgttcccatccttcaaacatgcattgatgtctacaatagcattcttaacagtgatcaaaaatcccttgaagccatctccaaccataaccttgttcagttgagcacagagctaggcaccaatgtggaaaatgtactcggttgtgacaatgctttcaaacaggctaagcttgaatctccaaatgaagacatgggatgcatgc

SEQ ID NO: 5620 - DNA, 552 bp, Gossypium hirsutum
  unsure (1)..(552): unsure at all n locations; Clone ID: LIB3828-002-Q1-K6-C10
aggaggtccaggnaagtacaatgaggaagtatttattctatcattaaagacaatgatttacacactaagaagaccgccaaagcattttgaggactttgttactggtcattttcgcaaccgtgcacaagacatccttgtggcatgtcaaacatataaagagggtgctatagtaggctctgttgcggttaaagatggtgttccggatgctaacaaaattgtaaagggtagctctgaggaatttaaaggaacgattccaaagatgatcaatgcggtggctaaagaatttgtgaaaaacgggtcaacgaactgtgagcagtttcagagttgcagaagctgataacggttaagaagagttggttagatctaaagtgtaggatgggatgtgttaagccattatagaagctaatgtagtgccgtttagtatgaatgatttggtgaacgcaattttggtgaacttggttacattattactacttcttacggtatatataatctcgggattccccggtagattttattatatatatatagtggaacggctctggttgactg

SEQ ID NO: 5621 - DNA, 647 bp, Gossypium hirsutum
  unsure (1)..(647): unsure at all n locations; Clone ID: LIB3828-002-Q1-K6-C11
ttgcaaatcttggagaagtgcgaggctgataagagaaagtttggatatgctcgtgatcaccaaccttgcatcatctttatggatgagattgatgcaatcggtggacgccgttttagtgaaggaacaagcgctgaccgtgaaatacagagaactctgatggagttacttaatcagcttgatggatttgatcagcttggaaaggttaaaatgatcatggctacaaaccgacctgatgtacttgaccctgcacttcttcgtcctgggcggctagatagaaaaatagaaattccattgccaaatgaacaatcgagaatggaaatcctcaagatccatgctgctggcattgccaagcatggtgaaattgactatgaagctgttgttaaacttgctgagggttttaatggtgctgatctacgaaatgtttgcacggaggccggaatgtcagcgattcgtgcagaacgtgattatgtaatccatgaagatttcatgaaggcagtaagaaagttgaacgaagccaagaaactggaatctagtgcacactacagtactgattttgggaaagagtagagagattacttcttttccgtttttggaagccatggagtacggngcagtgcattatattttagatgtcttctaatttgctc

SEQ ID NO: 5622 - DNA, 600 bp, Gossypium hirsutum
  unsure (1)..(600): unsure at all n locations; Clone ID: LIB3828-002-Q1-K6-C12
ctcctctatttcttaacaaacatcaactccananatcgccaaactgctaggaactgagcatgatttgaacttcaaagagaccgagctgtgtctcggcctgcctggtggaagtggtggaggaggaggagctgccgccgccggtggtggtggtggtggtaaaaatgaagtggaaagttccccaaagactcaccgggaaaagaggctactccgagactgttgatttgaagcttaatcttcagtctaaagaaggttgcatggatctgaatcagaacctagaaaatggttcaaaagaaaagaatcatctcactgcaaaaccaccagccaaggcacaagtattgggttggccaccagttcgatcttataggaagaacattatggctaaccagaagaacaacagtgacgaaattagtgacagagctagcagtggcagtgggggtgcagcgtttgtgaaggtttgcatggatggtgcaccatatttgcgtaaagtagatttgaagatgtacaacagctaccaaaagttatccgatgccttggctaagatgttcagttccttcaccatggggagttatggatgtgaaggaatgatagacttcatgaatg

SEQ ID NO: 5623 - DNA, 591 bp, Gossypium hirsutum
  Clone ID: LIB3828-002-Q1-K6-C2
gttttagcttgttagggttttgtttcattttacaaagaaaacaggaaagcaaagcattcagtgttcgaatccgtctttcttgcaccgaactgttacagatttattggcaaggtcaagcaacctaaaagcttatctcaagcgatgggagaagtgaatttcatgcaagaggaagatattcgattggagactacgcgagcaagatttgcaaatgttgtcaaaaggcatgcccaacttacagagcgtctctccagggattctgataagatgatatttgagcgtctacaaagagagtttgaagctgcaagagcttctcaaagtcaagagattaacttagatggtgagcagtggaatgatgggttattagctacagtaagagagcaggttcatatggaggctgacagaaagacaacatctggggatgcaaatgacatgccgacatctcatttccaagaaaaggttacctacagagtcggaaataaggtgatttgttgtttggaagggacaagaattggcatattatatgaaacgtcctttgcaggggaaccttgtgagctgtatcattgtgtgcttgagagcaagtcatttcttgaa

SEQ ID NO: 5624 - DNA, 591 bp, Gossypium hirsutum
  Clone ID: LIB3828-002-Q1-K6-C3
cgggctttcagttactggattaagatttttcaccgtgtacggtccatggggaaggcctgatatggcgtatttttcgtttacgagaaatattctgcaggggaagcccatcaccatttatcggggaaagaatcgggttgatttggcacgagattttacctacattgacgatatcgtgaaaggctgtttgggatcgttggatacatctgggaaaagcaccggttctggtgggaagaaaaaggggaacgctccatataggatttttaatttggggaatacttcgccggttaaggtgccggagctggtgaacatcctggaaagacatttgaaggtgaaagccaaaaggaatatcgtagatatgcctggaaacggtgacgttccattcactcatgcaaatatcagtttggcccaaagagaattcgggtacaagcccacaaccgatttgcaaaccgggttgaagaagtttgttagatggtatttatcttattatggttataacaaccgtaaaggtctacaataaaatttatttttggttttaaatgtaaggattttcttggtttcccgttagaatgaaatagaaggtaatgggaaaac

SEQ ID NO: 5625 - DNA, 419 bp, Gossypium hirsutum
  Clone ID: LIB3828-002-Q1-K6-C4
gcttaaatcatctttagtggtgtccatcattagttggccaaccatctctttaagcttgttaccccacatattcagtctcaggtgagtatatgtggggtaacaagcttaaatcatctgagactgaatatgatttgagtgccatttacatagataccactcgtccccagggatgttatggaaccagaaaccagtcagcattgacagtgaaatcaaatggggaggtgtgcttttatgaaagatatttggacaaggatcggtggaaagagaatacagtaacttaccaaatagagatgaccacaaagtaaacatcatttgcatgattgatatatatcattggcaggttgaggtttattttcaagacatttgaacgtacgtttgattaacaagctaatgatagtcaataacaagttttttcctat

SEQ ID NO: 5626 - DNA, 347 bp, Gossypium hirsutum
  Clone ID: LIB3828-002-Q1-K6-C5
ttataatattgggagtgatcagcttcttggggatgttgttcacgtttttggttccggaatcgaagggaaatcactggaagaaagtcgggcgaagttgagcaagaaaatggaaatcaaacacagggtggacaacagagtagtactgagattcgaattgcacaagcttaattaagcaaggcactgtaagtaattagtaggaaagtttgaagtgacattaggggatcttagttaattatgtctttaattagcattgcatctttggatattgcttgcactttgtttctagttttcttattttggcttccttttcaagttaatggaatgtctcttttttgagttttccatgt

SEQ ID NO: 5627 - DNA, 670 bp, Gossypium hirsutum
  Clone ID: LIB3828-002-Q1-K6-C6
gggatctgaaggacttaagtcaattggtcgctcccttggatttggggtttcacgagttgtatttccagaggatcttaaagtttcagagaagaagatttctgatcctcaggataaattcctcttgctatgcaataaattatttttcatatcttgtattctggcagtatcagtggaccctctatttttttatcttccagttattaacgatttgcaaaagtgtctaactattgatagaaaattagcagtcagtgcaacgactctgcggaccattatagatgctttctatcttatatgcatgaccctccagtttcgtacagcttacattgctccatcatctcgggtctttggacgaggtgaacttgtgatagatcctgcacaaatagccaagcggtacttgcagcgatatttcatcattgattttcttgcggtggctccattaccgcagattgttgtttggcgatttcttcaaagttccaatggttcagatgtactagcaacaaaacaggccttgttttttgttgtcttgcttcagtacatccctaggtttcttagagttctacccttgacatcagaaatgaaaagaacagcaggtgtctttgctgaaactgcatgggctggagctgcatattatttgctattatatatgctttgcagtcatatagtaggggca

SEQ ID NO: 5628 - DNA, 624 bp, Gossypium hirsutum
  Clone ID: LIB3828-002-Q1-K6-C7
cagatctatgacatcttccagcttcttccgggcaagattcaggttggggtattttctgctacaatgccacccgaagccctagagatcactcggaagttcatgaataaacctgtgagaattttggttaagcgcgacgaactaaccctggagggtatcaagcagttttatgtgaatgttgaaaaggaagagtggaagctcgaaacactctgcgatctctatgaaacactggccattacccaaagtgtcattttcgtgaacacgaggcgcaaggttgactggctaactgacaaaatgcgaagtcgagaccacacagtttctgccacccatggagatatggaccagaatacgcgtgatgtcatcatgcgggaattccgttctggttcttcccgtgttctcatcactaccgatctgttagcccgtggtattgacgtgcagcaagtctcccttgtcataaactatgatctgcccactcaaccagaaaactacctccaccgaatcggacgaagtggaaggttcgggagaaaagtgttgccataaactttgtgactgtagatgatgaaagaatgctgtttgatatccagaagttctacaatgttgtcatcgaggagctgccatcgaatgtcg

SEQ ID NO: 5629 - DNA, 641 bp, Gossypium hirsutum
  unsure (1)..(641): unsure at all n locations; Clone ID: LIB3828-002-Q1-K6-C8
gttgtcatggtggcttgtgtgttagctactatgtgtatgaaatgaatttgctcatacttaaagataggggataccaatggtgaggtccatattctatgcaatcagcttcttgcaagaactgtgttcatgngatcccatgaaaattttcacctatgatcattggggatgagaaagtagggaaagggtctttagagaaatgtgtattttgttatttttgctccgacgtgtagagctgtttcagtgattttgtgttggtttttccatttctgcagggatgtaaaccagtggatcgtatggacataatgggaggttctgcatcagctagtccatgctcatcatatcacccaagccctggttcatcttccttcccaagtccagcctcatcccattacacggccaatgccaatggcaatgctgatgccaattccctaatcccttggctcaaaaacctttcttctggttcatcttcagcttcatccaagctcgctcaccatctcttcatcgcaggtggttccataagtgctcctgtcactccaccacttagctctccaacttccagaactcctcgaaccagaagtgattgggatgaaatgaatgctggcccaacttgcacggngaagcgcttttcttacctgcctgca

SEQ ID NO: 5630 - DNA, 649 bp, Gossypium hirsutum
  Clone ID: LIB3828-002-Q1-K6-C9
gtgggacaggtgcttgaccaaaaagatgagagagagatgaaggccgaactctgtgctgatcttgaactaaaccaggtcatagatcgtaatgttggggatttatcaggtggggagctccagagatttgctattgctgttgtcgccatacagaatgctgagatttatatgtttgatgagccttcaagttaccttgatgttaaacagagactgaaagcagcacaggtcattcgatctctgctcaggcctaatagctatgttattgtggttgagcatgatcttagtgtcctggattacttgtcggatttcatttgctgcttgtatggaaaaccgggtgcatatggagtcgtaacccttcccttctctgtaagagagggaatcaatatcttcttggctggatttgtacctactgaaaatctaaggtttcgagatgaatcgttaaccttcaaggtagctgagaccccacaggaaagtgctgaagaaattgaaacctatgcacgatacaaatacccaaccatgactaaaactcagggcaattttaaacttaaagttatggagggtgaatttactgattctcagattattgtaatgctgggtgagaatggtactgggaaagacacatttattcgtatgctggctggtttgttgaaac

SEQ ID NO: 5631 - DNA, 380 bp, Gossypium hirsutum
  unsure (1)..(380): unsure at all n locations; Clone ID: LIB3828-002-Q1-K6-D1
acaaaaactatttggtacctaaaggaagactgggttagagtctgagctctaatgcgcctncgcaaaaagaagtataaaccgccaagtctcaaaacgggtgatgttccttcctaagaccatgctcagctcttctatatctactaaaaccatgaacaatacactccggatagataggtaaccttcttcagatcataactcggaaatactcaaagcagtatatcgcgaaaccaataagaagggaacagcattgaacatagaaacataaacagtccattgaaaatcaacaagcttttgctatagctttcgaacagctcgagatcgcgcgttggttgtgtaaagaacaatccgaaggggtcacaaacaacaaaaaataggctaat

SEQ ID NO: 5632 - DNA, 631 bp, Gossypium hirsutum
  unsure (1)..(631): unsure at all n locations; Clone ID: LIB3828-002-Q1-K6-D10
cggacgcgtgggcttttttggaaaaaaccgaggaacggtataagtttgtgcctattgaagacgatgaagagcacggtagctcgaattttccggtcgttttggtgcaaataccaatgtttaatngaaaaagaggtttataagatctccattggagcagcttgtggactttcatggccgtccgatcgtcttgttatacaagtacttgatgattcaactgactctgcaatcaagtcaatggtggagcaagagtgccaaaggtgggcaagcaaaggcataaacataacgtaccaaataagagaaaaccgaacaggttacaaagctggtgctttaaaagaagggttaaagaggagctatgtgaaacattgtgaatatgtagccattatcgatgccgatttcagaccggatcccgatttccttagaaaaagtatcccctttttggatcataaccctgacattgctctagttcaagctcgttggagattcgtgaatgccgacgaatgcttgctaacaagaatgcaagagatgtcattggattaccatttcacagtggaacaagaagttggatcagcaactcatgctttcttcggttttaatggaactgctggtatatggagaatagcagccattaatg

SEQ ID NO: 5633 - DNA, 639 bp, Gossypium hirsutum
  unsure (1)..(639): unsure at all n locations; Clone ID: LIB3828-002-Q1-K6-D11
gtcgagagagtcggaaacataaattggatcactgttcatacaaagccatgtccacagtgtcacaaacccgtggagaagatgggggttgtaatcttgtgagctgtatttgcgggcaagcattttgttggctatgtgggggagctacggggcgggatcacacttggtcaacaattgcaggtcatagctgtggtcgctacaaagaagatcaagcgaaaaagactgaacgagcgaagcgagatctttatcgatacatgcactatctcaaccgttataaagctcatacagattcttttaagctcgagagtaaactcaaggagactattttggagaagatatcaatttcagaagaaagggagtcaattcttagagatttcagttgggtaactaacggactcaataggcttttcagatcgagacgggttctttcatattcatacccgtttgcattctacatgttcggagaagaaatattcgttgacgagatgacaaataaggaaagggaaataaaacagcatttattcgaggatcaacagcagcaactcgaggcaaatgtcgagaaactctctaagattntagaagagccctttgatcaatacagtgatgataaagtaacggagatgagaatgcanatatcaatct

SEQ ID NO: 5634 - DNA, 648 bp, Gossypium hirsutum
  Clone ID: LIB3828-002-Q1-K6-D12
gtttgtttgaagatggaaggattcaaaccgccagcagagttatgaagagttggtggagaagggagtgaaggagcatatggacttggtttctaagatcttggaagctctcctcatgagaggtcatgttgaagaagcccttggacgaatcgagctactaatgcaaaatgggtgtgcaaccaatttagatagccttctatctattctctctgagaaagggaagactattgctgctctcaagttgttagattttggtttagagagagactgcagcatagatgtttcgagttacgagaaggtgttggatgctctcttaactgccggaaaaactctcaatgcgtattcaatattgtgtaaaataatggagaaaggagggatcactaactggagtagccttgaggatttaatcaagagccttaaccaggaagggaacacaaagcaagccgatatactctctagaatgattaaaggaggggcagcagctagtggaaacaagaaagggaagaaacaaacaactgttgctagctaaattaccttttgattagggaaaaaaaaaactttagataattctattgtgggaatacgacgatcttgagtttcatttgcagaaagctcatagcctgatttgcagttcgatactttcactaccct

SEQ ID NO: 5635 - DNA, 506 bp, Gossypium hirsutum
  unsure (1)..(506): unsure at all n locations; Clone ID: LIB3828-002-Q1-K6-D2
agtaaaaccacatgcacatatcactgagtcgtttaaagggggatgatggtttgcagtctctttgctaccactcatcattaaatctccaaaggtgttccatggcctcctctttttctatctatcttgttggaaggttgtaaatgtttattgttttgggttaatattgtgagttatattcatgngaaaaaacaaatgtattgatgatataagaggttctttgtggatgagttgcttaggaatgtcataccatagcagtaataaagagagttacaatgttgttctattcctcccaaaaaaaaaaaaaaaaaaaaaaaaaaaaaaaaaaaaaaaaaaaaaaaaaaaaaaaaaaaaaaaaaaaaaaaaaaaaaaaaaaaaaaaaancccaaaaaaaaaaaaaaaaaaaaaaaaaaaaaaaaaaaaaaaaaaaagggggggggcctttttagggaacaaatttttttcccccggccttgccaactaatattttttttttagggcccccaaaa

SEQ ID NO: 5636 - DNA, 635 bp, Gossypium hirsutum
  Clone ID: LIB3828-002-Q1-K6-D3
ctaatctcatatagtgaactctgctccaggccagacgggaaatggtaggagcacaggcggttgctctgagagtctccggcgacaggtcggctttctataactgcaagatcattggcttccaggacactttgtgcgatgacaggggcaaccatttctttaaggattgccatattcgtggcactgttgatttcattttcggaagcgggacatctttatatctgaacacggaaatattcgtggtaggagatccagaaggagatccggaaatggcaataattacagcacatgcgcgagaaagttcatcggaggacacgggttattcgttcgtgcatggcagaattacaggaacagcgaaggacgtatttttgggcagggcctggaagagcagtccgagggttgtttattcttatactgaaatggacgaaatcgtccatcctggtggatggtctagtaatcgccaacctgaacgagccgacactgtgtactacggagaatacaaatgcacggggaaaggcgcgactcctgctacacgagagaaattcgtcaaacaactatcggatgcggaagctaaaccattcttggttcttgactacgttgaaggtaccaaatggttgcttcccccttcgacagtacct

SEQ ID NO: 5637 - DNA, 648 bp, Gossypium hirsutum
  unsure (1)..(648): unsure at all n locations; Clone ID: LIB3828-002-Q1-K6-D4
naaaaagtctccctgtcttccccaatgatgcactcttccttacctttttccttctcttatcagctgccgatgcatttaacatcactaaggtccttggctccttctcagattacagcaccttcaacgacttgctgactcaaactggtgttgcgagtgagaatcaacgacaaaaaaagcgtcactgttcttgttgtttccaattctcagatttcaggactttctagccaaccgaaggatacaataaaaaagagctgagcattcatgtggtactggattattacgacaaagccaaggtggacaaggtgccatctaaaccgttgactctcaccacactttaccagcaaagtgggaaagcccaaaaccagcaaggtttcttgactatgacacgtgtggggaaacaagtgtcatttggatctgctgctccgggttctagccatgattctatctttgttaaacaagttacgactcaaccctatgatatttcagtactggaaatcagcaatgttataaatgtagccataacttcttccccatcttacgctcctaatgcttctcctcccaggaaggctttagcacctggtcccaacagtccccacttgcatccccacctaaaacacccgaagcgacataccagctgctgatgctcct

SEQ ID NO: 5638 - DNA, 646 bp, Gossypium hirsutum
  Clone ID: LIB3828-002-Q1-K6-D5
aggtccttggctgtttgttggcatacctaatgttgtcaaggcatggaacacccaaactaatcaagagctcagtcttagtggacctgttgggcaagtttatactatggttgtgggtaacgatttgctctttgctggtacacaggatggtactattttagcatggaaatttaatgccgtcaccaacaactttgaaccagcagcatcacttaagggtcacacccttgcagttgtatcattagttgttggggctaatagactgtactctggttccatggaccattctataaaggcctggagtctagaaactttgcagtgtctacagactttgacagagcacactagtgttgtgatgtccttgctttgctgggaacaatttcttttttcttgttcattggaccaaacaataaaggtgtgggtagctactgagagtggaaacttggaagtaacatatactcacaaagaagaacatggcttgctgaaccttcgtggaatgcctgactcggaatccaagcctgtattgatgtgttcatgcaatgacaattctgtccgcctctatgatctgccctcgttctcggagaagggtaaaatatttgcaaagcaggagattcgtgcaatagaggtaggcccctgggggctgtttttcact

SEQ ID NO: 5639 - DNA, 682 bp, Gossypium hirsutum
  unsure (1)..(682): unsure at all n locations; Clone ID: LIB3828-002-Q1-K6-D6
ccggngtcgacccacgccgtnnncgggctgatcctgaatcccccactgctaaggactctgccgcaccaaccacggagccccaccacacccaaacccaagtagacgacactgccgccaaactcagcaacctcacctttaaaatttggccccccacccaacgaactcgtgacgccgtcctcaaccgtctcgtcgagacgctatcctccgaatccgtcctttccaaacgctatggaaccatcccaaaggaggaggcttccgctgcggccaagttgatcgaggaggaggctttctcggtcgccggcgcatccttctccaccgacgaggacggcatcgagatcctccaggtgtattccaaggaaatcagcaagcgtatgctcgacactgtcaaagcccgagctgctgctgccactgactccactccttcaggttcggcggaagtagactcgaataacgtgggaactgcggttggtgaggaggattcgtcctcgtccgtcaaggctgaggattgagtttgagtattcttgtttctcacattgtctctttagggttctttttttgtttagcttgataattggtattgctagggttttagtagatctgtttctactgactataaatattgcgggatgcttaattgcttatataccatgataataatatctgtaatggtatttatcaatat

SEQ ID NO: 5640 - DNA, 548 bp, Gossypium hirsutum
  unsure (1)..(548): unsure at all n locations; Clone ID: LIB3828-002-Q1-K6-D7
caccggggnaaaccccattcacctgtaattaaacgcaggtctctttcatttcctttacgtttaataatcccttcataacaccatggacatgaagaagatctccaccgccatcattgttgccgctgcctcaatgagcgccgtcatggccgccagtgcaccagctacttcaccttccgccggtggtgctgagcatatctcctctcctgattctggtccagcacctggaccagactccagcgtcgctgctgctgccttgcctgttcttggatcattggtcggggcttcccttgtttctttgttttcttacattctccagtaagctgataaatggatgaagaagtgcataatcggaggttgaagatgaagaacatggagctttatatttatactgtaaactggttactatatatatataagttatatttatatatgtaatcattttggggctctttttcaattccttgttaaaattttgcttgagaaattgtttttatatatttctgagtttttttnannnaaaaaaaannnaaaaaaaannaaananaana

SEQ ID NO: 5641 - DNA, 655 bp, Gossypium hirsutum
  unsure (1)..(655): unsure at all n locations; Clone ID: LIB3828-002-Q1-K6-D8
ctcaagctgttgattaagcaaaagatctaacgttgaagcaacaatactgggaaaggagagtccaaggacataaggatcttcgtctctgatgtgtgattgtttgaagctatggattcaactagcaaaacccaattctttcggtcgagttccctaacggcgggacaacggatctgtgcatctgctttcttaccggtccttatagtgatcgatttcttgatttatgcaacgtctaattgctttggataccggccccgacccaagaaatgcatctatgagttcactgatcttacccggctcgctcatgaatcccgattttcggtgaatgaaatagaggcattgtacgaactcttcaagaagctgagtagctcaataatcgatgatggattaattcacaaggaagagcttcagttagccttgttccagacacccataggcagcaatctctttcttgacagggtttttgatctttttgatgaaaagagaaatggtgtcatcgaatttgaggaatttgtccatgcactgaacgtgtttcatccatgtgcccctttagaagataaaattgattttgcatttagattgtatgacctgagacaaacagttntattgagcgagaagaagttaagcaaatgatgattgccattntgatggaatctga

SEQ ID NO: 5642 - DNA, 604 bp, Gossypium hirsutum
  unsure (1)..(604): unsure at all n locations; Clone ID: LIB3828-002-Q1-K6-D9
gcatgatggcctcttcagcaaacggctggacaagggtcattgtntgaaaagccatttggccgtgactcagagtcctcggctgagctanacaagatgtctgaaaaagcatctaactgaggatcagatattcaggattgaccattacttgggtaaggagcttgttgagaacctctcagtgcttcgcttctcgaatcttattttcgaacctttatggtcaaggaattatatccgcaatgtgcaattcatattttctgaagactttggtactgaaggacgaggaggttattttgataattacgggatcatacgggacataatgcaaaatcatctcctgcaaatactggcactatttgcaatggagacccctgtcagcttagatgctgaggacattaggaatgaaaaggtaaaggttctgagatcaatgaaaccattggaactagaagatgtcatcattggtcagtataagggccacaacaagggtggtagagcatatccaggttacaccgatgactcaactgtaccgaagaacagtataacgcctacatttgcagcagcagctttgtttatcaataatgctagatgggatggtgtcccttttctcatg

SEQ ID NO: 5643 - DNA, 544 bp, Gossypium hirsutum
  Clone ID: LIB3828-002-Q1-K6-E1
gattaataaattttcaataaaaaaaaataattatagtttggtacatgcgttcaaagtaaacattgcatctggtaacccccataacagattttattttactattgttccttgaaatacaagaagcaaagtttattcaccaaaaacaactcttccaaggtaatatagaatatgaccatgatgacattcactactgtcccacaaacttaagaaattactataacccttgattaaaaaggccaggaatatgactattcattatataatcttcccaatcaatactcttggaatcaaagttaaattcagctacatcaatgcctttctcttcagccaccctttgcaatctctctaaatttcggtcatcaaaaatccctgtgaagaatgcgtaaggcttgtaaaattctgctaatcgaagtataaacttgactctacgattaagatttgtatagattttctcgaaacgttgacaacaaagtttgttgatcaaataaaataccttcagtgggagcacatatttgattttcatgtataggaaaaactattaatt

SEQ ID NO: 5644 - DNA, 272 bp, Gossypium hirsutum
  Clone ID: LIB3828-002-Q1-K6-E10
cgcagtgttagcaggagtccagtgggagcaggagcaggagcaggagcaggagcaagagtgtatccgggtcttgatctgaagctcctctgttgtcttttcactggtgagatgctattgcggggtgtatcaggagctgaagatgcctatgaagcttttatgtttggataaaaattagcatggagtagtgcgtaacttattagagttgtatcaactatgctggatttgatcttcattgctatattcagaacatcggacgttgggtgtgttatttt

SEQ ID NO: 5645 - DNA, 319 bp, Gossypium hirsutum
  unsure (1)..(319): unsure at all n locations; Clone ID: LIB3828-002-Q1-K6-E11
gatatgacctggtttnnctttntggagactggagggagcttaggaaatcagtgtctctgtcccttccggtggaccgggctcagtcctgccctggtggttggtggctgggctttcccgatttggcggcttgcctttcctcctaacacctggggggggggggttgctttcttggcatcttgttggtcccgtgatcccgctcaacggccgtcttttggttctttcgtcataacactgaatgaggtcgctagttctgcgttgtcgctatgcgctccggtcctctgtctctgtgggtgtggttcgcttcccctgattgccgctg

SEQ ID NO: 5646 - DNA, 448 bp, Gossypium hirsutum
  Clone ID: LIB3828-002-Q1-K6-E12
ctcgtccaacctttcccttccatgcctcgcagcattcatgaatagccaatattatatataccctataaatagtacagctcttgtttcttcgaggtgtcgattgccggttcggatttttgtgactcaaagtgtgcggtgaggtgctcaaaggcaggggttcaagacaggtgtttgaaatattgtgggatttgttgtgagaaatgtcattgtgttccatctgggacatttgggcataaagatgaatgcccttgttatagggacatgaagaactctaagggcaaatccaagtgcccttagatgtttttttccccataattacttgtatgtatttattttgcctttatacccttataaagatttaacaaatgatgttgtgggaggacccttaatcttaactatgtaaaatatactaaatgaataaattgggtccttagatatgtgatttatg

SEQ ID NO: 5647 - DNA, 626 bp, Gossypium hirsutum
  unsure (1)..(626): unsure at all n locations; Clone ID: LIB3828-002-Q1-K6-E2
gngggaaaagccccctttgccggccatcgaccaccgcaccggtcgccggacgccggcgacgacgccgccgttcgcggtggccggaaaacaaaaaagctccctttttctcctttttgcgaatagagtccagatctggggttagaaaagccgaaatcccggcgaaaagggccaaaatcgaaagagacctttcggttcttcctctttccaccgccgccggaaacaggtgcggcaaaaggcatggtggtggcagacagcataggagagtgggagtggtgctggtggcagacaacatgggagaatgggaagaggcaagtgggagtctagggttttgggattgggcttggatgttgggctaggttgattttaagttttgggttttattattagggttattttgttgatatgggcccgggcaaaaatggacttttacattggcttttaaaatcatcaccttatgaagtcacttacttcatatgttaacaagtcacaattttcataataaaaatgtacaacaattcccttttaattaataaattcattaaaagtgaggtttaaattgtacaaccatcattacattntttttaaatttctctcttcaagtaaacaaataattataacaccctttt

SEQ ID NO: 5648 - DNA, 287 bp, Gossypium hirsutum
  unsure (1)..(287): unsure at all n locations; Clone ID: LIB3828-002-Q1-K6-E3
cggncgcgtggngagatattgttttggctgaaagaaagtgaaggagctaagaaagaagaacccattgtaaaagaagtgaaaactgaggcacccattgtttgatcatagggaaatgtaagggaaagtttatatatatatgtatgtgagaactaaggataaagaagaaaaacaggaggaggaagaagcaaaggaaactagcaacatatgtaatcataaactcacaatattttatgttgtttgattttatgtttatttgggaaatggagggaaaatgtgtttattttttg

SEQ ID NO: 5649 - DNA, 657 bp, Gossypium hirsutum
  Clone ID: LIB3828-002-Q1-K6-E4
ggaggaggagcatgattaccggttcaaggttttccgggcgaacttgagacgagcggagcgtcatcagaagcttgacccgtccgcgactcacggtgtgactcagttctccgatttgactcccggtgagttcaggaagaggtttttggggttaaggaggctgagactgcctaaagatgcgaaccaggcaccgattttgcctaccgataatttgcctgaggattttgattggagagaaaaaggagctgttacgcccgtcaaaaatcagggttcatgtggatcatgctggtcttttagtacaacaggagccttggaaggtgctaattttttggcaactggaaaactcgtgagccttagtgagcaacagctcgttgattgtgatcatgagtgtgatccagaggaagcaggttcatgcgactcaggatgcaatggtggtcttatgaatagtgcttttgagtatacactcaaagctggtggactcatgcgtgaggaagactacccctacactggcactgatcgtgggacctgcaaatttgacaagtccaagattgttgctaaggtggccaatttcagcgttgtttcccttgatgaggatcaaattgctgcaaatcttgtgaaggatggtcctcttgcagttgccataaatgcagtgttcatgca

SEQ ID NO: 5650 - DNA, 635 bp, Gossypium hirsutum
  Clone ID: LIB3828-002-Q1-K6-E5
ggaaaatatgggtgccaaagttcttttcttctttgctttgctttccttttcagctgtctcggcatttgcacaggatgaggaagaccaaggtcttgttatgaacttctacaaggattcttgtcctcaggctgaagacattatcaaggagcaagttaagctactgtacaagcgacacaaaaacactgctttttcttggctgagaaacattttccatgactgtgctgtccagtcatgtgatgcttcactgctgctggactccacaagaaggagcttgtctgagaaggagacagacaggagctttggcctaaggaatttcaggtacattgagaccatcaaagaagctgtagaaagggaatgtcctggagttgtttcttgtgctgatatccttgttctgtctgctagggaaggcatcgtttcgttgggaggcccttatattcctctcaaaactggaagaagagacggtagaaggagcagagcagatgttgtggaggagtatcttccggaccacaatgagaccatctctggcgttcttgacaggtttgccgccatgggtattgacacccctggagtcgttgccctcctaggagctcacagtgtcggcagaactcactgtgtgaagctggtgcatcgtttgt

SEQ ID NO: 5651 - DNA, 659 bp, Gossypium hirsutum
  Clone ID: LIB3828-002-Q1-K6-E6
caaaacttcatgtggctacggagtcgctaccgggggaccattggcttggggtctttgctacaacaaagaaatgagccctagcaaaatatattgcgatgattactacaaatacacctatccttgcacaccaggagtctcacatcatggccgtggtgccttgcctatctactggaactacaactatggggaaactggagaggctttgaaggtggacttgttgaaccacccagaatacttagaagacaacgcaaccttggctttccagacagcaatgtggaggtggatgacgccggtgaagaaacaccaaccctcagcccatgacgttttcgttggcaactggaaaccaaccaagaacgacaccttggccaagagggttccaggttttggaaccaccatgaatgttctttatggtgaccaagtttgtggtcaaggtgatagtgattccatgaacaatatgatctctcattacctttattaccttgaccttttgggagttggccgagaagaagctggtcctcatgatatgctcacctgtgaagaacaagaacccttcactgtttctccttcatccgcaacatcatcatgaataaaggaaacaaactctggtatatgcggatttatttcaatttgcgtgaatccacaatggattgctcttaaca

SEQ ID NO: 5652 - DNA, 595 bp, Gossypium hirsutum
  Clone ID: LIB3828-002-Q1-K6-E7
tgggtgtggcggaggttgcggaagctggtgaatagcagtggctgtggctctggctgtggtgggtgcggcggaggttgtggaagcatggtgaatagcagtggttgtggactcaaggaggagagcggtggctgtggtggttgcggtggttgtggcggtgggtgtggcaaccttataaatacctgtgtcggaaccggaggtgtggtaaaaagtaatgggtgtgaaaatcccacatacatggaggcggctataaaagcttgatggtccatggggagtttcaccattattcataatgatggtccagtaaatcattgcatttattgctgcttatttccatttcctcctggtgaataagtacagctattattatatgaagtttgtatatttcgcttgtgtttctttcagattctggctttgcatatctattttccttcaaaaataaactttcctggaaaaaaagtaatacaatactctgtaatacaactatctaaaagttcttgttaatgtcgaatttcagtgaattatcccaaaaaaaaaaaaaaaaaaaaaaaaaaaaacccccaaaaaaaaaaaaaaaaaaaaaaaaaaaaaagggcgg

SEQ ID NO: 5653 - DNA, 505 bp, Gossypium hirsutum
  unsure (1)..(505): unsure at all n locations; Clone ID: LIB3828-002-Q1-K6-E8
gcagtccgtatgcttcttgggttaggtgtcctgctactctgccttgcaaaggtttcatctgatctgaaggcagaagaagttataaccaatgtcggtgaggtgggttctttggttaccagaggcggaaacagaagactgatgctagagattgattgtggaggattatgcaagaaaagatgcagtcaacactcgaggccaaacagatgcaacagggcgtgtgggacttgctgcttgaggtgcaagtgcgtgccaccggggacttcagggaacagggaggtctgcgggacctgctatactggcatgaccacccatggaaacgttgccaagtgcccttaacctttacgtcgcccaatatgtgttgcagccatcaaggggaaaaatgaaatgtttgtttgtgtaatatgtatgttgtagctcagatgtctcacctactcctaaaattattagtacttgtaatatatatttttaaaatagtagtatgcatttagcctccgttcagtnttna

SEQ ID NO: 5654 - DNA, 602 bp, Gossypium hirsutum
  unsure (1)..(602): unsure at all n locations; Clone ID: LIB3828-002-Q1-K6-E9
ctccagaattccttcgcggagagccttcaaatgaaaaatctgatgtttacagtttcggagtaatcctatgggaacttattaccatgcaacaaccatggaatggactcagtcctgcccaggtggttggtgctgtagctttccagaataggaagcttgccattcctcctaacacctcccccaagttggtttccctcatggaatcttgttgggccgatgatcccgctcaacggccgtcttttggtaatatagtaataacactaaagaagttgctaaaatctccattgtagcgatgcggaaaggaaaacagtaacaatgggtgtcgttagaataacctgaaagcagctgattttggagattccactaacctttgtttttggttccaggcaactgtagatgttttatctaacccatttggaaggcagttcccattagaatttgaggcctataacgataattaataataaggggaaaaaatatagcaaagctgtaatgagttgctgtgttcattatatgtaggttttgcatggggggttgccttttcttacataaagcaatttgccagtgtatgtaaactccgaaatgtttatgaattcngattggtt

SEQ ID NO: 5655 - DNA, 624 bp, Gossypium hirsutum
  unsure (1)..(624): unsure at all n locations; Clone ID: LIB3828-002-Q1-K6-F1
gaaaggactggttgtctttggttgctgtacacagtgacgcgtggttacttgctgtggctttctattttggtgctaggtttggattcgataaagctgataggaaacgccttttcaatatgataaatgatcttccgacaatatttgaagttgtgacaggggcaactaagaaacagacaaaggagaaatcgtcggtttcaaatcatagcagcaacaaatctaaatcaaactctaagcccaagtattcgaaggcagcagcatcaaaggatgaggttgaagatggcatggaagacgaagacgatgaggagcatggagagacgttatgtggggcttgtggagagaattatgccgctgatgaattctggatttgctgtgatatctgtgagaaatggttccatggaaagtgtgttaagataacaccggcaagggcggagcatattaagcagtacaaatgcccatcttgcagcaacaagagagcacggccttgacgatggttgttggggtggctgttttatgtgaattctggcattgtgggactgctaactgtctagtaggggatgtagtgaagtttgatgttagttaatgtgacgttttaatgtangagatctgtgtttttacttttgatat

SEQ ID NO: 5656 - DNA, 649 bp, Gossypium hirsutum
  Clone ID: LIB3828-002-Q1-K6-F10
cttctacatctttctttcttttttttttgggtgggagtttgattctctctttggaatcaaagaaaccataactgtttgttctttttttttctccctttgaattgaaacgattgaaagaagaaatgggttcagaaggatcatgtgttgttgtacccaggagtttcagattgctagaagagcttgagaggggtgaaaagggaattggagatggaactgttagctatgggatggacgatgctgatgatatatacatgcagtcatggactgggactattattggccctccaaacactgttcacgaaggatgcatatatcagttgaaactgttctgtggcaaggattatccagataatccacctagtgtgaggtttcaaacccggataaacatgacctgtgtcaatcaggaaactggagtggttgagcctagccttttccccatgctcgctaattggcagagggagtatacaatggaggatatattgactcagttgaagaaagaaatgatgtctccacaaaacaggaagcttgctcagcctcctgaaggtgtgtagatcctataatctctattattcatggagaaatgttggttgtattggattggtagattatggcgatttgcatatagatcaactaatgctattatttgtga

SEQ ID NO: 5657 - DNA, 676 bp, Gossypium hirsutum
  unsure (1)..(676): unsure at all n locations; Clone ID: LIB3828-002-Q1-K6-F11
gtttcggaaaaagaggtaatagaatagaacctctcaaanagtgagacacagacagaaaaagctcgaaatgagttacgagagaggtcctcaagatcattatcctcctcctggttattcctctccttatcccccaccgggctatccatcagcccctcctcccccatcttacgaaggctatcctcctccgccaactggatatcctgcctatcctcctcagccgcctcgccagccctacgacggttaccaaggctattttgctgaagggtatccacctcctccgccccctcaacctcatcctcaatatcaacactaccaccactatgaccactaccattaccagaaccagtctgattctggctgtttctctttcttgcaaggctgtttggctgctctatgttgctgctgtgtgttggaggactgctgcttcttcctatgatataattcatgacggatgagttatttcatttacatttctggttctgctatgcttcgctgctactgtttgggagggaggagaaatgccgctaataatgagttctaccccgcatttatggtagttgttactgttctataaacagttggttgtagcgattccctgcctaatccaatttgatagtttatctacttttgaactntgtcaacagaagtttgctttataaatacatttgctgggtgt

SEQ ID NO: 5658 - DNA, 587 bp, Gossypium hirsutum
  Clone ID: LIB3828-002-Q1-K6-F12
ctccgtccctcccttgagccccttccttctcagatcccatatggttcctttaagaagccctcctttttcacttcctccaagcccttttctcctctcatgaaaggcaggattgcacggtaaaaatggaaattgatgttcctgcctcggtggcttaccaattgtactcagatcgagaagcaattcccaattggatgccattcgtttcatctgtgaaggcaagtattgtatgtatatatggtacaagggcaggatatttgtgagcttgcttctttgttttgtgtaactaggtattagaagacaagcctgatttgtcacggtggttcgtgaaatataaagcatttggtcgtaatattgaatactcttggcttgctaaaaatatggaacccattcccaatcagaaaattcattggagatctttggaaggatttggtaacaggcaagcacaaaagaaccctgtaacccaatttgttatccactcaattagtacagtttctgggtttagttctgctctgtggttttttgacatctaaagctttaaaaattaacactaactgggcttttaacatggtaggggtgctgttcgattc

SEQ ID NO: 5659 - DNA, 537 bp, Gossypium hirsutum
  unsure (1)..(537): unsure at all n locations; Clone ID: LIB3828-002-Q1-K6-F2
ctccgcccgtgtggagtcagtaaaaactgcaccttcctaaccttccaaggtgttagaatcaaacttggccaggtgctgaacccggcacttgttcgaacattcactttgaggatattaccgcgaccaatgtcagttctcctatttataattgannncagaaatattgcccacggnaacaaatgcaaaataaatgaagaatcaaaagttaaactaagaaacattagtttcaaaaacattcacggcacttctgcgcttccagaagctgtcaagattatttacagcgctactttaccgtgtgaaaatgtggaacttgccgacattgaaattacacacagtggaccgactggacctgtagtatcacaatgctcgaatgtgaagcctaaagttagtggcaaacaaaatccagctccatgttccgcccctatcccagcaaaacctacctcggctgcttaatcaatagcataggtataattttttttgatgaggttgtaactcatataattatatttattttgcaaataaattttgttttgtttt

SEQ ID NO: 5660 - DNA, 590 bp, Gossypium hirsutum
  unsure (1)..(590): unsure at all n locations; Clone ID: LIB3828-002-Q1-K6-F3
cggncgcgtgggcgcagnaacacaaagcgaatcaaccagngnagnaanagctcactctttggaactcaatcgtcgatgaagcttcgaaatgctcgcttcatacagagacgaaacgctcgactatngaaacaattcagagattcgtttctccggtgacggcaaacatcgaacccgacggtgattatgaagattatataagaactgagcttctttatcaaacggggttatctcaagaccccactaactccctcctcctcgccaattacgctcagtttctctaccttgttgcacatgattatgagagagcggaagagtacttcaagaaagcggtaacagtggaggcggtggatgcggaagcgtacagtaaatacgcaagctttttgtggaaagcgaggaacgatttgtgggcagctgaggaaaccttcttggaagccattgaagcagatccgagcaactcttattacgccgcgaattatgctcattttctatggaacactggcggggaagatacctgtttccctcttgacactacccaagacgcttaaaccaaaaaaaaaaagggaaataaaaaatttttagaaaataaccct

SEQ ID NO: 5661 - DNA, 562 bp, Gossypium hirsutum
  unsure (1)..(562): unsure at all n locations; Clone ID: LIB3828-002-Q1-K6-F4
tccggncccgacgtcgagcgataacgctgagtttcagatcgtattgacgataattaaagagggttgacagcaaatccgaagaaattacgaagatgaaggagagattggttggtgtttctgaagaaaccacgactggggttaaaaggctttatcaaatgcaggctaatggaaccttgttgttccctgctattaatgtcaatgactctgtcaccaagagcaagtttgataacttgtatggttgccgccactctcttcctgatggtttaatgagagccaccgatgttatgattgccggaaaagtcgccgttgtctgcggttacggtgatgtcggcaagggttgtgcctcagccttgaaacaagccggagctcgtgtcatcgtgaccgagattgatccaatctgtgcccttcaagctcttatggaaggactccaagtcctaactcttgaagatgttctttcaacagctgatatctttgtcaccaanacaggtaacaaggacatcatcatggttgatcacatgaagaagatgaaaaacacgccatcgtttgcaacatcggtcatttc

SEQ ID NO: 5662 - DNA, 648 bp, Gossypium hirsutum
  unsure (1)..(648): unsure at all n locations; Clone ID: LIB3828-002-Q1-K6-F5
gtttgggcaccctccaggtggttcacttatgctgaactagaacatgctacaaatggcttttcacaatcgaatttcttggctgaaggtggatttggttctgttcatagagggatcttaccagatggtcaggtgatagctgtgaagctacataagttggctagttctcaaggtgaccgagaattttgctcagaagttgaggttttaagttgtgcacagcatcggaatgttgtaatgctgattggcttctgcattgagggtggaaaaagattgctagtttatgagtacgtttgcaatggctctttggattctcatctttatgggcataatcatgatacattgcaatggtcagcacgacaaaagattgccgttggagctgccagaggattgagataccttcatgaagagtgcagagttggttgtattgtacaccgtgatatgcggcctaataatatccttctcacccacgattttgaaccattagttggggattttgggttggcaaggtggcagccggatggagacaggggagtggaaactagagtgattggacgattcgggtatttagctccagaatatgcccaaagcggccaaatcacagaaaaagctgatgtctattcctttggnngtggtaatggtagagctcatcac

SEQ ID NO: 5663 - DNA, 691 bp, Gossypium hirsutum
  unsure (1)..(691): unsure at all n locations; Clone ID: LIB3828-002-Q1-K6-F6
ngacaaactcaagctctattcttactggaggagctcctgctccttccgntcagaattgcccttaacctcaaggtctggaataccagtacatacccgtgaacttgcttaagggggagcaattcagtcctgaattccaaaagctgaaccctattgggtatgtaccggtgctggtggacggtgacatgatcatttcagactcttttgcgattttcatgtatctggaggagaaataccctcaacaccctttattgccatctgatcttgcaaagaaggcactcaatttccaggctgcaaatattgtttcctctagcattcagcctcttcagaatctagctgtactgaagtacattgaggagaaagtaagtccagatgagaaaattccttggacaaaatttcatattgagaaaggctttgaagcgcttgagaagctgttcaaagatcatgctggaaaatatgctactggagatgaagtttccatggcagatctgtttctagcaccacagattctggctgggattgaacgattcaatgttgacatggctaaattcccactgttatctaggttaaatgaggcatatagtgagctaccagaattccaaaatgccaagccagagaatcagccggatgctccttcagcatanggcactcgttaagatggtggatggatgaggtacatatctactgctgaact

SEQ ID NO: 5664 - DNA, 558 bp, Gossypium hirsutum
  unsure (1)..(558): unsure at all n locations; Clone ID: LIB3828-002-Q1-K6-F7
gngtactctcttcttgacaataaccatctcactgggtctgtacctgaggagtacgtgaaaagcgtgtacgacggcaccaccaaaactttgtatttgcagcataactatctatccggattcccattacctcaaggttccactctgcctgataccgtctccttgtgcttgtcctataattgcatggtgccgcccgttgggatatcagcctgcccggccagtgccggaagccagccctccaggccgcaatcgcaatgttccgtattcacccatcgtggctccaccaactgacatcaggataaggtggatatggttatacgtttcacattagtagaagcaatgttaagagtgtgtgtaacttatattactaccatataggtttttttttttttttaaatttatataatttgttttaaggatgagttatataaacagtgaaaaagaaaggttttattagcagccctgcttctcttatacttaacccctccccacccctcaatgtaatcgtattttatttgggttacttttttattattataaaatttgacttgacttgttnnt

SEQ ID NO: 5665 - DNA, 655 bp, Gossypium hirsutum
  Clone ID: LIB3828-002-Q1-K6-F8
ggaagctagctcaattggccgaacgcatcgggatcgaattcgagtttcggggattcgtggctaatagtttagccgatctcgaacccgaaatgctcgatattcgtcctcccgagattgaagtagtagcggtgaacgctgttttcgagcttcatcccttgttagctcgaccgggtgggatcgaaaaagttgtttcctctattaaagcgatgaaacccaagattgtcacggttgttgaacaagaagcgaatcacaacggtccggttttcttagaccgttttactgaagctctccattattattctacccttttcgactcgttggaaggttcaggggtggcgccagcgagtcaagacctggctatgtccgagttatacttaggaagacagatttgtaacgtggttgcttgtgaagggatggaccgagttgaacgacacgagccgctgactcagtggagaactcggatggaaacggccgggtttagccctgttcatttgggttccaatgcttataaacaagctagtatgttgttggccctcttcgccagcggcgatgggtatagagtggaggagaataatgggtgtttaatgcttgggtggcatacaaggccacttatcgccacctcggcttggcgactcgctggtactgagtcaggtag

SEQ ID NO: 5666 - DNA, 604 bp, Gossypium hirsutum
  unsure (1)..(604): unsure at all n locations; Clone ID: LIB3828-002-Q1-K6-F9
cggnatccaacgactgtatataaactcgtgatcgttcaagatttacatgtttcacattatctcgtatatcttgctctgagctgcctctgcgtgcgggggcaggatcggagattgtttggtcggcgaagtttgagacctgtctttgtagtccaatcgactgctaatattcgagttggattgcgacaatggaggcagagaagaaacattcatcagccgtttctaatgtgggagcttgggcaatgaacgttattagctccgtcgggttaatcatggccaacaagcaactcatgtcccctaccggtcatgccttcgcttttgcgacaacattaactgggttccacttttgtacaactgccttaatcggtttggtgtcaaatgccactggttacacaacaaaaaagaatgttcctttgtgggagcttctttggttctcggttgttgccaatacttcaattaccgcgatgaacttgagcctcatgttgaattcggttggattttatcagatttcaaagctaagtatgattcctgttgtttgttttctggaatggctcctcaatggtaaacattactcgagtaaagtcaagatggcagtggtggtggtggt

SEQ ID NO: 5667 - DNA, 649 bp, Gossypium hirsutum
  Clone ID: LIB3828-002-Q1-K6-G1
tgctgattttggcatggctcgcctcttccccgaggatcaaacacatgtcaacacccgtgtagctggcacaaatggatatatggcaccggagtatgtgatgaacggacgtctttcagtgaaggcagatgtgttcagctttggggttgtggttctggagctgataagtggccagagaaactcatccttcaacttagatgtggatgctcatagtctgcttgaatgggcatataagctttacaagaaaggcaaaagcttggagttcatggaccctgtcttagcctcgtcagcagtccctgaacaagtagctatgtgcatccagatagggttactgtgcacgcaaggcgatccgcaattacgacctgacatgcgacgtgtagttattttgctgtcaaagagacctggcagtctagaagagccaacaagacccggagctctgggtgctcgacaccgaagatcccacaggcctcctgggttctcatccactgctggaacatcgggtgtttcggattcccattcatctgaatcatcctttaatacttatactgcttctgcatctgcttctacatcagctcttgcaagccccttgaaatcagatcggcatgggaagcgcccaattcagagttaaaagttttgctgcagatttgggctc

SEQ ID NO: 5668 - DNA, 616 bp, Gossypium hirsutum
  unsure (1)..(616): unsure at all n locations; Clone ID: LIB3828-002-Q1-K6-G11
ggaggttatgcctaaagttatccggtcgtgagcgaggattcaagaagccttgaaatgcgagggggaagctcagaggtctcatcgctgagaagaattgtgctccgatcatagtccgtttagcgtggcactcagctggaacttttgattggaagaccaataccggaggtccgttcggtaccatgaagcatgccgctgagcttgcacacaaggctaacaccggtctcgatattgccatcaatcttctcgagccgatcaaagagcagtttcctatcatctcttacgcagacttttatcagcttgccggcgtcgtcgctgttgaggtcaccggtggacctgaaattcccttccatcccggaagaccggacaaggaggaagtaccacctgagggccgtcttcctagtgctaccgatggagcggatcgtttgagggagatctttattaatcaaatgggtttaaccgataaggatattgttgccctttctggtgcccacacgctgggaaggtgccataaggaccggtctggatttgatggagcatggactaccaacccacttaccttcgataattcttatttcaaggagctattgtccggnaacggggcagatattatgcagct

SEQ ID NO: 5669 - DNA, 629 bp, Gossypium hirsutum
  Clone ID: LIB3828-002-Q1-K6-G12
ggctccacttgataaagtgtgtgttcttagctgcggaatgtcgacatgttttggtgccactgtgaatgttgctaaaccaaaaagggtgggtctgttgcagtttttggacttggtgctgtaggtcttgcggctgctgaaggagcaagagtttgtgaggcttctaggatcattggtattgatctaaaccccaacagattcgaagaagccaagaaatttggttgtaccgagtttgtgaacccaaaagatcataataaacctgttcaagaggtgatttcggagatgactggaggaggagttgattgcagtattgaatgtacggggagcacccaggccatggtttctgcatttgaatgtgtccatgatggttggggtgttgctgtgcttgtgggtgtgccgagtagagatgattcattcaaaacccatccaatacatttcctgaacgagaggacacttaggggtactttcttcggcaactacaaacctctatccgatatccctggtgttgtggagaagtatatgaaaagggagttggaactggataaattcatcactcattctgtcccattcttggatatcaacaaggcgttcgagtacatgctgcgaggggagggtttgcgatgcatgattcg

SEQ ID NO: 5670 - DNA, 645 bp, Gossypium hirsutum
  unsure (1)..(645): unsure at all n locations; Clone ID: LIB3828-002-Q1-K6-G2
ngaaggcgcagtatgtcaactgggcatggcaaggaggcgttggtttgagctcttctaatgattccttcttctttgatccatctatccgcaaatatttcaagaattatgtcctgactgtccttaccaggaagaacactatcactggaattcaatatcggaatgatcccaccatctttgcttgggagttgataaatgaaccccgttgcatgactgatccttctggggatactcttcaagattgggtagaagagatgtcggctttcataaaatcaatcgacaaaaaccatctcttgaccattggcttagaaggattttacggtccttcaagccccaaaaaggcaactgtgaatccagaacagtgggcctcggcccttggagctgattttatgcgcaactcgaacattacaaatgttgattttgcctctgttcatatataccccgaccagtggtttcatggtcttgggttcgaagaaaaacggaactatgtttccaagtggatgcactcgcacattgaagattgtgacaaggaactgaagaaaccagttatgttcaccgaatacggtctgtcagaccagaacaaagacttccagctatcccaaagagagcagctntatagaaccattcaggacatcatttataaatctg

SEQ ID NO: 5671 - DNA, 632 bp, Gossypium hirsutum
  Clone ID: LIB3828-002-Q1-K6-G3
cttgctgataactgtaccggtcttcaggtttccttgttttcaacgctgttggtggaggcactggatctggtcttggttccctccttttggagcgtttgtctgttgattatggcaagaaatccaagttgggtttcactgtctacccatcaccccaggtctccacatctgttgttgagccctacaacagtgtcctctcaactcactcccttttggagcacactgatgtggctgttcttcttgacaatgaggctatctatgacatttgcaggcgctctcttgacattgagcgacccacttacaccaatcttaaccgtcttgtctcccaggtgatctcctctttgactgcttcacttaggttcgatggtgccttgaacgtggatgtaacagaattccagaccaacttggtcccttacccaagaatacacttcatgctttcttcatacgctccagtcatctctgctgagaaggcttaccatgagcagctatcagttgctgaaatcaccaatagtgcctttgagccctcatctatgatggccaagtgtgatcctcgccatggcaagtatatggcttgctgtttgatgtaccgtggtgatgttgtgcccaaggatgtcaatgctgctgttgccaccatc

SEQ ID NO: 5672 - DNA, 616 bp, Gossypium hirsutum
  unsure (1)..(616): unsure at all n locations; Clone ID: LIB3828-002-Q1-K6-G4
gnaaaaaaatggcggntcgtttctttcccaagtattgccggncttcgtacccgaacacacaaacgaacagcaagaaatggagatactctgatcaaacttctatccatgccttactcttctctatctcaacatttcaaacgcaccgctttggacctcaaagaaaccgtaacgctggaaacgtgggggataactttgcaaaaagtctccgactttactctctattgtggcagtctcggtactgctttcttgctcttcaaatcctatcaacttaccaacaacaccaacgacctctccctctgcttagccattgttgatgcttgcaactccgcttccttatcttctcgggatgcaacctttttatgtggtcgagcgggtgtttgtgctcttggtgctgtggccgcaaagtattctggaaatcaagagtcgcttaatcactacttaaccccgtttagagagattaagctctcaagggatctccctgatgaattattgtatggnaagagctgggtttctatgggcttgttttttcttgaacaagcatcttggtgaagggactatcccttctacaactacacgtgcagtggttgatgaaatatcaagaatggcaggcgttggg

SEQ ID NO: 5673 - DNA, 656 bp, Gossypium hirsutum
  Clone ID: LIB3828-002-Q1-K6-G5
gctatggccgccttgttggtagactatttgaaccaatctctgaacttgatgttggactcttttctctccttggtgcagcttcatttcttggtggcactatgagaatgacagtttccctatgtgttatactgcttgagctcactaatgatttattgatgcttccccttgtaatgttggttctccttatctcaaaaaccatgggtgatatgttcaacaagggtgtgtacgaccaaatagtaaaactaaaaggattgccgtacatggaggctcatccagaaccttacatgaaacatttaatagctcgggatgttgttactggtcctttgatcaccttttctggtgttgaaaaggtgggaaacattctacatgcattgaaaaatactggacataatgggttccctgtgattgatgaaccaccattttcagatgcacctgaattgtgcggccttgttctaagatctaagttgcttgttttgcttaagggaaaggctttttcaaaggacatggtacttgcgggcaacaaggttttaagtaaaatttctgaactagactttgccaaggctgggtcaggaaagggactcaaactagaggacctagacattcaagaggaggagtgggacatgtatgttgatctccatcctattgccaatacatca

SEQ ID NO: 5674 - DNA, 580 bp, Gossypium hirsutum
  unsure (1)..(580): unsure at all n locations; Clone ID: LIB3828-002-Q1-K6-G6
ctcggnactgccatggctgcatgtgcccaattgctgctggtcaggtataaggaacagagtgatgggcttgtggcacgctgtgatgcagaagtcccaggatctattgtggtgcgcccaaaacggaaattagatcatgcctggatggtttattcatccttgagggatgacccttctgaagcaggtgcagcccaagtgtgtgaaactcttttgacattgcttgtggaagttgggcangaaaaaaagacatgaactctccatgaaagatgaatgaaatcaagcagctcaccttgttgcgacacttggttgtaataggttaactggttggtacaggttttttaaaactgtctggccatactacttcagtattgaagtctaatatttgatattgtatatagctgaaagttaggcagattcaaatgcatgacaatgatcaaagaataggatgcatgtaacgtaagaccaaagaaaatagaaaaagagcagcaacaagttaagacattctgatttcattgtaatggctcaataattatttgtaagatttatatttcgtattattatatatcttactttttttcttatc

SEQ ID NO: 5675 - DNA, 662 bp, Gossypium hirsutum
  Clone ID: LIB3828-002-Q1-K6-G7
gggatatcaaagctggttctcatcctataatatagagattgatggggaaaagcactatcactatcaccatcacattttactaaatattttcatattcacaaataaattcattcctttctcttttacttttattttattttttttacattaactcaaaaaacaaaaatggcaaagattgctttggttattgttttgatctcaatgatcgtggtcgtttcaatccattccgtcgttggtgacaccgccgcaacgtcacctacagcatcaacagaatcaaacgctgcaaaagctgaggcaccaggtcatgagggacacgatagttccaatgaatcatggaccgactgggccaaggacaagatcagcggtattgggggcatgttcgcttcttcaccatcatcctcaccagcatcggaaccagcaccaacaccagcaagctcatcagcggaaacacccgaagtcaaggtttgagctgcacctgtagccacaagcttggtttaatatgggatatcaaagcatggttctcatcctataatatagagattgatgggaaaagcactatcactatcaccatcactactttatttttttttttattttttggatcaaacctttcatgtggtttgaacccattgttaataaaatgtataataataacaagatgc

SEQ ID NO: 5676 - DNA, 400 bp, Gossypium hirsutum
  unsure (1)..(400): unsure at all n locations; Clone ID: LIB3828-002-Q1-K6-G8
cccacgccgtccggnaaaacccgacatcacaaaggccaaagaattgctaggttgggagccgaaagtcaagttgcgggatggtcttccgctcatggaggaagatttccgattgaggcttggaatctctaaagagtgatcaaacctattagtggattatactaatagagatgagattcacttcttgcggggaacaatatctccagccttcagtctttgttctccaatacctcctattggtctttactatatcaaaggaaaaaaaaaaccatagccattgaaagtaggaattttgtgcaactattttaattttcagtccttaaagtggacattgatgatggtcttgatgccatgaattttgtttgccactgctatcaataaaaaaagaatcgtgattatctat

SEQ ID NO: 5677 - DNA, 681 bp, Gossypium hirsutum
  Clone ID: LIB3828-002-Q1-K6-G9
gttcattttcagccttcctatttgttcttctggctattttgatcaccttgggtgaacaaggtgtagcagctggccgatggtggtatccatcatcgccaccacctccgccgcaaaatggttgggtttggacatggccatggcctgtgtatagctatccaccacccccaaccgccgtaaagccaccttcacatcatggtcaaaaatctcctcctcttcctcctcctcctcctccttctccgcagccaccgatggttaatggcaagtgcttgggaacaaccctggcgagcaaactaacctgtcttcaagatgtcataagttcgatcctgatgtttagaccttacgttagtccagaatgttgcgctgctgttcaagcgactcatgaagattgcttgaacactattttcgacgagtttaataatccattcctcgctcctctggttcaacaacagtgttttcaaacacccaatcccaatcccaatcccaatcctaagcctaagccccaccatggcggccaccaccaccatggccacccttaataagtttccaccataggtgattagatttagctgttaataagagttttaatggaataaatttatatgtaatctagattgctctattggttctattaggtttgtttagatttgaatatgataatcttttaaatacaaattatttact

SEQ ID NO: 5678 - DNA, 567 bp, Gossypium hirsutum
  unsure (1)..(567): unsure at all n locations; Clone ID: LIB3828-002-Q1-K6-H1
tcaaaaactggacgctattcctcccattgatgcactcaaccctaccgagttcaatggacccggtgttggcattcacgaagatcatgttgtcccaaaggttccgaaattggtactcttggttttggttttgaaggtggtcctgaaaaatgttgttcttctggatgttccggtaattgtaatcctggtggtttcgttctaccatttcctcaaattccagaaatcccaagaattccacagatcccacagatcccacaaatcccacaaattccactaatcccacagatcccacaagtcccacaaatcccactaatgccaggacagtcgggatgtgagagtggggagtgttgccgtcagggttgcggtgggacttgtgctgagtgtggtcagcccaggtgcgcatcaggatgttgccaggctgaaactgtnaagagcaaagggatagaagaggttatggacagtgaacccagtccaccaaagttgggagatgataccatattaagatgaaataatgaggaagagttggttgtcgtcgttttaattttacaaaataagaagtaatgatgttgc

SEQ ID NO: 5679 - DNA, 414 bp, Gossypium hirsutum
  Clone ID: LIB3828-002-Q1-K6-H10
cgtccggaaaaaaaaaaaaaaaaaaaaaaaaaaaaaaaaaaaaaaaaaaaaaaaaaaaaaaaaaaaaaagaaaaaagaaaaaaaaaaaaaaaaaaaaaaaagggagaaggaaaaaaagggagaaaggtaaaaaaaaaagcgagggcaggggggagggacaatgtaatggggtgggcctagaaaaaaatgcaaccggaggggggggggaggagcaccagaacggggaaaagggggggagggggcaaaacttaggtgggctgggggcaaatggggttggccccagttggcgtgttggagaggaggaggggaacggaaaggggttcggacggtggcgcggcccgaagggggggggggcgcaaaggtgaagggggcccttaggcgcggggggagggggggtgccgggccttgggaccg

SEQ ID NO: 5680 - DNA, 616 bp, Gossypium hirsutum
  Clone ID: LIB3828-002-Q1-K6-H11
cgcaagtggccgactccgactcgccgctcccacatttacgcaacgcaacgcctcattgaacaacgaaagcggcggtggtttagggttttagtagagcaaaacatagaaaagaaggaagtaggtaggcatggtgaagctcacggccgacttgatttggaagtgtcctcacttcttcaatgccctcaaagagcgagaattggatcttcgaggtaacaaaattgctgtaatcgaaaacttgggtgctaccgaggaccaattcgataccatagatttatctgacaatgagattgtgaagctggacaacttcccttatcttaaacgcttgggtactttacttataaacaacaaccgagttactcgtatcaatcccaatattggggagttcttgccaaatttacatactttggttctcacaaataaccggctggtgaacttagtggagattgaccctctttcatcactccctaagctgcaattccttagcctgttggataacaatattacaaaaaaacctaattataggttatatgtgattcacaaactcaaatcacttcgtgttctggatttcaagaaagtcaaagctaaggagagactagaagctgaaaatctctttgca

SEQ ID NO: 5681 - DNA, 458 bp, Gossypium hirsutum
  unsure (1)..(458): unsure at all n locations; Clone ID: LIB3828-002-Q1-K6-H12
gcgagatgaagttccttcagtgaccaatacatacaagnatgatctggncttcctcaacttgctttctaaatatggagaccaaattgtcagattcttaaggtttggtttcaaagtgggagaaaggtttcagatctatcagaactagaatttaaggcaaagtcatcaacatacagagcatggtatgatgttgatatgtttctgtctcaccgagttaccagttccagtgaaactgatttggagctgaggaggatgaatgggttaacgtaaaaaagcagtacaagaacgatccatcccatttaatgttgtatggaaaagccaaggcttagcactttttcaagtagagtgttatttaatgttgtattccatggtcgtttattttagtcggaacttgaattaggtgttactaaaacaggattttgtagctaccttgtgtactagcttttttaatcatgattgtt

SEQ ID NO: 5682 - DNA, 639 bp, Gossypium hirsutum
  unsure (1)..(639): unsure at all n locations; Clone ID: LIB3828-002-Q1-K6-H2
ggatttttggagtattggtcaggtttttcctatagtcccaattcaccgattggatgaaaagcccgaagtgaggggagtattgtctgatttaacttgtgatagtgatgggaagattgataagttcatcggtggtgaaactagcttgcttttgcatgagcttgaaggtaatgatggtggtgcaaatgggcggtattatttggggatgttcttaggtggggcttaccaggaggcccttggtggtgtccacaacctgtttggtggcccgaatgttgttagtgtgttgcaaagtgatggtccacaaagctttgctgttacgcgggtgatgcctggtccatcatgtgcagatgtccttcggatgatgcagcatgagcctgagctcatgtttgagaccctcaagcaccgtgctgaagaatttcatgtggaggaccatgacaatgatggcaccaaatatgctactttaatcagcagcgtcgctcgctccttccacaacatgccatatctcaaagctntatctccttgttcgtatgaggaagttcacaatgctgccgcggagtttggtgctagtgaggacgagcaatggtcttactgctacgcctgatgcagcctttgaagtgtcctcgttttaataaattctttctt

SEQ ID NO: 5683 - DNA, 474 bp, Gossypium hirsutum
  unsure (1)..(474): unsure at all n locations; Clone ID: LIB3828-002-Q1-K6-H4
cccacagatcccacaagtcccacagnatccccacaanntcccaaaaatcccactaatgccaggacagtcgggatgtgagagtggagagtgttgccgtcagggttgtggtgggacttgtgctgagtgtggtcagcccaggtgcgcatcaggatgttgccaggctgaactgtaaagacaaaggatagaagaggttatggacagtgaacccagtccaccaaagtagagagatgataccatattaagatgaaataacgaggaagagttggttgtcgtcttattaattatacaaaataagaagtaatgatgttgcagaagggtttgctataaaatcctcttggacaaaaagagtaattatgaagaataaatagctcaaaacaatattcgatttgcaatatcctaaagttccttgaatcttgttttgtagccatatgtaattaatgcatgtgcatgctaatatatatgattttctttgtt

SEQ ID NO: 5684 - DNA, 445 bp, Gossypium hirsutum
  unsure (1)..(445): unsure at all n locations; Clone ID: LIB3828-002-Q1-K6-H6
tcaactcctctatgtgactggttaccaacaagnatggnatgctgggtttgcttatgaacgcatggtgtgccaatcggtcgccgggccccattccgatggttatatgaagttccatggggtatgtacaaagcagtaacatatgtaaaaaaacattatggaagccctaatataattctctctgaaaatggaatggatgatcctggcaatctcacatttcctgaatcgttatatgatattaatagagtaagcttttatagaagctacttgaaggaattgaaaagagctatggatgatggagctaatgtcactggctactttgcttggtcaattctagacaattttgaatggttattaggatatacctcaagatttggtctggtatatgttgatcacaatgatctcaagagattcccaaactctcggcatattggttcaagcaaatgct

SEQ ID NO: 5685 - DNA, 637 bp, Gossypium hirsutum
  unsure (1)..(637): unsure at all n locations; Clone ID: LIB3828-002-Q1-K6-H7
gtgaattatgaaaagggataccaacgatcccagtcctcaatggaaggatactgcccaagttcgtggaatcaaatcgaatggataaagctgttaacagaaatggtgccaagctcaaattgttttctggcaccgccaatcctgcactttctcaggaaattgcttggtacatgggcctggagctgggaaagatcaacataaagagatttgctgatggggaaatatatgttcagctgcaagagagtgttagaggctgtgatgtatatttagtgcagccaacatgccctcctgcaaatgagaacctcatggagcttctcataatgatagatgcttgtcggagagcatcagccaaaaatatcactgcagtgattccatattttggttatgccagagctgatagaaaagcaagttcaatatattttgtaataaattatcagggatgaaatcataaaaagatgaatatatgtatagagatgtaagctgcaaattgaataggttgaaagccaaccatttgaagcagcctagtcttgccccattcagaatcagtaacaaatttgtgctatcttatgttagaattatgcttattgngacaatgcccttgcttcttgctgtttttatttctttaaagtatgaatttctg

SEQ ID NO: 5686 - DNA, 579 bp, Gossypium hirsutum
  unsure (1)..(579): unsure at all n locations; Clone ID: LIB3828-002-Q1-K6-H8
tttttgcgtccggnccatgacaatggcaaagctatagagagcttgcatgacagagttgcttttcntgaaaagattaacaggtgatatacatgatgaagtggagagtcataatcgtatgcttgaccggatgggcaatggcatggatgctacaaggggcataatgtctggcaccatggatcggtggaagaaggtgttcgagaagaagtccaacaggaaaatgtgtacactggtgatggccttcgtggtttccttcttaataatatactatctctttaggatgcttcgatatgtccgtggttgaagaaaccacaacattcttggaagtttggtccgtatacgagaaccgaatgtctgtcaaaggcaccaaaaaaatcccatttcttttcttgagaatctggtactgctcgcagtttgctagcacggtagttcattataagaagaaattcgaatcgcagttcaactgggttaaggcaggcagccccccccccccccaacatttgaatgttgtaatgttgatttcagcagacaattgtttttttaccaaaggagtnaaaaaccgaaaaaatgaggattgaaatt

SEQ ID NO: 5687 - DNA, 601 bp, Gossypium hirsutum
  Clone ID: LIB3828-002-Q1-K6-H9
gcacatgctgagaacaaattgccattcgtacggcggaaaaaagttcgaagctttggcagcacatgatgcctttgttgaaaccagtggagctttgaacaccatagctgcatccctaatgaagattgcaaatgacatacgcttcttgggaaggttttattttatttcatttttttatgtagaaatattattattgtgatagtttcaaacattttgccttgatccagtggtcctcgatgtggccttggtgagcttattcttcctgaaaatgaacctggcagcagtattatgcctgggaaggtgaaccctacccaatgtgaggctcttactatggtctgtgcccaggttatgggtaaccatgtggctataacagtaggtggatctaatggccactttgaactgaatgtgttcaagccattgatggctagtgcactcttacattcaataagattggtgagtgatgcatctgcttcctttgtgaagaactgtgtgaagggaattcaagcaaataaggacagaatttcaaaattacttcatgagtctctaatgctagtgacatccttgaaccccaaaattggttataataatgctgcagcagttgcca

SEQ ID NO: 5688 - DNA, 415 bp, Gossypium hirsutum
  Clone ID: LIB3828-002-Q1-N6-A1
ggaatcatctgaagttaaaattaagaagataatggaacattagtatacacgttatgccagtcgtgaccacgactgcatctatccatcagcaatccagcattgtccagaaagggagaatgaaaatgttgacaaagtttgttgtgtttttgggtctgatttgatttgatttgatttggtgttctgcaatgcacccacccaccctattatttccaagaagaaccacctagtctaatcacctctttaccactgttgtccctctttgctatcctttcaaaccccccatcatctccctttgtatcacttacatcaccgtacagatctttcagcttcgccaaattactggatgccttgcctccctcttttgctggacttggaagtcgatcataatgactgttcccacgttgctcactctgac

SEQ ID NO: 5689 - DNA, 527 bp, Gossypium hirsutum
  Clone ID: LIB3828-002-Q1-N6-A10
gaaaaaccccattcaagagcgaggttcattttggataatcatatgcaactaaacagaaattatgaagttccaagttccaacaagtattcccaaccactcaataccttccaagatttaacaaagtatcgaacggtaaaacaataaaaaaaaactccctacatgatccaagttctcaaaattcaagcaaccatatctcaaagcaaaacacgaaatacaaattcatcttaaacttcaaaagccttatgcacgagcaggagccgcaacaccaggacgaggagcctgaccaggctgaccgggctttggcatatcatccctgcgtctaatgaagcgctgaggcgggtcacgtttcctcctgtcagtgcgggatcggaccctcacaacgtgggaatggatcgcacatgaaacacagtattgcatcttcacatacagcttgggcagagtgtacgtgtcatagacgcaggcttcctggacatccctgacagcagcttgctccacgatgttcctcacaagaaacctcttgattgact

SEQ ID NO: 5690 - DNA, 562 bp, Gossypium hirsutum
  Clone ID: LIB3828-002-Q1-N6-A11
aaacaagactatactaaagtgtatttagataaatcctttcaggattaaagtagactgctacatcagtctgaaattgtatctctaaaatcattcaaaacaagttgcagaaacatatcaacagacacttcaaaaacccgctggactccatacatgtccataatctacccaccactaccacatggtacctacttgtacgtaaatataaagcaccggacaaacacacttacagtttccagcagtaaccacgtgcatagagccatgagaaggcagcatcatttgtaaagctgctagcgaggactcaaagatcgtgaacgagaccttgaaggactgcgattgacacgccttgggctctttgacctgctgctcacatgatctctctcatcttgtagactctgaccattctccctaggactaggggacctctgcttggttctgtattccctgtccctgtcaccatgtggagaacgtggagaaagagaccgagaaacagatctagatcgcctgggagagcgataatcatcttttgccccacaatcccttgacatggatctggaccgactgg

SEQ ID NO: 5691 - DNA, 466 bp, Gossypium hirsutum
  Clone ID: LIB3828-002-Q1-N6-A2
agtaacaataaagtggtccaaaagcttttatttcattacatattgtacacaactcagcttttctcaccctctctctccccatataccataattggatacagatttataagcttatttaaattaactgctgaaaggtggaggccttggcatgccttgcacgatgccgcaagtcaatacaccttccggcaagttgtactcatccttgagggatcggttaggggaaataacactagcataaagctgttgcccaaggtaatgcctgtcccatatctccgacctcaggttccacatcccgcagttgtcgaatgtcaataggattgctgaccaggagttggggaatacctgtatggtgtgtctgctcacagcgtcaagaagattgtagttcatcctcttctcagggctccatttcccaatgtccatgcccacggcaaagaatgagtaaccagacaagtggtaagactgaatg

SEQ ID NO: 5692 - DNA, 382 bp, Gossypium hirsutum
  Clone ID: LIB3828-002-Q1-N6-A3
ttttaaatatctgtcacaaaacatattttccataggatatagtaatatttatacttgtcgtaaaagtaaattaatagatgaagcaaaagttacccctcttctttcatttgaaaacatcaattcttttatcatccgcatgaccgggggatcttggtatttagaattcagccatagcttcttcttttttattcctctcatatccgtacgtttccatccagtatgcacatacaatacaccacataactcaagaatcccaaactaaaaaaaatattaataatgccaataacaacttaagcgaggggaaaaaaacgggggacaaacatatttttggtaaaaggctagcggcaggatccttgaccaccactttacagccctgtgatta

SEQ ID NO: 5693 - DNA, 431 bp, Gossypium hirsutum
  Clone ID: LIB3828-002-Q1-N6-A4
aactcaaaatcacattattatcttattcaaataatattggactgctacaaatagttttctgtaaatttgtagctatctttttttcacattaatggacgtatgttattgtttgaaattgaatacgtctatagcatgggggtttgtcggagccacttactcagagtgtggcttcggtgatctgttcctcgactgcagctttggctgcggctgcagctgcagcagcagcagcagcagcagcttcactgcactttttctcctcggcttctttaatccgcatttcgatgtccgcctttcttgcaataaggatttctaatctcttattagttctctctagcattcgatttagcttgctaagatctttgactttgccttttccctcaccttcttcatgatctttatccctcttctttttcttctttttctcttttggc

SEQ ID NO: 5694 - DNA, 574 bp, Gossypium hirsutum
  unsure (1)..(574): unsure at all n locations; Clone ID: LIB3828-002-Q1-N6-A5
tcgcgatctaggcttcttttggcatcaatcatgagttcactccaatgttatatcctctcatcataagttctgttggtatcattgtttgtttaatcacaaccttatttgcaactgatttctttgaaatcaaggctgttaaggaaattgagccatcaggggggaggcaacttatcatatccactgttctcatgactattggaatcggggttgttagttgggtagctcttccatcttcctttaccattttcaactttggagatcagaaagttgtcaagaactggcaactattcttatgtgttgctgttggtctttgggctggtctaattattggttttgtaaccgaatactataccagtaacgcatacagtcctgtacaagatgttgctgattcctgcagaactggagcagcaactaatgttattttcggccttgcattgggttacaagtcttgcattattcctatattngctattgcagtcagtatttttgttagttttagctttgctgctatgtatggcattgctgttgcttgccttggaatgctgagcaccataactactggactggctttgat

SEQ ID NO: 5695 - DNA, 315 bp, Gossypium hirsutum
  unsure (1)..(315): unsure at all n locations; Clone ID: LIB3828-002-Q1-N6-A6
ggtttggggtttttatacatatatatgattaaaatgtgttttgcttgcgaatagccgcggcatagaatgtgtgaacagtcttgaataataataataataacaagactttggcgagtgtttatttatttatttttaaaaaaaaaaaaaaggggaagatggggaaaaaaaaaaaaaaaaaaaggaaaaaaaaaaaaaaaaaaaaaaaaaaaaaaaaaaaaaaaaaaaaaaaaaaaaaaaaaaaaaagaggggggggggggnagggnaaagtngtngggggaaaggggaattgaaaaaaaaaggagggggagggggag

SEQ ID NO: 5696 - DNA, 400 bp, Gossypium hirsutum
  Clone ID: LIB3828-002-Q1-N6-A7
ggtgttttaattttttttttttttttgtcggcaatttaaggtatatgttcagcataacaataactagtttacttttaacttctgttgttttcaagtcaccagattttgtttattcaaccttagacacacaacagaaaaaaggtttggtgtgttcaaagtttaacataccaaacatgaaacgaagtagataggaaatataagttgcagtacttaataacacgcgcttaattgtcacacacttttatttcttaacatttggagcagctgcaccgagaagcttatcatagtcattcagatgtcagctttgctttcctccctctctcttcctactatttcacggagcatttcagtgagagtggcagcggtattcaactcgccggcttcccttgctttcagtatg

SEQ ID NO: 5697 - DNA, 491 bp, Gossypium hirsutum
  Clone ID: LIB3828-002-Q1-N6-A8
acatctcataccatattgcaattcatactataaaccaaataccattccatcatcattattttcaagtcaaactcatatggctagatccacaactcaaaatataccataatgacattagcttatacatgtcatatacgatatttacaaaaattcaaaagtaccaattaattgatcgatagtgtgatgacgtttctcaacaatccctcagtccgagctagcttcgattatctataaaacagggaaagaacatacaaagtaaactttaaaagcttagtaagccatatacaaataaaaccatttcattaatcaacatcatttccatcaattaaacaaattatgaataagcaaatataagcttacaaactttcccaaatgtatacatattcaatttcataagtaaatttatcaaatacttcccttttcaatactcggatgaatatcatacgtacctgagtcgcttaactcatttacacattctttctaaacttgac

SEQ ID NO: 5698 - DNA, 415 bp, Gossypium hirsutum
  unsure (1)..(415): unsure at all n locations; Clone ID: LIB3828-002-Q1-N6-A9
gtagaaaaaaaaaaaaatgggggggaaaaaaaaaaaatntnnnaaaaaaaaaaaaaaaaaaaaaaaaggggggttaaaatttttttgggggggaaaaaaggggtttttttttaaaaaaattttaaaaaaaaaaaagaaaaaannnnaaaaaaaaaattaggaaggggggggggggggtaaaaaatggganaaaaaatgggggggggttaaaaaaaaagggttttnaagaaataaaaaggaatggggggtgttaaaaaaaattttttgggaaaaaaaataaanngagggaaaaaaaaaaatttttggnggttgtggggaaggggaaaaaaaaaaaggggggggggaaagaaaaaaaaatttttttttttttaaaaaaaagaaaaaaaatttatgggngggaagagggggggggggg

SEQ ID NO: 5699 - DNA, 473 bp, Gossypium hirsutum
  unsure (1)..(473): unsure at all n locations; Clone ID: LIB3828-002-Q1-N6-B1
atataacaaagaaaatcatatatattagcatgcacatgcattaattacatatggctacaaaacaagattcaaggaactttaggatattgcaaatcgaatattgttttgagctatttattcttcataattactctttgggtccaagaggattttatagcaaacccttctgcaacatcattacttcttattttgtataattaataagacgacaaccaactcttcctcgttatttcatcttaatatggtatcatctctctactttggtggactgggttcactgtccataacctcttctatccctttgctctttacagtttcagcctggcaacatcctgatgcgcacctgggctgaccacactcagcacaagtcccaccacaaccctgacggcaacactctccactctcacatnccgactgtcctggcattagtgggatttttgggacttgtgggatctgtgggacttgtgggatct

SEQ ID NO: 5700 - DNA, 373 bp, Gossypium hirsutum
  Clone ID: LIB3828-002-Q1-N6-B10
gggttttttttttttttttttttttttttttttttttttttttttttttttttttttttttttttttttttttttttttttttttaaaaaaaaaaaaaaaattttttaaaaaaaaaaaaaaaaaaaataaattttttgggaaagggggggggggaaaataggaatttaaagggggaaaaaaaaagaaaataaagggggaaaaaaaaaaaaaaaagggttaaaaagaagtgaaaaaagaaatttaaaattaaaggaaaattaaagaatttaaaaatttaaaataaaaataagggaaagtttttttttaaaaaaaagaaggggaaaatttggggaggtaaaaaatttggaaaaggggaaaaaaaattttttgggg

SEQ ID NO: 5701 - DNA, 618 bp, Gossypium hirsutum
  Clone ID: LIB3828-002-Q1-N6-B11
tgttttttaaagatttaaaatgccattaaattcaaatggtagagatcccttcaaaattggtaagctttgctaagatgttattgttttctctcctcaaagctacaatcctaatgaaaacaaaaatacattgaaataacaacaacaataaagcctaaacacagcaatataaaggcacaacatgagcaagtctaatcatgctcatattaatcggcttaatgagctttacttgataaatacttgttcaaaacatccattaccgacccgaaattcgggtttgccaatcaagttaatgagatttacttaataaatacttcttcaaaacatccattaccgacccgaaatctgcagtgacttgcacaggagggtttgccaatctgcaagccatgtccttgatattcttagagtgataatcaatcttactgtgtgtaaatttcaacccatgggctgtactcaccaccactgtcctatcagtaggaccaataaccccacttctcctaagcttattcagtgcagtcaatgccacccctgtatgtgggcaagtaaacatcccagtggaatcagcttgtgccatggcatccattaactcttcctctttcgcttcctcaacaatcccatttg

SEQ ID NO: 5702 - DNA, 385 bp, Gossypium hirsutum
  Clone ID: LIB3828-002-Q1-N6-B2
aagcttataatattaaaaaaaaaagtaatgtgtctatcaaaaaagtaatatgcagtttcatatatatatcccaaaaaagagcttaacagtaggcctaacaaagcaacaaacaaaggcaggaatacagcggcacagcaataaaaaggtttaggaagatattatctacttaatatattgagagacccatttgaagccgtcaccatatcccattttgcgaacaatgctgcacataaacacctcaaggggtcgaacggaggagtttgtaagattgaccttgcccttcccagtcgtgaaattggtcagcccaagatgataatgaagctcatcttctgaagctgcgtacggaatgtcaatcttgttgcctagaattagaaaaggaacattg

SEQ ID NO: 5703 - DNA, 450 bp, Gossypium hirsutum
  Clone ID: LIB3828-002-Q1-N6-B3
gaaaaaaaaaaaagacttggttcatcatcaatttataagaaaacaagctctataatttatgcatttccatcttcaaaaggaaaacagaaataacagaagaagaagtaactcgtacatatatgttttagtttattaccagggggcatgttgaacacaagagagaaaacagagcaacaacaaacaggcatatgtttaaacatgtagtatttctttgttgattaaagagagtttgtgtttgtatttaatttggctctattgatcaagcttgcttccagcaacatccacgacgaatctgtatcgaacatcgttcttctccagcctctccattgctgtgttgatataatccatcttcaccacctcaatcattgaggtcaaatttttctctttacagaagttaagcatttcctctgtttcctttatgctcccaataaaactccctgtaatcgactt

SEQ ID NO: 5704 - DNA, 507 bp, Gossypium hirsutum
  unsure (1)..(507): unsure at all n locations; Clone ID: LIB3828-002-Q1-N6-B4
ggtttgggtttttttttttttttttttttttttttgggtttttttttttttttttttttttttttttttttttttgggggtggganggattgggaaaaaggaataaaaaaaaaaaaaattagtttttaaaaaaaaaaaggaaaggaaatgggatgaagggaaacaaattagtaataagggggaaaaaaatttcaaggggaaaaataaagggccaaaaaaaaatggaaaattgggaaaagaaaaaacaaacccaaaatgaaagatttgggaaaaagggggggcggccttttttttttttttttgtgcnncttgggggggggaaaaaaaaaagggggggtttgtttttattgaaaaaaccattcaaaggaaaaattaaatttaaaaaggggccttaaactaaggaagaaaaaaaatttggggaaaaaaaaaacaagcaaaaaaaaaaaaaaacccgtaaaaaaaaaagcccaagaaaaaaaaaaaacgggagggaaattttgggggggg

SEQ ID NO: 5705 - DNA, 472 bp, Gossypium hirsutum
  Clone ID: LIB3828-002-Q1-N6-B5
gaatcataaatgccaggatttattaataaaggaaggttttttatttttaataaaactagtcaatcatttacctaaaaatcaagcttttttctgcttggttggtggtggaagtggcaaagaaaccatgaatctgaaaacccaggctcccaaagttgccccaaacaaagcaccaatccaataaacataatacagttcccatgaattatgtcgattattaacatatgcccatccaaatgcacttgcaggattcatgggagctcccgtgaatctggagcccgttagaaccaaaatcgccgtcgctaaagacaccaaccattgcttaacccacccgttctttggacccataaacattatcagcagcagtgcaaggcttcgtccgaatgtaaacagtccttctgcgacggctccggtgtgtaagtccactttcagggaaggtcccgtcagggtgttgcttgattccgcgggaatcaaa

SEQ ID NO: 5706 - DNA, 453 bp, Gossypium hirsutum
  Clone ID: LIB3828-002-Q1-N6-B6
aaaaaattatttaattagaatttaaaactcaaatataccaacatttatatagcatatacgaaacgtaaaatggtgtagtaaatacaacgttttagattttcagctgttgggaccatgaagttccatctctcgttcattggttgcctgcactggtcttgcattttgttctgcataatcatgaacagcctctcggattgcatgtatttgttccttcgaaacagttgctatcttcttgttaataatccaaatgacattttcagtgcaaggagggacagtcaaagaaccaatgtatctataatactccacgtcatcaatttctataaggtttggatcagtcacccccattgatctttgttggaccacatcaatcatatctgtaatgttgcttatgagcttgtgtaggaaatcattaggtaaaccatctttcgaaagtagtgcagaaacagctaaact

SEQ ID NO: 5707 - DNA, 267 bp, Gossypium hirsutum
  unsure (1)..(267): unsure at all n locations; Clone ID: LIB3828-002-Q1-N6-B7
ggggttgttggggnnnnnnnnnnnnnnngagaaaaaaaaaaaattgggtttttttttttaaaaaaaaaaaaaaaaggggggtgtttaaaaaaaattttattttataaaaggtttaaaaaaaaaaaaaaaaaaaaaaattttttttttttgaaaaaaaaaaaaggggttaaaaaattaaaaaaaattttggggaaaaaaaatttggaagggggtttttttttgaaaaaaaaaaaaaaagagctgttttaaaaaaagggggaaggtgaa

SEQ ID NO: 5708 - DNA, 565 bp, Gossypium hirsutum
  Clone ID: LIB3828-002-Q1-N6-B8
ctcaccaaatgaacagagtttcattcaaaattcatcaaaaaagtatcctttacaaaaatctgaattcacctatttatagtgctaaaatagggtagccaaatagtcacaaacattcacttaatgtgctaattaagaaaaattgatttaaaaatcaagactcttggaattcttgaaacaaataacttcttcattgaattctcttcaattcaactgaatgaatgttcatgaaagcttgaaattgactcttgaactgtcccatggctagccgaataaacatcatctccttaatgaggatttgattgcttaatttattctttttaaaaagaacaaaatagcaggtagcttaaaaggttgctgccgaatgtaaggagtataaaatgctctttaaaacgtccttcaatggtgtattaaccccctttgtaacagctacttcatttgtgttcagatagcacttgaaaggtcactttttttaagtttgtaacagctttgaaatgtaacggttgtgaactgaagatactctcattattattggcaggccccattctctttaccgtttatggaattg

SEQ ID NO: 5709 - DNA, 518 bp, Gossypium hirsutum
  Clone ID: LIB3828-002-Q1-N6-B9
gaagaaaaccttggcattcgcttattactactattaatttagtaataatttaacagatacatggccgcaaagcaaatctcaaaccaaacaatgaagtcggcaggtggctacattgacaatacaatctttaaaattattacaacccaagagcgaaaggaaagcctgtagagcttaaccaacttcctccagcaatgaacctgccaggagtaaaagcctgagcttcacttgcactagtgatcaccttgtaccctccccatttcactctcgcagaagttgaggcaccagccccggtgttctggtactcggcataaaacagtgttttcagggcgaaactcccgctccactcgtgccaaccagcaggttgaatcacgtcactgattgttgattgcattaccacagtcctcgagtactccttccagggcctgccaagatatgttgggaagtttttacgaacaggctgtaaatcagaagtggcacctatcctacatttctggatcacaatgcccctgttttggtta

SEQ ID NO: 5710 - DNA, 503 bp, Gossypium hirsutum
  unsure (1)..(503): unsure at all n locations; Clone ID: LIB3828-002-Q1-N6-C1
gaaaagtaattcttgagcaaattatatcttcatttaacaataagaaatagtgactaaggttcttatatacttcctgcttcttttcaaaggatgaaacaataaaattataatatcccacttaggcttcatgtgtttgtaggcggccttttaatcgtttgttcctctaaaagtggaccatgtcgacaccaatggtcaaggtgttgctaatgatatttgcaagcattgcatccatgtccttcattggagattcaagcttagcctgtttgaaagcattgtcacaaccgagtacattttccacattggtgcctagctctgtgctcaactgaacaaggttatggttggagatggcttcaagggatttttgatcactgttaagaatgctattgtagacatcaatgcatgtttgaaggatgggaacaatagttttaggggtagtggggtccattgaaagctttgtaacctncgccaatgcatttttggtctggttatccattgctttaatc

SEQ ID NO: 5711 - DNA, 562 bp, Gossypium hirsutum
  Clone ID: LIB3828-002-Q1-N6-C10
gtgttttttttcagtcaaccagagccgttccactatatatatataataaaatctaccggggaatcccgagattatatataccgtaagaagtagtaataatgtaaccaagttcaccaaaattgcgttcaccaaatcattcatactaaagggggctacattagcttctataatggcttaacacatcccatcctacactttagatctaaccaactcttcttaaccgttatcagcttctgcaactctgaaactgctcacagttcgttgacccgtttttcacaaattctttagccaccgcattgatcatctttggaatcgttcctttaaattcctcagagctaccctttacaattttgttagcatccggaacaccatctttaaccgcaacagagcctactatagcaccctctttatatgtttgacatgccacaaggatgtcttgtgcacggttgcgaaaatgaccagtaacaaagtcctcaaaatgctttggcggtcttcttagtgtgtaaatcattggctttaatgatagaataaatacttcctcattgtacttcctggacctcct

SEQ ID NO: 5712 - DNA, 553 bp, Gossypium hirsutum
  Clone ID: LIB3828-002-Q1-N6-C11
aactagataaacaaatcttataaaacattaatcaagctaggctgaaataaagccaagagtcgctccataattcaattttctagaacatgcaaggctccatagatacaagtgcctggtgcatatcaagttgtaattagggggcattgttgtgcaaccctttgtcatgaaagctgtaatatttaaagatacatcatcccgaatttcttaaataaaggccaacatttaacttgagcaaattagaagacatctaaaatataatgcactgccccgtactccatggcttccaaaaacggaaaagaagtaatctctctactctttcccaaaatcagtactgtagtgtgcactagattccagtttcttggcttcgttcaactttcttactgccttcatgaaatcttcatggattacataatcacgttctgcacgaatcgctgacattccggccttcgtgcaaacatttcgtagatcagcaccattaaaacccttagcaagtttaacaacagcttcatagtcaatttcaccatgcttggcaatgccagcagcatggatcttg

SEQ ID NO: 5713 - DNA, 543 bp, Gossypium hirsutum
  Clone ID: LIB3828-002-Q1-N6-C12
gggttggggtgttttaataaaattattatatatatctatatataccaaatacatgaaatatttaatacaatacaatgacaccatctcaacaaagttgtaggggacaactgccccctttgctctacatgatcttgaatgggtttagactctgggtggtcgtttctccattgctcttggagcaagccctattgcctctgatcctttcattatgcgcaaacgtttacacgattcaacaaacatctcccatgggacatcgcccacgagcatccagtcgccatccttatcttcataggttggcacataatcagaactgttgagaagatccatcaacttgctctcattcatgaagtctatcattccttcacatccataactccccatggtgaaggaactgaacatcttagccaaggcatcggataacttttggtagctgttgtacatcttcaaatctactttacgcaaatatggtgcaccatccatgcaaaccttcacaaacgctgcacccccactgccactgctagctctgtcactaatttcgtcact

SEQ ID NO: 5714 - DNA, 467 bp, Gossypium hirsutum
  Clone ID: LIB3828-002-Q1-N6-C2
aaaaattcgaggaatgttattcctcaatactactaactgaattatggaaaaccaatagtagccaatgattcacaagtatatgtcatcatcctatacaaaccatacaacttttgtacacacaatactgaaaaggaaatgaactgaagtgaagtgctaacaagggcttcccccctgaaacatttgctgcagggcttgttgtaaattcaacacaatctccgcatatgcttctggtaagctcatggttctcaaggcatcctctgcataagacaaacgagctggaataggttgggaacccattgctccagctgagctcgtatggctcttcttatattgatgcattggccatgctagaacttttactcgtgttggaagtacagaaacaaggtctggatatctaaggcttactgtcaccttgcaatcagaatcttccagtacaaattcaatcatgtggtacggaagactatgat

SEQ ID NO: 5715 - DNA, 528 bp, Gossypium hirsutum
  Clone ID: LIB3828-002-Q1-N6-C3
gaaaaaagagcaatgaatttaaattataagctatagcaaaatatgaaaactttacttacaaaggaaaaaaataaaaagaactgacaagaaataccggggctaggtgtttttttcactgctcccccaagaaaagaatacggggggctcatctttctcttgtttttaacttgcggttcctccggttttcccattaccttctatttcattctaacgggaaaccaagaaaatccttacatttaaaaccaaaaataaattttattgtagacctttacggttgttataaccataataagataaataccatctaacaaacttcttcaacccggtttgcaaatcggttgtgggcttgtacccgaattctctttgggccaaactgatatttgcatgagtgaatggaacgtcaccgtttccaggcatatctacgatattccttttggctttcaccttcaaatgtctttccaggatgttcaccagctccggcaccttaaccggcgaagtattccccaaattaaaaatcctatatggagc

SEQ ID NO: 5716 - DNA, 419 bp, Gossypium hirsutum
  Clone ID: LIB3828-002-Q1-N6-C4
ataggaaaaaacttgttattgactatcattagcttgttaatcaaacgtacgttcaaatgtcttgaaaataaacctcaacctgccaatgatatatatcaatcatgcaaatgatgtttactttgtggtcatgggggtttggtaagttactgtattctctttccaccgatccttgtccaaatatctttcataaaagcacacctccccatttgatttcactgtcaatgctgactggtttctggttccataacatccctggggacgagtggtatctatgtaaatggcactcaaatcatattcagtctcagatgatttaagcttgttaccccacatatactcacctgagactgaatatgtggggtaacaagcttaaagagatggttggccaactaatgatggacaccactaaagatgatttaagc

SEQ ID NO: 5717 - DNA, 349 bp, Gossypium hirsutum
  Clone ID: LIB3828-002-Q1-N6-C5
acagggaaaactcaaaaaagagacattccattaacttgaaaagggagccaaaataagaaaacttgaaacaaagtgcaagcaatatccaaagatgcaatgctggggggggacataattaactaagatcccctaatgtcacttcaaactttcctactaattacttacagggccttgcttaattaagcttgggcaattcgaatctcagtactactctgttggccaccctgggtttgatttccattttcttgctcaacttcgcccgacatttcttccagtgatttccctttcgattccggaaccaaaaacgtgaacaacatccccaagaagctgatcactcccaatattataa

SEQ ID NO: 5718 - DNA, 493 bp, Gossypium hirsutum
  Clone ID: LIB3828-002-Q1-N6-C6
gttgtagtataaacaagcatatcctccaaaatatcacataacagaatccactgctattttctttttattattttgtatctcttgatcagcagttaggaggaatatgtttacacacctcaaattctgtagaccccacgggggacagtaaaagtatttggaaaagaatttcgttgatgaaacaatgccagatgataaagcctgggtgaagattccaaaatcaaatggaggattatcatcattttcatcagctgggcacttttcattaagaacagaatctcgcatgcccttccatatgttgtaacctttcatttgctgattcccacaatacaagaaatctttattgcagtcactaccaatatccttgcatgcattctgccagcatgtatcatttcgctctacagctaccaagtaccagaatgcccctactatatgactgcaaagcatatataatagcaaataatatgcagctccagcccatgcagtttcagcaaag

SEQ ID NO: 5719 - DNA, 471 bp, Gossypium hirsutum
  Clone ID: LIB3828-002-Q1-N6-C7
aaagggcaaaagagtgaggaaaagtggataaactttatgtagcatttttagaacacatataattaaatggtcaaatatcttaaagaacattcaacttaaaatgctaaaaagggaaaaccaaaaaagggggggggagcacacttaattgaacattcaaacaatgaaagcgctcgcctctgacaaccttcagaaaacgtaatctcatcaaaggagatccgcgacattcgatggcagctcctcgatgacaacattgtagaacttctggatatcaaacagcattctttcatcatctacagtcacaaagtttatggcaacaccttttctcccgaaccttccacttcgtccgattcggtggaggtagttttctggttgagtgggcagatcatagtttatgacaagggagacttgctgcacgtcaataccacgggctaacagatcggtagtgatgagaacacgggaagaaccagaacg

SEQ ID NO: 5720 - DNA, 389 bp, Gossypium hirsutum
  unsure (1)..(389): unsure at all n locations; Clone ID: LIB3828-002-Q1-N6-C8
aaaaaaaaccggggtgttgaaaaaaaaaccaaaatttaaaaaaaaaaaaaggcccaaggggggggggggggggaaaagggggaaaaaagggattaaaaaataaaggggaaggaggcccgggctttaaaaaagggaaaaggttgagaaataaaggttttttttttttgaaaaaaaagaaaaaagggggggggaaaaaaaaaaaagggccttttttaagaaagggaaaaaaaaaaaaaaagggggggcaaaaaaaaaaaaaaaattttaaaattggaaggaaaaaatttaaaattcggaaaaaaagaaaaaaatttaaaaaaaagcccaagggaaaatatttttgtgcccttttttataaaaggggnggaagaaaaagagaaaattttttt

SEQ ID NO: 5721 - DNA, 572 bp, Gossypium hirsutum
  Clone ID: LIB3828-002-Q1-N6-C9
aaagtaaaagggtaataataataataataataattctctagctacatggataattcaaagctctctcatgtcaacagcatacctttgctcttaaaagtaaataaaacaggagtatcagtattcctgactcataaaatatcaaccaaaattgctaaaacataaagaaaagcacactgtaggataattgaaatatttttctaaaacaaatggcttgccgcctcatggataccatcaacggacctcttctcagcttatcaacataccatcactgctccactcagagatcccgggaatacccaacattcacgtcttgttgttcatctcatcacaattgacaactgccagtagatgtgtcgatcaatcatctaggtaataatatgacccagcagacttttgctctctatccttggttgagtccagtttgttgattctcggtcggtaattggttgggtcccgcctaaaagtgatgtccagatgagataggaacagattcatgccagttaacaaggactgaggagcgtttgcaatacaatccactgaaggcttcccctcgtagacaataactctatctg

SEQ ID NO: 5722 - DNA, 433 bp, Gossypium hirsutum
  unsure (1)..(433): unsure at all n locations; Clone ID: LIB3828-002-Q1-N6-D1
aaaacccaagttttataacatgtccaattacaaggccaataataaagcccagttacataatcaatgacccaataactaatgccctacagcccaatatcaattactagcccgttaggcccagtattcggagaaaggaaaccctagagtgtgctgatgacttacgcgccgcaaccaaagacgagccccagccccagtgccgtacgctcgtgcctncacgtcaacagccctcgtacacccacgccaagcgccaacacgaccctcgtacacgcgccaacacgacccccgtacacgcgccttgctccgtacctgcaagaagacaaacagagacaacagacgcaagaaaatagcaaaaatgggaatatttttattgtcttcttctctcggctataaaagcctgatattttttcgattggaaactccctttggatttttt

SEQ ID NO: 5723 - DNA, 446 bp, Gossypium hirsutum
  Clone ID: LIB3828-002-Q1-N6-D10
acaccaaaaaagcttcatttttgcatctcattgtccttaaatctgtcataacaaagaaactctccattaacaaagaaagatggctaaagctttgtcctctgtccagggcggtattgaaaatggacctattttttgcttgtttggcaggcgagaaattttagattaaaaaaacaccagaaaaacaaactgccaaattgatcaaatgatggtgccgacatagccaatgcctgtaatgaaaaaggtaatggtttgtacccaaaggtatatgaagtaattgttcttcccgtacataaaatcaaagcccccacataggaaaaggaatgctgaaaatcctaactccaatttgtttaatctatccgaaaattttgatctacatctttttaccgctttgctattggtcttgtttttattagcttcagcgacttttttcgctacatctccaagct

SEQ ID NO: 5724 - DNA, 472 bp, Gossypium hirsutum
  Clone ID: LIB3828-002-Q1-N6-D11
cccaggaaaatctatgtatagaaaaaagtttcagaaaatatgaacaggcaaatcccattaagcaaaatattagtctccagttagatctgtacattatctaaaaataaaacaggaaagggaaaaaaaatcaattcctatgaagaacatcagctggcatacttatatcgaagaatacaccgccataagtctcctttttaggtcgtctctgggacgggcaaccactgtcttccgaactcccaaaaccaaaaggtcgatcccgtttgccgctagtgccagaatcagatgcaacacatttctcggtagtactcggtttactgttccaacaaacggcaagctcggatgctttctcgatgcccttagatttgtacggagctatgttatgtgtattacattggagagatcccaatagatcgttctcgatgcattcatacattttcttgcaaagcgtatcagtgatcacggtgagattgat

SEQ ID NO: 5725 - DNA, 596 bp, Gossypium hirsutum
  Clone ID: LIB3828-002-Q1-N6-D12
agaaaacagatgctctagattattaaaaaaactgctacataattctcaaacaagacagatgttggagcaaatgcatatttcatgctcacagttccgtactatctttctccttttctccttaaaattgaattgcttagggggggaaccacaagacgcaaagattctatgtgaccctgaaaaatccagggtagtgaaagtatcgaactgcaaatcaggctatgagctttctgcaaatgaaactcaagatcgtcgtattcccacaatagaattatctaaagcttttttttttccctaatcaaaaggtaatttagctagcaacagttgtttgtttcttccctttcttgtttccactagctgctgcccctcctttaatcattctagagagtatatcggcttgctttgtgttcccttcctggttaaggctcttgattaaatcctcaaggctactccagttagtgatccctcctttctccattattttacacaatattgaatacgccttgagagtttttccggcagttaagatagcatccaacaccttctcgtaactcgaaacttctatgctgcaggctctctctaaaccaaaatctaacaac

SEQ ID NO: 5726 - DNA, 428 bp, Gossypium hirsutum
  unsure (1)..(428): unsure at all n locations; Clone ID: LIB3828-002-Q1-N6-D2
ncgcctgtggttttgggttttttttattttttttttttttttttttttttttgggttttttttttttttttttttttttttttttttttttttttttttttttttttttttttttttttttttttttttttttttttttttttgggggggggaaaaaaaggaagttggaacttttttttttgggggggggggaaaaaattctaaaaaaatttataaaaaaaaaactttttttaaaaaaaaaaaattggttttttaaaagaattaaaccaaaaatttaaaccaaaaaaaaaaaatttttaaaattttccaaaaaatatttaaaaaaaaggggggggggggaaaaacttggggaataaaaaaaggggggggggaaaaaaaaatggaaaaaaatattcccctttaaaaaaaaaaagaaggagggggggggg

SEQ ID NO: 5727 - DNA, 426 bp, Gossypium hirsutum
  Clone ID: LIB3828-002-Q1-N6-D3
gtgaaatcaccttgacttattgaatcaatgaacttggatatatgatggatattattacataattttaacttgatatgatggaaattttctacataatggcaaatatcaacatcctaactattaataaaaataagactaaatgctgcttcttattgacatttggctatttgttaaaatacaagccatgggaagcgaaaataaaataaataaaataaaatggatggctagttatttccacccagcaaagaggtagacgagagtctgcttgaattagcaatactgtgaggatatgttgccggcatgaaaaagttgggaatgaatgaattatttaggtactgtcggagggggaagcaaccatttggtaccttcaacgtagtcaagaaccaagaatggtttagcttccgcatccgatagttgtttgacgaa

SEQ ID NO: 5728 - DNA, 509 bp, Gossypium hirsutum
  Clone ID: LIB3828-002-Q1-N6-D4
agaaagaaaagtctgatttcataagcatttgaaaacttgggaacatcccatcatagtggggtgagtgctaaccaaaaattcatgcactcaaatcatggtaagcatgaagcaagccgaagcgaaaatgaaaaggatggcagaggcagaagctatagaagcagcagaagtattatcaggagcatcagagtcggtgattgtagaaggagcatcagcagctggtatgtcgcttcgggtagttttaggtggggatgcaagtggggacttgttgggaccaggtgctaaagccttcctgggaggagaagcattaggagcgtaagatggggaagaagttatggctacatttataacattgctgatttccagtactgaaatatcatagggttgagtcgtaacttgtttaacaaagatagaatcatggctagaacccggagcagcagatccaaatgacacttgtttccccacacgtgtcatagtcaagaaaccttgctggttttgggctttcccacttt

SEQ ID NO: 5729 - DNA, 499 bp, Gossypium hirsutum
  Clone ID: LIB3828-002-Q1-N6-D5
attatacagggttttccttctcccatttgtttacaagtaaaagaattgctgaggcaatttaataaactcaacgccaacaatcatcagctgatttccatagaaaaaggcagggacagatatgagatgtaatgtaatgtagcttcatcccctacaacttcaacacagtgactgctagaaatttatgagcgttctattgacacacacttaaggtgaagggcttggtcggtcggttggttggttggttggtgctattaaacattccaccactaccccataattgttttctctaactcaagtaatttctcccgcaaacttaaaaaaacctacaaatgacccctcaccggatggatgacaagaaataaaatgatcaacaccaaaaatacataatcgattgactaatatgttatccgttgctgcaacacatcagggcttgggaaccgcttctgcccattttcacactataaaaccagttccatctccagtgaaaaacagcccccca

SEQ ID NO: 5730 - DNA, 487 bp, Gossypium hirsutum
  Clone ID: LIB3828-002-Q1-N6-D6
aacaaaaaaaaggccacaacatattgataaataccattacagatattattatcatggtatataagcaattaagcatcccgcaatatttatagtcagtagaaacagatctactaaaaccctagcaataccaattatcaagctgggcaaaaaaagaaccctaaagagacaatgtgagaaacaagaatactcaaactcaatcctcagccttgacggacgaggacgaatcctcctcaccaaccgcagttcccacgttattcgagtctacttccgccgaacctgaaggagtggagtcagtggcagcagcagctcgggctttgacagtgtcgagcatacgcttgctgatttccttggaatacacctggaggatctcgatgccgtcctcgtcggtggagaaagatgcgccggcgaccgagaaagcctcctcctcgatcaacttggccgcagcggaagcctcctcctttgggatggttccatagcgtttggaaag

SEQ ID NO: 5731 - DNA, 285 bp, Gossypium hirsutum
  Clone ID: LIB3828-002-Q1-N6-D7
aaaaaaaaccgcggggggggtgaaaacaattttaaaagcaaatttttaaaagggaattaaaaaaagcccccaaaagggtccccttttaaaaataacctttttttttttgcagaaccattttcaaattaaaaaaaaaagccccatttttttattttaaaaccccggttaatacccttttttatccttttaaaccctcccggggaaatggaaaaaaaaaaaaaaaagggggggccccccccatattttccaaaaaaagggaggggtcctacacaatcctttttattt

SEQ ID NO: 5732 - DNA, 512 bp, Gossypium hirsutum
  Clone ID: LIB3828-002-Q1-N6-D8
acttcaaaattataatatgatgtatgggacatgagccttcaaaattagctccggataacatagacacatatacagttggagagcttaatcaaaatgatttggttgctgtcactgtcaagcagtgttcgcacggaccggacacactatattcacttcatcgcccgcaatgggacctgaatcaaagcacccttgaaaccaggatgatctacccttgaaatcattgacttttacccttgaatcgcatcgtatctttgtggcatttttagcctaacatcacttggggttagaagtcttcaactccagtgttgtaaacgaaactgggaaagaaggtagtaatgcactggaaatagtagttcatcacggactttaaatgcggaagagtcatgttcctcaagaggttgggattacgaagcacaaatgctttccattcttctttgtttattttaccatccttgtccgcgtgtgcatcatcaaatgttttgtcaatgatttcctcgagaaggtcatcggac

SEQ ID NO: 5733 - DNA, 435 bp, Gossypium hirsutum
  Clone ID: LIB3828-002-Q1-N6-D9
tgtttttttttttttttttttttgaactaaaacttggtgtattaaattgaataagtataattgcagactactaacagttttcacatcttcagttttgatacatgccaaatgcatcagcatgtgaaataatgatttcaaacttgtgattggggaatacaagtatcacttgaaatgcacgacacacttgaaagaaacagctctgctatggcttacaatgagtattcaggattcaattgtttgatacttttggagcattagtcgtcttcacccccgacatcaccccaccgaacattgtacttggctgcaagataatgtgctccgacgggtcctctgctcccataagggtatagttctggagaaattttttttgcttcaagttctttcaacaacggcgtaaacagtgaccaagcagcgtcgagctcatcgcttctaatg

SEQ ID NO: 5734 - DNA, 458 bp, Gossypium hirsutum
  Clone ID: LIB3828-002-Q1-N6-E1
ggttttttttttattttttttttttttttttttttttttttttctttttttttttttttttttttttttttttttttttttttttttttttttttttttttttttttttggaagggggaggggtttaatttttttaaaaaaaaaagaatgttgtcccattttccccccaagggggtggaaaaaacccaatcaaaaatttcccttttttttaaatttaataaaagggtttttttaaaaaaaaaataaatttttttgggaaatttggggcttaaactaaaaatctttaaaaattttaaaattgggaaaatttttggaatttttttttaaaaaaaaacccagggtttgaaaaaaaggggcaaaaagaaaaaggtggaaaattaaaagttttaaaaaaaaaaaaaaaatttttcctttaaaaaaaaaaaaaattggtggtccaaatgaggggttttttttgg

SEQ ID NO: 5735 - DNA, 273 bp, Gossypium hirsutum
  Clone ID: LIB3828-002-Q1-N6-E10
aaaataacacacccaacgtccgatgttctgaatatagcaatgaagatcaaatccagcatagttgatacaactctaataagttacgcactactccatgctaatttttatccaaacataaaagcttcataggcatcttcaggtgctgatacaccccgcaatagcatctcaccagtgaaaagacaacagaggagcttcagatcaagacccggatacactcttgctcctgctcctgctcctgctcctgctcccacttggactcctgctaacactgcg

SEQ ID NO: 5736 - DNA, 176 bp, Gossypium hirsutum
  Clone ID: LIB3828-002-Q1-N6-E11
tcgccttcaaggtacttcattttcctcatcctcatcttcatcttcttctttaatcttaatatctgttattagggtttgtttcttcttctttgatatgacctggttttcctttttgcagagagacactaatttcttaagcttcttgcagtctgcagaaaggaaaaccaggtcatatc

SEQ ID NO: 5737 - DNA, 450 bp, Gossypium hirsutum
  Clone ID: LIB3828-002-Q1-N6-E12
cataaatcacatatctaaggacccaatttattcatttagtatattttacatagttaagattaagggtcctcccacaacatcatttgttaaatctttataagggtataaaggcaaaataaatacatacaagtaattatggggaaaaaaacatctaagggcacttggatttgcccttagagttcttcatgtccctataacaagggcattcatctttatgcccaaatgtcccagatggaacacaatgacatttctcacaacaaatcccacattatttcaaacacctgtcttgaacccctgcctttgagcacctcaccgcacactttgagtcacaaaaatccgaaccggcaatcgacacctcgaagaaacaagagctgtactatttatagggtatatataatattggctattcatgaatgctgcgatggcatggaagggaaatggttggacgag

SEQ ID NO: 5738 - DNA, 275 bp, Gossypium hirsutum
  Clone ID: LIB3828-002-Q1-N6-E2
aagtagaaaaagggggttataattatttgtttacttgaagagagaaatttaaaaaaaatgtaatgatgggtgtgcattttaaacctgattgttaatgaatttattaattaaaagggaattgttgtacatttttattatgaaaattgggacttgttaacatatgaagtaagggacttcataaggggatgattttaaaagccaatggaaaagtccatttttgcccgggcccatataaacaaaataaccctaataataaaacccaaaacttaaaatta

SEQ ID NO: 5739 - DNA, 139 bp, Gossypium hirsutum
  Clone ID: LIB3828-002-Q1-N6-E3
gggttttttttttttttttttttttttttttggttttttttttttttttttttttttttttttttttttttttttttttttttgggttttttttttttttttttttttttttttttttttttttttttttttttttttt

SEQ ID NO: 5740 - DNA, 522 bp, Gossypium hirsutum
  unsure (1)..(522): unsure at all n locations; Clone ID: LIB3828-002-Q1-N6-E4
agttggaacttttttgcactaacaaacatttcagttgtttttacacaaatacagaaacatgaggaatttaaaaggtttatgtaaaaacatcaagtttttcccaaatacctgcgtaaaacatcacatatatgcaaaccaattggggcatacacacacattactcagagttggtattaacagcagcaacagtggagaccaaggaatctacaccacaaacattgcgacccctgcagattttgtagtatccattttcaccccaggtttctccccatgagttcttaatgatccaatatggtttatccttcaacctgatgggggcatagcctgctgaaccataccccaccaacaatactccatggtcgaggcgtttagagcaaatgtacgggcaagaaactcccccaatgtatgtttgcatgaacactgcatttatggcaactgcaagaggaccattcttcacaagatttgcagcaatttgatcctcatcaagggaaacaacgctgaaattggncaccttagcaacaa

SEQ ID NO: 5741 - DNA, 516 bp, Gossypium hirsutum
  Clone ID: LIB3828-002-Q1-N6-E5
atgcatgaatcatcataacttttaaatcattgaaattcatgcatcatacacagtcaacaccatccttacatacatatattacatccatccctacatccaccaagcccatgaccaacatcaagaggaggcaacctggcttatgctaaaagaaaaatgcaatggatcgatcgttacaaaccagtaccattgcaccattactcacctgcacattaacaaactcgtctcttggaaaagaaactgagtaaacaaacattttattcggccacactcggctttctctttggcgaggcattttagtgaagcttgtttgcaagattgcattgcttcctgatctcacccttgctaccagtgagaggattgttctcagagaggagagtaatggcccttgagaactccttgaagaaatagtcttggctcttggccattttcttcacataaggtctggtccttttgtcgtacgccagttggtgatccacaatcaacaaacccttgttgtccagtatgttcctgtagtag

SEQ ID NO: 5742 - DNA, 307 bp, Gossypium hirsutum
  Clone ID: LIB3828-002-Q1-N6-E6
gcggaaaaaaaaaccccatttttatttttcatgtttggggaatagacatttaggccactcaatcacatacttttggctacaattgggtgggggggggaagaaaaagaaattctcaaattttatacaaccaacacaaactggtgtaaaactccacaattgttaagagcaatccattgtgggattcacgcaaattgaaataaatccgcatataccagagttggtttcctttattaatgatgatgttgcggatgaaggaaaaacagtgaagggttcttgttcttcacaggtgagcatatcatgaggacca

SEQ ID NO: 5743 - DNA, 380 bp, Gossypium hirsutum
  Clone ID: LIB3828-002-Q1-N6-E7
ggggataattcactgaaattcgacattaacaagaacttttagataggtggattacagagtattggattactttttttccaggaaaggttgggggggaaggaaaatagatatgcaaagccagaatctgaaagaaacacaagcgaaatatacaaacttcatataataatagctggacttattcaccaggaggaaatggaaataagcagcaataaatgcaatgatttactggaccatcattatgaataatggggaaactccccatggaccatcaagcttttatagccgcctccatgtatgtgggattttcacacccattactttttaccacacctccggttccgacacaggtatttataagggtggcacacccaccggcacaa

SEQ ID NO: 5744 - DNA, 296 bp, Gossypium hirsutum
  Clone ID: LIB3828-002-Q1-N6-E8
aatactgaacggaggctaaatgcatactactattttaaaaatatatattacaagtactaataattttaggagtaggtgagacatctgagctacaacatacatattacacagggggggatttcatttttccccttgatgggtgcaacacatattgggcgacgtaaaggttaagggcacttggcaacgtttccatgggtggtcatgccagtatagcaggtcccgcagacctccctgttccctgaagtccccggtggcacgcacttgcaccttaagcagcaagtcccacacgccctgtt

SEQ ID NO: 5745 - DNA, 546 bp, Gossypium hirsutum
  unsure (1)..(546): unsure at all n locations; Clone ID: LIB3828-002-Q1-N6-E9
aaccaatccgaattcataaacatttgcggagtttacatacactgggcaaattgctttatgtaagaaaaggcaaccccccatgcaaaacctacatataatgaacacagcaactcattacagctttgctatattttttccccttattattaattatcgttataggcctcaaattctaatgggaactgccttccaaatgggttagataaaacatctacagttgcctggaaccaaaaacaaaggttagtggaatctccaaaatcagctgctttcaggttattctaacgacacccattgttactgttttcctttccgcatcgctacaatggagattttagcaacttctttagtgttattactatattaccaaaagacggccgttgagcgggatcatcggcccaacaagattccatgagggaaaccaacttgggggaggtgttaggaggaatggcaagcttcctattctggaaagctacagcaccaaccacctgngcaggactgagtccattccatggttgttgcatggtaataagttcccataggattact

SEQ ID NO: 5746 - DNA, 406 bp, Gossypium hirsutum
  Clone ID: LIB3828-002-Q1-N6-F1
aactgattataattatcctattttataatcaaatcaaacagccagttcaccacctacatatcaaaagtaaaaacacagatctcctacattaaaacgtcacattaactaacatcaaacttcactacatcccggggtggacagttagcagtcccacaatgccagaattcacataaaacagccaccccaacaaccatcgtcaaggccgtgctctcttgttgctgcaagatgggcatttgtactgcttaatatgctccgcccttgccggtgttatcttaacacactttccatggaaccatttctcacagatatcacagcaaatccagaattcatcagcggcataattctctccacaagccccacataacgtctctccatgctcctcatcgtcttcgtcttccatgccatc

SEQ ID NO: 5747 - DNA, 536 bp, Gossypium hirsutum
  Clone ID: LIB3828-002-Q1-N6-F10
atcacaaataatagcattagttgatctatatgcaaatcgccataatctaccaatccaatacaaccaacatttctccatgaatatagagattataggatctacacaccttcaggaggctgagcaagcttcctgttttggggagacatcatttctttcttcaactgagtcaatatatcctccattgtatactccctctgccaattagcgagcatggggaaaaggctaggctcaaccactccagtttcctgattgacacaggtcatgtttatccgggtttgaaacctcacactaggtggattatctggataatccttgccacagaacagtttcaactgatatatgcatccttcgtgaacagtgtttggagggccaataatagtcccagtccatgactgcatgtatatatcatcagcatcgtccatcccatagctaacagttccatctccaattcccttttcacccctctcaagcttttttagcaatctgaaactcctgggtacaacaacacatgatccttttgaacccattttttttta

SEQ ID NO: 5748 - DNA, 557 bp, Gossypium hirsutum
  Clone ID: LIB3828-002-Q1-N6-F11
aagtcaacagataaaacttccattacataatgtcattgctgaatgatcatgaaagatttcttctacgttaaaaaaccatttgcaaaggagaaacaaaagctatccttcatagaaagtcattagagaaatgagccatcagagacatcggtatgatgaaagttgaagcaaattgtacagataatcgatacacccagcaaatgtatttataaagcaaacttctgttgacaaagttcaaaagtagataaactatcaaattggattaggcagggaatcgctacaaccaactgtttatagaacagtaacaactaccataaatgcggggtagaactcattattagcggcatttctcctccctcccaaacagtagcagcgaagcatagcagaaccagaaatgtaaatgaaataactcatccgtcatgaattatatcataggaagaagcagcagtcctccaacacacagcagcaacatagagcagccaaacagccttgcaagatagagaaacagccagaatcagactggttctggtaatggtagggggcatagtggtggtagtgtt

SEQ ID NO: 5749 - DNA, 586 bp, Gossypium hirsutum
  unsure (1)..(586): unsure at all n locations; Clone ID: LIB3828-002-Q1-N6-F12
agttccaaccccacaaaattgcatctggtttaatggaattacagagcttatgcaaaaaataaaataataataataatgtgataaaatcttaaaatcagggtagatattttaagagatgaatgaagaactatacccacacggtggggtattggggtttgaatataggtgaactgtcacatcaatggatcagcgattatgaaatgattatcttgttgagcttgaacttttagcaaattttgcaaatcggtccatacctcgttccagtaaattttccatgaaaggttgaagtacggaagccaccggaatcaaaagttgaggaacttcatatgaaattcttagctgaaaagaaaagaaggattggcagaagtgagtacagttcgaataaaaacactcattagctctcgtctattggtttatcatattggtcttacaacagcaacattaatnttacaggttatatatgctcatagtgtgatgaaaatatagtggagagctgcctaacttttactaacaggattagggacctttcggatagaatcgaacagcacccctaccttgttaaatccccattaggggtaatttttta

SEQ ID NO: 5750 - DNA, 408 bp, Gossypium hirsutum
  Clone ID: LIB3828-002-Q1-N6-F2
aaaacaaaacaaaatttatttgcaaaataaatataattatatgagttacaacctcatcaaaaaaaattatacctatgctattgattaagcagccgaggtaggttttgctgggataggggcggaacatggagctggggggtgtttgccactaactttaggcttcacattcgagcattgtgatactacaggtccagtcggtccactgtgtgtaatttcaatgtcggcaagttccacattttcacacggtaaagtagcgctgtaaataatcttgacagcttctggaagcgcagaagtgccgtgaatgtttttgaaactaatgtttcttagtttaacttttgattcttcatttattttgcatttgttccgtgggcaatatttctgatcaattataataggagaactgacatt

SEQ ID NO: 5751 - DNA, 411 bp, Gossypium hirsutum
  Clone ID: LIB3828-002-Q1-N6-F3
ggtttgggttttttttttttttttttttttttttttgttttttttttttttttttttttttaaaaatcttttcatgactaggtttatttttttttccttgattgggaaacaaaaatggggaagaagaaaagggggaataaaaaacaaacaagggggggagagagaagggggccataggatttactccacagggttatatttctaaaatattttttatttcccttttttttttttggtttaagcgttttgggtagggtaaaaagggaaacaggtattttccccggcagggttccataaaaaatgagcataattcggggggtaataagagttgctcggatctgcttaaaagggttccaagaagggttcctaaggtgcccaaaaataggtccttggtttcaaaaaaaaggttgg

SEQ ID NO: 5752 - DNA, 536 bp, Gossypium hirsutum
  Clone ID: LIB3828-002-Q1-N6-F4
ccaccaaacataattaaatattattaataaatatttaataaacaagtgaaatcaaattacttctatcagatgcaataaaactgcatcaatggcaactattatgattttatctaccacattgtcccaataccttattcaagagtttcccaatgaaagacaattacccccaaaactttcccatcacccaaacaaaaactcctacattaatcaaaaacctaacaatctaacaataattcatatgataaagtgcaataaaaagaagaaaaaaaaacgatggaaccgtcggaatgtaccgttttcgttattgaattctgcctcaaattctctcctcagtacctgtaattaggaggcttataaggaccctcaattgggacactaatgtagtcagcttggtccttggtaagcttagtgagcttagccccaagtttcccaaggtgaagagaagcgactttctcatcgagatgtttcggcaaaacgtaaaccttcttctcgtattttccggttgatttctccttccatagctcgagctgtgcaat

SEQ ID NO: 5753 - DNA, 357 bp, Gossypium hirsutum
  Clone ID: LIB3828-002-Q1-N6-F5
gtgggaaaacaacctccggatattggtactggcatttaatttttgaatgcacctatttctaattaaaaataaaacaatataactattgctctaagggccaaacaggaaaaactgggggggttacaaaatacactcatttttttttacaggtatatgagtatgaaaataaaataaaattctatactatagttaaaattaaagggggacattatttccaaataatatttgcctaaggccatcttcagtcttcaagactgagctgtctatcaactctttgtatggtgtaggtacctctgctttctggcttgatcatgcaatggtaggccattgctgatgatgctgatattcattctaact

SEQ ID NO: 5754 - DNA, 466 bp, Gossypium hirsutum
  Clone ID: LIB3828-002-Q1-N6-F6
cggataaacatggcatatatatctatatatatatcatatgtctttcattaacttctggttctggactacataatccttattatcattgatcatacccgggaggaaccaagagcccttgttgaagattaccagccaccaaacagatggacagttcagcagtagatatgtacctcatccatccaccatcttaacgagtgccctatgctgaaggagcatccggctgattctctggcttggcattttggaattctggtagctcactatatgcctcatttaacctagataacagtgggaatttagccatgtcaacattgaatcgttcaatcccagccagaatctgtggtgctagaaacaaatctgccatggaaactttatctccagtagcatattttccaacatgatctttgaacagcttctcaagcgccttaaagccttcttaatatgaaaattttggcaaagaattttc

SEQ ID NO: 5755 - DNA, 465 bp, Gossypium hirsutum
  Clone ID: LIB3828-002-Q1-N6-F7
ggggtttttaataaatttttttttttttttttttgtttttatttttttattttattttatatgggtttaaataatttgttaggtttgtttttgtaaaaaaaaaggaaaggaaaattttgtaagaaaaaaaaagggacccaaataaaggggggggcattggggggggggggggggggaaataaaaaaaaagaaggggtgttaaaaaaacctttttttttaattgggaatataactaatgcttaaaaaaaattatgtaaatgtaaaaaaaaaaaaaaacctttggggggggaaaagaagttaaaaaaaattttaaaatgggttttaaaaaggggaaaaggttaacgattttcaccttattggggtgtaaggggggggggccacatggggggaatacggaaaatttgtatggggggctggaggggtggttttcggaactggccgggaaggttttatccaaaagggggg

SEQ ID NO: 5756 - DNA, 461 bp, Gossypium hirsutum
  Clone ID: LIB3828-002-Q1-N6-F8
aataaaaagatatgccttcacattagatccaaccttgaaaattacaaaggctccccattaaaaaaaaaatctaccctaaaagaaactaaaaacaatactaaaaagtgggaaaaaaatagacaaagaaaaactagaattacacacttggactggtttttaatttaccctcatttttttcattcactcgtacattctgcaactcagttaaaagatagaccccacttattcttttcaacaggttttttactttttctcaactcagctcctgagttaactcactacctgactcagtaccagcgagtcgccaagccgaggtggcgataagtggccttgtatgccacccaagcattaaacacccattattctcctccactctatacccatcgccgctggcgaagagggccaacaacatactagcttgtttataagcattggaacccaaatgaacagggctaaacccg

SEQ ID NO: 5757 - DNA, 537 bp, Gossypium hirsutum
  Clone ID: LIB3828-002-Q1-N6-F9
gccaatccaaacctttatatttagccttacctatccactctcatgtagttcagaagagatattattatggaaaaaatcattttccattataacttaaactacaacgaaatatcaagaaataaaagaaaagaaaaaattgaagatttttgaacaaccggtggttagccagttattggaaaaacaaaaatccctaagattttgggcaacaactatccttgagatttgccaagctcaacgtccttgagtagtgatgagccgtccacttgctttataagtacctttacatctgatgtagcatcttttcggtattgcattggcttatctccctcaactgcccaactatatattatcatcccattcacagctatgctcatccctagtatgtttttcaatgtcagctctgaatcaaacagcatccatcctaatatcaacacgcatactgttttcatgtgtcctagcacttggaaagacactgccgagaatcggccaatgcacaggtactggcttatgttgcagaaaacagctaaggaacatgac

SEQ ID NO: 5758 - DNA, 520 bp, Gossypium hirsutum
  Clone ID: LIB3828-002-Q1-N6-G1
gtctcaagtttaattacttaacagacatgtgcatggtttgaacttctaaaatattaaacttgagaaaaaaaaacacctagtaacaaaactatacacccttacttttgccaactaatcctccattaacatgtacctacaaaaattatgggggggtctataatatacaaagaataaatagagcccaaaatctgcagcaaaacttttaactctgaattgggcgcttcccatgccgatctgatttcaaggggcttgcaagagctgatgtagaagcagatgcagaagcagtataagtattaaaggatgattcagatgaatgggaatccgaaacacccgatgttccagcagtggatgagaacccaggaggcctgtgggatcttcggtgtcgagcacccagagctccgggtcttgttggctcttctagactgccaggtctctttgacagcaaaataactacacgtcgcatgtcaagtcgtaattgcggatcgccttgcgtgcacagtaaccctatctggatgcacat

SEQ ID NO: 5759 - DNA, 491 bp, Gossypium hirsutum
  Clone ID: LIB3828-002-Q1-N6-G11
ggtttgggggtttttttttttttttttttttttttttggttactctcatcggaaatcaatccggattctttttttttttttaccaaaaagaaaacaccatgaaaaccaccctagaggcgaaaaagtgttcgagcaacaactgcctaacaattgggggggtttcgagaatttatattttaaaaagaaaaaaagaaaaaaaaacgaatgtgtctttgggaggcaaatgttggctgctctcgggcctactctgcaaaccaaactggttttgtttagtcatcagcaaatcctagctcaaagagccttaagtgagcattagcgtaatcagcaaagaattcaccctcatcagcagcatatttctcaacgaatggacggaacactgggtcaaagacgaaaactttgtcggatggcagctgcataatatctgcccccgttccggacaatagctccttgaaaaaagaattatcgaaggtaagtgggttggtagtccatgc

SEQ ID NO: 5760 - DNA, 451 bp, Gossypium hirsutum
  Clone ID: LIB3828-002-Q1-N6-G12
ccatgtagaatgaattatatatttatttatttagtgcaatcgctctgcagagagtgtaaaaggtaaataaaaaagtgtggttgaattaatccaagcggttccctaagcatccatacgaatcatgcgggggggaccctcccctcgcagcatgtactcgaacgccttgttgatatccaagaatgggacagaatgagtgatgaatttatccagttccaactcccttttcatatacttctccacaacaccagggatatcggatagaggtttgtagttgccgaagaaagtacccctaagtgtcctctcgttcaggaaatgtattggatgggttttgaatgaatcatctctactcggcacacccacaagcacagcaacaccccaaccatcatggacacattcaaatgcagaaaccatggcccgggtgctccccgtacatgcaatactgcaatcaact

SEQ ID NO: 5761 - DNA, 439 bp, Gossypium hirsutum
  Clone ID: LIB3828-002-Q1-N6-G2
gacttgaaaaccgcatttgaagcgcaatgcttaatgggatccattcaaatttctacaatgaattgaaaatatgttaatcattgtcgatgattcacccaagtttttgcagcgaacttgcaatcttgtgctatatatatgtgtggctctctacttaatacatagtaatttgtatggatattagaagaaaaaaattgatacaataccaatatatatctcgcacaaattacctcaccagaaagaattgaattttctgatagcaagccctagctttactttctcttggaacacagttgtttgaggtttccgttttcttgaataagtccttggattctagccaatttgcacgagtgttctatggtgagtttgtaaattggcggggactgccatggtaccatcccgaaatcatcactatattcctgcattccttctacaaagaact

SEQ ID NO: 5762 - DNA, 430 bp, Gossypium hirsutum
  Clone ID: LIB3828-002-Q1-N6-G3
agccgaactactcgtcaaatctattgcagtccatatagagtcttgaacaaagcttcgaagagtcgaagttcacacaatagaataagcaaaaacacacgataaaagcaaacaaatcattgggtagcaaaatgcagggggtggcctcaaacattacttatttagtactcatcttcatcttcctcatcaccctcgcctgactcagcaccgacttcttcataatccttctcaagtgcagcaaggtcctcacgagcttccgagaattctccttcttccataccctcacccacgtaccagtgaacaaaggcacgcttggcatacatgagatcaaacttgtggtcaatgcgggagaacacctcagcaacgctggttgagttggaaatcatgcaaacggctctctggaccttagcaagatcaccaccaggaacgacag

SEQ ID NO: 5763 - DNA, 461 bp, Gossypium hirsutum
  unsure (1)..(461): unsure at all n locations; Clone ID: LIB3828-002-Q1-N6-G4
gggacgaagataagaactgccacatattcttattttgagttaatcaaagtattggggtggagaaatagtacattagtatcaggttcatatcattgactacaaattggtgcacatataaagagagcaaataatcncgaaggttggagatccatgcttcaaccatttcaaaattgcaaacaattcattacaagtgttatccaaaggcatgtcttccaggaaagcagacaggcaatacctattgcattagcctagaaattagagctcatatgcagggaatctggaacccaagggctcaatcatgtctaggaaaagatatgccatacccccaatcccttcaaacaaggaatagggcctattacccccatgcatctttcccttggatataagcttgtgagcctgatcaagcaaaaagcaagcaaatgctttttgccttatacaagaactttacgttggctgttttt

SEQ ID NO: 5764 - DNA, 447 bp, Gossypium hirsutum
  Clone ID: LIB3828-002-Q1-N6-G5
aattaatatgaagattttttactttttatgaaaaagaaaaaggcaacaatgaaaacaaaatcatcatcaccatgttcattgtaaaatgtaaagcctcctactacgccaacaacaaattccatggcaattatgttcaagggctgccaacaacaactttgcatgcactctaacatgaggaaaagaaaaccaaatgtttatatttgagggaaggctgaatgcttatgatgttttgcttcaaaaatgtttgccttgagatgatataagccctcttcctaaatactatgcttccaacaatgtttggatttcatttccagcaaggacgccaaacatccatcttcaacttaccataaaacattaatccaccaatacaaactcattagaatcatcactgttggaacctgatgtgagggtacagtcccagaatatgctctggctggaagtcatgcc

SEQ ID NO: 5765 - DNA, 104 bp, Gossypium hirsutum
  Clone ID: LIB3828-002-Q1-N6-G6
ggtttttttttaattttttttttttttgaggaggggggagaatagatgtaaagtggaggttgtgaaaaataaatggataagaaaggaattggggagtaggccct

SEQ ID NO: 5766 - DNA, 467 bp, Gossypium hirsutum
  Clone ID: LIB3828-002-Q1-N6-G7
gtgtttttgaaaagataataatatttgcattcttgttattattataacattttattaacaatgggttcaaaccacatgaaaggtttgatccaaaaaataaaaaaaaaaataaagtagtgatggtgatagtgatagtgcttttcccagggggggtatattataggatgagaaccatgctttgatatcccatattaaaccaagcttgtggctacaggtgcagctcaaaccttgacttcgggtgtttccgctgatgagcttgctggtgttggtgctggttccgatgctggtgaggatgatggtgaagaagcgaacatgcccccaataccgctgatcttgtccttggcccagtcggtccatgattcattggaactatcgtgtccctcatgacctggtgcctcagcttttgcagcgtttgattctgttgatgctgtaggtgacgttgcggcggtgtcaccaacgacggaatg

SEQ ID NO: 5767 - DNA, 398 bp, Gossypium hirsutum
  Clone ID: LIB3828-002-Q1-N6-G8
atagataatcacgattctttttttattgatagcagtggcaaacaaaattcatggcatcaagaccatcatcaatgtccactttaaggactgaaaattaaaatagttgcacaaaattcctactttcaatggctatggttttgggtttcctttgatatagtaaagaccaataggaggtattggagaacaaagactgaaggctggagatattgttccccgcaagaagtgaatctcatctctattagtataatccactaataggtttgatcactctttagagattccaagcctcaatcggaaatcttcctccatgagcggaagaccatcccgcaacttgactttcggctcccaacctagcaattctttggcctttgtgatgtcgggttttccggacgcgtggg

SEQ ID NO: 5768 - DNA, 454 bp, Gossypium hirsutum
  Clone ID: LIB3828-002-Q1-N6-G9
agccatgaaaacagtaaataaatttgtattaaaagattatcatattcaaatctaaacaaacctaatagaaccaatagagcaatctagattacatataaatttattccattaaaactcttattaacagctaaatctaatcacctatggtggaaacttattaagggtggccatggtggtggtggccgccatggtggggcttaggcttaggattgggattgggattgggattgggtgtttgaaaacactgttgttgaaccagaggagcgaggaatggattattaaactcgtcgaaaatagtgttcaagcaatcttcatgagtcgcttgaacagcagcgcaacattctggactaacgtaaggtctaaacatcaggatcgaacttatgacatcttgaagacaggttagtttgctcgccagggttgttcccaagcacttgccattaaccatcggtggctg

SEQ ID NO: 5769 - DNA, 544 bp, Gossypium hirsutum
  Clone ID: LIB3828-002-Q1-N6-H1
agcaaagaaaatcatatatattagcatgtacatgcattaattacatatggctacaaaacaagattcaaggaactttaggatattgtaaatcaaatattgttttgagctatttattcttcataattactctttttatccaacaggattttatagcaagcccttctgcaacatcattacttcttattttgtataattaatacgacgacaaccaactcttcctcattatttcatcttaatatggtatcatctccctactttggtggactgggttcactgtccataacctcttctatccctttgctctttacagtttcagcctggcaacatcctgatgcgcacctgggctgaccacactcagcacaagtcccaccgcaaccctgacggcaacactccccactctcacatcccgactgtcctggcattagtgggatttgtgggacttgtgggatctgtgggattagtggaatttgtgggatttgtgggatctgtgggatctgtggaattcttgggatttctggaatttgaggaaatggtagaacgaaac

SEQ ID NO: 5770 - DNA, 285 bp, Gossypium hirsutum
  Clone ID: LIB3828-002-Q1-N6-H10
gggggtggggggtttaaaaaaattttttttttttttggggggttttttttcgggggttttgtttggtaatttgaaattgggaccttgtatttgtaagggaccccccggtcgcccggggaaaccgggaccggcgcaagcagggtcacaagcgggggggggggggaatttaaatatatctcggaaaaaaaaaaaaaaaaaatccaaacccaaaaaaataaaaacccaataccaataaccaaaaaccaaaaaaccacaaaaaaaaaatccaaaaccccaaaaacccaa

SEQ ID NO: 5771 - DNA, 493 bp, Gossypium hirsutum
  Clone ID: LIB3828-002-Q1-N6-H11
gagataatcatcatttttaattaaattgaaatttataatgagaatataagattggagtttgtaatttgattcgatgtttaaaatcatattctcaaccatctctgggcgttccgctcccaccacctttgcaccaagggggggatccaaaggatcaacttaataaaatccacgccagatgcattcacaaccatgtcaaaaccattagcacaacaaaggagctataatccatatctcaatatccaaacaaaatagagctgagtactatccttaagactacgaaaatcgataccccaaatcctttgttgccattcaacaatgcactcaactgattggctgctattgagtctattcctgttccatgggtgcaggttcttcattcttgtcttcatccatattatctggttcaacattagactcattttgaatatcagaaacctttttttcatctccgcctttagcggcattggtatcatcaccaggaattttcaaatct

SEQ ID NO: 5772 - DNA, 467 bp, Gossypium hirsutum
  Clone ID: LIB3828-002-Q1-N6-H12
aacaatcatgattaaaaaagctagtacacaaggtagctacaaaatcctgttttagtaacacctaattcaagttccgactaaaataaacgaccatggaatacaacattaaataacactctacttgaaaaagtgctaagggggggcttttccatacaacattaaatgggatggatcgttcttgtactgccttttttacgttaacccattcatcctcctcagctccaaatcagtttcactggaactggtaactcggtgagacagaaacatatcaacatcataccatgctctgtatgttgatgactttgccttaaattctagttctgatagatctgaaaccttttctcccacttttgaaaccaaacctttaagaatctgacaactttggtctccataatttagaaagcaagtttgaggaagtccagactcatctttgtatgtattggtcactgaaggaactttcacttcgc

SEQ ID NO: 5773 - DNA, 439 bp, Gossypium hirsutum
  unsure (1)..(439): unsure at all n locations; Clone ID: LIB3828-002-Q1-N6-H2
ggttttggggttttagctatagaaccgaaaaagttttactggaaaaagaaacatgaacaagagagtataagaacccgaatttacataaaagtgcgggattcgcttcccatctctccttcccttgaaaatgcaaaatgaccctttatgctaactgacatgctttggctcacaaaagatggaaatcaacaactagaaggtaaaaagaaagaatttattaaaacgaggacacttcaaaggctgcatcaggcgtagcagtaagaccattgctcgtcctcactagcaccaaactccgcggcagcattgtgaacttcctcatacgaacaaggagataaagctttgagatatggcatgttgtggaaggagcgagcgacgctgctgattaaagtagcatatttggtgccatcattgtcatggtcctncacatgaaattcttcagcac

SEQ ID NO: 5774 - DNA, 521 bp, Gossypium hirsutum
  Clone ID: LIB3828-002-Q1-N6-H3
aaaaaaatagagttcataattctaatgcatatagctggatgactaaagaatgtatgaaaagtgggctccaaaaggaccaattgagatagaacaacttacatggagtaggatatcaaaaaatcatacaagaaaaagatgacaaaattagtcagtttttacttgctcttcccagtggcaccttctctctgattccggaagtgactgagaagctgctgtgccttttcttttgctcttggcgtgccagactgggacaatgcgacaaggggtggcacagccccttcttgcaaaaccagggtacagaacttgggactattaaggcatagttgcagcaatacagatgcagcattctccttacccctctgtgatcctgattcaagaatttcaactagtaatgggacaccaccttctcctacaattgccacgcgcccttctgcaactgtcgacaggtttgagagaagggcaactgccttgtcaaccatcccactatcagggtccattaacaggacgaggtattttacagc

SEQ ID NO: 5775 - DNA, 478 bp, Gossypium hirsutum
  unsure (1)..(478): unsure at all n locations; Clone ID: LIB3828-002-Q1-N6-H4
aacaaagaaaatcatatatattagcatgcacatgcattaattacatatggctacaaaacaagattcaaggaactttaggatattgcaaatcgaatattgttttgagctatttattcttcataattactcttttggggcagtaggattttatagcaaacccttctgcaacatcattacttcttattttgtataattaataagacgacaaccaactcttcctcgttatttcatcttaatatggtatcatctctctactttggtggactgggttcactgtccataacctcttctatccctttgctctttacagtttcagcctggcaacatcctgatgcgcacctgggctgaccacactcagcacaagtcccaccacaaccctgacgggaacactctccactctcacatnccgactgtcctggcattagtgggatttttgggacttgtgggatctgtgggacttgtgggatctgtgggcgga

SEQ ID NO: 5776 - DNA, 502 bp, Gossypium hirsutum
  Clone ID: LIB3828-002-Q1-N6-H7
caaaagtagtaatattaacgcaaaaaattgtaaattaaaatgaaataatgtttaaatagtcgtctacaagaaaaaggaatttagcctaaaaaaaaaaactaggaaaaaactagaatctcgagatgcagagaggaaggaagaatgagatatgagaggcatgtgttagtagattgtccctccccaattggactaaagcttattccctttcagccaacgcaaaacatgcataaatttgaagaagaaagtagtttggggatttgtcacagaaatatgctactgacggaacaatcatcatgaacgcgccaaatggtttcacccaacaggtttgccactgaaagaaccgtcaactgcgggaagtaattcttctctgccactggtagtgtatttgttatgattacttcttgaaacacaccacctgataacctctctattgcaggagggctgaaaactgcatgagtacagaatgcataaacttcccttgccccctcttggtgtaaaagtg

SEQ ID NO: 5777 - DNA, 451 bp, Gossypium hirsutum
  unsure (1)..(451): unsure at all n locations; Clone ID: LIB3828-002-Q1-N6-H8
gggggagaaggggaaaaaaattgtaaaaaagggggggaaaaaaattaaattttttggaggagggggaggtttatttttttaagggttttaaaatggggggaaaaaaaaaaaagggggggggaaaaaaaaaaaaaaaaatttaaaggggggggggggggggggggttaatttaaaaaaaaaagggaagggggaaagaaatttttttaaaaaaaaaaaaaggggggtaaaaaaaggggggggggnntaaatttaaaaaaaaaaaaaggggtttttttggggggttttaaaaaaaaaaagggtnggngnaaagggaaaaaatgagaaaaggtggggggggtgtgaaaagaggggaatangggggggaaaaaaaaagatggtttttataaaaaaaaaaaannggaggggggaaaaggggggaaaatttttggggggggttttttttaaaaatttt

SEQ ID NO: 5778 - DNA, 485 bp, Gossypium hirsutum
  Clone ID: LIB3828-002-Q1-N6-H9
ataattaattggttcaatttatataagttatataagcatttcttatctgtgttgtttacaaaagaatattaaataactggatccaagtcatgatacgataactctatcttaattggttgatgcttaagtcaattttatttgggtgtctcaaatcgaaactaaataatttatgaacataaatatctggagatatcctaatgtattccaaaatcagaacatggacaaaaaagaattgagtgttgaattttatttggtaattcgacttaatcagatggagcaatcattttctcaggcaccactaaactttcaaattcttcttctgtgagcatcccaagattcaatgccgcttccttcaatgagctgccttctttatgtgctttcttggcaactgctgcagcattattataaccaattttggggttcaaggatgtcactagcattagagactcatgaagtaattttgaaattctgtccttatttgcttg

SEQ ID NO: 5779 - DNA, 593 bp, Gossypium hirsutum
  Clone ID: LIB3828-003-Q1-K6-A1
ctaatattgtgtgctgcgccactgttcactcattgtgaaaaatccaagagctgtatgcctgcacaacacccggacacaagatatattctctggacttatgtgggggcatgcacagtcctaggaaatgccgtggcattccaaaagctaaggcatacttaaacgctggatttgcactataagatttactaccacaactacatattgctgatcttagcggttaaaactccctcattagcttatgataggtgctcttaataaaaaaatgacgtaaaaaaatgactcttccaaacccgtatttaaaaaaatccctccctaagctatactgcgcataatgagtgtcaacgcaacctcatctgaaaaggtacagtgaactaaatttactcatctatttctagcttatacatctttgaaatcaaaagctaagagcacgtttggttcgctgtattggattagaggtgtattggattggattagaggtgtaatggagtcgaggtgttatagcaaatcaactgtttggttgaatgtaatggaatagatgcgtattattaaaactgccctaggttgaatgtataaaaaaaaaaaaaaaggcggcc

SEQ ID NO: 5780 - DNA, 591 bp, Gossypium hirsutum
  Clone ID: LIB3828-003-Q1-K6-A3
ctcactcaacattcccatttccaatctccagctcccaaggtaaatatgccgatcagaaacatagcagttggccggcccgaagaggcgactcaccccgatgctctcaaggcagctttggctgagttcatctcaaccttgatcttcgttttcgctggatcgggctcaggaatggcttttaacaagttgaccgacaacggagcaacaaccccggccggtctcgtagccgccgctctagctcatggcttcggtcttttcgtcgctgtctccgttggcgccaacatctcaggtggccacgtcaaccccgccgtcaccttcggtgctttcgttggcgggaacatcactctcttgcgcggcattctttactggatcgcccaactcctaggctcaaccgtcgcttgcctgttgcttaagttcgctaccggcgacctggctgtaccagcttttggattgtcatcaggtgtgggcgtgtctaacgcattggttttcgaaatcgtgatgaccttcggattggtgtacacagtgtacgccacagccgttgatcccaaaaaggaagcttgggaacaatcgcaccattggcaattggtttcatcg

SEQ ID NO: 5781 - DNA, 613 bp, Gossypium hirsutum
  unsure (1)..(613): unsure at all n locations; Clone ID: LIB3828-003-Q1-K6-A4
ccccgcgtccgancattggtnacaagggcaaggaatttcatgctgtgcaagaagcaaaggactgagaaagtgaaagacgacgggaaggcagctgaatcaattaataggaaggcaagtgggaattggaaggcatggtttaataaatccctcaatctcaagatttcctcccattaattaaataattcccaaccctttatgatcctatatttcttgggttagctttatttataaataaagcattgaaagttagtctattatcattaatggccatggtagagtgttgcttatgtttttcaccttatttctcatttaggtgagaaaagacctgcaggaataaattggaacttgtttttcagtattttgccttatgcgataagaatgaagagaacattcattgtgtgcttgattttccatttctgtctttgaaagtgttgcgttctattgttgaatggcttttgatggatgattctattaatctcatactctacgtaaggtttggcttacacccagtgttcaaaaagttgttctgaattgtccataaacatgtattttcagtagcttatatccattgcttgaaatgttcttctgacttgcccttaatattgcaagttgc

SEQ ID NO: 5782 - DNA, 402 bp, Gossypium hirsutum
  unsure (1)..(402): unsure at all n locations; Clone ID: LIB3828-003-Q1-K6-A5
ccactaatcccacanatcccacaagtcccacatatcccacaagtcccaaaaatcccactaatgccaggacagtcgggatgtgagagtggagagtgttgccgtcagggttgtggtgggacttgtgctgagtgtggtcagcccaggtgcgcatcaggatgttgccaggctgaaactgtaaagagcaaagggatagaagaggttatggacagtgaacccagtccaccaaagtagagagatgataccatattaagatgaaataacgaggaagagttggttgtcgtcttattaattatacaaaataagaagtaatgatgttgcagaagggtttgctataaaatcctcttggacaaaaagagtaattatgaagaataaatagctcaaaacaatattcgatttgcaata

SEQ ID NO: 5783 - DNA, 591 bp, Gossypium hirsutum
  Clone ID: LIB3828-003-Q1-K6-A6
gttactgtaggtcatagtgctgttttacatggctgtaccgtttgagatgaagcatttgttggcatgggagccacacttcttgatggtgtagttgtggaaaaacatgctatggttgctgctggagcccttgtaagacagaatacaaggatccctgctggagaggtgtggggaggcaatcctgctaaattcctgaggaagctaactgaagaagaatagcgtttatttcccagtcagccaccaattataccaaccttgcacaggtacatgctgctgagaatgcaaaaccctttgatgaaattgaatttgagaaaattcttcgcaagaagtttgcgaagagggatgaagagtatgactcaatgctgggtgttgtccgtgaaactccaccagaactaattcttccagacaatgtcctaccagataaagagcaaaagtcctctcaaaaatgatcttttttttttatttattagttgcttttttatttgctccaaaagtcttgagatttggcatcaagaaaaattattgttatgttccaagtacatggcagagggatgatttttcttttccaaataataccggacatgttttagtata

SEQ ID NO: 5784 - DNA, 597 bp, Gossypium hirsutum
  Clone ID: LIB3828-003-Q1-K6-B2
ggacaacccagttgccattgttatgactggtatggggaagggtatggtttgggtcaatggtagaagcattggccgatattggaacaattaccttagtcctcttaagaagccaacacaatccgagtaccacatcccacgggcatacttgaagccaaagaacctgattgtcctccttgaggaagaaggaggcaatcctaaagatgtccatatagtaacagtcaacagggatacaatctgcagtgctgtgagtgaaattcacccaccatccccgagattgttcgaaaccaaaaaggtagtctccaagccaaagtgaatgatttgaaaccaagggctgaattgaaatgtccaggcaagaagcaaatcgtggcagtggagtttgcgagctatggtgatccatttggcgcttgcggagcctactttattggaaattgcacagcgccagaatccaagcaagtcgttgagaagtattgcttggggaagcccagctgccaaatcccactagatagcattcctttcagtaaccaaaatgacgcatgtacccatctcaggaagactttggccgtccaactcaaatgtgcctaaacaaatgcgtgcttc

SEQ ID NO: 5785 - DNA, 577 bp, Gossypium hirsutum
  Clone ID: LIB3828-003-Q1-K6-B4
ttttctttctttacaatcttcatttgttcaggtttttgaagttttcataccatgggtgacagtcagtattcattttctctcacaactttcagtccttcgggaaagctagttcagatcgagcatgccttgacggcggtcggttcgggtcaaacatctcttggaatcaaagctgctaatggggttgtaattgctaccgagaagaagttgccttcaatcttggttgatgaaacttctgttcagaaaatacagtgtctgactccaaatattggagttgtttacagtggcatgggtcctgattttcgagttttggttcggaaaagtaggaagcaagcagaacaataccataggttgtataaggaaccaattccggtaacacaacttgtaagggaaactgcagctgttatgcaggagttcactcaatctggtggtgtaaggccttttggtgtatctctactagttgctggatatgacgacaatggtccacaattgtatcaggtggatccatctggctcttatttctcatggaaagcctcagcgatggggaagaatgtctctaatgcaaaaacatttcttgaaa

SEQ ID NO: 5786 - DNA, 615 bp, Gossypium hirsutum
  Clone ID: LIB3828-003-Q1-K6-B5
ggtcgaaccccgccgtccgggccctcttctctttttccgttttcttcttcttttttctttttttttttcctttttttttttcttctctcactttctcgaggcctccatttttgaaccctagctggagaaaaaaacgtaattttcttggaaaccaaacacttcgattaatttatctccagtcaatcgccaagaaaaaaaatgcagcaccagaggctgaagcaacagcaacaagccttgatgcaacaagctcttcttcaacagcagtctctctatcatcccggcatattagctcctcctcagatagagccaattcccagtggaaatctgcctgctggttttgatccaagcacttgccgcagtgtgtatgtgggaaatatccatacacaagtgactgaaccactacttcaagaggtttttgcaagtactggccctgttgaaggttgcaagcttgtcagaaaggaaaagtcatcgtatggattcgtccactacttcgatcgcagatcagctgctcttgctatattgtctctaaatggaaggcatttgtttggacagcctatcaaggtcaattgggcatatgctagtggtcagagagaggatacatcaggtcactttaac

SEQ ID NO: 5787 - DNA, 581 bp, Gossypium hirsutum
  Clone ID: LIB3828-003-Q1-K6-B6
cccagcgtccggaaaaacaaggattcgacacctaacgttgtggttgctaaggatggtagtgggaaatatgattgcatcacagaggccttagctgaagtcccgttgaattgttgcgatcgatttgttattcacattaaggctggtacttataaggaaaaaatcattgtgaccaaggagatgactaatgttatgttcctcggtgatggcccaaccgagaccatcatcaccaatggcgttaactgctttaaggataatgttaaaacattcgacactgctactgttggtgtggatggggctggtttcatggccaagggtgttggattcgataactcagcaggacctgatggtcatcaagcagtggcttttagggcatcctgtgataaggttgtcatgctcaattgtcattttactgggtaccaagacaccctttacgctcatagagacaaacagttttatagggattgtctcattagcgggacagtagacttcatcttcgggaatgcggcgagtgttttccaaaactgtcagattgtcgtgaggaagccaggtgaaaaccagcacaacatgattacagcacacgg

SEQ ID NO: 5788 - DNA, 600 bp, Gossypium hirsutum
  Clone ID: LIB3828-003-Q1-K6-C1
gccgactgtgcccctggatttgctcgtggtactaccggtggaaaggacggaaagttttacgtggtcactgaccctagtgatgatatttctaaccccaagcctggaactttgcgtcatgcagtcactcaactcaggccactttggatcactttcaaaaaatccatgatcatcaagctgaaacaggagctcatcgttacaagcgacaagaccattgatgcaaggggagctaatgtgcatatttgctatggtgctggtattactgtccagtttgctaggaatgtcattatccatggcctccatatccatcacattaaacccgctactggtggcatcattagggatgctgaaaaccacattgggttaaggactgccagcgatggagatgcgatctctctgtttggagcaaccaacatttggcttgaccatctttccctttatgattcctctgatggtcttatcgatgttatccagggttccactgccattaccatttcaaactgccatttcactgaccacaacgaggtgctattgtttggagcaagcgacacctacgttgctgacgagaagatgcagatcactgttgctttgaaccgcttcggt

SEQ ID NO: 5789 - DNA, 464 bp, Gossypium hirsutum
  Clone ID: LIB3828-003-Q1-K6-C2
gcaatgtgcagtacatttacttactgtggatcctcattcgagaccatacatcataatcagaaacccagaacggagggccctgaaataagcggttggcctttcttaccggctgacatgggtccaaagggaccagtccttaaaccaccaaacggcaacatggcagcatatgctatggttgtggccttcgcgggtgcattggttgatgcaatcaccaacccaatgaacgatgctctctaccattcaaacaaggctaaagaactcggcccagccaccgtttgcaaaggcattttcggtcgtggtgctgcccctggcaaccccggcgaagttctcaccgaccccaaaaccggcggaaatttcaatgcctatggaaataagaacaaaaaattcttgcttccagccatctggaaccccaaaactaaatcttgctggactgtttaatgtaggtggtttgcaaaatttgagac

SEQ ID NO: 5790 - DNA, 596 bp, Gossypium hirsutum
  unsure (1)..(596): unsure at all n locations; Clone ID: LIB3828-003-Q1-K6-C3
ctctatctgagaacacaaatgaaaaattgttttcaatgaagtgttgactgctgctgcaagggatattgtcacngaaaaatatatctaggctacgtggtggctggtcaatgcaagatgcattccatgcattttcacaacatatagtgctgtcagttctgttcctggagcatctgatctctgtacttaatcagactcgtgtcactaaaagtgatccaggaaaaggagaaaactctattcttctttctgaaactcagttagcagatgaaattctgcaagctgctatttttgctctcaccgccttcttcaggggtggcggtaaagttggaaagagagctgttgaacagaggtactcttcagttcttgctgcacttatactgcaatttggaaagtgtcatggtctagctaattctggtcaacatgagccactacggccttttgtgaatgtgttggagaccttgaaatggggaagattttggctagagatagtgagcaaaatgaaaaggaaaagtggattaatcttattggagatttagctggctgcatttctatgaagagaccaaaagaggttgagaatctatgtaagattttcacgaaat

SEQ ID NO: 5791 - DNA, 593 bp, Gossypium hirsutum
  unsure (1)..(593): unsure at all n locations; Clone ID: LIB3828-003-Q1-K6-C4
ngaggctttgtgttttccactcttaatcgggtcgatagagctgatctacttctctgctgttctatcgaaggtcatggagggaggttggcttccacttgtttttgctactttctttctcactgtcatgtacatttggcactatggcagtgtgttgaagtaccaaagtgaggtcagagagaaaatatccatggatttcatgattgaacttggctctaagcttgggacagtgagagttccggggatcgatttattatacaacgagcttgtccatggcattccttcaatttttgggcagtttctacttagcttaccttccatccattctactatcatttttgtatgcatcaaatatgtacctgttcctgtggtaccccaggaagagaggtttcttttctgtagagttggcccgaaagactaccatattttcaagtgtattgctcgatatggttacaaagatgtctgaaaggaggatcaccatgcatttgaacaacttgttcaaatcctagaaaatttcttgctgaaagaagctcaagatctagcattagaaagcaggttgcacgagatggatatcgatagtgtttttgtgagctcaa

SEQ ID NO: 5792 - DNA, 581 bp, Gossypium hirsutum
  unsure (1)..(581): unsure at all n locations; Clone ID: LIB3828-003-Q1-K6-C5
aaaaaaatctccaagaagttaaatagagaaaaaaattatcattaaacaccttcaccaacatgatccaaaaataaaaaaaaaacggtgaaatcccttttccttttggtctcaaaaaattcaaagggaagattgttggttttagggtttgggttctcattgatttttagtgaaaaattataaaaaaaaatatgggaagaggtagggttgaacttaagaggattgaaaacaagatcaacaggcaagtcacttttgcaaagagaaaaaatggtcttttgaaagaaagcttatgagctttctgttctttgtgatgctgaagttgctctcatcatcttctccaatagaggaaagttgtacgaattttgcagcagctcaagcatgatcaaaacattggagaggtaccaaaaatgcaactatggagctcctgagccaaatgtgtcatctagggaggctgctttggaattaagcagtcgacaggaatatttgaagcttaaagcacgttacgatgccttacaaaggtcccaaaggaatttactaggagaagatttggngacctttgagcagcaaggagctcgnagtcactt

SEQ ID NO: 5793 - DNA, 581 bp, Gossypium hirsutum
  Clone ID: LIB3828-003-Q1-K6-C6
gcgaaggcttctgtaggaactgcaatgaaatcctttaacagtgttatcttaaaattccctaaaattgatgagagcttaaggaattgtaaagccgtttttgagcagtttgatgaggactcaaatggtgcaatcgacaatgaagagctgaaaaaatgtttcaacaagcttcaaatttcattcacagaggaggaggagataagtgatctgtttaaggcatgcgatttcaatcaaaatatgggaataaaattcaacgagttcattgtacttctttgcctggtctatcttctcaaggacaatgctcctggacatgaaggtaaatcacgaatgggaatgccaaacttggaggccacattcgaaacctttgttgatgcattcgtgttcttggacaagaacaaggatggttttgttagcaagaacgagatggttcaagccataaatgaatccggggagcgttcgtctggacgaatagccatgaaaagatttgaagaaatggactgggataaaaatggatcagtgagtttcaaagagtttctttttgcattcacaaattgggttggaatcgacgatgcggaagatgacga

SEQ ID NO: 5794 - DNA, 265 bp, Gossypium hirsutum
  Clone ID: LIB3828-003-Q1-K6-D2
gactcaccctgtcacagatcattaagcccagtggctgtggtggttactcgcagcacataccgctacacttcccatggccctagcacgctctcctttctcttatttccattactgaatggacaattgcggacaatgtgcccgtaacactctaagaagagctctccctacatggataaaacatatggctgtccccaaccctaccccttaaaatctatattatgatgatgattaacgcaactggccatatccctaatgagacggagga

SEQ ID NO: 5795 - DNA, 588 bp, Gossypium hirsutum
  Clone ID: LIB3828-003-Q1-K6-D3
gccaaatatctctcctccacctctgctttcatgggtccgaagtgtgctctgtgggattgtacaaggcctgctcaaggatctgactggtttcaggactactgtagcagttttcatgctaccctagctttgaatgaagacccccctggcacaaatcccattctacgccctggtggaattagtttaaaggataatttactacttgatgcagttcgagcaaaggcacagggtaagaatgttggcatccctcaatgtgaaggtgccgctaccatgaaatctccttggaacgctactgagctatttgatctttctttactcgagggtgaaataatcagggagtggctcttctttgataagcctaggagggcatttgagagtggaaacagaaagcaaaggtcattaccagattactctggacgtggttggcatgaatcgaggaagcaggtgatgaaggaatttgcgggccaaaagaggtcatactacatggacccgcaaccttctggcaaatatgaatggcacttgttcgaatatgagatatatggttgtgatgcttttgctttatatagactggagctgaagcttgcgaatcaa

SEQ ID NO: 5796 - DNA, 53 bp, Gossypium hirsutum
  unsure (1)..(53): unsure at all n locations; Clone ID: LIB3828-003-Q1-K6-D4
ggggngggggggggggnnggggggggggggggggggggggggggggngggggg

SEQ ID NO: 5797 - DNA, 482 bp, Gossypium hirsutum
  unsure (1)..(482): unsure at all n locations; Clone ID: LIB3828-003-Q1-K6-D5
gntttagctatgcaagctttngaactgtgggatataatctgaaagataagaatctgaagcagttggtcgggagggtgttgaaatgcttcaaaccgagtgacttttctgtagcagttcacgttgatgttggtggtggtcagtcacttgagcagagctgcctgctggacgtaaaagaatactgttgcggagagatgggcattgaagggcttgcaagtggaggttccatgatgtaccagaaatttaagagcactggtggctgtggatcaccaagatcaactctgaaatgctgctggaaagaggaagaagaggaagaagagtagttgaaaatctcttttatggttttatgtttttgttttctattataaataaattgctcctggttaggatgcatggcgtttgggtattttatcttttaattcgtgtcattatgacttggtatgaaatagttttattatatataagctggacctcttttatatctt

SEQ ID NO: 5798 - DNA, 595 bp, Gossypium hirsutum
  unsure (1)..(595): unsure at all n locations; Clone ID: LIB3828-003-Q1-K6-D6
cgaaaaataccggnagaacgctggattcttctcatggcttatgttgagcgaggtgttgtgaaatcaaagcgatcaatatggcgactgaggaccatcatcgatttcttctgggcaatcatcaattttatcggagtgtttttttcgaccatgtnntctcgatggaaaagtcagatgcctatagaaaaagctctggttcaagcaagaaatggtatggtggtccaggaggaccaggaagtggaccgtatggtggtggtggcggcccacgtcgaccatcacgtggactagacaatgttcgaggaattgatcatagtaagtgctgtgccttattattattatgcctgggaacttccaattatcagtgtttttttatcaccaggccatgttccccttctcttttttccccttcaatttgtcaactaaaataatttgtcatttgccactgctatattttcaggttcccttcctgcttgcggctcttgctgtggtggctaattcccaaacattgttgtgtctaattcatttttattttgtgcaagaaatttataagatgttagtgtcaatagactgcctgtgaaataaaaaactttggaaactc

SEQ ID NO: 5799 - DNA, 598 bp, Gossypium hirsutum
  Clone ID: LIB3828-003-Q1-K6-E1
ttgacattgtgttggcttaccaaatcaaaaggcacttcctttagggatgatttctgcactagtggtgttcctagtggctcttactagggttcaactctcaaattgccaacatctcaatgccaaaatctcctgcttcgactgccctcataattatgacttctcaggcatccaagttgcagtgaagtgtgagaaagtgaagaaactagccactgcgaccactgaagaaaatggttctttcaaggtccagcttccatcaggcatctcaaacactaactgccttgccaagctcctaggtggaccaaaccagctatacagcaagaagaaaaacctggtgtccaaggttgtcaaggtgggacatcaacccaacacttacaccctctccactccactggctttctccacttcatgcccttcggcatccattgatgctaaatcatgtggagctcaaaagggatcggttcatccaagaccgtcgatctgccactacccccggagtggggacttgcaccatccagctattatgttcctttcttccccatcatcggtatcccttgatgactatctcagtggattagagacagtgtaatagcagtaatta

SEQ ID NO: 5800 - DNA, 591 bp, Gossypium hirsutum
  unsure (1)..(591): unsure at all n locations; Clone ID: LIB3828-003-Q1-K6-E2
cttgtgatgaacacctactcctcctggntggagtcctgtattgcaagcctcattttgagcaactatttaaggaatctggcaatttcagcaagaattttcaaacagcgaagaccgagaagcaaaatgacacgtcgaggactcccaacaaactctcatccttattctctggaacccaagataaatgtgctgcttgcgagaaaacagtgtacccanttagaaaagattacaatggaaggggaatgctttcataaaacatgctttaggtgcgctcatggagggtgccctttgacacactcatcctatgcggctttgaatggtatcctctactgcaagcatcattacgctcaacttttcatggtgaaagggaactacaaccatgtcctccagtctgctacacataggaggaacacctccactgcatcatccacggactttgctgaaaaccaagctgacctcgaaactgcagcggctaatcaagatgacaatgaagaacagtcataattttaaagaatattgaaaacaataaactttagcaattatcgatccattggatgattcactgactggttcttcataaaattcccttatatg

SEQ ID NO: 5801 - DNA, 358 bp, Gossypium hirsutum
  Clone ID: LIB3828-003-Q1-K6-E3
caacttgagcccatggcaagtttcttctttccagtttgacggaacatgactcccttacctaacaaatgatttcattatttcacaagatgaagtcttgtttacaatttgctatttaatggcaccaaactgttgtaaaagctttctcataaaatgcagatggcaaagccactctgaatctcaacccgagttaaaatgaaaactgtgagatcgattatacatctatccttcatttgttctgattttgatgtacataacattgctagtaattgtcgcatttttgacatcattgatgtataattagggtttgcaattatcacatgataaaatgtaatctcagcaaacatcaatcatatacatt

SEQ ID NO: 5802 - DNA, 433 bp, Gossypium hirsutum
  unsure (1)..(433): unsure at all n locations; Clone ID: LIB3828-003-Q1-K6-E4
gttttctctccctccaattaagaagcagatcttcgttaagaccctgaccggcaagaccatcaccctcgaagtcgagagttccgacacgatcgacaacgttaagggcgaaaatccaagacaaggaagggatcccaccagnaccaacaacgtctcatcttcgccggaaaacagctcgaagatggccggaccttggccgattacaacatccagaaggagtccaccctccatctcgtcctccgtctacgtggtggcatgcagatcttcgtcaaaaccctgaccggcaagaccataactttggaagtcgaaagctctgacaccattgacaacgtcaaggcaaagatccaagacagggaaggcatcccaccagaccagcaaaggctcatatntgccgggaaacaactcgaggacggtcgcaccttggccgattacaaca

SEQ ID NO: 5803 - DNA, 585 bp, Gossypium hirsutum
  unsure (1)..(585): unsure at all n locations; Clone ID: LIB3828-003-Q1-K6-E5
aagntggcaggcgcagcaaatgggtttccataaccttactgttttcagtatgtttatcggcgtcctatggtaagaggaccggaatctccaccatggctgacggagccgatgggtttcaaccaagcaacggttttccgcatgaagctgatcctgattcttcaacctctatcgatcctgatcctaccggattcggtgctggcataggtataggttatgaaagaagcccttactgtatcgactgcgacgatgtggatatcatgggcggcagcttttgcggcacctgcaattacggatgcccttaccgcaggttcaataatgggtgtggtggtggtatcgcttatatggatgaactcaaacgaacgattaaggaccttaccatgaaacttgatgccaatggtcttttagggaaaaagaaggccatgaatatacaagctatggcgccagaatcttcatagatttatatatagattatagaaactacggattctatacaaagagaaagaaaataaagaataaccaagcagcttgatatatgattgaattacaatgtgctagctgtttttttttatctttaattattatatg

SEQ ID NO: 5804 - DNA, 590 bp, Gossypium hirsutum
  unsure (1)..(590): unsure at all n locations; Clone ID: LIB3828-003-Q1-K6-E6
cgcgactgcctcgtctaccgctcttacatcgctctcggcagctaccaactggtgatcaatgagatcgactccgccgctaccactcctctccaagccgttaaactgctggccctctatctctccaaccctcatgataaggaatcaacaattgcgagcttgaaagaatggttagcagatccagcgattggaagcaatgccatattaaggttgattgctggaatcgttttcatgcatgaagaagattatattgaagctcttaaacacaccaatgctggtggcaccatggaacttcatgcattgaatgtgcaaattttcattaagacgcaccggtcagattatgcagagagacaactgagggtcatgcagcagattgatgaggaccatacactgactcaacttgcaaatgcatggttgaatctagcagtgggtggttccaagatacaggaagcttatctgatcttccaagatttctctgagaaatatccaatgactggtttgatcctaaatgggaaggctgtctgctgtatgcacatgggnaaactttgacaaggctgaaacactgttacttgaagcacttaataaggatgcaa

SEQ ID NO: 5805 - DNA, 585 bp, Gossypium hirsutum
  Clone ID: LIB3828-003-Q1-K6-F2
cttggagaagggtcactggttctctcttctctcttcttagactctaactaacatctacatggcttctgcaaacagatggctcaaacctgaggtgtatccgctatttgcatcggtgggtgtggcggtcggcatttgcgccatgcaactcgtcaggaatatcaccaccaaccctgaagtcagggtaaccaaagaaaacagggcagctggagttcttaacaactttgaagaaggtgaaaaatatgcagaacatggactgaggaaatttgtgcgcaacagacaacctcagattatgccctccgttaataacttcttctctgaccctaaataaaatccatttgcacaattcttcaaaattggatgaaagtaaggcataaagacgattgtattcttgactgccaagttttttgaaatatattcttcttgaataattaaaataataagatttcattcctttccctttcttcttctgttgtaggcttctagcttatgttagccaaattccaaattgattgtctgttgatttttttttaattatttaaatttacatataaatattgtaagaactctacaatgcctcaagggttg

SEQ ID NO: 5806 - DNA, 605 bp, Gossypium hirsutum
  Clone ID: LIB3828-003-Q1-K6-F3
cacgaaaacatgttgtcccaaaagtgctgaaattggtactcttggttttggttttgaaggtggtcctgataaatgttgttcttctggatgttccggtaattgtaatcctggtggtttcgttctaccatttcctcaaattccagaaatcccaagaattccagaaatcccacaaatcccacagatcccacaaatcccacaaattccactaatcccacagatcccacaagtcccacagatcccacaagtcccaaaaatcccactaatgccaggacagtcgggatgtgagagtggagagtgttgccgtcagggttgtggtgggacttgtgctgagtgtggtcagcccaggtgcgcatcaggatgttgccaggctgaaactgtaaagagcaaagggatagaagaggttatggacagtgaacccagtccaccaaagtagagagatgataccatattaagatgaaataacgaggaagagttggttgtcgtcttattaattatacaaaataagaagtaatgatgttgcagaagggtttgctataaaatcctcttggacaaaaagagtaattatgaagaataaatagctcaaaacaatattcgatttgcaatat

SEQ ID NO: 5807 - DNA, 586 bp, Gossypium hirsutum
  Clone ID: LIB3828-003-Q1-K6-F5
cctcagttagaagttggaaaccaaggtaggtcggtagaaagaaccaaaggctgttactgaggagccagtagtagaggaggctcctaaggaaacaatgccagaaccagttgccgaggagatcaagagaaaccactgaacaaaccgttgaaaccaaagaaactacagagtctagtgaggcagcagcagaagcacccaaagaggaagttaagaaggaagaagaagcaaaaccagctgaagtggaggagaaagttgaaacagaagctgatccagcagagaagactgagtaaataataaagcttttgtgatgaaaatgcgggtgtcaatggaagtgtgtttcaaatggctacagtttgataagtttgcatgtcaagtcaactagttttcttctatgtaggtcaataaggatgtagtaatgtggctgatggaggcccaccgatagtagtcctgcaatgtggctaggttaacatgcatttgcatatgtcaaagagtgacatacttcaagttccattgtgggggaatttttatgggtcatctgttatctgtaaagggatgggtttcttgggtcccaaaccacctttctttgctt

SEQ ID NO: 5808 - DNA, 602 bp, Gossypium hirsutum
  Clone ID: LIB3828-003-Q1-K6-F6
caccgtcagaatccttgacttatgcgatacttgtgggtgggaagaatatcctggtgcacttggaaatggaagatggtacgcaacacaagtaaccttaggcgatggtagattcatggtgttcggcggtcgagatttcccaacatacgaatttgttcctccacaagggccagaaaaacacccttaaggatgtggtcgattttaatttcttggtggaaacacacgatcccgtggaaaataatttgtaccctttcgtttacctttcgactgatggaaatgtcttcatcttcgctaacaatcgttcggttcttttgaaccctaacacccaaacgatcatccacgagttcccagtgctccccaatggtgctcgtaattatcctgcgtcaggaagtgcttgcctccttccgatcatgctcaagcctaatgaagatcgtagagtgatccccgccgaggttttgatatgcggtggtgcatcacatgatgcgtacgccaaggccgatttgcagcgtcctaaagtgtttttgccagggaacaccgactgtgctcgccttgatatcaccaaaaggaacggcaaatggaagatcataaacatgccatcagctcgt

SEQ ID NO: 5809 - DNA, 493 bp, Gossypium hirsutum
  unsure (1)..(493): unsure at all n locations; Clone ID: LIB3828-003-Q1-K6-G1
gnaaaacacaaanaaaaaaaaaaaaactaagtttttctgcaacaaattaaggcaggtctctccaacaccatggacatgaagaagaagatctcttgcgctgtcatattcgccgctgcctcaatgagcgcagtcatggcagcaagcaccgccccagcttcctcaccagatggcgccccacttagctccgcctcagttggcgctgcaccagcttctgcaccaggcccggactccagcgttgcaacctcaaccttgcctgttcttgggtcattggttggagccttcattgtctctttctttgcttaaattatgggttacctgcagtatttgaagagatcatatataacttacataccatttgtattcaagaaggctcacgttccgttccctttattttgacttctactgattgaagatttctttttcttcacttgttctgtaatgtgagaatttgaattccttcttatattttgcaataaaaaattatggttatgct

SEQ ID NO: 5810 - DNA, 604 bp, Gossypium hirsutum
  Clone ID: LIB3828-003-Q1-K6-G2
gccaaactatgtgcgtgcttgggcaaacatgggtatcagttacgccaaccatgtttgttaaatcctgcaatgttctctcattgtcttggtattcatgaaaagggaactgcatttcttagtttattatcttcatttccttttgcatatttctgagatgctcaatccttctaaatgaaaatttactagcatactcagggtccacaaatttactatgtcacactaaaaggggaaaaataaatcttcagtaattagttctttggaaaatatgctctgcaagaaatatttgttctgtatgaaccatggttcttggattgagttttgaagtgctgcatgttgaatgggttcaggaaatctataaatgttttgtatattttatttatgtctcaacaacatgaagtatgtaattttgttaaacggggtatgggatggttgatagcgaaggataatgtttgttaggtgaggaaaacaagaaaagttaaccgagattagtgtttttgaagacaaggtggtataattactgaacacattagcaaaaagaattcgttcaaaataacactaatctcgatggagagataaaagcttatttgattggttagtaataaat

SEQ ID NO: 5811 - DNA, 307 bp, Gossypium hirsutum
  Clone ID: LIB3828-003-Q1-K6-G3
ggagcaagttaatgccggcgatcttatccgcagtttaccctgtttgcatcagttccatgctaattgcatcgacccgtggctacgacaacaaggtacgtgccctgtttgtaaattccgagcaggatctgtatggcaggaacccggtggaatagacgcttcttacatggtttaattacctgttcatcgatgtatctcacgtacgtgcatatataaattatattaatttattggttgaagggctgtaattacttgatgaccaatgatcatcgccaactaacaagtagtgcaatgatctatttttgatgtt

SEQ ID NO: 5812 - DNA, 527 bp, Gossypium hirsutum
  Clone ID: LIB3828-003-Q1-K6-G4
cagttataaggttgacagattttggcgtggaaggagctgatgccaaaaacatcttttacctgagagagaaaattttaaggctgccagaactaaagaagctgatcaaatggataaagatgagagagatacgcaagatgcttttgatagagaaaagcaagagagattggagcgcgagaggcaacaaagagaaatggaggaggaagaaagagagcaaaggagacatgaattggagagggaaagggaggagaagaagagagaacaaagaagccttgaaaaagagagggagagagtcagggagatggagagggaaagggaaagggctagacaagctgttgaaagggctactagagaagcacgtgaaagagcagctgctgaggctcgtgctagagctgaaagggttgctgttgaaaaggcagctgctgaagctcgagagcgtgcggaaagggctgcagtgcagagagcgcaaactgaagcccgtgaaagggcagctgccgaggctagagaaagagcagaaagagctgcagcag

SEQ ID NO: 5813 - DNA, 598 bp, Gossypium hirsutum
  Clone ID: LIB3828-003-Q1-K6-G5
tgaaccactcgtggctcagctcttattacccaagcccaaggtaagttcttctccacggcttcgatctcgactgggctcaagccgccggatctgaacaaggagccgcggaacggttacaccacatggtggctttgtttaagcccgtcaccgcggctcttctgtccctcccgatgcccaccgtcgccgccatcaccggtcacgccgctgccgctggatttctcctcgcgttgtctcacgattacctgatcatgaggaaagaccgaggggttctttacatgtccgaggtggacatagcgctgacaatccccgattacttcaacgcgttgtttagggaaaagatcggcgacgcgtcggtccgccgcgatttgttgctgcgagggttgaagatgaagggagacgaggcggagaagagaggggtagtggaagcggcgtacggcggcgaagcggaagtgagagaagcgagcgtacgtttggcggagaatttgggtaaaaggaagtggaacggggaggtttatgccgagataaggaaaggattataccctcagctctctgctatactgggattaacccacaaagcatacaccattgccaggctttg

SEQ ID NO: 5814 - DNA, 382 bp, Gossypium hirsutum
  unsure (1)..(382): unsure at all n locations; Clone ID: LIB3828-003-Q1-K6-G6
gtaaccctacttcagctttgcccttcttccccagtctctcaaaatgccgttcaagaggtacgtggagattggaagagtagctctggttaactacgagaaaggactacggcaagcttgttgtcattgtcgatgtcgttgatcaaaacagggctcttgttgatgcacctgatacggtaagaagccaaatgaactttaaaagactgactctcactgatatcaagattgatattaatagggttcctaagaagaagaccttgattgatgctatggaaaaagctgatgtgaagagcaagtgggagaacagttcatggggcangaagctgatcgtncagaaaagacgggcatcgcttaatgattntgataggttcaagctcatgttggc

SEQ ID NO: 5815 - DNA, 574 bp, Gossypium hirsutum
  Clone ID: LIB3828-003-Q1-K6-H1
aacccccatattattgctttcactgcacatccccatccctctaaacctccaactcttctttataaacgccaccaactttctcctccaatccccacttcttcttcgctgcttcttactttcttactttctttctttcaatgatgctgctattttctttttgtttgttttatatatatcttgtctcctttgggaaagttcctacatctcttcatctttgtcttgggattctgggttctatttcattggtttagagatcaataatgattggcatatcatgtagcagtgtttttcatctaaagtcttgcatgtggaaacgaggttatctatctatatgtgatacagccaaggatgacttgccggctcacttctacttaacataaatcatgctctctacataagcagctaaaagttagagcactaagctaaaacctgtatatgttgtcatcaattaatttataataaatgttaattgatcggcaagtcatctgtggctatatcattgtctcattttctcattctagatttatgatgaaaatacaaaaatagagctgaatccttgagtgctgatgaactg

SEQ ID NO: 5816 - DNA, 591 bp, Gossypium hirsutum
  Clone ID: LIB3828-003-Q1-K6-H2
gccatcggtggatgaatcaaaccaaccacagacacattggtgattgctggagtaagaagggtgggtatagatttggctacatttaggttcttgccacgttgagttggaggattttcttcctgtttctggcatacaaagtctttcttccagtgtgcaaagtactccagagaaacatggccattcagatgatgcttcgagaagtccagaactcctgcaagaattcctgaaatctggtccaagaaaggagcttcttcgaacctgttttcataaagagaagaaaagttcagcttcttcaaagagcaaaatgtctgaagttgtaaagttgggtaacaagatcatcaaaaagcctgacttgagaaaggtttcatccactgccaacagtcagtcttctgctaggaagcaaaacagaaagggggagaacccaataagggtgctcccagctactgagcagtcttcagaccatggattttctagctcatggatatgtaaaaattctgcttgcagagctattctttccatagatgacacattttgtaagagatgctcctgttgtatctgtcacttatttgatgacaacaaggacccaagtct

SEQ ID NO: 5817 - DNA, 463 bp, Gossypium hirsutum
  unsure (1)..(463): unsure at all n locations; Clone ID: LIB3828-003-Q1-K6-H3
gagagaaaaaattcgcaggnaattagcgagatcctgcaattttcctgcgttttctctcttcaatcttctccggctatctgatctatccgtcatcatgacaacatcaaggcgtcttgcagaaagaaaggggagaagttccaaaagaacataacaaagagaggagctgtgcctgagacaaccacaaagaaggggaagaattatcctgttggtcctgtgcttcttgggttcttcatattcgtcgtcattggatcatctctcttccagattatcaggacagcgaccagcggaggtatggcataagtctgcacttctggtgttaaggaattgcgaggagactggtcttgcattgggcttttcttttctgttagttttgtagggaaactgatgatatatttactagagatatgcttacgttgtgaaatgttcggaatttgaataagacctcccctttctttgtctggtc

SEQ ID NO: 5818 - DNA, 534 bp, Gossypium hirsutum
  unsure (1)..(534): unsure at all n locations; Clone ID: LIB3828-003-Q1-K6-H4
ggnaaaaacctcctcatgatttgttgcgaaacctgagtcattattcctggtaagttaaattttctatttagttcctataattttttttccattattggttcaataaatcgggcgggtttgtctattattttcacttcttggcaattggacactgtgttgttcttttaaatttataattttgttttagattttttcattttggttaaattaggcagtcattttgagataatattagagatggagctgaattgatctaattgaaacctaatcttatgcgatttaagcttgtaaaacatagactgcaaagatattgatggttctaaaaattttagtgatgggtttattttcaccgtgattatttggaggttgtgctatagatgcattatttgtcgtacttttttcagaacgttttaggaaaatgatgattgatgggaagaatggtagatatcgaactgcatgtacaaaaactggaagttgatatattctttttttgtacataaaaagaggaaataaaaatagatttgaggcttttat

SEQ ID NO: 5819 - DNA, 590 bp, Gossypium hirsutum
  unsure (1)..(590): unsure at all n locations; Clone ID: LIB3828-003-Q1-K6-H5
cactgagccanatagcaatgtttcnagtgaagaaanaagtgattatatctgaaaatctgataacaaaacacttgaacaaagtgaaccagctgcagatctcaactatggatcagttgttgttggtgcaaccctttttccagacatgaaagatggatcatcggacagtgattccagtgctatcttaaatgaagacatcatcatcaacaccaaaaccaacaaggacaatagccctaacaacgcagctttttcatcatctggggtgttagagctagacagccaacaccaccttttgatatcatcttcttcgtcaccaacatcctccatggattgcttcaatttcacaaaaacaagctatcaaccccaccagtacgtgaagatggaagaacataatttcttcactgcagatgaagcttgtaatttcttttcagatgaacaagctccaagtcttcattggtattctcctgaacaatggaactaaaatgaagctccaagatttttgtaagatgggaattatgtaagaagttaaaaactagtacccaataccatgatcttcagcctgtgatggaagtcaataatgcagaaaagaaaac

SEQ ID NO: 5820 - DNA, 589 bp, Gossypium hirsutum
  unsure (1)..(589): unsure at all n locations; Clone ID: LIB3828-003-Q1-K6-H6
tccgcggncgcgtgggnaaaaanaggcgtctgtaataaaatctgcaatcttaattctgtcggtgtttttatctgtaagcttcagttcgggtgttaggttgctccaggaacagcccaatgatgacctcaaaaacatggacgctattcctcccattgatgcactcaaccctaccgagttcaatggacccggtgttggcattcacgaagatcatgttgtcccaaaggttccgaaattggtactcttggttttggttttgaaggtggtcctgaaaaatgttgttcttctggatgttccggtaattgtaatcctggtggtttcgttctaccatttcctcaaattccagaaatcccaagaattccacagatcccacagatcccacaaatcccacaaattccactaatcccacagatcccacaagtcccacaaatcccactaatgccaggacagtcgggatgtgagagtggggagtgttgccgtcagggttgcggtgggacttgtgctgagtgtggtcagcccaggtgcgcatcaggatgttgccaggctgaaactgtaaagagcaaagggatagaagaggttatggacagtgaac

SEQ ID NO: 5821 - DNA, 580 bp, Gossypium hirsutum
  Clone ID: LIB3828-004Q1-K6-A1
ttctaaaagacaaatcacattaccatacaagccagtttgctgatgttgacattgcgttgttgctgaaattgttgaaaacatggccagttgccatgatatttcctgttattgacatgctgaggatgaccgttctgcaccctgatggggcaacagtacttttcaggcatgttgaagtcaatgatgcggtaatggaaatgattatgaaagccacgactgatcctgcacttcctgcaaatcttttaaccagcatccgtgctgtaactaactttttcaagaattcaagctactatggctggctgcaaaagcatcgtagtgatattcttgatgcattttcaagttgtcttgcatcaccaaacaagaatttacagttggcttattcaaccctgatactaaattatgcggtgctgctaattgaaaagaaggatgaagaaggtcaatcccatgttctttcagcggctttagagattgctgaacaggaaactctagagattgattcaagattccgagctttagttgccattggatcactgatgcttgagggtctggtgaaaaaatagcaatggactttgatgttgggaac

SEQ ID NO: 5822 - DNA, 591 bp, Gossypium hirsutum
  unsure (1)..(591): unsure at all n locations; Clone ID: LIB3828-004Q1-K6-A2
gcaaaatccgatanaaattggcgnagactgctctcttccacttgcttcgatcccaatccaagcaactcatttccagaaacatccattcaggttatcgttttaggtttgcaacactgtctggcacccaatatgcgaagccgaacctcaactatgcaacgagcattttcagtgtccaaaaaagagggcttctcaagctaagacatctgaggatgacgacaaaatcagcatcggtcctcgtaaaagcaaagaagacgacgaagatgagaaggatgccggggttgtttactacggtccgatttcttctacaatcaagaaagtaaagatgctttcactttcgacctgctgcctctcggtatcgttaggccctgtcattacattcatgacttctcctgatatgaatgtgattgtgaaaggtgcggtagcatcctctgtgatattctttagtgctacaacaactgccgcacttcactggttcgtgagcccttacatccacaaaatccggtggcagcctggttcagacagcttcgaggtggagatgatgtcttggttagcaacatatattccacgaaccattaagtttgcagacatcca

SEQ ID NO: 5823 - DNA, 587 bp, Gossypium hirsutum
  Clone ID: LIB3828-004Q1-K6-A3
gtccggtactgcagacaaagcgactaaggggaggatggctccttcgcgggccaccatagtacggtaacagcacactatcttcgcaaatcagtaacaagattgctacggcgatttccttttgcctttgcgatccgacttcgatgatttccactaaaacgggaatccctccttcttcgactaatgccgttttagcttccggtacgggtaccaacacgctcataacgaaagccgacttgtcaaccatgtttgacccgaagtcggccattaattccactagaggtctcatgatccctgcttcaacggccctgattttgttctctttaaccgtgcatagagaataaagcgccgttgatgcgtcctttttcccgcgaaatccaccgttttcgagaagattaactagcagtggaatagctcctgaccgtccgatcgctaccttgttttcttctacctgcgatagccgaagcaaagcacaagctgcgttttctttagccgttgaagttcctgttctcaaagctctaaccagtggcttaatcgctcccgaggaggctataagttctttgttctcatcgcataaagagagattcaaa

SEQ ID NO: 5824 - DNA, 579 bp, Gossypium hirsutum
  Clone ID: LIB3828-004Q1-K6-A4
cttagtttactatgtgagtgcaatgggctccctgaggtggccacttacctggaaaaagtgattaaggtgaatgactaccaagaaacccggttcgtaaaccggattgtgtcgtcgatgttcaatacggtgtcggggaaaaaagatcgcggtgctgggattcgcattcaagaaggacactggggacacgagggaaaccccggcgatcgatgtgtgcaaagggctgataggggacaaggccaaactgagcatatacgacccacaagtgaaccaagaccagattcagagggatctttcgatgaagaaattcgactgggaccatccggtccatcttcagccgatgagccctacttcggtgaaggacgtaagtgtggtttgggatgcatatactgcaaccaaggatgctcatgggatttgcattctcaccgagtgggacgagtttaaaaacctggattaccagaagattttcaatgacatgcagaagccggccttcgtgttcgatggccggaacgtcgtcgacgcagagaagctgcggaaaattggattcatcgtctattccattgggaagccattggatgattg

SEQ ID NO: 5825 - DNA, 584 bp, Gossypium hirsutum
  Clone ID: LIB3828-004Q1-K6-A5
gccatatccatattccattgcgctcatggttatgcaggcaatgttgggttcatggagcaaaatgctgggggtggaaaacacatgggctctgagctggtacaaagagtcggcattaatgaaattgcagaaagcatgatggctttcaacaccaactataaagatactggtcttttcggtgtctatgctgttgccaagcctgattgtttggatgatttggcttatgctattatgtacgagacaaccaagctagcctatcgtgtttcggaagctgatgtcattcgtgctcgtaatcagttaaagtcatccttgatgcttcacatagatggaaccagtcctgtagctgaagacattggacgccagctacttacatacggtcggagaatcccatttgctgaattatttgctaggatcgacgctgttgaccccagcactgttaaacgtgtggcaaaccgatttatttatgacagggatatcgccattgctgccatgggtcctatccaagatttgcgtgactacaactggttcagacgccgtacttactggaaccggtattagattaatttgcttttttctttatcaatggg

SEQ ID NO: 5826 - DNA, 582 bp, Gossypium hirsutum
  unsure (1)..(582): unsure at all n locations; Clone ID: LIB3828-004Q1-K6-A6
gtggggngaaaaccattgtttcatctgtttggatttatgatgtgtattggtgccacagcagcaagagctcttaaatcagtgcttcaaggccttttgctgtcttccgaagggaaaagctcaacgccatgaacctattaatgtacatggcacctatagctgtcctggcccttttcccagcagctctttacatggaaaaggtgtagttggcatcaccattgcacttgcaagagatgattggaagttcttaatatatctcctcttcaattcagcacttgcttattttgtcaacttagccaatttcttggtcaccaagcataccagtcccttgactctccaggtgttgggaaacgcgaaaggcgcggtggccgtggttatatcgatcttgatattcaaaaatccagtatcaattaccgggatgcttggatactcactcacagtggcaggggttattctttatactgaagctaaaaaacgcagtatgtaaataaaggggccattaagcaatagggatatatatatatgggtacaaattcaacaaatattatgtgttttttagtgttggattaggctgttgagtgaaac

SEQ ID NO: 5827 - DNA, 590 bp, Gossypium hirsutum
  unsure (1)..(590): unsure at all n locations; Clone ID: LIB3828-004Q1-K6-B2
cggccgcgtgggnngccttaacaaatgggnaaaccaaccgcaactctagcctttttaggtaccagattgggtgttaggccatcaccagtggtggcagcattttcatctagaggaccaaatttcctcacaccttgaaattctcaaacctgatgtggttgcgccaggggtgaacatccttgcagcctggactggagaattgggtccgtcaagtcttccaacagatcataggagagtgagattcaacatattatcagggacttcaatgtcatgccctcatgttagtggaattgctgccttgatcaaggccagacacccagattggagtgccgcagcagttaaatctgctctaatgacaaccgcttatgttcatgataacatccataatccactccaagactcttccactgcagcagcttccactccctatgatcatggagctggtcatatcaaccctttgaaagctctagacccaggtttgatctatgacatttcagcccaggattactttgtattcctctgcacacagaaattgactgcaatgcagctaaaagcttttagcaagcattccaatatgtcttgccatcacaaca

SEQ ID NO: 5828 - DNA, 515 bp, Gossypium hirsutum
  Clone ID: LIB3828-004Q1-K6-B3
gtgatattgacttggtaggggaaagaaaagggggagaaaaaaaaaaaaaaaaaaagaaaaggagaaaaaaagaaagaggggaggaaaaaagaagcggaggaggagaaaggacaataaaaaaaaaaagaagcaagaaaaaaaaaaaaaaaaaaaggaggaagaaaggggggggggaagagtaaggaaggggggagagagggggggagagagaaaaaagaaaaacaaaaataaagggaagagaaaaaaaaaaaaaagggggggaaaagggaaaaagcgaaaaagaaaaaaacaaagagaacgaaaacaaaaagggaaagggagggctagcgaaaaagaaaaaggggggaaaaagaaagaacacgcgaaaaaaaaggaacagagaaagaaaaaggaaagaggaaggaaaggaaaaaaaaaaggatggagggtgaaggcggaaaggaagggcggcctaacacagagaaaaagaaacaaacaagcgaaggattggtaacctaccaatagggaacgggaaa

SEQ ID NO: 5829 - DNA, 576 bp, Gossypium hirsutum
  Clone ID: LIB3828-004Q1-K6-B4
gttttctcttcctccaattaagatgcagatcttcgttaagaccctgaccggcaagaccatcaccctcgaagtcgagagttccgacacgatcgacaacgttaaggcgaaaaatccaagacaaggaagggatcccaccagaccaacaacgtctcatcttcgccggaaaacgctcgaagatggccggaccttggccgattacaacatccagaaggagtccaccctccatctcgtcctccgtctacgtggtggcatgcagatcttcgtcaaaaccctgaccggcaagaccataactttggaagtcgaaagctctgacaccattgacaacgtcaaggccaagatccaagacaaggaaggcatcccaccagaccagcaaaggctcatctttgccgggaaacaactcgaggacggtcgcaccttggccgattacaacatccagaaggagtcgaccctccatttggtattgaggcttcgtggtgggatgcagattttcgtcaagacgttgactgggaaaaccataactttggaggtggagagttccgatacgatcgacaatgttaaggcgaagattcaggacaa

SEQ ID NO: 5830 - DNA, 556 bp, Gossypium hirsutum
  Clone ID: LIB3828-004Q1-K6-B5
accaaaccctcaaaccacccactaacctctacacggtatccatacaccaaatcaattcaacaggctattcaacgatctaagcttggatatgacggttgggacgactgcggtgacattggcggtactgttgtcatgtcctgtcgccatgcctgatgctctatgctgatctcatgatgaagaacactgataagacttctgacagcattttataacaccaacatacaggatcaacatcccatattgttacctttagaaatacgatggtaagatgggcagacttatgagcaatccaattggatattcaagatcataacatggatcataacacaggaatctgtgaccaatattatgctcaactatgttatgaactaagtcttgtgtctaacctactgtctcacctaatatataagctcatatatatacttgcttttataaatgcaaaaatatccaaaatcttatcccaaactttgaccatgactgcaaccatgcctgcaactgaatgaataattgaatgaaccacctttgaatgcatctttgattgcttagataattcata

SEQ ID NO: 5831 - DNA, 593 bp, Gossypium hirsutum
  Clone ID: LIB3828-004Q1-K6-B6
cggccgcgtgggtttttattcgtctctgaagcttttagcaatggctttttcttctctcttcagatccaccgccgccgcctccgcctctctcatcgaggcagcctccgatcggtctgacctatctctctcaccctctgatcgcctcaaggtttccagccttggttttggtggaaatttcaactccttttttggtgcctctgtttcaactagatcttcttcattacagaaatgcaactcaaggagtatccaacccatcaaagctacagctactgaaattcctcctacaattccaaagtcacggagcagtggcaagaccaagattggaatcaatggttttggtcggattggaaggttggttttacgaatagcaacttcaagggatgatattgatgtagtagctgtcaatgatccttttattgatgccaagtacatggcttatatgttcaaatatgattcaactcacggaccctttaagggaactatcagagttgtggatgagtccacattggaaattaatggcaagcaagtacaggttgtaagcaaaagggaccctgcagagatcccttggggtgagtatggggctgagtttgttg

SEQ ID NO: 5832 - DNA, 587 bp, Gossypium hirsutum
  unsure (1)..(587): unsure at all n locations; Clone ID: LIB3828-004Q1-K6-C1
cggncgcgtggggttgttgtaagaaagtgcaacaaaacagaccagccgccttctagcaactcatctaggagccctttgccggaagtgaaggttgacattgatggtgagaaatatcctcaagaaacgctgtaagacgtaaacgatcactgaagaagtggaagagctttcccacttcgaatgattcttttaaaagtggttcccggagccggaaatggtcaaagggtactgattctgacatcttacatctaaatggcaatccactcccacagctccctgaagaagaggaggctgttggcattataacaatggaagatgtcattgaagagcttttacaggaggagatctttgacgagacggatcatcactacgatgactcatgacatttgccttacttcgtcgcacagtttttctacggcactgattatttgttgtttcttgtttggcacgcagtagaatttggtttgttagagcttattgtagacacatgctggttgtatgcgaaatgcattaggcattcgagttaatggaaactatatatttttgtaagtaggacaaaagcaagcattccatttataaatgtatggtaa

SEQ ID NO: 5833 - DNA, 581 bp, Gossypium hirsutum
  Clone ID: LIB3828-004Q1-K6-C2
gtacacaaaagtcctttgatatctaaccaaatatttttttcaacctccaaatatagccttccagagtatgagggaatcttaggtaaccaatcgctgctctggtattgtagggctgtaaaacacactgttaaaaagctggttccaactaatgattatatctaatggaccggaaactgtgtgcaatggttcaataacccactggatgaatacattaaattcacttaacaacaataagtaagaaactctgtcttaccttgcacctttatcagatgactgtattgcaaaggaaattgatttcatgatgaaaaagggtggattgcttgaattgcaatttgatgaggtggtgtgctgtacacatggagaatatcagcattccatggtactatgatgggaggtattggactctatggaagctgccgatgtttgggtgcaacgactcttctcaagtcctgaaagaaattcacgagtgcaaaaaggcataccccaatgcttatatccgttgcctggcatttgacaacaagcaccaaggtcagtgcatgtcctttgtcattcacaaacctaattgaaaccaccaccaccga

SEQ ID NO: 5834 - DNA, 582 bp, Gossypium hirsutum
  unsure (1)..(582): unsure at all n locations; Clone ID: LIB3828-004Q1-K6-C3
gccaggaacagaccgaccattgtgngaacactatttccaaaacacgcaagncttattttcgtggttgatagcaatgatcgtgaccgtgtggttgaagctagagatgagttgcacaggatgttgaatgaggatgagttgagggatgctgtgctgctagtatttgcaaacaagcaagatcttccaaatgctatgaatgctgctgagattaccgacaagcttggccttcattctctccgccagcgtcactggtatatccagagtacatgcgccacatctggtgaaggactgtacgagggactggactggctctcaaacaacattgcaaacaaggcatagatggcgtaattgacttgtctgtctcagaaaatgccagcccctttcggaattattgatgtttctacgtccgttaaaatgttttggtttttcatgttcttttgtttcttgcaaactttgtcatttgttgcttcttgtagtttaagaataattggtaaaattttcggtttctattgttggtcttggtagttggaaaaaaaaatgtattgttttccccnnnnnaaaaaaaaaaaanaaaaaaaaanaaaa

SEQ ID NO: 5835 - DNA, 587 bp, Gossypium hirsutum
  unsure (1)..(587): unsure at all n locations; Clone ID: LIB3828-004Q1-K6-C4
aaacaagnagctgtatcagnatacttttgcagnatgaagaaaagcgatccaagttcttgaggtggaggattcaattcttggaaaaaagcatcagaaagcttgatttcagtcccaatggtatctctaccatagttcaggtaaacgatctcaagaactctcccggacctggaaaaaggagctcaggcaagctaccaaccaagcccttcacttgcttcaggacaattatccagagtttgtggccaaacaggtatatacacattaatatcttaaatcttttttgtatcatggtgttgaatttcaacaaatattgaatgttggttttggattttgaaggtgtttatcaatgttccatggtggtacttggctttcaatatgatgattagtcctttcctaactcagagaaccaagagcaagtttgtgtgtgcaagtccagccaaatcatctgatatccttttcaggcaagtggactccaataatttctacaatgaatttttttaatcataaattcctttattatattttgcatactaacttatgattgtatatatacatagatatattgcgcctgaacaagtaccagttcagta

SEQ ID NO: 5836 - DNA, 579 bp, Gossypium hirsutum
  unsure (1)..(579): unsure at all n locations; Clone ID: LIB3828-004Q1-K6-C5
ctttcgtggacctagtgacactcacctagncagtcttgtgggccaagcattgtttggtgatggtgccgcagctgttataatcggggcagaccccgtgcccgaaatcgagaagcccatgtttgaactagtctcagcagcccaaacgatcttgccagatagtgatggtgcgattgatggtcaccttcgtgaagttggtcttacatttcaccttcttaaggatgttccggggcttatttcgaagaatatagaaaagagcctggtagaagcatttcaaccattgggcatatccgattggaactcccttttttggattgctcatcctggtggtccagcaatattagatcaagtagaagccaaattagcactgaagccagagaagctacgagccacaaggcacgttctttcagagtatggtaacatgtcaagtgcttgtgttctatttattttggatgagatgaggaagaaatcaagggaagatgggcttcagaccacaggagaaggattggagtggggagtgctctttgggtttggacctggcctcactgttgagactgttgtgctccatagtgttgctgctta

SEQ ID NO: 5837 - DNA, 626 bp, Gossypium hirsutum
  unsure (1)..(626): unsure at all n locations; Clone ID: LIB3828-004Q1-K6-C6
tggtacgcctgcagtaccgtccgnattcccggtcgcccagctccgatccttatggttctttgtagaccttaacctccggaaacacatgatccgaatcgccaaaaaccccaaacctctaacaactctgactcaccaattcctccaacgctgcaccgtcagtggaaccgccaaaggcaaatccaaactcaaagccggccaacctttgaaacgctccaaaatctccactaaaaaaggaaaaggcggcgcttctctcgacgattccctccccaaagcggcagaatccccgacgagaagcaaaaactctacgaccaatgcctcaatgcacccacaccggtccgtcacctctcaccgaaagagcgagnncccgcgaagnnccgaacgagaaaaattgggattaataagcaaggagcggcaacgggaaatggagattttgaagaagggaggaagaaaggcaatgggagtccctgacgagcctatgattatgggaactccggggctggatttgattacattgggccttgtcgatgccgataagatacccaaatatgagctgacggtggaggatggccggagattgtccaaggagtatagtcgggttttgatgaggaagcatagggcaaggcagg

SEQ ID NO: 5838 - DNA, 271 bp, Gossypium hirsutum
  unsure (1)..(271): unsure at all n locations; Clone ID: LIB3828-004Q1-K6-D1
ctttttcaactttctcttcttctctttgttttaaagagggctggagttttagccaaaaaactccatggctaaacttgttgctactttcttcttggctctcattgccatctccatggttcaaactttggttatggcatcacatggacatggtggtcaccattatgataacaaacgttatggacctggaagtctcaagccttaccaatgtccatctcagtgcacaaggaggtgtagccagacacagtanccataaaccatgcatgtttcttct

SEQ ID NO: 5839 - DNA, 590 bp, Gossypium hirsutum
  unsure (1)..(590): unsure at all n locations; Clone ID: LIB3828-004Q1-K6-D2
gctgatctaatgcaagnattcaagacgggttaccttactctatcatcagccaagtctatgtttgtgagccagttactgggaacagccatgggatgtgtcattgctccactcacattctggatgttttggactgcttttgaagttgggtcacctgaaggtccatacaaagcaccttatgcggtgatattcagggaaatggccattcttggtattgagggcttctcggaacttcccaagcattgtttggctttatgtttcggattcttcattggtgctgttcttgtaaacctcttgagggatgtgactcccaaggaaatttcacagttcattcctattccaatggctatggcagttccattctacattggagcttactttgcggtcgacatgttcgttggaacagtaatcttgtttatatgggaacgaattaaccagaaggaagcagaggattacgcgggtgcagttgcttcaggtttaatttgtggtgacggtatttggacaataccatcagccatactttctatcttgaggatcaatccaccaatttgcatgtactttgggccttctctgagtagttgattaggaaaccg

SEQ ID NO: 5840 - DNA, 601 bp, Gossypium hirsutum
  Clone ID: LIB3828-004Q1-K6-D3
gttttacgaaggcaatagtaagtaaccatgtctccagatgcttcagctgcccttgcagtgaggcagaaagttcaaacctttttgaatgctgcttgtacagggaaccttgatcttctcaagaagattgcctctcaacttgatgaggggaagggactggctaaaacggtggcagatattaaggatgcgaacaaacgaggggcaattcattttgcagcaagagagggcaagactgaggtgtgtaaatacttgttggaagaattgaagcttgatgtgaacacaaaagatgaagatggtgacactcctctccttcatgctgcccggaaaggtcatactctcactgcaaaataccttctagagcatggtgctgatcctgctatacccagcaacttagatgccactgctttacatcatgcagctggaattggggatgttgaattgctgaagtatatactggacaaaggcgtcaaggttgattcacaaagtgatgctggtacccctttagtttgggctgctggtcatggtcaacgtgaagctgtgaaagtattattagattatcatgctaatccaaatgctgaaaacgaggataatatcactccattgt

SEQ ID NO: 5841 - DNA, 251 bp, Gossypium hirsutum
  Clone ID: LIB3828-004Q1-K6-D4
ccttcctgggtacttttcgggccagcccttgcctttacctgtatgtggccccaaacttcttttttgcctttttcttttaacttgtgaaaaggttggtgaaaattcctttggagtgcctttggagtcgaacaggtctagtatggggcctgatgtgcttcatttgtaatatttgcctgtagtcatcagtttttgtttttgcttttgtttgtttctttaacggtagtcattagtttcttcattccttgcattct

SEQ ID NO: 5842 - DNA, 588 bp, Gossypium hirsutum
  unsure (1)..(588): unsure at all n locations; Clone ID: LIB3828-004Q1-K6-D5
gctgatgataagaaactctganagaaaggcttcttcaattatatctttgcaaaccagcaatttgaggtctgcatttttgggagagaaaaagggagctgtgtttctagcattcccataactcgcgtaagtttagtgaggaaggctattgagtgtaaggagtcgagaatcgggaagcagccaataacggttccgtccaatgtgacgattactatggagggtcaggacataaaagtaaaaggtcctttgggagaaatggcattgacatatccacgagaagtaaaggttgatagggaggaatccggagccctaaggatcagaaagtcagtggagactaggagagccaaccaaatgcatggccttttcaggactcttactgacaatatggtggtgggagtatcaaagggttttgagaagagacttcaactaattggtgttggatatcgtgcaacgttagaaggaaaagacttggtgttaagtcttgggttttcccatccagtcaggatggcaatccctgatgacattcaagtaaaggtggaagagaacacgaggatcgtcgtaagtggatacgacaaaagtgacgtcggtcaa

SEQ ID NO: 5843 - DNA, 443 bp, Gossypium hirsutum
  Clone ID: LIB3828-004Q1-K6-D6
cttggacgctgctgctcttcatggcatcgttacacaaggagaaggtcgctcatccatccttgcaatgtttgcgagaaagagcaggaacaatgggaactagaagccaatacgccctgaagcgctacggctgataccccggtgcaccctgtagtgagacagtgggatgaacagttgaaatggtgtgaagaacgaaatcatgtgagtgacgcactaaatcaatcctgtgagaaactgtcttgaccaatggagcttaatggcgccaggtgcagctatcaacaagtagggcatgatatgcgacattacgcataaggaggataatcagctcttatgatacccattgacattcttctatggattaattaccacatgcttctctggttctagaatggcggatcctcctaggtgccacgctaccttgaacggatatatctgtcgctttgtga

SEQ ID NO: 5844 - DNA, 66 bp, Gossypium hirsutum
  Clone ID: LIB3828-004Q1-K6-E1
gtccgaaaaaaaaaaaaaaaaaaaaaaaaaaaaaaaaaaaaaaaaaaaaaaaaaaaaaaaacgcga

SEQ ID NO: 5845 - DNA, 584 bp, Gossypium hirsutum
  Clone ID: LIB3828-004Q1-K6-E2
ctcatgtccagtccccattcgttgaaatgatgttacttgatggttgcttcataatggaggttctgcaccattttggagtctctgaacaacaaccttgggttttccccattgaaccatggcaactccccattttggttcaagacctgctcattctagacaaccaaattcccttttttgttttggaaatgctgtttgagtcattggagagccaagaagggacaccgacaccttctctatgcactaaggccttgaaatttttcgatctagctttccctctatccatggatatcgcctgccctttgaaaccccaccatttacttgacttgcttctccagtctatccgctcatcaagtccatcccaaatggtcgccccaaattttgtttactcatttttgaagaaaatcagtacgagaaaccaagctgatacaatgagagatcaacttgaactgcagcctccattttacttaacaaagaatgcaatggaactccaagcatcaggtatagagttgaggtcaacaaccgctgctaggttcacaaatatcaatttcaacaacggagggcttgaaatcccgtctgtaaccatt

SEQ ID NO: 5846 - DNA, 593 bp, Gossypium hirsutum
  unsure (1)..(593): unsure at all n locations; Clone ID: LIB3828-004Q1-K6-E3
ctccccanaatcaaactgatcctttagtttttatcatcagtttgtttcagagggtttttggttttttaaactttccttatttttggagccatacatcaggagacttcattaattcatttggtgtttcatccttttttggttgcggaaacaggaaaattagcacgggtgatagcagaaaaaaagataaattaaaaaaatgttgggtgatttcttgaacagattgctattgttggtttttggatatgcttatccagcatttgagtgctttaaaatatacattcccaccgccaccaccatctccttctccaccgccaccctcatttgaaaatacgccactcccaccaattagaggagtatcatacgcatctcctcctccgccagttattccctactactaaagaactgcttttacacgacattgagttgtagttcaaaatcttcaggtgcaaccatgatggcatgttaacctgcgtgttgtttcttcagcttttttgagaactattttttcccctaaatatataataacttaatattttatttgtattgtcttttttatttcctttgtattgttctgctaatatatatggtaatgt

SEQ ID NO: 5847 - DNA, 601 bp, Gossypium hirsutum
  Clone ID: LIB3828-004Q1-K6-E4
gttttccaattacctctgaaagatgcaaatctttgttaaaaccctcactggcaagaccatcaccctcgaggtggagagttcagacaccattgataatgtgaaggctaagatccaagataaggaagggatcccaccggatcagcagaggcttatatttgctggcaaacaacttgaggatggccgcacgctagccgactacaacattcagaaagaatccacccttcacttggttcttcgacttcgtggcggcatgcaaatctttgtcaagactctcactggaaagacaattaccttggaggttgaaagctctgacacaattgataatgtaaaggcaaagatccaagacaaggaagggatcccaccagatcagcagaggcttatctttgctggaaagcagcttgaagatggtcgcaccttagctgattacaatatccaaaaagagtccaccctccacctggtacttcgtcttcgaggtggcatgcaaatctttgtcaaaactctcactggaaagacaattaccttggaggtcgagagttcggataccattgacaatgtgaaagccaagattcaggacaaagaaggaatcccaccagaccaacaa

SEQ ID NO: 5848 - DNA, 392 bp, Gossypium hirsutum
  Clone ID: LIB3828-004Q1-K6-E5
gccgtttgcatgatttccaactcaaccagcgttgctgaggtgttctcccgcattgaccacaagtttgatctcatgtatgccaagcgtgcctttgttcactggtacgtgggtgagggtatggaagaaggagaattctcggaagctcgtgaggaccttgctgcacttgagaaggattatgaagaagtcggtgctgagtcaggcgagggtgatgaggaagatgaagatgagtactaaataagtaatgtttgagtggagggcttgcattttgctacccaatgatttgtttgcttttatcgtgtgtttttgcttattctattgtgtgaacttcgactcttcgaagctttgttcaagactctatatggactgcaatagatttgacgagtagttcggct

SEQ ID NO: 5849 - DNA, 600 bp, Gossypium hirsutum
  unsure (1)..(600): unsure at all n locations; Clone ID: LIB3828-004Q1-K6-E6
gntctcatgagtgctcttctcaaacagcaagaagtgttgcatcatctgaaacgagtttgacttcgacgggtattctatgaataatattccagtgtagggtgttattccataccccagttcacatcgtgattgcagtttccgatgtacatatccattgtataggaaaagttatcacttcagcaatcaagttagtaggaacttgagtttgttcaagatactgcgttttgcttagttggaagatggtgtcttcacattgtgaatatcatgttctgctgggtttctttgaagcttaccagggccagataattggtgaagtgtctaagatacacttctgcatgatatgcaaaggtgctcatgcagaattttgattgtatttggtagcgaaatctggcaggaatcgactaattatcgcgtgctttctctaaaattgtcaaagttgtggagccactgtttgtaggtatcagcagactatgggaaactctctaactctaatagcagattttaagtttgctccttttttcttcttaatcagaggaattaactatgttatgtacatacgctatttgattgctctagacagaaagtctgggtattaatctc

SEQ ID NO: 5850 - DNA, 583 bp, Gossypium hirsutum
  Clone ID: LIB3828-004Q1-K6-F1
gcatgtgcctctgtaaccccacaacagttgtgattcctaaaggacatatttattatcaaaagtaaacttagaaggtccatgcaaggctcctattgagattaatgttcagggcactataaaggctccggctgatcctggtgctttcaaggaccctaattgggttagattctatagtattgaaaatttcaaaatgtccggcggaggaattttcgatggtcagggaagcattgcttatgagaagaataaagatccccacaatcgtgcatttcgtgtcaaactccccgttaatataaggtttgactttgtgaccaacgcattgatacaagatataactagcaaagacagtaaactattccacgttaatgtttttgcatgcaaaaacattaccctcgaacgtttcacggtagaggcaccggcagatagcccaaacacagatgggattcacatgggcaaatcagacggcgtaaatattattggatgtgagattaaaactggtgatgattgtatttctatcggagatggcactaaaaatttggacataaaagatataacttgtggaccaggacatggtataagtatcggt

SEQ ID NO: 5851 - DNA, 580 bp, Gossypium hirsutum
  Clone ID: LIB3828-004Q1-K6-F3
ctccagttttggtgtttgttgttgctgctttggtcttcgttgttatcaattcgttgaggcaaagacgacattatggactgcctgtatggccatttctcggcatgctaccgtcgttggtgtccggtcttcggtccgatttgtacgagtggatttcggacatactttgtgaacaaaatgggacgttcaggttcaaaggtccatggtttagtagtctcaattgtgtggttacggctgatcctaggaaccttgagcatcttcttaagtccaaattctctgttttccctaaagggccttattttcgtgataccgttcgagatcttctcggtgacgggatattcaacgccgacgacgagacgtggcaacgtcaaaggaaaacggcgagcatccagttccattcggcgaagtttcggcaattaacggccgagtcagtgttggaactcgtccatgcaaggctattgcccgtgttggaaaatgcagtgaaccaatcaatctccattgatcttcaagatgttcttttgagattaacgttcgataacgtttgcatgaccgccttcggcgtcgaccccgggtgtctccgtct

SEQ ID NO: 5852 - DNA, 581 bp, Gossypium hirsutum
  Clone ID: LIB3828-004Q1-K6-F4
agttggtgatggctgtggttatcatggcagcgtcctctcggagggaattgggtgcagcacaagtgcaccatgtggtcggaggtgaccgtgggtgggacgtttcctctgacgtggcatcttggtcctccggtaggagcttcagggttggagacaaaatttggtttgcctacgccgcagcacaggagagcattgctgaggtgaatagcccggaagaatatgagtcgtgcgatgtgagcaaccccataagaatgtacacggacggcatagatggcatcccactggatggggaagggatccgttatttcgtaagcggcaaggaagagagctgcaagaacggtctaaagctacacgtggaggtgatgccttttgggaaccccgagcccgaaaggcccagagttgcagtggctgctgcggcgcccaccactccttctggatcagcccggctttacggaagctccgtgctattattggctgggttatggctttgctatatggctatttaattgtactagttatgtagttatgacctctctgcactctttttcctctttagacttttaaagcctagtgttcttaccttc

SEQ ID NO: 5853 - DNA, 580 bp, Gossypium hirsutum
  Clone ID: LIB3828-004Q1-K6-F6
ataccataggtacttggctgagttcaaaactggtgatgaccggaaagccgctgctgagaatacgctctctgcgtataaatctgctcaggacattgcagtttccgagctcgctccaactcatcctattcgtttgggattggctctgaacttttctgtcttctactatgagatcttgaattctcctgaccgcgcttgcagtcttgcaaaacaagcttttgatgaagccatctcggagcttgatactctcggagaggattcatacaaagacagcactctgataatgcaacttcttcgtgataaccttactttgtggacctcggatatgcaggaggatggaaccgatgaaatcaaagaagcctccaaacctgaggatgagaaacaacagtaaaatccctaatcttcgagttagtattttacttctctggttgtttttgtatggagaagttgattggtcccactatcccttcagtttgctttatatttaaaaaaaaaaccttgaaaatactgctaaaagtttcttggaatttcgccatatatatatttagttgaagctttctaattatagtgggggcattgtgca

SEQ ID NO: 5854 - DNA, 376 bp, Gossypium hirsutum
  Clone ID: LIB3828-004Q1-K6-G1
cggacgcgtgggcggacctgaacccgcacatgcccatgtttgtaatgtcagagcctaaagactagtggcaaattaaacccgactaccatgttccagccctgtcccaaaaaccctaagtgccaccgtttaaaccataccaacagattcagtgcaatagtaattaatatatttattcatattacataaaaacagatctttttcattttaaaaaaaattaaaaaaaaaaaaaaaaaaaaaaaaaaaaaaaaaaaaaagaagaaaaaaaaaaaaaaaaaaaaaaaaaaaaaaaaaaaaaataaaaaagaaataatatattatataataaaatctaaaaaacaataaactggtccgtacattttacaacaatgggaactgc

SEQ ID NO: 5855 - DNA, 586 bp, Gossypium hirsutum
  unsure (1)..(586): unsure at all n locations; Clone ID: LIB3828-004Q1-K6-G2
ggttcttctacaatcagacccctttcttaatgaacttacgagcatgtttgagcgaagcactgagacaggctctgtttgggttactcttaaacgatcatctttaaaatcgaaggctcaaaggaacaaaatgaagactgctgaacaacccattgaatatcgatgccttgttcgtgcaactaatgngaaaaaagacaatttctacttcggtgggagcaaaggatcaccagcgtttccaagcttcatatgccaccattcttaaggcccacatgactgccttgaagaaaagggagagaaaggacaggaaaaaggctgcagaggataagaaagaaggtggttcaaagaagccgaaaagggcttgaagggctttactctttccattgccttcaagctgtcatcatcacctagaaaatgcttaggttctttgttttttctttaaaaaaccaaaatgaaatttctttcaatttaagctcattacagtgattacacttggaattttgcttgaattccccttaggtgtgacttcaatggttccttcttttattttcaataggttgataaattatatgaatttacaagagattttggt

SEQ ID NO: 5856 - DNA, 587 bp, Gossypium hirsutum
  Clone ID: LIB3828-004Q1-K6-G3
ctctcgcctcataatatctcccctcaactaaggatctcttcccactttatccccttcttcatttctctctgtcttcttcttcttcttcttcttcttcttttccttcttcctctcctcctcctcctcctcctccttacataactcaattaatcctttggacgaaaaaatggcgaacgcggcatctggaatggctgttgatgatgaatgtaagctgaaattcttggagctaaaagcgaagagaaactataggttcattgttttcaagattcaagagcagcaggtggtggttgagaaagttggaagccctcaagaaacctatgaagatttcactgcggctctacctgccgatgaatgtcgctatgccgtctttgatttcgacttcaccactgatgagaactgtcagaaaagcaaaattttcttcattgcatggtcaccggatacatcaagggtgagaagtaagatggtgtatgcaagctcaaaagatagattcaagagagaattggatggcattcaagttgagttgcaggcaacagaccctagtgaaatgagctttgacattataaaagcccgggcaatctgaatacgca

SEQ ID NO: 5857 - DNA, 189 bp, Gossypium hirsutum
  Clone ID: LIB3828-004Q1-K6-G4
ggaaaaaaactcaaatcaccgatcgaatgaaatggagtgcgtgttcggtttagtgggcaacgactttgccatagtggcggcggacaccgtcggctgttcacagcatccttgttcacaaatctaacgaagataagatcatgatcctcgattctcacaaactcatcgccgccagcggtgaatccggcgaca

SEQ ID NO: 5858 - DNA, 588 bp, Gossypium hirsutum
  Clone ID: LIB3828-004Q1-K6-G5
ggcgtctgtaataaaatctggcgtcttaatctgtcggtgtttatatctgtacgcttcattgcgggtgttaggttgctccaggaacagcccatgatgaccccaaaagcatggacgctattcctgccattgatgctactcaaccctaccgagttgaatggacccggtgttggcattcaccaagattatgtcgacccaaaacgtgctgaaattggtactcttggtcttggctttgaaggtggtcctgataaatggtgttcttctggatgtatccgtaatggtaatcctggtggtttcgtactaccatttcctcaaatttcagaaatcccaacaattacagaaattccacaaatcccacagatcccacaaatgccacaaattccactaatcccacagataccacaagtcccacatatcctcacaagacccaaaaatcctactaatgccaggacagaccgtatgtgagagtggaaagtgttgccgacagggcatgaggtgggacttgtgctgattgtggacagcccaggtgcgcatcatgatgttgccaggctgaaactgtaaagagcaaagggatagaacaggttatggaca

SEQ ID NO: 5859 - DNA, 417 bp, Gossypium hirsutum
  Clone ID: LIB3828-004Q1-K6-G6
gtttcattcctcaaacacaacctacatgcatatcaaaggaacaccagcctctatatcaatcctttagggtctctttcactgccctgccaaactaccatgcttcagggtgatgacctacctgcgagaatgtgcccaatcttgctggggaggagctcagccggtctaaaggatcctgtccgtatcgtccctgctttcttacttattgaaatggggcttccaaatctcacgtcatttctcaaaggaaaaaaatgaaaacaggttcatagactgaataaatattgactgatttctgacctctcggccttatcttcgattggtaaatatagggctttgatctatcttaagtagcgtaatctaacttatatcaacctaataacaaaatgcgagggaaaggacaactttaatagaggctctcgt

SEQ ID NO: 5860 - DNA, 602 bp, Gossypium hirsutum
  Clone ID: LIB3828-004Q1-K6-H1
aaaaacattactttcgaactttcaccgtatctgcacctgacgaaagcccaaacacagatgggattcacattgggagatcggatggggtcaatgttcttaactcggagataaaaactggtgatgattgtgtttcaattggggacggttccaaaaatttggttatcaatggagtaacttgtggaccaggacatggtatcagtattggtagtctcggattgtttaaaaatgaagaaccagttgatggagttacagtaaaaaattgcaccatgactaatacttccaatggtgttagaatcaaaacttggccaggtgctgaacctggcacttgttcgaacattcactttgaggatattaccgtgaccaatgtcagttctcctattataattgatcagaaatattgcccatggaacaaatgcaaaataaatgaagaatcgaaagttaaactaagcaacattagtttcaaaaacattcacggcacttctgcgcgtccagaagctgtcaagattatttgtagtgctactttgccttgtgaaaatgtagaacttgcagacattgaaattacgcatagtggaccgactggacctgcagtatcacaatgttcg

SEQ ID NO: 5861 - DNA, 608 bp, Gossypium hirsutum
  Clone ID: LIB3828-004Q1-K6-H2
cgataatccggatagggattgatgtagatctaacgactcactatcctttggtacaatacatatacccaatggcttgcttacattgcatcaatatatgcctgaatgccaggcgtgccgcaccggacttgtcatattctacgagcaaggacaccataattgatcgaaactatgaggctatgctctctcgcgtatgctatggatagatactgctgttggctactgacaaggaatgagtcacctatgttccccgctgattatgcttcttgaagaagaatctgttgcattgtgatgcttcacgcgtttaatgcgtaaattgagaggaaatttccggtgcaccgatagttcggtcggggttgaaacacagctttgtagtttggcgacggtaactcaagttatcgacccgaaacttcatcagcacttagagacgctaggtggaggtgattatctctttgctttccgaatgctaatggtcttatttcgtcgagagttctcattttgcgattccttatacttatgggagatgatgtgggctctggaatatgatccggacttgttctaccagtacgaagattcgggttcagatatggagaaaaccgaaggtgctaaag

SEQ ID NO: 5862 - DNA, 480 bp, Gossypium hirsutum
  Clone ID: LIB3828-004Q1-K6-H3
cattgaccagttttacatgttatacgatgactttaacatcacgaagctgccactgctcccacaagaggttactggggttgaagctctgaaatcattttcacgtcattttctttcaccatatcaacccttgtgtaaaagaggaacggttgaagatcttgagcgaagaatatcaatgttaaaggtacagatatcagaagctgaagcagaacttgagaaactccgaaaatgagatggaaaggtctgaatggtgttctatatgacttcgtatggtcttttcagtttgccgattcgctcggcatcgcatgatatcatgtgacattgtcgattgaaacagaatttagcattctatttgtgttgctgaataatgtttacataagcataatttaattttagagaaaagaaattctttaaacattgcattttcaccattgacatgtattagatgttgccattatattagtgttatgaaaggattttctt

SEQ ID NO: 5863 - DNA, 593 bp, Gossypium hirsutum
  Clone ID: LIB3828-004Q1-K6-H4
gccaaacctctcacagcccctcgccttttccattattcacttcggcagattccatggcaccaaagaaagacaaagcccctcctccttcatccaagcctgcaaagtctggaggtggcaagcagaagaagaaggtcattttttattattatatgtttcattttatgtatttattggggttcattttctgcttcttatgacttgatcaaaaaagggctttttctttttgggtatttgcagaagtggagcaagggaaagcaaaaggagaaggtgaataacatggtgctgtttgatcaggctacctatgacaagcttctctctgaagctcctaaatacaagctcatcactccctctatcctatctgatcgtatgaggataaatggatcacttgcaaggaaggctattagggaactgatggcaagaggattgattaggttggtgtctgcccattcaagccagcagatttacactagggctacaaacacctagatggttcgttatatttttgcttagttccatgcaatagtgccgttcattgttgagttgacttctaagtgaatttatttactgccgccgcttttttttttttttggttt

SEQ ID NO: 5864 - DNA, 588 bp, Gossypium hirsutum
  Clone ID: LIB3828-004Q1-K6-H5
ctccccgttaatataaggtttgactttgtgaccaacgcattgatacaagatataactagcaaagacagtaaactattccacgttaatgtttttgcatgcaaaaacttaccctcgaacgtttcacggtagaggcaccggcagatagcccaaacacagatgggattcacatgggcaaatcagacggcgtaaatattattggatgtgagattaaaactggtgatgattgtatttctatcggagatggcactaaaaatttggacataaaagatataacttgtggaccaggacatggtataagtatcggtagtcttggaaagtacccaaatgaagagccagttgagggagttaaagtcacaaactgcaccatcactaatacttcgaatggagctcgaatcaaaacttggccaggcgaatctcctgggatagtatcagatgtacattttgaggatattatcgtgaataatgtctcttcccctatcctaattgatcaaaaatattgcccatggagtaaatgcaagataaatgaagaatcgaaagttaaactaagcaacattagcttcaagaacatccgtggcacatctgcgcttc

SEQ ID NO: 5865 - DNA, 593 bp, Gossypium hirsutum
  unsure (1)..(593): unsure at all n locations; Clone ID: LIB3828-004Q1-K6-H6
cggnagcgtgggatttcccggtgccttggaaacgaagaggtatgccacacaagtaacattagctgatggtaagttcatggtgtttggcggtcgggatttcccgacatacgaatttgttcctccagaaggacaaaaaaacactattaatgaagtgatcaatttcccattcttgaaagaacacacgatcccattgagaacaatttataccctttcgttttcctttcaactgatggcaacctcttcgtttttgccaataattgttcggttcttttgaacacccaaacccacacgattatccacgagtacccagtgctccctggtggtgctcataattatccgtcatcgggatgcgcttctctccttccaatcatgcttaaacctaatgaagataggaaatcaatccctgtcgaggttttggtgtgcggtggaacgccgcatgatgcatatacaaaggccgatttgcaacgccctaaggtgtttttgccaggaaacaccgattgtgctcgtattgacatcaccaaaaggaatggcaagtggaagatccaaaacatgccataagctcgactcttgggagacatggtggtgctttcgac

SEQ ID NO: 5866 - DNA, 601 bp, Gossypium hirsutum
  unsure (1)..(601): unsure at all n locations; Clone ID: LIB3828-005-Q1-K6-A1
ngatatctacgtcctacaattccgatacacactaaccccaactggctgaactgcttgagagttgctggcaacaagatcctgcactaagacctgatttttctgaaattatagagattttacagcaaattgccaaggaggtaggagatgacggtgaagatcgacgtaaggagaaatcttcaggaggatttttgtcggcccttaggagaggccaccattaaagtaaaagaccaagatatgtttatacagtgatatgtcggccgggccattcccaccattttcatcaacactgtacagtaattctttttttttcccttgtttcccccatgatttatggtcgtctaaaacaatgtccattcttctgcctgccgccattcctattcgaagataaaaagaaagaattgcattttgtagatttgaattcgttgaatcctgttttaaaagtaattgcatgatctagttaggacaaattttgggttcaatgtgattctctttattgaaaaattgaccttgttttcggagctactaaatcggcattagatcattgtaaaacgtagactcgatttgcaatttgctccactccaaggtatttttcctttttttt

SEQ ID NO: 5867 - DNA, 598 bp, Gossypium hirsutum
  Clone ID: LIB3828-005-Q1-K6-A2
cttttctatgagagagtgttcttatcattaatgggaacagattgcatctgcctcatgatccgcaattgcagcgttccttgcagttggcttttagaattaaagatgatcaagagaacgatgatgcaaagaggcaacggcatgatgatgacgatgatgatgacgacgatgatgatgacatggaaactgatgatcatgatgaatttgaggagaatcatgcttcacatggggatgacaggggaatatatagggtattagggggctctgccaagagatcgagacaagtccaggtccatgaagatgcttgtttccataattcttcaaactcccaggactgcaacaaaagttctttttcttatccaccacccgcacaagctgatataaatcaagcaccacctgaaaacccaagagcagcttggttacaaaagcagtggattgagtctcgctcacttcagctagaagaacagaaactacaaattcaagttgagatgctagaattggagaaacagcgtttcaagtggcagagatttagtaagaagagggatcgtgagcttgaaaagatgagaatggaaaacgagaggatgaagcttgagaatgagcg

SEQ ID NO: 5868 - DNA, 367 bp, Gossypium hirsutum
  unsure (1)..(367): unsure at all n locations; Clone ID: LIB3828-005-Q1-K6-A3
gcgggattacccgctgagtttaagcatatcaataagcggnaggaaaanaaacttaccaggattcccctagtaacggcgangcgaacccgggaaaagcccagcttgagaatcggtcgccatcggcgtccgaattgtagtctggagaagcgtcctcagcgacggaccgggcccaagtcccctggaaggggcgccggagagggtgagagccccgtcgtgcccggaccctgtcgcaccaagaggcgctgtctacgagtcgggttgtttgggaatgcagccctaatcgggcggtaaattccgtccaaggctaaatacgggcgagagaccgatagcgaacaagtaccgcgagggaaagatgaaaaggactttg

SEQ ID NO: 5869 - DNA, 602 bp, Gossypium hirsutum
  Clone ID: LIB3828-005-Q1-K6-A4
cttaatttatctaggcatgaaatcttcaaaattatcatagcttttcttttctgttgattcaaactgttgattcaaactgttcattatatatcaatagtaaatataataaaatttaaactctctttgctatgttgtcattgcatgtatacataatgcaatcacaattttggcatataactgaattttgaattttgtttcttctcctgatcacttgtaatcttttgaagcttgctactagcgattacattgtcagagacactgggaattgcactcctcgttatatgagatgcactaccaatcaggttgtggattttggggaaagtggtcctgttcgatgttcccattgcaaaggttacataaatcctttcatgaagttcattgatcaggaaaggaagtttatctgcaatttatgtgtgccgccagaatttagaagcattgcttgaaaacatcccaacaatgtttcagagtagtacaactgctgagtcatgttttagtgctgcaatcaaggttcattagcatcttgtcctgatgagagtgtagtttatgaagctttaaactttgaattgtcctccgaggtattataattcctagttcaaaactta

SEQ ID NO: 5870 - DNA, 592 bp, Gossypium hirsutum
  Clone ID: LIB3828-005-Q1-K6-A5
cccagcgtccggttggaacttgacttctaacgctgctaggcctaaccctcagggctcctacaaatatggttccattaacattacccgcaccatcaagcttgccaacactgcacaaagagtagatggcaagctccgatatgctcttaatggagcctcctatgtcgaaccaaccactccactaaaacttgcagaatactacggcgtagccgacaaggttttcaagtatgataccattcccgatgagccaccaagtgacaacactaaggtaactttggcacctattgtcctcaacatgacacacagaaactttgtggaaatcatcttcgagaatcccgagaccgccattcagtcttaccacttgtctggctactcattctttgccgtgggcatggacattgggaaatggagccctgagaagaggatgaactacaatcttcttgacgctgtgagcagacacaccatacaggtattccccaactcctggtcagcaatcctattgacattcgacaactgcgggatgtggaacctgaggtcggagatatgggacaggcattaccttgggcaacagctttatgctagtgttatttcccct

SEQ ID NO: 5871 - DNA, 599 bp, Gossypium hirsutum
  Clone ID: LIB3828-005-Q1-K6-A6
atggatttcagtgttctcaatgaagcgttggcctctaaatccttcaataagatcgctgatatatgcgataatctcatgcttcaggtagcagccgagggcgttccttttcgagacgaatggcctttcgcaattcatcttctgggtcacatctacatcgatgatattaatagtgcaaggtttctttggaaatcaatacctcctgcaatcaaagagagccaaccggaggtggttgcggcctggaaaataggtcaaaagctgtggacaagggactatgccggtgtctacgaggctattcgtggttttgattggactcaacaaacacaagttcttgttgccgctttctcagagctttacactaagaggatgtttgaactgctgcaatctgcttattcgacaataagcatccaagatgcagctcaatttcttggaatgagtgaggaagatgcctcgaattatgtactcggacaaggttggacggtcgatcctacttctcgaatgataaccgtgacgaagcaggctatcgtgaaggagcagaagttagacccgggcaaattgcagcgactaactgaatacgtcttccacctcgaacattaaatcat

SEQ ID NO: 5872 - DNA, 547 bp, Gossypium hirsutum
  Clone ID: LIB3828-005-Q1-K6-B1
ctctttctcgctctcccgctccgcagtagaccaacctgccgtcactatgagcagatcaggccagcctccagatctcaaaaagtcatggacaagaaactccagatcaagctgaatgcaaatcggatggttgttggtactcttcgtgggtttgatcagtttatgaatctagtggttgacaacacagtagaggtgaatggcaatgagaaaactgacataggcatggtggtgatcagaggaaatagcgttgttactgttgaagcccttgaacctgttggcagaatgcagtgattctggtttttctattgatttatcactttgatgtatctcttcgctttgttgtttcaatggcatccctgctagtttgggattgggattgggatattttatgtaattgagaatttgtcggaagttagatgggtctccatggaatctgcttttcgtttctcaactttacccgatggattgccctttgtgcatttcaaacggatttaactgaatgtagagaatggttactgcaattcttatttttagtgcttaggcctcattg

SEQ ID NO: 5873 - DNA, 229 bp, Gossypium hirsutum
  unsure (1)..(229): unsure at all n locations; Clone ID: LIB3828-005-Q1-K6-B2
caccacacgttcgnaaaaaagatattgaggagtataggaaaaggtctgtttgaattttgtgtttagaaataaaggaaggaaaaaatgagggaggtgattagtgttcatataggacaagctggaattcaagttgggaattcatgttgggagctttactgccttgaacatggcattcagcctgatgggatgatgcctaccgagggcaatgcaggtggtaaccatgatgcct

SEQ ID NO: 5874 - DNA, 590 bp, Gossypium hirsutum
  unsure (1)..(590): unsure at all n locations; Clone ID: LIB3828-005-Q1-K6-B3
gctcacgtgcccaatgccctgccaccgtgttggccatcggcacatcaaccccgcctaattgtgttgatcagagcacataccctgactactatttccgtatcacaaatagtgagcacaaaaccgagttgaaagagaagttcaagcgcatgtgtngaaaaatcgatgatcaagaagcgatacatgtaccttacagaagagattttgaaagagaatcccaatgtatgtgaatacatggctccttcactggacgctaggcaagatatggtggtagttgaggtgccaaagctaggcaaagaagcagccaccaaggccattaaggagtggggccagcccaagtccaagatcacccaccttgtcttttgcaccactagcggtgtggacatgcctggggctgactaccagctcaccaagcttttaggcctccgcccctccgttaagcgcctcatgatgtaccaacaaggttgcttcgcaggggggacggtgctccgagtggctaaggacttagctgagaacaacaaaggtgctcgtgtacttgttgtgtgctcggagattactgctgttacctttcgtggacctagtgacactcacct

SEQ ID NO: 5875 - DNA, 579 bp, Gossypium hirsutum
  Clone ID: LIB3828-005-Q1-K6-B4
cagcaagcaaactagtcctctttttctgagactataaaaccttctggatgttgcatgtaaatatcctcctcaagttctccatgcagaaatgcagtttttacatctagctgctcgagctccaaatcatccatggccacaataccaagcaaaactcgaattgaactatgcttaacaactggagagaacacatctgtgaagtccactcctggaatttgactgtaaccctttgcaacaagccttgctttatatctgggttcttcaactcctggagtcccttctttctttttaaacacccatttacaacgaatagcctttttacctttaggaagtttcacaaggtcccatgttctgttttatggagtgattccatctcttcatgcatagcaaacatccacttttctgagtcttcacagctaaccacctcagaataattagatagctcttaattcgcatctatatcttcaaccacatttaaaacataagcaactagatcagcctcggcatacttctttggaggtttaatttctcttctaattctgtttttggcgataaagtattgtggtgaagaagcaactctat

SEQ ID NO: 5876 - DNA, 577 bp, Gossypium hirsutum
  Clone ID: LIB3828-005-Q1-K6-B5
aaattaagcataaacttttattaatattaggcagtaatgatagtggaatgaggcagctaatccgtgttgaaaagttgctgctagtcgatgaaagtttggtgatgtcaaaaatattctcgaaactttggtcgagtaaggaaagacatggtgaaattagcagctcggatacatcagacagccatggatctgtgaatgcggaagaaacaaagtccaccccttctagaagtaggagacattcactatcttagttgaggatgatgcccttagcagagcattgaaacttgccttttgtctggctttgtaaaattgtctaagaagatgacagtaggagactagaaccaactgatttttctagctaagcttaccactttggatgtttcgagcaaatggaatgatgcacgttgaataacccagcgattgacttgtaacaatctaaattgttcattgttgctacaaatgtacccagaagaaatgagaacaaagaatcttaggctgctaagcttcttaaccaaataaaaatataatgcaataaactttctatataatattaaatcgtcaacgtattgatgagtttttc

SEQ ID NO: 5877 - DNA, 587 bp, Gossypium hirsutum
  Clone ID: LIB3828-005-Q1-K6-B6
cccagcgtccgtctcactctcctatctctcaatcgattttaatcactatggccaagagctcctttaagttggaacatcccctcgaaggaggcaggctgaagctgctcggttagggaaaagttccggacagaatcccggtgattgttgaaagggcggagaagactgatgtacctgagattgataagaaaaaatatctggttcctgctgatctaacagttggccaatttgtctatgttgtacggaagaggattaagctcagtcctgagaaggctatattcattttcgtgaagaacattctacccccaactgctgctatgttgtctgccatatacgaggaaaacaaggacgaagatggttttctttacatgacttacagcggtgaaaacacatttgggatcattgaggcacatgatcaagatatatccatgtgagtatggcttgcgaaaaaaaaaaattagtttaagatgtaaatcctctttgctctgtgttagttgtaggtggatgttgtcttgcttatattattagttcaatattctgtgttaaatggcctcctttgaccatttcttctgaagttggtaactaatata

SEQ ID NO: 5878 - DNA, 587 bp, Gossypium hirsutum
  unsure (1)..(587): unsure at all n locations; Clone ID: LIB3828-005-Q1-K6-C2
ggcctttccttgcttaccctaatctcanagtctcacatggcaactctctacactagnaaacaactgtccattcattgtctggccaggaacacttactggcgctggtatacctcaattgtccaacactgggttcgagttagccccacaagcatggaatgccattactgttattgctccttggtcaggcagactctgggctcgaacccaatgctcaacctcctccggattgttcacttgtgccactgcaaactgtgggtcgggccaggttgcctgcaatggtgtaggtgctgtccctcctgcaacccttgtagagttcactctagcaccaaatggaggacaagatttctatgatatcagcctagtagatggctttaacttgccgatttcagtaaccccacaaggcggctcgggtccaaactgcaccataactagctgttcggcaaatgtgaatgcaatttgcccaccagagctgattgttaaagcatcttgtgggaatgccatagcctgcaaaagcgcatgcctagctttcaatcagcctaagtactgttgctctggtgaatacaattcaccccagaaatgtgaaccca

SEQ ID NO: 5879 - DNA, 597 bp, Gossypium hirsutum
  unsure (1)..(597): unsure at all n locations; Clone ID: LIB3828-005-Q1-K6-C3
cagcgacgggatctgctttgacaaanagcgaggactgcgttggcattcgttacgctgaaggcggatgggcaaagggaattcatgttttatcgatcccctagtgcggatatgttgttgaaagaatcggagttgaaattggatctcattaagcaagccaagatattccattatggatccataagtttgatatcggaaccctgcaaatcagctcacatggccgccatgaaagcggctaaacaggctggggttttgctttcttatgaccctaatgttcgcttgcctttgtggccttcccctgaggctgctagggatgggattaagagcatatgggatcaagctgattttgtcaaggttagtgatgatgaggtggaatttctgaccaaaggagaccctaaaaaggatgatgttgttatgtctttatggaatgacaacttcaagttgcttattgtcactgatggaccagaaggttgcagatacttcagtaataaattcaaaggaaaggtgaacggctacaaagtgaaaaccgtcgacaccaccggagccggcgacgcttttgtcggtgcatttctacaagctgtagccaaagatccaaatctc

SEQ ID NO: 5880 - DNA, 592 bp, Gossypium hirsutum
  Clone ID: LIB3828-005-Q1-K6-C4
cccagcgtccggggaaaagaaaaaagtacagagtaagggagaaacgccttcaaaaaagaagaaaaagactttaaaaagagggaaaaaatagtaggaaataattagctttcgatttagaaacattggatttcaaatctcagttcttcaatttctgaaagaaagggaggttcttggccatggcaaattctaagggctcaacaaacataaggaactttatggtttctggaaagcatgctttacttcctccgaaaagtccatttcccactgtttccccagcatatactgattatgtccccaacagtgttattgggtcaaaagcagttcaaaagcctagagaaggaaatacacatcaccaatgcacttcctctgaaagcctacgaatggaggaacagccttcttggcttgacgatctccttaatgaaccagagactcctgtgcgcagaggaggtcatcgacgttcttcaagtgattcttttgcatatattgatgcatctaatgctcctaacctagattatgcagctcaagatgagttcagatatcaaaatatgattaacacaccatcttgggcatctcaagatgctaggctttccta

SEQ ID NO: 5881 - DNA, 579 bp, Gossypium hirsutum
  unsure (1)..(579): unsure at all n locations; Clone ID: LIB3828-005-Q1-K6-C5
gnaatacttggtcctgccattgctgaccacaaaacttacttgngaattatgtgacatggttacaatcaaataatgcacgtgaaggaagggcttataaggaatcttttgagaaaaaatggccctccattaccttctcggacaaaattatcctctggagacctatgaaatgctgagaaagttggatgaactcagcttgagagcgatagcgaacttaagtgccaatgctacttccaaacaatttgaacgagaagttcgtgaagtgttcttggagacttttggtggacttggagcagctggtttgtcagcttcacttctaacatctatattacctaccaccttggaagatcttcttgctctcggcctgtgttctgctggcgggtttatagccatttcaaatttcccagcccgtagacaaggaataatagaaaaggtgaaaaagacagcagatgctttaggacaagagcttgaagatgcaatgcagaaggatcttcaagaaaccacccagaatttggaaaagtttgtaagaattatcggggagccttatcgagatgctgcgcaaaatagactggacaaacttct

SEQ ID NO: 5882 - DNA, 597 bp, Gossypium hirsutum
  Clone ID: LIB3828-005-Q1-K6-C6
caagcagattgcaaagggagttgaaaataaaccagtcctctcagtgtccatatgctgttgtttgttatcagtctttctataacaatggtgccatttcaatcatcttggagtatatggatggtggatccttagcagactttctgaaaaagttaaatcaattcccgaaccctatcttgctgtgatatgtaagcaggtgctcaagggtttgatatatcttcaccacgaaagacacattatccaccgtgacttaaagccatctaacttgttaataaatcatagaggcgaagtcaagatcactgactttggagtgagtgcaataatgacaagcacctcagggctagcaaacacttttgtcggcacatacaactatatgtctcctgagagaattattggtggcaattatggcaataaaagtgacatttggagcgtgggactggtgttgcttgaatgtgcaactggtcaattcccatattccccaccagaccaggcagcaggatggacaaatttttatgagctcatggaacaaattgttgaacaaccaccaccttgtgcaccttcagatcgattttctcctgagttttgctcgtttatttctgc

SEQ ID NO: 5883 - DNA, 559 bp, Gossypium hirsutum
  unsure (1)..(559): unsure at all n locations; Clone ID: LIB3828-005-Q1-K6-D1
acaacaacaatggctggacacacagtttacaccctctcagaagtgtctcgacacaaatccaanaacgactgttggcttgtcatcgatggccgagtaacccggctctctttactcacccaattatctttacttatttatgttgacaaataatcagagacttgactgattctttcaggttctgaacgtgacaaagttcatggaagaacatccaggaggagaagaggtgttgttggaatcagcagggaaggatgcgacgaaagaattcaacgatatcggacatagcaagtcagctcagaatttgctcctcaagtatcagattggtgttctccagggtcacacttcaaagaataatgaacaggttggttcaaccgaggagcccaaaaagaaagagatgagtgcattcgtgatcaaggatgacctgacgcctaaatatgcggcagtcgtcgagttcgctgccccactcctggttgctggttcctatttctgttacagatacctcacactaagctcataagtgctgtaatcagtttggttttcaagttcaacctcaacatgcccc

SEQ ID NO: 5884 - DNA, 115 bp, Gossypium hirsutum
  unsure (1)..(115): unsure at all n locations; Clone ID: LIB3828-005-Q1-K6-D2
naaaaaaaaaaaaaaaaaaaaaaaaaaaaaaaaaaaaaaaaaaaaaaaaaaaaaaaaaaaaaaaaaaaaaaaaaaaaaaaaaaaaaaaaaaaaaaaaaaaaaaaaaaaaaaaaaa

SEQ ID NO: 5885 - DNA, 594 bp, Gossypium hirsutum
  Clone ID: LIB3828-005-Q1-K6-D3
tccgcaccacgcgtctcgaaaaagtgataatcaacttgatcggaaggaagaagattgggaagcgagtcatacgaggaagccattgcagctttgtcgaagcttctcagtgacaaagctgatctcgggagtgtcgccgccgcaaaatcaagcagataacagccgagttagaggcagctgccgattccactcagttcgacccggtcaagcggctcgagaccggtttccttcacttcaagaaagaaaaatttgacaaaaatcctgatctgtacggtgcacttgccaaagggcaaagacctaagttcttggtatttgcatgctccgactctcgggtgtgcccctcccacatactgaatttccaaccaggggaggcttttatcgtccgtaacattgccagcatggtcccgccctatgacaagaaaaaatactctggagctggggcggccatcgaatacgctgtcctgcatctgaaggtggagaatatactaattattggacacagttgctgtggaggtatcaaagggcttatgtacatcccagacgacgggaccactgctagtgatttcatagaacaatgggctagcatctgtacaccag

SEQ ID NO: 5886 - DNA, 407 bp, Gossypium hirsutum
  unsure (1)..(407): unsure at all n locations; Clone ID: LIB3828-005-Q1-K6-D4
cacatattcacacttttaataatatttaaaatgngagaaatcttcccgttcaatgtcatctttagtccttcttatgttggttcttctagcaacagagatgggacctatgacagtggaaggtagaacatgtgagaccaaaagtagtgaatacaaggggatatgcttatttgatgctaattgtgatagtatctgcaaaatagagtcaggtttcgatggtgggcattgccatggcttctttcgcagatgctattgcactaaaccttgttaaatgagcaatctattaagatttcattatacttaaaagattgcctcatttccgcttgttatgtgtgtgcttgagagttgagagaataatacatattggtgtacattgaattatattactattaaatatatctataattttt

SEQ ID NO: 5887 - DNA, 585 bp, Gossypium hirsutum
  Clone ID: LIB3828-005-Q1-K6-D5
gtgtacagacacctgccacccggacttcagcatagacgatatcggctacactgcctcatggaaatctgaggaaatgacgaagcaaatgggatgactcgaacctatcagtgatccttgtgaagcgtgatgagcaagactctatgagggaatcaagcagttctgtgtagcaggtgaaagagcagagtggaagctcgatacgctatgtgatctttatgatacattgacaatcacccaagctgtcattcattgcaacacaaaacgaaaggcgattggctaactgagaagatgcgtaacactaacttaacggcctcgacaatgcatggggatatgcctcagaaggaaagagaggcaattatggcagagttccgggatggcgcaacccgtgtccttatcacaacagatgtgtgagctagggggctcgatgctcaacaggattgcctgaggataaattatgacctcccaaataatcgagagctatacatccataagatcggtcgatcaagtcgatcggagaaaggtgtagctataaattacgggaaaagtgatgacatcaagattcttagagatatcgagcagtactatagt

SEQ ID NO: 5888 - DNA, 520 bp, Gossypium hirsutum
  Clone ID: LIB3828-005-Q1-K6-D6
tccatttattggtgaataatgcatgctcttcatgtttggcaattaatatagaggagtcgttattttggacgggagacaaactaaattttcatcctggctaactatttcaagagaacaacttaactgagttaccatgagattcttccttttcaggtgaatgttactgctgaccaccgaattatctatggtgctgatttggctgccttccttcagaccttctcaaagattgttgagaaccctgaaagcctcactttgtagatgattctcagatttatgcaatgaattcacaccgagtcttctaatttcacggcaaagcagagctgttgtctgtgtattcaaacagatggcctagctgaggaccttttctctgtatcagtacaatttgtatcgcgatacattttttcttttctttttaaagtatttcaggtgcaatctcagattgagttgaattagatattggaagaaacagaataactacgggatgtttttgatagaattaaatgaaaattgctttattaag

SEQ ID NO: 5889 - DNA, 574 bp, Gossypium hirsutum
  Clone ID: LIB3828-005-Q1-K6-E1
gaatatttacgaattctccgcctggggagaagactgcaggtgttatcgtcagataaaaaacaaaccttacccgaagtcacgttattgtcgtggtgttcctgatcccaagattaggatttatgatgtgggaatgaaaaagaaggtgtggatgagttccctttctgtgttcacttggtctcttgggagaaggaaaatgtctctagtgaagctctggaagctgctcgtattgcttgcaacaagtatatggctaagtatgctggaaaggatgccttccacttgcgagtccgtgttcacccattccatgtcttgcgtatcaacaaaatgctttcatgtgctggagctgataggctccaaactggtatgcgaggtgcttttggcaagcctcagggaacatgtgctagagtagccattggtcaggtcctcctttcagttcgttgcaaggacagcaacagtcatcatgctcaagaggccctccgacgtgctaagttcaagttccctggtcgccaaaagattattgtcagcaggaagtggggtttcacgaagttcaaccgaactgattatttgaaatataagt

SEQ ID NO: 5890 - DNA, 575 bp, Gossypium hirsutum
  Clone ID: LIB3828-005-Q1-K6-E2
ggttccgatcggtgttgctgtctctgccccttcttctgttctttctaatcggagaatatccgttagattttcggaatttcgtggtctcaagattaaacccaggttggcgtcgctgactcagtcgaccagatcggcgattcaggatcggcgtcgagtcggacgtgttgtttgtgaggctcagaacacagctgttgatgtgccagcaattaaggatgaaacatggcagtcactagttcttgaatgtgaattgcctgttctggttgaattttgggctccgtggtgcggaccttgccgtatgatccaccccataatcgacgagctgtcgaagcaatatgctgggaagctcaaatgttacaaagttaacaccgacgagagtcccaacatcgcaactcgatatggaattcgaagcattccgactgttatgatcttcaagagaggggagaagaaagatgcagtgatcggtgccgttccaaagtcgacattgacaacttgcatcgagagattgttgtagggttggtgacaatcggtgggtaagggttcaggtcggatttattttgggttaggaaaaatttggg

SEQ ID NO: 5891 - DNA, 591 bp, Gossypium hirsutum
  Clone ID: LIB3828-005-Q1-K6-E3
gctggttgtataagtggttctgagaagttggttacagaaattcgtactttgcatcatattttgggtggtactctcaacccaaatgctgcgtatctaatcatcagaggcatgaagacactgcatcttcgtgtacagcaacaaaattcaacagcattaaggatggccgaagttttagaggcacatcctagggtgaaacgcgtctattatccaggcttgcctagtcatcctgaacatgaaattgccaagcggcaaatgactggctttggtggtgtggtcagttttgaggtggatggagatctcatgaccaccatcaagtttgttgatgcattgaagataccatacattgctccatcatttggtggctgtgaaagcattgttgatcagccagctataatgtcctactgggatcttagccaagctgagaggagcaagtacgggattttggataacttgattcgattcagcttcggggttgaagacttcgaagatttgaaggccgatatactgcaggccctggagaccatagcttaaatagcgttttgatgtgtttagtatttttcctagtctaaatggagcatgttgatctccaaa

SEQ ID NO: 5892 - DNA, 587 bp, Gossypium hirsutum
  Clone ID: LIB3828-005-Q1-K6-E4
actggctaccaaatagcagtaataattctagctttggggatgaaatgtctgcacgtggtgttcacgtaccgaaaaacggaactgcaaatatatcatcagaagaaagtcccaagtctcgggagtgttatgatgtacttttgtattttggaatagtggattttttccaaaattacagtgtgatcaagcgaatcgagcacgcgtacaagtcgttgcagttcgaccgaaagatgattgcagctgtaaacccgaaagcatattcgtctcggtttcaagaattcattagtgacatatttaaagcggacgacacgcccagtctccccaccgagctcacaaatggatgcagataaaaaaggccatgcaatggagtaggttttgagcatgtccagaaattatggaagatgtaaccatgtagacaaatattctgtaaggttgagaattatcccttgattacttgaaaatagaaacaaaaatccaaaccagaaatttatagtttagttgcttgtgcacgctgagcttctgattaaatgaagcttttctataggtgcaatgtatcccaatctctagttttcatacagaaatgcaaacta

SEQ ID NO: 5893 - DNA, 532 bp, Gossypium hirsutum
  unsure (1)..(532): unsure at all n locations; Clone ID: LIB3828-005-Q1-K6-E5
cggccgcgtgggctggnttggaggatctatcttggcatcactcagcaccttccagcagatgtggatttccaagggtgagtatgatgaatccggtccatccattgtccacaggaagtgcttctaagttttgtaattgcttttgatggtgatctacattttgcatttagttggctttttttgtgtgcgatgttaagtgaagtccaaagtctggtttatgtggggagagttagggatcattgtaggatggtgtacttgatattgacgtattattattttagcctttcaccgtatcaccaccattaagatgatgggtcctatggagatggcggtgggcggacaattggtgcttaattccttccttataatccatctttgaaccatgttgcttaaaaggatgtttggagctggagactggattgtggtgcttttttattttattttattatttaatattcaagggttttgagaacattaatgttcatagctattattgtacgagattttttttgaaaaatagagtcagtttgcggtc

SEQ ID NO: 5894 - DNA, 316 bp, Gossypium hirsutum
  Clone ID: LIB3828-005-Q1-K6-E6
gaaacctcaaagttcaggaagaagtggcggttgtcaacattgtattcctcatcttcctcattgttgtctactctgttggctgttgtgctttcagaaacagtaggagagacaatgattatcatcaaggctggaagccttgagagcttgttttttctgattaagaagggtttagtttgttcggatctgctattatttagtttctatgtttgcgttttagacctttatttttattgtatagatttttatttccttgtctagttagtagaacaattaagatatcatctaatgctcatgtataaaagatattttctatgtt

SEQ ID NO: 5895 - DNA, 289 bp, Gossypium hirsutum
  unsure (1)..(289): unsure at all n locations; Clone ID: LIB3828-005-Q1-K6-F1
ggcgcacctggcagagtgtaaacatgtggctgcactctaggataaatatcatgcttcaaggccatagatgctgtatacggagaggtacccacaggtaatcataaaggaactttattaanagctacgaggaagaaacaacatgggacaagaattacaagctccatcaagccactcattttgcttgtcttaattctgaactcagatgctccttgtagtctcaataacagatgctccttgtaatttaaggggttttttaataatcggtagttatcatcacaataattaactc

SEQ ID NO: 5896 - DNA, 573 bp, Gossypium hirsutum
  unsure (1)..(573): unsure at all n locations; Clone ID: LIB3828-005-Q1-K6-F2
tgggnacctagcatcatgccaaattgatatgctttcactattaccaactttacaagtcattccatcatgcaagactttcctcgttgcctaaatactcctccaggtatacgaagggtaatttcctaactctgcttacatgaagtctgtgcttggataatatttagcctttaaagtctttgctaataatgaatctagatactccaataaacgccagcttcgttttaggctgttttacccaaataaccccaaaaaatattatatttacaaaaataacctaagtttaaaaacaatcactaaaataatctaaaattaacagtatccactctttttttgcaccaatgattggctaatcattttgttagacttaaaaacattatttttttgggttctggcctgtcaatggtcggaactcatgtatttttttaaaaaaattgtgtaatactgaaatacggatgtacgaaaaagaaaaaaacaaaaaaaatttttggtgctggcctgtcaatggccggcacccagtacacagtacaaaaaaaaattaatttttttttcgtgtcagaatcagataaaaaatac

SEQ ID NO: 5897 - DNA, 603 bp, Gossypium hirsutum
  unsure (1)..(603): unsure at all n locations; Clone ID: LIB3828-005-Q1-K6-F3
ggnatctacttcaagcaaaaccaacanatttgaagcctaacgttgtggttgctaaggatggtagtgngaaaatatgataccatcaccaaggccttggctgaagtccctctgaaaagcccgaatcgatttattattcacattaaggctggtacttacaaggaacaagtccttttacccaaggagatgactaatgttatgttcatcggtgatggcccaactaagaccatcatcaccaatgaccttaactgcattagggatcatccgcttaaaacattcggcactgcaacagttggtgtggatggggctggtttcatggccagggacattggattcgagaacacagcaggaccccctggtcatcaagcagtagcttttagggcaacatgtgatatggttatcatgttcaattgtcatttcaatgggtaccaagacaccctttatgctcacaaagagaaacaattttatagggattgtctcatcagcgggacagtagatttcatctttggggatgcggcaagcgtgttccaaaattgtcagatcatcgcaaggaagccaggtgaaaaccagaacaacatgattacagcccacggaaggaaattccca

SEQ ID NO: 5898 - DNA, 583 bp, Gossypium hirsutum
  Clone ID: LIB3828-005-Q1-K6-F4
atctgatcaaagaacacaaaacaaaaggttgcttagagtcccagttagagaaatgggtcgtggagtcagcagtggtgggggaccagagttctttgggttaccttttcgggagcggagaagctccacctccaaaaccaaccaacgtcacgagtactggcaccaccagtaatgaagttcctcagaagcagattgaggttgtgaaggaaactgtgcaaaaaccgaccactgcttcaccatcatcgggtgatgccaaggagatccctgcaggtgttccagggagcaaaacgaacaactatttccgagctgatggccagaattgtggcaactttcttacggagcgcaggacaactaaggttcacgcagcgcctggcggtgggtcttccttggattacctgtttggtggcagcgagaagtgatatgtgagatattaaatgttggaaccactgcttatggttgtcctaaaaggtttgggacagaaaatatttaagtataaacaatatgttggtttcccttccatcctggactttctggaaacttcaaattaagctttttcctatctaagcaactgcttaccattagttaa

SEQ ID NO: 5899 - DNA, 566 bp, Gossypium hirsutum
  Clone ID: LIB3828-005-Q1-K6-F5
cagctttgtttttgagcccgggtggaagggtcaaactgaattaccgggaccaccatgccgacatgtcgagggaaccaatgaagaagattgctttgcacattcaatcctcttagatgttgaaacagcacatattaggccacttaggttgaactatgacacttggtgttcatcgggtgctcttgatatcaatggtcgattggtaagtaccggtggttacaacaatggctctgacaccgtgagaatccttgacttatgtgatacttgtgagtggcaagaatttcccggtgcacttggaaacggaagatggtatgccacacaagtaacattagctgatggtaaattcgtagtgttcggcggtcgggatttcccgacatacgaatttgttccgccagaaggacaaaaaaacaccatcaacgaagtgatcaatttcccattcttgaaggaaacacacgatcccgttgagaacaatttatacccttttgttttcctttcaactgacggcaacctcttcatttttgccaataatcgttcggttcttttgaacactcagacccacacgattatcc

SEQ ID NO: 5900 - DNA, 603 bp, Gossypium hirsutum
  Clone ID: LIB3828-005-Q1-K6-F6
ctcacttcctataataactccccccattgaatcggattccatttcctaaaaaattgattcaccaagagatggatattgatcatgaatgggtcttcctccctgataatagattcctggatatcaatcaagaccatggaggaaaacgagtttctgattcaaaccttgttttcttcacagactacttcgatgaagaacagtctccgccatcagggaattcagggaaggtagctaaacaagttgtcccagttccatttccattggaaccaagaatccttaaggttccagaaaatgaaatagggaaggaaatcaccaaaagggtacctcttgatttcagttctacaccatccatgattcttgagaagatcaaagaaggtggtatggaatcagttggaggtgataaagaagtgaagacacaagtttcgtttaggaaaccaagttacaacaacaatgaatctgtcgacatgaccaacaaaatgaactcaccaaggtccactacgaaaggagttatccctcaattggatgctgcaggtacgtttaattttgatgatgaaactgagtttttggagaacatgaattcccccaaaataaaagatctggtggaaa

SEQ ID NO: 5901 - DNA, 586 bp, Gossypium hirsutum
  unsure (1)..(586): unsure at all n locations; Clone ID: LIB3828-005-Q1-K6-G1
caaaccacaaagnaaagcttggagagagacccaaaaacaatgtctaaggaagtgagtgaagaaggacagggtcgtaaggactatgtggaccctccaccggcacctctgattgatatggctgaactcaagtcatggtctttttacagagccctcatagctgagttcatagccactctcctcttcctctatgtcactgttgctaccgtaattggtcacaagaaacaacaagatgcatgtgatggtgttggtctcttgggtattgcatgggctttcggtggcatgatctttatccttgtttactgcactgccggtatctcaggtggacacattaaccctgcggtgacttttgggttgtttttggcccgtaaagtatctctcatcagggctgtggcttacatggtgtcacagtgcttgggtgctatatgtggagttgggttggttaaagctttcatgaagcatccatacaactcccttggcggtggtgcaaacacggtggcttctggctacaacaacggaactgctttgggagctgagattattggaactttcgtacttgtctacactgttttctcagccaccgacccca

SEQ ID NO: 5902 - DNA, 590 bp, Gossypium hirsutum
  unsure (1)..(590): unsure at all n locations; Clone ID: LIB3828-005-Q1-K6-G2
caacgcttcagtacagtcgtcggcgtagcagnanagaattaaaaagaaaaaaaaagcgaaaatggccgcacccgaagctcctctctgctatgtcggcgtcgctcgccaatctgctgcttttcgcctcatgaagcaaatggggtgggaagaaggagaaggtcttgggaaagataaacaagggatcaaaggtcacgttagagttaaaaacaagcaggatactaccggtattggattagataagccaaatccgtgggcttttgatacagctcagtttgatagtattctcaaaggattgaaagtgaagcaagcagtgcaaaccaacgatgaagctgaaaagaatgaaaatcaagtggaaacaaagagggatgagcctaatgacactgaagaacaagttgttaaggctacccggccgcagggaagatataagaaaagagaaagagggaagcttgtacatgcatattcttcgaaggatcttgaaggaattcttgccaaaaaggttgaggagtcaccacaggtaaatcctgacgtggttgctgaaatggaggtcatagagacaactgaaacaaatgatttttccactgaaggaaata

SEQ ID NO: 5903 - DNA, 587 bp, Gossypium hirsutum
  unsure (1)..(587): unsure at all n locations; Clone ID: LIB3828-005-Q1-K6-G3
ggaggaaagcacgttgtattgcaatgctgcaggcatttcaggaggctatcagagactatntccacaccacctgaaaaaaccctcaccagagatttaacttccaaaattggtggttttgtttcttttctgattgaatgccgcccactttctatgagtatgggaaatgcaatcaggtttctgaagagtcgtattgccaggttaccactaactctctctgaatcagaagcaaaaacaaccctttgttctgacattgatcgtttcataaatgagaagatagtgcttgctgataaggtgatacttagacatgctgctacaaaaatcagagatggtgatgttcttctgacatatggatcatcatgtgttgttgaaatgattcttttgtatgcccatgagcttgggaaacaatttcgtgttgtggtggtagactcgcatccgatgcttgaaggccaaaagctacttcgtaggctggtggtaaagggccttagttgtacttatactcaattaaatgctatttcttatgtcatgcacaaagtcactcgagtttttcttggggcttcctctatattttctaatgggactgtatattc

SEQ ID NO: 5904 - DNA, 566 bp, Gossypium hirsutum
  unsure (1)..(566): unsure at all n locations; Clone ID: LIB3828-005-Q1-K6-G5
anactattgaggctgctgaaaagctgtggctactttgaacgatgaacatgactggagaaatggcatgcatgttaagcttcttgagcgaaagggtaagcatggacagcgaaagcaagcttggaggggacctgctcatgaaaaaaacatcaatgctcaggtatctgatcaaactggaaccgaggagaaaaatgcttcaagtgagtatcatgaagatataccagatgatgaggatggggagcatttgtccaaagagaaaaatggggttcgacctagaaacagaggacgagggaggagacagaaaaatcgtggtgccaatggacacggccatggaactacatcctcatgccatgccgtagaaccatcgaagccaccaccgggacctagaatgcctgatggaacacggggattcacaatgggacgtggacggtctccaatttctaaaccaagttaatgatgtggtattttgattatcatgcatatggtttcaaaggccaagtgtgaaaaacaaaaacccaaatggatttatctgtgttttataaatggtgatggtgttatcttttcttttg

SEQ ID NO: 5905 - DNA, 582 bp, Gossypium hirsutum
  Clone ID: LIB3828-005-Q1-K6-G6
ctcaatctttatctccttcattgtttgtttttgggttagaaagctctgtttttttattacccttttcatcaaaaagcttcaatctttcaaccatgttgcttaaagcttcccctgctttttctttgttgaagaatccccaagttgaaactcgggttcctctgttttcaagaaacggttctggggttgggtctggggctgttgttgtttgtgctaccaaaggagccaataataagccattaacaggtgtgatttttgagccttttgaggaagttaagaaggaacttaatcttgtcccaactgtgcctcaaatgtccttggctcgtcaaaagtttgctgatgagtgtgaagctgccatcaacgaacaaatcaatgtggagtacaatgtttcatatgtctaccatgctatgtttgcctattttgatagggacaacgttgctctcaagggtcttgccaagttcttcaaggaatcaagcttagaagagagagagcatgctgagaaattgatggaataccagaacaaaagaggtggacaagtgaagctgcaatccataataatgcccctctctgagtttgatcatgcag

SEQ ID NO: 5906 - DNA, 624 bp, Gossypium hirsutum
  Clone ID: LIB3828-005-Q1-K6-H1
ggtcgaacccacgccgtcccggaaaaaaagagtgattggcagtctgtaactaaaatctgcaatcttaattctgtcggtgtttttatctgtaccgccttcagttcgggtgttaggttgctccaggaacagcccaatgatgaccccaaaaaatggacgctattcctcccattgatgcactcaaccctaccgagttgaatggacccggtgttggcattcacgaagatcatgttgtcccaaaagtgctgaaattggtactcttggttttggttttgaaggtggtcctgataaatgttgttcttctggatgttccggtaattgtaatcctggtggtttcgttctaccatttcctcaaattccagaaatcccaagaattccagaaatcccacaaatcccacagatcccacaaatcccacaaattccactaatcccacagatcccacaagtcccacagatcccacaagtcccaaaaatcccactaatgccaggacagtcgggatgtgagagtggagagtgttgccgtcagggttgtggtgggacttgtgctgagtgtggtcagcccaggtgcgcatcaggatgttgccaggctgaaactgtaaagagcaaagggatagaagaggttatgga

SEQ ID NO: 5907 - DNA, 599 bp, Gossypium hirsutum
  unsure (1)..(599): unsure at all n locations; Clone ID: LIB3828-005-Q1-K6-H2
ccgtccgctcaaaaacagnaacaaatacaaaactctcccttcatcttttgtttctttttctttagcagtgataatggttgagcctgcaacagcgacccaagcagcagctccggtgatgcctcagctcaaagatgagcttgacattgtgataccaactataagaaacttggacttccttgagatgtggaggccattttttcagccctaccatcttatcattgttcaagatggcgatccttcaaaaaccatcaaggtccctcctggttttgactatgagctttataacaggaatgatatcaacaagattctgggtcccaaggcttcttgtatttccttcaaggactctgcttgccgttgctttggttacatggtgtctaaaaagaaatacatttttaccattgatgatgactgctttgttgctaaggacccatcaggcaaagcagtcaatgcacttgaacaacacatcaagaacctgctatgtccatcaactcccttcttcttcaacaccttgtatgaccccttcagagagggtgctgatttcgtccgtggatatccattcagtctccgtgagggtgtcccaactgctgtttctcatggcc

SEQ ID NO: 5908 - DNA, 592 bp, Gossypium hirsutum
  unsure (1)..(592): unsure at all n locations; Clone ID: LIB3828-005-Q1-K6-H3
caaatcccagcttagcaacctcacaaatttttnntctttaaaaaacccatctttctggttctaaactcacccccatccatctcttttgcatataccttcagtcactaagcaatagcagccactactgcaaatggcttccaacaaaacctgtgctgtccttacagttttctctcttcttcttttcaacttatcattcaccaatgcttgccattcatgcaagccaccaaagcccattccaccacctgctgcatgccctccaccaccagcaaagcctgcttcttgccctaaggacacattgaagctaggtgtttgtgctgacctacttggactggtaaacatagtggtgggaacacctccttcgagcaaatgctgtgctttgctccaaggcttggctgatttagaagctgccctttgcctttgcaccgccattaaagccaatgtgcttggggccaacctcaacatccctattacccttagcttactccttagtgcatgtcagaaggaaatccctccaggcttcaaatgttgattttttttaagaagcacaatcagttgttgatgttgcctaatggctgagtttgctctactttaa

SEQ ID NO: 5909 - DNA, 609 bp, Gossypium hirsutum
  Clone ID: LIB3828-005-Q1-K6-H4
tcgaccacgcgtccgctctcctttcatggcaaataagattcccatggtcatgaccatgaggaatttgagtttagtgaagtctttgtgcatcaactgatccataccatagagtttgtgcttggtgcagtttcaaatacagcttcataccttcgtttatgggccctcagtcttgctcactcagagttgtcagttgtgttctacgagaaggttcttcttcttgcttgggggtataacaatataatcatcctcattgtcggcataatcgtctttattttcgcaactgtcggcgtgttgctaattatggagaccctcagtgctttcctacatgctttgcgacttcactgggttgaattccagaacaaattctacgagggagatggttacaagttctatccattttcattcgcattactcgatgatgaggatgattgatgcgatgcaccgaatcgaatacaaaagaatgtatgttgaatggacttgagcgtggataggtaagaagttatgttgattttttcatttaaacatgacgaaaattgggaatatagatgtaccctatatagttggagttgaggaggcttttattaaagtcgcctaaggacacactgcttc

SEQ ID NO: 5910 - DNA, 595 bp, Gossypium hirsutum
  Clone ID: LIB3828-005-Q1-K6-H5
ccgatgtaaagaagccttactgtaactgtttgattgatctctgtgttaacttagatttgttggaaagagcttgtgatctgttagagctgggactttcactagagatttatgccggaatacaatcaaggtctccaacacaatggtccttgaatctcaagagtctatctctcggggcagctttaactgcactacatgtttggatcaatgatttgacaaaggtacaggagtctggggaggagcttcccccattgctcggaatcaataccggacacgggaaacacaaatactcggagaaaggattggcaactgtcatcgagtcgcatttgaaggaactagatgctccattccatgaagcctcagataaagctggctggtttttgacgacaaaagttgccgccgagtcatggttggagtcgagacgttcacccaacttggtagttgcataggttgtgtgtgttcatgaacgagtctttgccctaggtcagttctttgcatcaatatataatgtctagaaacgaaatattttctgactcctctttttcatctttattagcatcctctaatttaatggtgggaaaattttgtagcatggtac

SEQ ID NO: 5911 - DNA, 588 bp, Gossypium hirsutum
  unsure (1)..(588): unsure at all n locations; Clone ID: LIB3828-005-Q1-K6-H6
ggccgctactagctacttttttttaaaaaaaacatgaanagttttcccttattgttttgtgcgtggtgactctagtgatggtgttgttttcaggtgcagaggcagcgccagtgccgaatgtgataaccccttagagtatagctcatgcttgaatgcgtacaagaagccacctccatcagccggttgttgccagaagatgaaggaacaagcaccatgctattgcaagtacatgaagatagaagatgtcaaacgtgtttttgacagagttgagattgcgaaaatggctaaattgtgtggagtttcatattcttccacctgctagaatcccgtttggtttcatttgactatctctggatgagataacctgacatctcaataaatgaaaattttatttgaaaactatttttttacccataatttcgactataatgtacttgtgttcttttttttttggaataatactggtggtttgctattaaaaaaaaaaaaaaaaaaggcggccgccctnnnnnnnnnnnnnnntttttttttttttttnnnnaaatggaacgtnacctatggcccctttgctccttggggattgccaat

SEQ ID NO: 5912 - DNA, 600 bp, Gossypium hirsutum
  Clone ID: LIB3828-006-Q1-K6-A1
gttattattaagctgactgcacagtttgttgcacgaatgggaaatcattcttgactgggttgaccagtagggagattaataatccccagttcaattttttaaggcctactcacagtatgtttacctttttcactgaacttgctgatgcatattccaaagtgttgatgcctccaagggcttgacagaaaagttgaggaagagtgttgttgatatgacaactgtgcttgagaggtgcttgcaccggctggaatgggaacgctcgcaggagcaggcaaggcagaaagctgaggatgaaattgagcaggagagaatgcaaatggcaatgattgattggcatgattttgttgtggttgagactatagactttgctgatgacgaggacgaggacttacctcccccaatgaccattgaggaggtaataaggaggagcaagatcactgctatggaagaagatgagattgttgagcctggaaaggaggtggaaatggaaatggatgaagaagaggtacagcttgttgaggaaggcatgagagctgctagcattggagagaatgatggtgagaagaggatataagggtaaatgaggaccctgaaccacca

SEQ ID NO: 5913 - DNA, 579 bp, Gossypium hirsutum
  unsure (1)..(579): unsure at all n locations; Clone ID: LIB3828-006-Q1-K6-A2
ggnanaaacatgaanccattctttcttccgagacgatggacatccccgtggggttagcgtcaaataaaaccaagttatcgaagttgagggtcccaggggtaagcttatccgcgacttcaagcacctcaacctcgacttccatctcattaaggacgaggagaccggcaagcgtaagctcaggattgaggcttggttcggctccaggaagactagcgccgccatccgcaccgctctcagccacgtcgagaacctcatcaccggcgtcaccaagggataccgttacaaaatgaggttcgtctatgctcactttcccatcaacgcctccatcactaacgccaacaagtccatcgagatccgtaatttccttggcgagaagaaggtgcgcaaggtggatatgttggaaggggtttccatagttcgatctgagaaggtgaaggatgagattgttttggatggtaatgatattgaacttgtgtcacgatcagcagctttgataaatcagaaatgccatgtgaagaacaaggatattagaaagttccttgatggtatctatgttagtgagaagggaaggatcgccga

SEQ ID NO: 5914 - DNA, 570 bp, Gossypium hirsutum
  Clone ID: LIB3828-006-Q1-K6-A3
ttaagtttatctgtggactagataaaacagtcgatttgttttgatccaaacacattcgaccatgtcgttattggtacccaacagaaatgcaaggcttgtgagaagactgtttatccagttgaacttttgtctgcagatggagttccttaccataaatcttgcttcaagtgcagtcattgcaaagggacactaaagttggctaattactcctcaatggaaggtgttctttactgcaagcctcatttcgagcaactcttcaaggagacgggtaacttcaacaagaatttccaatcgtctgcaaaggcagctgagaagttaactcccgagctgacgagatcaccaagcaaagctgccagcatgttttctgggacagtcgaaaaatgtgctacttgtggcaaaactgcatatccacttgagaaggtaacagtagaaggacagtcttaccacaaatcatgtttcaagtgctctcatggtggctgctctttaagtccatcaaattatgcagcacttgaaggcattttgtactgcaaacatcacttttcccagctcttcaaggagaaaggaagctac

SEQ ID NO: 5915 - DNA, 430 bp, Gossypium hirsutum
  Clone ID: LIB3828-006-Q1-K6-A4
atcaagatcaatggctgccccatcaagctcggggagcacattatcctacacaaaaaagctgtcaaatcgaacattctcttatgccgacaacgctgctgctgctggtacataagaatactagtcaaaggctggggatacactaaaaaaatctactcttttcataaaaaaatatcgaaagacctaattgccttttaccaaaagcttgtaccaccagcaaaaaatgaaggatataaaggataaagagcagacttactaccggactatcatggtagatgatacaattatgaaacaaccgcaaaaaaccgatggaaaatgatctaatgaatgggttcagaaaaactacaagtattgaacatatactgttagttcaggcaaatctactggatcttgcgaaaattctgatattaattatgactctaagaaacacctg

SEQ ID NO: 5916 - DNA, 580 bp, Gossypium hirsutum
  Clone ID: LIB3828-006-Q1-K6-A5
gaagtctttgcagaaatcaaatgttaataaagaagtttagcaatcagtataaggcaacaattggggctgattttttgacaaaggaagtgcagtttgaggacaggcttttcaccttacaagatctgggaatacctgctggccaaggaaagattccagagcttaggtgttgctttctaccgtggtgccgattgctgtgttcttgtatatgatgtcaactcaatgaaatcatttgacaaccttaacaactggagagaagagttccttgttcaggcaagcccttcagatccagagaatttcccttttgttgttttgggaaacaaagttgacgtggatggtggaaacagtagagtggtgtccgagaaaaagctcgagcatggtgtgcctcaaaaggaaacatcccatattttgagacctctgctaaggagggagttaatgtggaagaagctttccaatgcatagcaaagaacgcgctgaagagcggtgaagaggaagaaatatatttgcctgacaccattgacgtggccagcagcagccaaccaaggtcaactggatgtgaatgttgaagcatatcgtgtgataa

SEQ ID NO: 5917 - DNA, 584 bp, Gossypium hirsutum
  unsure (1)..(584): unsure at all n locations; Clone ID: LIB3828-006-Q1-K6-A6
ggnatacgtcttgcgtgttttgtacctgcgtcaaacaggggaatatcggcgtggtggagcggtttggtcggttcgagaaatggcggagcctggcctccacatatttaatcctttcgccggtcagtatctcgccggcatcctttcaaccagaatctcctccctcgatgttcgcatcgaaaccaaaaccaaggacaatgtgtttgtgcaattgctttgctcgattcagtacagagtggtgaaggcacatgctgatgatgcattttacgagctgcaaaatcccgatgaacagatccgggcctatgtgtttgatgttgttcgagctctagttcctagaatgaatttggatgatctctttgaacaaaagggtgaggttgctaaagctgttcttgaggaacttggaaaggtgataggagaatatggatacagcattgagcacatactgatggttgacattatacctgatcctgctgtgcgcacggcaatgaatgagataaatgcagctcaaagacttcagcttgccagtgtgtacaaaggtgaagctgagaaagtgctccaagttaaaagagcagaagctgaagccgaat

SEQ ID NO: 5918 - DNA, 267 bp, Gossypium hirsutum
  unsure (1)..(267): unsure at all n locations; Clone ID: LIB3828-006-Q1-K6-B2
gggaggatcaccggnaacagctagnattagaagaagcaccgtgggaaagggaagaagaagggaagaatccaagagcaccatggaaaattgagttgaaatcaataatccaggcttaatttctaaattatattatacatttctataatatttttatatattatatattaatttactgatgcaaaaaaaaaaaaaaaaaaaaaaaaaaaaaaaggcagacaaattaaaaagaaccaaactaaacatacacaagcatgcaaaaaaaataaa

SEQ ID NO: 5919 - DNA, 563 bp, Gossypium hirsutum
  unsure (1)..(563): unsure at all n locations; Clone ID: LIB3828-006-Q1-K6-B3
ggnaacaaagtactatcagggnaagggcataagcaagttaaagaaaattcggaatcatcgaatccgagtgcgaggaattgaagagggaaactaggctcataatccagcaaagtgccagaactcaggttaaacttgctcttatgttccgcatacctgaaagcaagggaagccggcgagttgaataccgctgccactctcactgaaatgctccgtgaaatagtaggaagagagagggaggaaagcaaagctgacatctgaatgactatggtaagcttcctcggtgcagctgctccaaatgttaagaactagaagtgtgtgacaattaagcgcgtgttatctttcagcattgccgttttgttattaagtactgctaatctacgtcgtttcatgtttggtatgttaaacttagaacttatcaaaccttttttctgttgtgtgtctaaggttgaataaacaaaatatggtgacttgaaaacaacagaagttaaaagtaaactagttattgttatgctgaacatataccttaaattgccaatattgtgcattgtcttgtttgctttgtc

SEQ ID NO: 5920 - DNA, 391 bp, Gossypium hirsutum
  Clone ID: LIB3828-006-Q1-K6-B4
gcagtattaacgacagccaagctggcttctcatagggattctatatacagtcctgaatgcctttacaatgacaatgttcttgtttcggccattccactgggaccatgagcccggggtccagaggttcatatggtagatactaaacactaaaagctaaaaacaagacaagcatcacaggttttgctaatagcagtattcgtcattggatcatagagaactaacaccctttcattcatgtgttggcatctaaaattaaccctgtattacttgttgtaattcttaccattcatctcgagcaaatggatatttcatgtttgatatgcagtttgtaaccaaatggtatgtaatggtaaacatgttaagagttaaggctctttcagttgcctttttt

SEQ ID NO: 5921 - DNA, 580 bp, Gossypium hirsutum
  Clone ID: LIB3828-006-Q1-K6-B5
attcgtccttgtttttgagataacctatatcgcaggttgcagaagacggctgatggtgaggacccttcaaccccttgtctgtgataatggaacagggatggttaagggtacctcgacctgattggttgtcattttaagtgctaaagcaataatatgtttagcgcttgaacttaatgtagttttgaaattttgcttcttaggctggatttgctggggatgatgctccgagggcagtgtttcctagcattgttggtcgaccacgtcatacaggtgtgatggttggaatgggacaaaaagatgcatatgtaggggacgaggctcaatctaagcgtggcattttaactttaaagtacccaattgagcatggcattgtcaacaattgggatgacatggagaaaatttggcatcatactttttacaatgaacttcgtgtcgctccagaggagcatccgattctcctcactgaagctcctctcaacccaaaggccaaccgtgagaagatgacccaaattatgtttgaaaccttcaatgctcctgctatgtatgttgccattcaggctgttctttccctttatgctag

SEQ ID NO: 5922 - DNA, 589 bp, Gossypium hirsutum
  unsure (1)..(589): unsure at all n locations; Clone ID: LIB3828-006-Q1-K6-B6
cccagcgtccggttaatgtttttgcatgcaaaaacattaccnctcgacgtttcacggtagaggcaccggcagatagcccaaacacagatgggattcacatgggcaaatcagacggcgtaaatattattggatgtgagattaaaactggtgatgattgtatttctatcggagatggcactaaaaatttggacataaaagatataacttgtggaccaggacatggtataagtatcggtagtcttggaaagtacccaaatgaagagccagttgagggagttaaagtcacaaactgcaccatcactaatacttcgaatggagctcgaatcaaaacttggccaggcgaatctcctgggatagtatcagatgtacattttgaggatattatcgtgaataatgtctcttcccctatcctaattgatcaaaaatattgcccatggagtaaatgcaagataaatgaagaatcgaaagttaaactaagcaacattagcttcaagaacatccgtggcacatctgcgcttccagaagctgtcaagtttatttgcagcggttcttcgccatgtcnaaaatgtggaacttgcagacattgata

SEQ ID NO: 5923 - DNA, 608 bp, Gossypium hirsutum
  Clone ID: LIB3828-006-Q1-K6-C1
attaagccagggtcgaaaacctactataaaatggtggctgctgatttagtagcctctcttcgaagctagagtcgtcggaggccaaagcatcaacgaaagctttcacaaaaccctagtctctaactacttcgttttgcctaagccatgtcgagaaggaaggttagagagcccaaggaggagaatgctaacctaggacctgctgttccagagggcgagcatgtttttggggtggctcacatctttgcttcatttaatgacacattcattcatgtgactgatttgtctggaagggaaacaatggttcgcattactggtggcatgaaggtgaaagctgatagggatgagtcttccccttatgcagccatgcttgcagcccaagatgtttctcatcgctgcaaggagttgggtattactgcccttcatataaagcttagagctactggagggaataagaccaagacaccaggtcctggtgcacagtcagcacttagagcccttgctcgttctggcatgaaaattggacgcatagaggatgttacccccattcccactgacagtacccgtagaaagggaggcagacgtggaagaagctgtgattcttcgcttcg

SEQ ID NO: 5924 - DNA, 594 bp, Gossypium hirsutum
  Clone ID: LIB3828-006-Q1-K6-C2
ctttggttttcagccaatctccaagtctaccttcgttatctccgccaacattaacacaaagcgtatttatttaagatagaaaaaaatcaaacaattggcatgcacagtctccgcctagcttcttccgctcattcccagtctctcttcacaatgtccgccgcctccgcttcccttgctctcccttctcccctttcttcgtttcgctccaatggacctcttccttctagatgcttcctccgcctcaacaacccctcaagatctagggttttcatgagtgtctccgttggatcccaaactgtcgtcgatgatgccttgttcgctgattacaagcccacatccgccttcctctttcccggtcagggcgctcaagccgttggaatgggaaaagaagctcaggctgtgcctgctgctgcagaattgtataagaaggcaaataatatattaggttttgatcttctagatctttgcatcaatggtcccaaggaaaagttagattcaactgtcataagccagcctgctatttatgtcacaagtctagctgccgtggagctgcttcgtgcccgtgatggaggcccgcagattattgattctgtt

SEQ ID NO: 5925 - DNA, 591 bp, Gossypium hirsutum
  Clone ID: LIB3828-006-Q1-K6-C3
tttgctctctccttgtttttgagaactgtgtgtttcttcaagcttcttgaaagcttcattttggttcagaactggaaaccgctgctgtgatggctccaccaattgagactacagtcaagtcctctgactctcactgcgctccacatcctcctttgaatgaaaggatcctttcgtcaatgaccaggaggtccgtcgctgctcacccatggcatgatcttgaaattggacctggagctcctacggttttcaactgcgtgattgaaattgggaaagggagcaaggtgaaatatgaacttgacaagaaaactggtttgatcaaggttgatcgtgtgctttattcatcagttgtgtatcctcacaactatggtttcattcctcgtactctttgtgaagacaatgatcccttggatgtcctgattattatgcaggaaccagttcttccagggtgctttcttcgggctaaagctataggtctgatgcctatgattgatcagggtgagaaagatgacaagattattgctgtatgtgctgatgatcctgagtatcgtcactacaatgacatcaaggaacttccacctcaccgtttggctg

SEQ ID NO: 5926 - DNA, 597 bp, Gossypium hirsutum
  Clone ID: LIB3828-006-Q1-K6-C4
tcaaaacatcctcaaactgttcaacaatttcgtctcccgttaccaaatttccccattaaaaccaaaaatgagaatcccaaatctcaccaaagcctttattttgttaatggcaataactctgatgtcaacccaagccaacagcctaatcccttacagtagatccttatgggacgtgatgctcgctgaagacccattcaaaatcctggaacaaaacccagtgaccgtccccaaaggatcagaacccgtcgctttagctcgagccgactggaaagaaaccccacggtaccatgccattaccctggacatcccagggatgaaaaaggaggatttgaagatcgaggttgaagagaacagagtgttaaggatcagtggagaaaggaaagaagaacaagaaattgaaggagagaaatggcatagagctgaaaggacgaatgggaagttttggagacagttcaggttgcctgcgaatgtggatatggatcgtatcaaagctcatatggaagatggggttttgaggatcagtgtgcctaaaattgtagatgagagtaagaagcactctaaggtgattgacattgttcagtcgggtggtattggtga

SEQ ID NO: 5927 - DNA, 592 bp, Gossypium hirsutum
  Clone ID: LIB3828-006-Q1-K6-C5
caatgagaaggatataagcctgaccttaacttgtctccaatgctagctgcaccaccaacctgtcttgctccattggctaaggtgatcaacgataaatttggcattgttgagggtcttatgaccactgttcattctattactgctacacaaaagactgttgatggtccttccatgaaggactggagaggtggtagagctgcttccttcaatatcattcctagcagcactggagctgccaaggccgtcggcaaagttttgccagcactgaatggcaagctgactggaatggctttccgtgttcccactgttgatgtctctgtggttgacctcactgtgagacttgagaagaaggctacatatgatgaaattaaggctgctatcaaggcggaatctgaaggcaacttgaagggaattcttggttatgtggacgaagatttagtctcaactgacttcatcggagacaacaggtcaagcatttttgatgccaaggctggaattgctttgaatgacaactttgttaagcttgtgacttggtatgacaacgaatggggttacagttcccgtgttatcgacttgatccgacacatgtcta

SEQ ID NO: 5928 - DNA, 429 bp, Gossypium hirsutum
  Clone ID: LIB3828-006-Q1-K6-C6
gcgagaaagctcaaaagttgaggaggccttcgtaaatactgccgcaaagatccttcagaacattcaggaaggagtcttcgatgcatccaatgagtcatctggcatcaagatcggctatgggcgtgcccaaggtccatcaggtgcaagagatggagccgttgcacagagtggtggttgttgtggttaatacgaactgaaacaatctgttgcatgtatctgatccacatttccagtttatctctatatgatctcattgctttgatgaatctctctccttgaaggtgttgtcgaactcggtaaggacactgaatgtatagaactatgtctttcatttgtactgaactaggaactcatttgttcacctcgtttcgattctatttgactcactgcactgtaaaatataaaccaatgtcatcccattttaccttc

SEQ ID NO: 5929 - DNA, 606 bp, Gossypium hirsutum
  Clone ID: LIB3828-006-Q1-K6-D1
aaaaaatgtcagtcaccttgaatctccgccttcttcatttctttcatcttctttacctaaatcaagattgggatttgcaaatgggtcatcttcttcaactctactcttcaaattcaacagatcttttccagttcttcgtgcctcttctggttcctcttcttctgttgacactggtttgagtactgaattggatgctgtgtctactttcagtgagatagttcctgatactgtgatctttgatgattttgaaaagtttccaccaactgctgcaactgttagctcttcattgttgttgggcattttgagccttccagatactatttttagaaatgccgtggatatggctttggcggattcgacatgttctccgctggacaatcctgaactgaggttgtcttgttttgttaacaaggctttagtaaatgttggtggtgacttggcaaagctagttcctggtcgagtttcaactgaagtggatgcacgcttggcttacgatacacatggaattattaggagggtgcatgacttgctgaggctgtatgatgagattgccgttcctccagaacgcttgttgtttaaaattccttcaacttggcaaggaataga

SEQ ID NO: 5930 - DNA, 591 bp, Gossypium hirsutum
  Clone ID: LIB3828-006-Q1-K6-D2
attctctatggaatacaagtgtcaattatgggaaaagccatggaaatcagaaagaaagaacacttaaagaacttgtaggtctgttgcggcagagcgagctacgaagaaaaaagttgagaatgagctaagagagcaagctgatgccattgcattggctacggcagctacggggaactctccaaattcattgaaacatgttgctgatgacatgaacggttcattatctccaatgtctgtgccagcacagaaacagctgaaatatagcccaggtattgttaatggcccagccagagagtctgcagcattcataggtcaaacacgaaagatgttaccgcttgggcagttaccaatgaagaagttggtagctataggacaagctggcaatggcaaactgtggaggtggaaaagaagccatcaccagtggctcctacaattcaaatggaaatggcagaagccatggagactttcagaatggatcagacacagtgatgaaacaatgataagggcaaggcctcgttctcaagctctaacacatagagtctgatatttgatggtcaccagattacattggccatagtaatcttggttata

SEQ ID NO: 5931 - DNA, 599 bp, Gossypium hirsutum
  Clone ID: LIB3828-006-Q1-K6-D3
aaaaagggaagagagatagtgaacggtgaagctgataacttcggtcgtgattttctgggattacttgtaaatgcttatcatgaggcggaccagaaaacaggctttcgattcaagatatggtagatgagtgcaaaactttttattttgctgggcaagaaacagtcaattccttgcttgcatgggcaactctgcttttagcaatacacaccgattggcaagacaaagcaagagcagaggtgattgaggtctttggtaatcaaaacccagattctgaagggatggccaaattaaagacgattaccatgattatcaatgaaactttacggctctatcctcctttaaatcgcgtgataagagaagtaggaagagaagtccaattaggaaaacttgtcctgcctactcatttagaggtcgacatgcgaatcatagcacttcaccatgatcctgacttatggggagatgatgttaatcttttcaaaccagagaggtttgctgaagggattgcaaaagctactaagtacaatgcagctgcatttatgccttttggattgggatctcgatcttgcgttggcatgagctttgcaatcactgaagcgaaa

SEQ ID NO: 5932 - DNA, 606 bp, Gossypium hirsutum
  unsure (1)..(606): unsure at all n locations; Clone ID: LIB3828-006-Q1-K6-D4
gtttcttcaagcttcttngaagcgtcattttggttgagaactggaaaccgctgctgtgatggctccaccaattgagactacagtcaagtcctctgactctcactgcgctccacatcctcctttgaatgaaaggatcctttcgtcaatgaccaggaggtccgtcgctgctcacccatggcatgatcttgaaattggacctggagctcctacggttttcaactgcgtgattgaaattgggaaagggagcaaggtgaaatatgaacttgacaagaaaactggtttgatcaaggttgatcgtgtgctttattcatcagttgtgtatcctcacaactatggtttcatccctcgtactctttgtgaagacaatgatcccttggatgtcctgattattatgcaggaaccagttcttccagggtgctttcttcgggctaaagctataggtctgatgcctatgattgatcagggtgagaaagatgacaagattattgccgtatgtgctgatgatcctgagtatcgtcactacaatgacatcaaggaactcccacctcaccgtttggctgagattcgccgcttctttgaggactataagaagaatgagaacaagga

SEQ ID NO: 5933 - DNA, 448 bp, Gossypium hirsutum
  Clone ID: LIB3828-006-Q1-K6-D5
caaaatgaataaataccggttccagtaagcccatggcggcaccagcaaccctacaattctcagccagggaaaaaggtattcagcgccaggctttgggagcaaaagggtgacctgtaggggcctcttaaagcccgggaagtggaagaattggacttgggtactcacaggtgaccacttcgagaacggtgcctttttttaccaccatcaggtaatccaagtgccagcaagcaatttggcgccgacaaaatgatgcctttcaaacctggtcaaatggtccccgagctcacaaagtatgccggaccactaagctgcacaatcggccgtccttgctaaaaatgctatttttatatgcatttgtcctcccttttttacgtacaatatttgatacccaagcatagtacatttggtatcttttctgaatgattgtcaataaattttcttttatgcg

SEQ ID NO: 5934 - DNA, 586 bp, Gossypium hirsutum
  Clone ID: LIB3828-006-Q1-K6-D6
tcaaaagctgagtacatggtggaaaaactgcatacgaccggctagtgtctgcctgatgtatggtaactgactacaccatgaaaatgcagaaataaaaaaaatggctttatatatattatatataatacacaagcggacgccatattgttcgggccaaataagctagaaaagaaaacatcaccttttaaaagagggggaggaaatgaatgattctttcgcatcgcaatatgaaggatattctaattcttgattcatgtaatcaatgtatgacaaatataattaagagtattgaggggtatagcaatggactctcattaaatagattgatctcttatgatacttacattgactgaaccgtgcaaggaacgaccaaaataacaaccaaatggtgctgctattcatacccagccactgtctttatacttcaacacggataatatcaaataatggaatgcttgcctaaaaaaaaaaattgatggggaagacaatatattaggatccagaataacgctacacgtgcagtgcaacggacaaagtctgatctagggagaccataaacaaattacatgggatattttgaaccacc

SEQ ID NO: 5935 - DNA, 588 bp, Gossypium hirsutum
  Clone ID: LIB3828-006-Q1-K6-E1
cttttccagtgcttttcttcggatcggccacatatcctgtgtccttaccggcgtcgacaagggtgtggccttcgttcagatggtttaagagctgttgtaattgtatcacttgagaggaactgttgcctgacttgattttgtaaatcttagtctcccctcgtagcatggacaacaccagcaatgatgatttcaccttttgtaaggttgggttaccgactgatcaaaatggtttggaggaaaagaatcttgcagctgatattggtggtattgccattaaagacgaaacctcaaactgcagcgatagtagcaagaatggtggttttccctggaaagataaacatccaaataattccacatttgtagatcaggctactgttggttctttgactttcaatgttattgatgcttcatgtttgaaatcatcaggtattgccattaaagacaatcctcaaactgcagcgatagtagtaagaatggtgaatcatcaagacaagtagcatatgtagatgcgggtgcttcagcagtgaagtcagaaaaaccaagaagttctaccagaaagtctgcacctcggaccaaggttccttttga

SEQ ID NO: 5936 - DNA, 568 bp, Gossypium hirsutum
  Clone ID: LIB3828-006-Q1-K6-E2
tttattctaatggcaacgaaaaatatgtgacaaaaactggttagaaactatcgatgtcacccggagatcctctatctcccttcacttctcttctacaatgatgaattgaccccttgcaaagatgacataggttcattattgaactcagtaaagtttcttcctaataaggactaccctgtttttttctttggtatacaaggttgtgatgagagggaaggaagtaatccgtcgtggttcaatcggattgaagccagcaaggttgtagaaattgttagcagtttgacagcaagtgggattctgaacgagaaagatataggggttataaccccctataggcagcaagtccttaaactaaagaaggccttcgagaatctcgacataccagatgtcaaggttggcaccgtcgaacaatttcaaggccaagaacgaaaagttatcattatatctaccgtccgatcaacaatcaaacacaatgagttcgacagaacccactgtctcgggtttttgagcaatcctagaaggtttaatgtggcggttactcgcgccatagctttacttgttattgttg

SEQ ID NO: 5937 - DNA, 480 bp, Gossypium hirsutum
  Clone ID: LIB3828-006-Q1-K6-E3
cccacgcgtccggggcactgtaggcaacgcatttggcgtgaccaacgctcctggacttggaacaagcatgagcttgccccaagcactttcaaacacacgtactgatggacttggggcgctttaccgggaaggaacagcctcatttctcaactccatggtgaataataggttcccattctcgactaagcaagtcagggagacttttgttgcagcacttggttcaaacagcgctgcagcagctcaggctcgtctcttcaagcttgccaatgaaggccacctcaagccaaggacctaagcaaacaccttttggtttgtcagtttcttgaagcattttatccactagtgtgtgctacttagattttatgttcctaatattcgacatctataatgctacagctttcatttggatagatactgtgtctagaactgaatgttaagtttatgttttcttattttaaataaaatttaagatatttgttt

SEQ ID NO: 5938 - DNA, 111 bp, Gossypium hirsutum
  Clone ID: LIB3828-006-Q1-K6-E4
cttttttcttttcaatttcgttaggtttttcatccttttcgcaatttttgtataattattcctatttatattttgaagaaaacgtaagacaaatgatgtttttggtcttcc

SEQ ID NO: 5939 - DNA, 601 bp, Gossypium hirsutum
  unsure (1)..(601): unsure at all n locations; Clone ID: LIB3828-006-Q1-K6-E5
cgccgtccggnaaaagtttgggtaatcaaataggagcgaaggtgaaagagcactgatacaactgttctgaattgaattcagctgaaatgaacacaatggctagctcgaagaaactgatttccagggaagagtgggagaagaagttgaataatgttnaaaatcagagaaagaagatatgaataaattggtgatgaattttcttgttaccgagggttatgttgaagctgctgagaaattccgaatggaatctggaactcacccagatatcgatcttgcaacaatcacggatcgcatggctgttaaaaaggctgtgcaatgtggaaatgtcgaggatgccatcgagaaaattaatgatttaaatcccgagatattggatacaaatccgcaactcttttttcaactccaacagcagagattgatagaattaattcggaatggaaaagtagaagaagccctggagtttgctcaagaggagcttgctcctaggggagaagaaaatcaaagctttttagaagagttggagaggaccatttcactcctggtatttgaagatacttcaaactgcccagttggagagcttttggacatatcacagcgcctt

SEQ ID NO: 5940 - DNA, 594 bp, Gossypium hirsutum
  Clone ID: LIB3828-006-Q1-K6-E6
caattttgcttcagctggctctggctatgatgccaagctgcctggtgaatcatgccatcacattgacccagcaattagagtatttcaaggaataccaggcaaagctagcaaaggtagcaggcagcaccaaatcagcatccattaccaaggatgcactgtatgtattgagtgcaggaagcggtgacttcctccagaactactatgtcaaccctctacttaaccatgcctatactccagaccagtacggctcattccttattgataccttcacaaacttcgtcaagaacctctatgggttgggagctaggaaaattggggttacctcacttccaccgttaggttgcgttccattagcaagaacattgttcggttaccacgagaaaggatgcatctccaggttcaataccgatgctcaacaattcaataaaaagctcaacgccgcagcagccaatctccagaagcagcatcctggtcttaagattgtggttttcgacatattcaaggcactttacgacattgttaaatctccctctaactatggttttgttgaagcaacaaaaggtgttgtggaactggaacagtagagacaaccgc

SEQ ID NO: 5941 - DNA, 327 bp, Gossypium hirsutum
  unsure (1)..(327): unsure at all n locations; Clone ID: LIB3828-006-Q1-K6-F1
tccagnccgtccgcggagacaggacgaatgaaagcaaagggggtaaaatcgtcaaaacaaatatccctattgagggtgtctttttgtatgtcagtcttacaaaagtcacaatagctgataactacatcctcggcctctcccttacttgcacaggagacagatgtccaatgagtttggggcaaaaaccctaacctccaaaacatgaccagagtaagctagctatcgcctatccagcatctttatcaacatacatggctgcagctgctctagagggaatatcaattaagatgctaggcagtgtgaggcggcagcgggagcacttgaagc

SEQ ID NO: 5942 - DNA, 596 bp, Gossypium hirsutum
  Clone ID: LIB3828-006-Q1-K6-F2
cccagcgtccgcaagcagcaaaggcatgatatattgtggttcactcacctatacgcaagctacttacttatagataaggttggactaaggctcttataaatacattgaagtcataagtatctgtatgtttcattatgccaattaaacaaaccctgaagatggattattgaacgcacggcagcctaacaagatatatctaccctgatgaagaaaaagctgatattgaatgaaaaggacacaggtgactgaactatgagctgattcctggtggtcgagaacattaaagttactgaggagaataaacaccaatatgttgacttggttgttgagcatcgtctgacaacagctattcgtcctcaaataaatgcatttttggaaggattcaatgaattaattcctagggaattaatttctgtttttaatgacaaggagctggagttactgataagtggacttcctgatattgatctggatgacatgagggcaaatacggagtactctggttatagtgcagcatcacctgttattcagtggttttgggaggttgttcaggggttcagcaaggaggataaagctcggcttctacagtttgtgac

SEQ ID NO: 5943 - DNA, 599 bp, Gossypium hirsutum
  Clone ID: LIB3828-006-Q1-K6-F3
atttttgcaaattattgtatcatctttttctatacttcgttgaaatttgacctcaaattagagtgtacggaccctgtgaaggtctgtagtctgtttggttttgggtgccactaccgtagggttttgttggaaatgggaggcgactcgttttaagccatttatgtttttgtttgctctgcatttgctgtgttttttttttcagttggagaagtgggacttgggggaggaggatgataaacgatggaaagaaacaatggagatgatgatgataattttaaaataattttaaccacttgcatttgctctgattttttcagctggagaagtgggacttggaggaggatgatgaagacggaaaggggtaaactattaaaataatcacttttatttacttcagattacattttagtcacttatgtttgaaatattacgttttagtcacttacattatcatgttgtaacattttagtcattaagccattaatttccgttaacagtgtaacattaagctgatgtggcacattaaatcatcatttcaaacgaaaattttaggtcaaattataaaattggtccctatattttttcattttaagcaattt

SEQ ID NO: 5944 - DNA, 612 bp, Gossypium hirsutum
  Clone ID: LIB3828-006-Q1-K6-F5
cctgcagtaccgtccgattccggtcgaccccgtccgctaaaacatacaaggaaaacagtatccttaaggcattgactaagttgcttttgcagtcgcctttgccctgtgcgaaaagggcattcaggtcactgtattgcgtgaggatgaatatgagaagcttgataagtcacttggcaccaaatctgagggtaaattggttacctctaagagttatagctcttgcaaggtatggttagttggagatgacttgaccgaagaagagcaaagaaaggcaaataaaggaacactatttattcccttttcgcaacttccaccaaaaaaattgcgcaaggactgcttctatcacacaacaccagcgatgcagactccgacggcccttgagaatgtggattcttgcgagaactggttgccaaggagagtgatgagcgtatggcgcatagctgggatactgcatgctctggaaggatgggaagagcacgaatgtggttacaccatgtctaacattgacaaagtttgggaagcatgtctcaagcatggatttcagcctctgaaggtcccaactcaatcaaagtcctagaagatatttggcgatttatctaattaatctacttg

SEQ ID NO: 5945 - DNA, 609 bp, Gossypium hirsutum
  Clone ID: LIB3828-006-Q1-K6-G1
gcgatttatccatgttgtttatctttccttttggtctcccttttcgtttcattttgttacgctaagatccgcttaacagagatccgccacgatgaccgtcctataatccctttcgacgagttcggcttcacccacaccggtcgcctcgagctcaatgtctccaacattgcgctctcgaaccagaacccagatctcgacatgtctaaggtcgggttctttctctgcacgcgggacgcttggatgcaagtgttattacaaatcgaagacgggtatatcaactgccctctcaattccgatttcgttaaactcgccttcgaattcaaacagcttaaagggaaatctaatagtttcagcaccgtttaccaagagaacaccgccgatcaatacacgctcgtcttcgctaactgtttgagtcatgtcaaagtatcaatggatgtccgatcggcgatgtacaatctcgacggaaaggaaaaacatcgtgattatctctccgccgggaaaactattctccctagggtttacttcattttcgccctcgtttatttcacattggcagggatttggatttacgtgctttatttaaaacgactcaccgtttttagaatccat

SEQ ID NO: 5946 - DNA, 598 bp, Gossypium hirsutum
  unsure (1)..(598): unsure at all n locations; Clone ID: LIB3828-006-Q1-K6-G2
gtttcaaattttgngagagttggtcttggaaaaaggaggatcaagaagttttaccaggagatatctctgtatccttagttaggggagttagggcccgaagaagatgaggaagactttcagagctgttgtgaagatgatgaggtatggaaggacaatgaagaggtggcgaaagaggaagaaaagaaagagcttgatgaattttcagtgaagatgttcttcaagggcatctctttagctgaaactggggactctagttctgggttttcaggaattggggtggtcatggagagatcagccagtagccctgttattcaagtgcagaaaaagcttgacttttatgttgaggaatctgtggctgattatttagccttaatggatggtttgacagaggctatgcagaacaaaattcgccgagtatatgcttttactgattccgcattgctacatgatcagattacatgtgaggagaaccttgataatccacttttgatggcgttaagggaaagagtcatggaacattcccgtaatttggaagagtttgtcctgaaacttgttccaagcaccgatcttttgaggccattgcagctagcccaagtag

SEQ ID NO: 5947 - DNA, 611 bp, Gossypium hirsutum
  unsure (1)..(611): unsure at all n locations; Clone ID: LIB3828-006-Q1-K6-G4
gcaagctaaanagaatgaaacgcagccatttacatccaggtcagggtccagatcaccggtcgttaatctgttgccgaagcgattcgggaattcaacgatgttggcggagtctatcccggtttgtgagttccaaggtcgacctattgccgaccatccggctattaaattcggacgacctcccggtgctcttagggtacctcgtgaaccactcgatgctgtcactgttgctgaagctgtttccgtaatttcttgctggtacgaggacaagacagaatggggggaacgagtagggtggatttacggctcagtgacggaagatgtggtgacggggttccgtatgcacaaccgtgggtggcgatcagtatattgcataaccaaacgtgacgcattccgtgggtcagctccgatcaaccttaccgatcgtcttcaccaagtgctccgatgggcaacaggctccgtcgagatattcttctcaagaaacaacgccctcctcgctactcgcaagctcaaattcctccaacgtttagcttacctaaacgtcggcatttacccattcacatcatttttcctcatcgtttattgtttcctccccgcactttcactaatctccg

SEQ ID NO: 5948 - DNA, 594 bp, Gossypium hirsutum
  Clone ID: LIB3828-006-Q1-K6-G5
cccagcgtccgatctcctcctcccctccactactccaccacccttcctccgccaccggtttccaaaaagcgccttccaaattctctcgctccatcctcaaactcttcaaattcgtattcaagttcagacaaagttcgagtcattcggttttgtggttgaaacaaagatcgctcggggacctacttcgtagtttacgacaagacgggtgcactcacgacgatccccgaggtcccggagatcgattttggaggactttcgccggagattaactcgttggtagtcgagagaagtgaatcggaaagcttcactgcagcctccactgtcggtatttcatgtgcttaaaagaagctaaattatacagaaatattatcatatacatatatatgaataacgaggatgtgatcaaatagtttgtttatattttgatcatattttttaggtttattttttcctctttaatgttaccttaattagttgaagttttgtactttgatcctttcatgtctcagactctcagttctatgatcatcagctgaatttgtggttacaattaagccattttatgtactgtatggaagagtgattcactttgcg

SEQ ID NO: 5949 - DNA, 436 bp, Gossypium hirsutum
  Clone ID: LIB3828-006-Q1-K6-G6
aaaaactttccagtttctattttctaaaacaaactgaaaagtcttgctgcggaggaaactgtggctgcagctctggttgcaagtgtggcaatggctgtggaggatgcaagatgttccctgacataatagagaagactacaactgagactattgttcttggtgtgacaactcagaaaatgcactttgagggatctgagatgggagttggggttgagaatggatgcaagtgtggagacaactgcacttgcaacccttgcaattgtaaataagagggggggaaaatgaacaacaaagagaagcagagaggcctttgtctttttaactaaataaattctattactttagtatgtatcagcaaatcttcatgaggatttggttcttaattatgtgtaatgtgggcttttctgctatgtcagaatgtattatgatatttaag

SEQ ID NO: 5950 - DNA, 430 bp, Gossypium hirsutum
  Clone ID: LIB3828-006-Q1-K6-H1
cccagcgtccgttcagcttcaaactgttctacggcagttggttttgatgaaagaatgttgctgcactcagaggttgaaataaaatcacatccacatccagaaagaccagatcgtcttcgagctattgctgctagcctttctgctgctggtatattccctggaaagtgctgcttaattcctgctagagaaatcactctggaggagcttcaaatggtccattcctcggagcatattgaagttgctgaacttacccgccaaatgttttgtagttattttactcctgacgcgtatgctaatgagcattcagcacatgctgctagacttgctgctggtttatgggcagatcttgcttcatcaatatctttctggacgcgtaaaaagtgggtttgatgtggcttgactacctgaccatcatgctgctgtcataaca

SEQ ID NO: 5951 - DNA, 218 bp, Gossypium hirsutum
  unsure (1)..(218): unsure at all n locations; Clone ID: LIB3828-006-Q1-K6-H2
gggaattgtngctgatgtggtcagcccaggtgcgcatcaggagttgccaggctgaactgtaaagacaaaggatagaagaggttatggacagtgaacccagtccaccaaagtagagagatgataccatattaagatgaaataacgaggaagagttggttgtcgtcttattaattatacaaaataagaagtaatgatgttgcagaaaggtttgctataaa

SEQ ID NO: 5952 - DNA, 587 bp, Gossypium hirsutum
  Clone ID: LIB3828-006-Q1-K6-H3
cccagcgtccgaaagttgtcagttggtctcaatatctttttttgttctacttttttcagtagctgctagacccaccgataatgattgtgtttacacgttgtacgtaaagacgggttggatgatgaaagcagggacggactcgaggatcagtgtagttctgggcgattcgttcgggcggtcagtttggattccagaactccgttcatggggtttaatgccatacgcccacgactacttcgagcgtggcaaccttgatgtcttcagtgggcgaggtagctgcatcggctctccctgccgcctcaacttgacctccgatggctcggagttgcaccatggctggtactgcgactacatcgaggtcacatccaccggacctcaacaaccatgcgcccagaccgtgttctatgttgatcagtggttggccactgatattccccctttccagttaacggcgtttcgtgatgggtgctatatgcgggatgagcctcgcaagcgtggcaggaatgtgcctctcattgttgggaatcccgaaagacctgcttgatgggtgccttttgggttaaaaatagttgctaataatgtggcag

SEQ ID NO: 5953 - DNA, 551 bp, Gossypium hirsutum
  unsure (1)..(551): unsure at all n locations; Clone ID: LIB3828-006-Q1-K6-H4
gnagagccganatttaagaaagtggctcctaatttgaggtcaaagccagatgaagactccagttaacatgtacattacaccctgttactcaagtctatccttcatatggttttcctgtggcatgcaattgtaagttatgatgatgagtttggaaaaatgctgaatttgccgcagcttgtgaaacatgaatgaaaagcacagcagaataatcaatcgagtttcttatggaaagggaaaaggttggtataagggaagtggcctggtgctttatatgtctgatgaagaaggaaacaaaatgtggaaatttgcctccccccaacaaacagtcttctccagaattcggggaaaaatataaaaagggtgaaatgaatgcttggtttttgtgagtaaatagaagaagtccatctagagtgcttgttaggagggtgttagctatcacagagcattcagagtgaaatgagtccattaaaggaaacaaaaaaaggtggataactgtatacgtatatataatatatattaaaatagctgtgtagaaatcaggttaccctttt

SEQ ID NO: 5954 - DNA, 268 bp, Gossypium hirsutum
  Clone ID: LIB3828-006-Q1-K6-H5
gttttctatttctttctttcatgggttttatcggttcaatccgtagaaccatttgtttatgacgtcaactttgctggagccgttggagatggagagagtgatgataccgaggccttcaagaaatgcatggatgttgtctgtagttcgcatgtccctttagggatatttcgtgttccttatggacaaaagtttttggtgcaacccttgatttttatggtgaatgtcgaccaaaaaatattactattcagattgatgggatactcattgc

SEQ ID NO: 5955 - DNA, 586 bp, Gossypium hirsutum
  unsure (1)..(586): unsure at all n locations; Clone ID: LIB3828-006-Q1-K6-H6
agaaaaatatggcaagtgaggcggcgagagaagctaacgtccctgcagcggctgcggcggaagcacccacaacagggaccgagaagcaaccacataagcttgaaagaaagtggaccttttggtttgataaccaatcaaagcctaaacaaggcgctgcttggggttcctctttacgcaaagtttacacttttgacactgtagaagaattttggtgtttgtatgatcaaatattcaagcctagcaagttgcctggaaatgctgatttccacttgtttaaggctggaattgagcccaaatgggaagatcctgagtgtgctaatggaggaaaatggtctgtcactagcaacagaaaggctaatcttgagaacatgtggcttgaaagtttgatggcattgatcggggagcaatttgatgaggcagatgagatttgtggtgtagttgccagtgttcgccaaaggcaggacaaacttgcattgtggaccaagactgcaacgaatgaggctgctcagatgggtattggaaagaagtggaaggagatcattgacatcaatgataaaattacatatagcttncatgacgactctcg

SEQ ID NO: 5956 - DNA, 583 bp, Gossypium hirsutum
  Clone ID: LIB3828-011-Q1-N6-A1
ccaactaacaagtatttgatgtaataataaaatatattgtacttcaaggaaagatagaaatttaaattttgaacataacattattaaggaaaatagcaacaaatcttgaaaatagactataaaatctattcccttaaagcttctttaacaaacaacttatatatatatatatatatatatttgggtgtgctttttagctgtcttgaatgggaatcaatggtagcgtgccaccatatatttctggcagttggctctcgtctatttcttcaagcaatgttgatttcaggcttttgttctcaacgaatactatcttcttcctggttttgacgtcgatgaaagggtgaacaactttccaggctgccatgaaaatgtagggtgcatgcactacgaacatctttcctaatctttctgggtagtaatcctgcaggagagagagagcagaaaggtatgcccggatgtcgcaatttgcatatccccaaccttcaagatctccgatcacaataaatttatcttgtcctggaagcatcctggtcagtattttgtcgaaaagtagactataaaacgcttgaattcgtcgaggccg

SEQ ID NO: 5957 - DNA, 57 bp, Gossypium hirsutum
  Clone ID: LIB3828-011-Q1-N6-A2
gtagattgatttctcaaataatttttttctatatgatcacctgaactctaattccag

SEQ ID NO: 5958 - DNA, 529 bp, Gossypium hirsutum
  Clone ID: LIB3828-011-Q1-N6-A3
gttgccccatccaaaaacgtgtttctttttaaccaaaaaagaattttttaagggtttattaaattcaaaaactggaaaaagaaaaaacattcttcattggggggggcccccccaggcaaaagaaataacccccaaaagaaaaaaaaagattttaaagaaatttcaagccgggccaccccggggggggggaaacaaccaaacaggggaatctaacagggggggaaaaacaagccccccggggacaaaaaaaaaatccgcccccgccgggccggggccccccccaggcggagggggacaaaaaccccccgccaaaaaatgggggggctaattctggccccctggggaacccccccccaatgcgccccccgggcattaacgttaataaaaacaaaaaggggttatccccccggggggaaaaaattggggcccatcattagaccccttaaaaccacacaaaaaaggttccccgggggccggagaacatttgttcacaagagagattgagaagaaacgggcaaaattggcggga

SEQ ID NO: 5959 - DNA, 576 bp, Gossypium hirsutum
  Clone ID: LIB3828-011-Q1-N6-A4
attcatataataattaaagataaaaaaaaaacagctagcacattgtaattcaatcatatatcaagctgcttggttattctttattttctttctctttgtatagaatccgtagtttctataatctatatataaatctatgaagattctggcgccatagcttgtatattcatggccttctttttccctaaaagaccattggcatcaagtttcatggtaaggtccttaatcgttcgtttgagttcatccatataagcgataccaccaccacacccattattgaacctgcggtaagggcatccgtaattgcaggtgccgcaaaagctgccgcccatgatatccacatcgtcgcagtcgatacagtaagggcttctttcataacctatacctatgccagcaccgaatccggtaggatcaggatcgatagaggttgaagaatcaggatcagcttcatgcggaaaaccgttgcttggttgaaacccatcggctccgtcagccatggtggagattccggtcctcttaccataggacgccgataaacatactgaaaacagtaaggttatggaaacccaatttgct

SEQ ID NO: 5960 - DNA, 353 bp, Gossypium hirsutum
  Clone ID: LIB3828-011-Q1-N6-A6
aaggggaaaaaaaaggggggccaaaaaaggaaggggggaaaaaaggaaaaacccaagggggaaaaaaaaaaggggggaaaataaaaaaaagccaaaaaaaaagggggggaaaaaccgccgggccaaaaaaaccaaaaggggaaaatcccccagggggaacacagggggggggcccaacctggaaaaaaaaaggggggggaaaggggacccccaaaaaaaaaaaaaaaaacgggggaaacccctaaaaaaaacccccaaccttttccaaaattgggggccttaaaaattccctcccttgggaaaaaagggaaagggaaatttggtagggggggggggggcggaccccgggggcc

SEQ ID NO: 5961 - DNA, 508 bp, Gossypium hirsutum
  Clone ID: LIB3828-011-Q1-N6-B1
cacagctgaaaggctgatctccttactattattggaaataaattcaatttatgatggaaaaatataaacataaaattgcaaaagattttcagcttctacagactagaaattaatcagcctatattatacatctgcagcaatatagtaatagaagtttcaagaactcgacacacccgaaatttgagattgatcttttctttgatcgttgcctcaagtatttttgtgctgtttctttttggtaactctccagcacatcttccttgtaaagcaaatctctggtgtctcttatatcgtcggtgccgaaaaatacgtctccgatggtgccgcgattgatagacgagtggtacaaagaatcggaaggagaagatgtggaaagggaagaagattgggtaaagtattggcctccactgccaccaccaccgcctgtatgatcatagaagctgccaccgtcgtcataatttgggattcctctggccatggaaaaaggtttatgggaagaagagaggag

SEQ ID NO: 5962 - DNA, 605 bp, Gossypium hirsutum
  unsure (1)..(605): unsure at all n locations; Clone ID: LIB3828-011-Q1-N6-B2
atcaagaagttaaatgccattaagtaaatctaaatataaataaaagaacagaagatatatgtnggaattcatgggtttttccttgccaccctntaaaagattactcaatgaaaaatatgtgctaaaacccaaacttttttttttttttggtccctatccattgtagtatatacattatatgaatatatgagcaaaataggcctaaattataggaaatcttaaatgaaccctgtgataccaaaatctaggaaaccaaatattcagaaggtgaaccaactggatacaatgataaaactcagctttaataccaaaccttatggtttgcaaatcgatctcgtaaacgtaccattgccaacaacaatggtaacctcgtgtcctagccggatcacttgcgagtagttactttcagggaaatgagcactggttgattactggcagctttcattgctgcaatctcttctaaccgtttccatgtggcttcccgttttgatttagcctcattttctcgtgcttcttcttcctgaaacatatgcaagcactcctcaaagagctcggggtcattgtcagagaaaatcttttggacgtttagtgtcaagctctgcact

SEQ ID NO: 5963 - DNA, 600 bp, Gossypium hirsutum
  Clone ID: LIB3828-011-Q1-N6-B3
aagaattgcatcccaatttgttggaaacatgataaagatgttataacaaatacaataccatttgttcctgaagcagcaaagaagccactctctgtcaatggtaatcattcttttaccaatcaaaagaaataaaatcaactgaccaaacattcaatcacttgaagacccgtcatcatcatgatcttcatgctccgtaacaactttctctatgaacctctttcgaactccttcgagaacagatgcattgctcccactttgaccatcattcagtacaggatctgattgacaaagaactaaggccacaccttcaggcgtgcatctgcggccaaaactatgcaagcctacataatttgctttcaccgctccgttgttatacaccaagagtgtgggaagattacgatctgggtagttaggaatgcaatctgtagatattatcttgacaaactttgttgcagggtatttaactgccaattcttccaaacactgcaagagcagcccacactctggaaatccttctttgtagagaatgacaacaacccagacatcctgaggagcttgcgaaacctcccgtacaaaatcggatccggaaattggcataac

SEQ ID NO: 5964 - DNA, 604 bp, Gossypium hirsutum
  Clone ID: LIB3828-011-Q1-N6-B4
agctgtacaaaccaagatctcattctccaatgacatactttaatatatgcagaaaagaaagaaaaaaagaactgtaatcatacctcaatgccatacatacacaaggaaataattttaagtgattcaaacattatgcaagttttgtttcatgaacaaagcctgggcaaggatcttgcagtgctatgagttggtggtgttttcgatttcatgagtttggccatctgggcctgcattttcttgcagagtttctccagttcaatcaccctccattgcatcccttgtaaatgagctctgaggttctcgttgtcgcccgatatgtctaatctccctgaataaagaacaatttgttcactgccttcacctttctttgccttgcctcgggtttcattgagtttacaaggggaatccatgtcgggtttactgttcttagtgccctgcagtaagttcttaagcttcaattgctgggaaacgagagcttgtaccgagctttttgatggaaatttcgcattctgggaaaggtgtacgcaagcatccgaagagagcttctcgtagttcagtgcgcaacagaccttcactttttcttcttcagacaaccctgcatgca

SEQ ID NO: 5965 - DNA, 598 bp, Gossypium hirsutum
  Clone ID: LIB3828-011-Q1-N6-B5
agataaaagattaaaaaaactgtttaattaattagttaaaaacgacataattagaacaatgatatgataataagcatactaatggcgttggtatcaataataagctgtttaaactccagggaccatgttgggactatagggaacgccggaactcggaatccaagtctcagattcaagatagacgcgaggagtccatttgttggcttcatttatatctatcttttttatacctttccatgctaccctacggctggtatcagcaccgggtcccctatttccaaactcggcaatgaaagaagtgtctattcctatggtacctgtcattggggcataaccctctggttgaatgatgtcgtcgattttagattgcattatgatagacctagcgaattgtttccagggacgccccaagtatgccttgtttgtatccttcactgggatgtaatcaggggcgcccgagatggtgcagttttgaagcacaatggctgagtttgttccaagatcattcctgccctgtgcagtaaccatgcaattttggccaggccctggcttcctcacgatgagcatacagttctggaaaatgctcgccgcatccccg

SEQ ID NO: 5966 - DNA, 603 bp, Gossypium hirsutum
  Clone ID: LIB3828-011-Q1-N6-B6
ttttttttttttttttttttttttttttttttttttttttttttttttttttttttttttttttttttttttttttttttttttttttttttttttttttttttttttttttttttttttttttttttttaaaaaggaaagggaataaaaaaaaaaaaacgggggcccaaaaaaattgggtaaaaaaaaaaaaaaaaaaaaagggggggggggcctttttttttttttttttttttgggggggggggggggaaaaaataaaagaacaaaaaaccctaaagggaaaaaaaaaaaaagggccccaaaaaaaggagggggaaaatttaaaaaggccccaaaaaaaaccccccctttttaaaagggaaaaaaaggggggtttttggaaaaaaaaaaaaaaaccttttgggcgggggaaaaaagcaaaaaaaaaaattggtttttaaaaaaaaaaaaccgggaggggaaactcaaaaaaaaaaaaaccttgggggggaaaaagggaaaaacccaatgggggagggggggggaaccttggggaaaaaaaaaatggggtgggtttttggggcccccccagaaaaaaaaaataatttggggcccctgtgtt

SEQ ID NO: 5967 - DNA, 522 bp, Gossypium hirsutum
  Clone ID: LIB3828-011-Q1-N6-C1
ggtctaaaggatgggtacaaaagtaacattatgaagatatacaatgttttacatcataccgatttaaacttatagactataatattttgatttgcatacagataagcatccatagtgcagttcagattcgactaaattgagcaaagttcaagaaatttcagaccctaaaaagtgaaagtaagaaggaaaaaaaagatagatgagtacttgaaacgattcttctttatttttcaactttcgtacttgaaatattcagagtcacgtagcaagcaatcttctcattacgcctgattccaaaaaatctcacagtgtacctagctgcaaaatcagaagaggtttagcggcaaaatcaagcgatccggagaaggaaaacaagatgactctttagcttcaaaaacaaaaacaccggaattgttttgattttcgagattttgacgaaaagataaacatggaataatcgtcggtcgggaaatctttcaagaaaatttggattttcctcaaaaatacaccgaccagataaac

SEQ ID NO: 5968 - DNA, 606 bp, Gossypium hirsutum
  Clone ID: LIB3828-011-Q1-N6-C2
gggtaatataaagttcttattctagcattcaaactattacaatgttctaaaatatatcaaagatcaaaactcatccattgattcattgaacagatagattctcaataataaaaacatgaagctgaaatgacaaagagaggctaatttctcaaatatatatatgaatgtgtgtattttttttttctttggatctttctccgtttgacaaaattcaagaactaaactgcaaacgtcaaatccattacagaactcctgaagaactttattggaaaaacgctaatgaagcagcaaaaacaattcgcaagaggtgctcaaattccttaggtattcgttcttcttaccacctgaatgtgacaagctctagtcagattcaagctgcttaatccttgccctcagagtggctatttcttcctccaaggccgtaactttgtctgacccacctgcatcttcaaatccctgaccttgtttcttggcagtctccatggtcttccttcttatacggagttctttaatataatggtgtaatttgtctataattagagataggaatagcaatccccccatgagagtagtttcgaggaggtttttggccatgagaatctcgtc

SEQ ID NO: 5969 - DNA, 573 bp, Gossypium hirsutum
  unsure (1)..(573): unsure at all n locations; Clone ID: LIB3828-011-Q1-N6-C3
ctggaattcgcacatattcatttaatatttaagaaatacaaattaaatagatcgagcactcctccatgcaccgtcttagctcaaaaaaaaaaaaaaaaaaaaaaaaaaaaaaaaaaaaaaaaaaaaaaaaaaaaaaaaaaaaaaaaaaaggggcgggccgccctttnttttttttttttttttttttttatccctaaaaggaattaaaataagggtttaaaatttccaaaatccgaattcgaaccctaaatttgggaaattctttttttttgaggaaaaggggaaaattggaatttaactttaggaaaaaaaaaaaactgggaattccaaaaaaacaaaaccgggtttttaaaccccattgggcccccacaggctaaaaatctgggccaatgggttcttaatatcatacagggaaattaacactacgtttttttggaaatttcatttgaaagacccctaggcaaacccagaggaaggggattttaactggaaaggggatttttataagctcccccagcaaaagctgcaaaaggatcaaatgctgcagtccttgaaccagtttaagaaaaccta

SEQ ID NO: 5970 - DNA, 592 bp, Gossypium hirsutum
  Clone ID: LIB3828-011-Q1-N6-C4
aataaaattcaatcatatatatatattgaatttaatcttaatacacaatcgatgtgagatcgatggtcgtcttcggaccgaaacaaggcccgctaggggaatgaaaaagaattttcgtagaataatactctcaaaagtttataacaacaaatgagtccttacaaaatgctccatatccttgctattactagattttgcaccaaattttcactactataacatgatgcttccctaagcctgcttgcactacaaatatcgggaccagattccaccgaatgcatagtttttttattcaatcctcagttcaccgtggaaaagccgggatcttgaacacggggaatcgaaggtagcaaatcactcagcaggtaatattgacaccggtttctctagacttgccatgtatgtcatgtagacagtccataaatatgagaacgaattgctcaccaacggctgcaaatgaaccgggatgaacctgaaagtgatgaagtcgcaaaagggccagtacattataccatttaacatcgtaggaagtaagtcacgctttaatctggaaataatttcatcaccgctttcaccttgtagacgagcattc

SEQ ID NO: 5971 - DNA, 606 bp, Gossypium hirsutum
  Clone ID: LIB3828-011-Q1-N6-C5
ggcaagcataatttagacaaccattctcattcatatcacagaccacgattaaaagacattacttggatacaacagactggtttttagtgaagacaggcaaagaacatagaagatgacactttgaagagtttcaaaagagctcacagaatatccaaaagtacagatgaaaagtcagagcaacaaactacatttttatatatagagaagtttgatacaattgaaccggcactcgaaattgacccttcattcgaatgcccactggttctcccgacgaacctcttcttcctcttccggggtgaagtcattcttgatattgaaagtcttcctgatctcttctggggtctttcccttgatcatgtcagcaacagtttggcaagtgagatccagcaaacccttgatgttcaaatagttcgctgccagaatgagatcaaagagagtggcttgatcgaccttgacaaagtcagcgtcccaactcttgagctcgtcatcggcggatcgatcgtctgtcttaggagcctcgacgtgtttcttgcagtactcgatcaccttcgctaagatcttgctcgtaacattaggcaacggtatcccgttatcagcgcaatcgtc

SEQ ID NO: 5972 - DNA, 573 bp, Gossypium hirsutum
  Clone ID: LIB3828-011-Q1-N6-D1
aaggaaatgatgtatcaatattaaatgattaagactccttgcaaggagaatgaatacaataaagaaagaacatttcctcaatatccccaagcatctcgctcatttcttgaagttgaaaagcagttacatgatgagagttaattgcgagtggtctaacaaggcttgttttggcggcactcgagtgttcctgaccacctcaccaggagtggcaccatgtgagccggcttatatgctatcatcttgtcgcctccgaatttcttggcggccctcgggtctcctgattgtgtgaaaatggcaccgttcaacatcaaatcaccctctgatctccaatcccagttcttccactcttgttcagttgcatattccctcttgcaaacctctttagctgcaatgttacgtggggctctaaatcggttgccatggctgataattgtagggtgactgctgcctccaatagcggacatgatccaatgacggtaatcgttgttcacaacatggacgaaaccaaaccggaccctaggcatcctttgtaccaaatttttaccgaagtgggtgaaagcaaggtgatttgca

SEQ ID NO: 5973 - DNA, 565 bp, Gossypium hirsutum
  Clone ID: LIB3828-011-Q1-N6-D2
gcttaactacccttggagaccatttcattaacataaagataatgggcaaattcagtaccaaacaaaagcaaagccaaaaaaaaaatgtaaatttacaaataagctgtaagctgccactaaaacaggctaatcaagtagatccaatcccaaggggaagcatcacaacctcaggtgacagaagagggaggggacaagatctaccacggaccacgcaaggcctgcatattgaaggaatcggataccagtgtcgacatcaaataaatcttgttgagagaaaaataacatcttggggatataacttgattgctttatctcactggatttcttggctgtagctgaaccattaagcattgggatgtagctggttgattttattgggattcccaatgtgtttgacactactgggagaatccatttcgcaagagccttgctgcaaaacttgacaatcaggattgtcggtatcccaactagcattcttcccaaaaacgtagggatcgtgagttgcgaggtaaatattcgtggaacagcttcatgggggaactggtgatatgtctgttgaatcccg

SEQ ID NO: 5974 - DNA, 599 bp, Gossypium hirsutum
  Clone ID: LIB3828-011-Q1-N6-D3
gaagggcaacgtccaccatcccaaattagcacactgtgttcctaagttaacataaccagacaataaataagtaaaatacaacctcgtggcacagggcagtagccattcaaggtctcttcagacccctatcaaccatacatgtaattattcaatcgcacgaatgccttagattggccactttcaaactcactaccaagaccctgaaaaacccggaggtgataacattagtaattgttttgccacaactgttgggtctgctttgatggctggccttgagacccactcagggatccatccatagggttttgctgctgatggtcccccaatactcctgtttgtgaatggtagaaatttgggtatccaagagccccaaaatgctgcgaaggttgttgcccttgtcgaaatccaccaccctgctggttttgcccctggaagctgtaataattgcttccaggaacagcagacattgttcgtgagccagggccatgaacccacatggccgaattctcagtctgttgaagcgacatcaaatgattgctgtccttgtactgagaactcagaatatcatcatagccaatggttgtgcctgcaggtgctgt

SEQ ID NO: 5975 - DNA, 588 bp, Gossypium hirsutum
  Clone ID: LIB3828-011-Q1-N6-D5
gatcaatgaatgggataaattgtgattaaaaaaacaacaaccagcaaagtctaacataagcaacttccaaagacacgagcacctctgcgtcgaatcaaatcgggaaaaggaatggagaagacattggattcaccaaaatctcgaagcaaacatcgacaaagggtacaacgatatcttaatgttttcatgggattttttcagtaaacaaataggtaagaatccaaaccatacaaaagcttgccattaatctctcttgctgccccagggatggcatactttttccaatcccattccaaggcaatgtctgaaccctccttccttcaattcggaaccagaatcatttgatcctatcttcggatggattgttccgacaatagcttcgatttcttctttagccctttcaaacacattaggtgctttaacttcatttagtggggtggtttcatctatatcattactcttcccatgagtttctttgtggtgatggtttgatgatttgtcatggtgcaagatggcccctatctcttccttagctctttcaatcaaattaggggccttgacaccattttctggtttgtcatgttttgc

SEQ ID NO: 5976 - DNA, 587 bp, Gossypium hirsutum
  Clone ID: LIB3828-011-Q1-N6-E1
aagaagataatggtaaacaccatggaaaatattcctccttttaaacaaaactgtttctaaaaggccaaaaaaaatcatttcaggacccttcaaaacaaaccaaaaatactgaattaacaaataaaaccaacgtctaattcattctccgaattagctcattgatgtaattctcacgggtgccagcgtctcctccttcaacataggggtttctcttcttcttcagaccacccaaaggcgccttgagcttgaagggccagaggaaattgttggcctccttaaaatgaggtcccacagtcatgatctcatggatgagatcttccacacagatgatgccaaacttgcccagagcctgctccacgattgcgttgtcagtcaaagcagttctctgtttgttcaacttcccaaaacctcttttgtaaatcaattccctcacactcttgagattagggtatccgtaagtcacataaggttcgaccagatgaagcatgttcattgttgccttgttcactttaaggaaaacaccattgaaaatctgtctcaaacgcaatagctgcaagatctttcttgttcttgggtgcatggcattg

SEQ ID NO: 5977 - DNA, 601 bp, Gossypium hirsutum
  Clone ID: LIB3828-011-Q1-N6-E2
aacgtggaaatggtttgtttaacattccagattaacattcaagtttaacaatgaaatctacacaaaagaaactgctttaccccctgcttaaaaaatgagttcagtttcaatggtgtagagcataaaaagtttagtaatactgggggttaaaacccatctaagatgcaactatttacattcgcactaacaagacatgcagagaattcaggttttcaagcagctggcattgagttcgaaaggaccacatacgaaaaattttggagtccatcctggattttgctcactgcaatgttctgatcactacggagatgttcagagaaggaattagctttctcctggatagatgcttttgtaagtgcttcatgtgaatctgcattaacactcttaatggccgctagataagctccagctacatcggatatgcctgtgataaagctgctggatacagcttccacgtatcctgtcattgattgtgccttcaatcttattagtttagccttctcaacagaatcttctggccagtcaatattcatcatatcaccatcggcatcttcatcttgaactttgttagaaccagatatgacagatttacccagcatca

SEQ ID NO: 5978 - DNA, 286 bp, Gossypium hirsutum
  Clone ID: LIB3828-011-Q1-N6-E3
cagttgaaaccacgacctactaaaatatttaactaacgggtcatcaaagctacaaatatcagagcaactcccattccgtcattgtcatgggtagtagatatggatgtgagaatatcatcaaagccaaaaatcaggctctgccctccccttctcaacacttcccacaataacactttcaaattacaatccgctggcccttcaacaccaaactatatacatttctccccaaactattaccaggaaacagtcatcatccgcgcattagatcaatgtcgacatggctatt

SEQ ID NO: 5979 - DNA, 448 bp, Gossypium hirsutum
  Clone ID: LIB3828-011-Q1-N6-E4
caaaaaaaaaaaaaaacacccaaatacgatgctaatttagccttaaaaaattctagcggcggtgtgggcaaaaagtgaccaaatagttgccgcgagagcaagtagcaatactggtcggatcatcgtaagcataagaataagctttaggacaagcagtcttgaaaatcttcgaatacgccgtcggtttacacgactgaggactgccgaagctgccggtacaacaatatctcggtgaattaaaagcgaaacaagcgcttttacaagccaccacttgtttattatccctcacttgtaacgcgacggggcacattaaattcaagtcactaacacacccggcgtagctacatttaccggcgcctttgaaaggtgtaatggacatagcgatgttatagccatccaccaaactgacgtcgtagaaatcttgttgttggccgagggtgatttccgc

SEQ ID NO: 5980 - DNA, 599 bp, Gossypium hirsutum
  Clone ID: LIB3828-011-Q1-N6-E5
gatagaaattcataatcaaaatagatgacaaacgccacacggttttgccttcatttgtagagcatgaagttattcgaatattatcacaatagcacaacagtcaaacaccataatcattggggaagcgtcaaagcgcttcacttgagcagccccttagacttcaaatattccacggtttggtcgtagatttcctcgatcccatacttaaagctgaatccttcgctaataagcttctctgaggaaatgatcaacttgggtttggaggggaaatctccaaaatcggtagggactttgaagtcagggtatcttttgttgaggaactttgctagttctggcacactggtattgacagcactgcatatatatcgacccgatgcagattctttttcagccagaaaaacatgggctcggcattcgtcttccacatgtgtgatagagatcgaacctgacagcatctgcattcctttcaaagcatttatgaggaattcattgcctgaaatcaaagatgtagcaaggcctatgctgctggggacaattggggtaagggaaggaccagtcatgagagaagggataactgtaatgagatcaatgttgttttc

SEQ ID NO: 5981 - DNA, 576 bp, Gossypium hirsutum
  Clone ID: LIB3828-011-Q1-N6-E6
cactccacaatgttgacaataccatccatcaaacaagcacagaaacaaagcaagaggatcacaagcattatcaccattacaaacaccaagcctattgtttctggaaaaggctccccacgactttaatactagtaatactattatttaattgcagccaaccattacaagaggtggtggtagatgcacttttgtatagaagaagccaggaagaattgcaacaattaaggttacaccaaagtgatcaaagaccctggtctatgagataatcaccaagcctttccacaatcatgttgcactggcctggagtcattggctcgtcatagatcccaatgatcaaggccaggttggtctttttaacagtaacacctccggggccctttttccctcgaataacagctccgggttcaccttggatcaccatgtattttgtgccaccaaggtacaatccagtcggagcaagcgatccaggttcagcaaagtcattcatgatgccagtgatttcttctggcttgaactgagggaaattggagctctgggcccaaacgctgccgtcttggccaatgatagcggcggcag

SEQ ID NO: 5982 - DNA, 603 bp, Gossypium hirsutum
  Clone ID: LIB3828-011-Q1-N6-F1
ttttttttttttttttttttttttttttttttttttttgggggaaatattttttatttttcaaaatagtgtcaaaaattagtatgtaaatttttagggcgttcggaaaaaaatttacccattgaatttttttttcaaataacgttttggtaaaaaatttgttttgaggcttttttggtgtaaataaatttataaagacccaaataacccctaaaatgctcaaaaaatagatgcccactttcgggatccccctggaataggatcataagtttgtccaagtcgcgaatttgatttagggttttagacaaatgaaaggaaacttgaagttcgagtttgactcaacctgagcaatccaagtttgaattgaaaggaaaacaaccaaaatcaagttataataaaacaaggggattgaattaagaattaaggcttctaattaagtgaatgccaacaattaaaacatttttgaagaacctagactaaaaactggatgaaatcaccagaataattaaagagaaggttcggtcagccaaaaacaatgaaaacccaggtgtttggagtcatttaggtcgttcttgatgaaaaagaagctgtcgaacaaggatct

SEQ ID NO: 5983 - DNA, 609 bp, Gossypium hirsutum
  unsure (1)..(609): unsure at all n locations; Clone ID: LIB3828-011-Q1-N6-F2
accgataaatttggaacaatacatntgaaataaactgatacaaaagacattacgtccacaggtgcgatactatctatcttgggtggaggtaaacattttcttcaatattgtgataattacataatgaaaatattaacaataaggagtgagaacaaatccatcattaatcacacatatattcaacttctcttttgagacgcacataatatttttttttaatccatcttggtcagtcaaatcacacacacacatataaactaaatttattgcaacaatggccaataacttactttggagacctaaaattccctctctgggaaaagaataggagcaactagagaccatacatagagacctgctgttgcccacccagttataatccgaacccacaccgatggccatcctacgtcgactaacttgccgctttctccgaccgaggttgaccatccggttaaaagcattgctgagtacatacttgcaagagaaaagattatgtggaagaaggcatatgaataggagaccggcttgttcttctctttttcttcgtgttcatctgccttgtccattggaagcaaaggctttcctgcacgaggcgagcttggtggggag

SEQ ID NO: 5984 - DNA, 660 bp, Gossypium hirsutum
  unsure (1)..(660): unsure at all n locations; Clone ID: LIB3828-011-Q1-N6-F3
tcgccatgcacgccgtaccgtaagtcttggncatccctctagtaagcggcccgcccctctttttttttatttttatttttatttttatttttttttttttttttttttttttttttttttgaaacaaaatgtaaagggccttcaaattaaaataaattattttacaaaatatttataattatagacttaatggcatttatagattattaaaaattaattcttgttctcaaaatcaaccatttcaaccccaatgtttatactggtgaaaataatcttgccaagtaacaaatgcagttctggttttggggagttaattttggctttttcgaacccattttcgcactggcttatttgatccacattagagcttaaccccatgtttaggtcatcagcgtcacgtttaaaaatagcatcaaggattgcttgtttgtttttgaaaatggctttgtaaccatcaatgcaaatttttaggggaaaagggatggtttttgaggtagggggatcccctgcgagttttgtagcctttgccaaggcttccttagccttgctatcaattgcttcaatctcagcttgaaaaacagtcacgggacttatatcagcagtttcacctaggaatggaccagctgttggaacacattcgggggggtgattaacttcttg

SEQ ID NO: 5985 - DNA, 616 bp, Gossypium hirsutum
  Clone ID: LIB3828-011-Q1-N6-F4
gttcacaaatttatttatatttcacaatattgtatacaaattatcaatgcatgcatttagctccaataagcaaaacattgacaaacaaacaagtgatgctagactacaattaaacatattaaaatatattatcacttagtgaacaatctgggacaaaattagatgtctacagatcctacacggatatttttcgataccgaattggcacagtgataatgcatttttttttgctcataattctttaaactttgtatcatatatatatatatatatgatacaatttcagtgctgctaaaaaatttttgtattttctcaattctttaaactctttaccgcatcctaaaacccatgcctaggccttttgcatttgtgctgaaaataagttggagttctctcacacattccggcatcgacggccgctctccgctctcaacacggacgcaacgtgatgccaggttcgcgaacatagctatagattcaatggtgtatgaactctgagccatctctggatcaatcactttacgtagcttctttcgatcattcagtatatgcctaacttggagtacaaggttttgatcatttggtccttggtttatgtcaacagctctgcgtcccg

SEQ ID NO: 5986 - DNA, 609 bp, Gossypium hirsutum
  unsure (1)..(609): unsure at all n locations; Clone ID: LIB3828-011-Q1-N6-F5
aaatatatgagacatttaaaacttcattaaaaaagtttttgagatatacaaatacaatacactcgaaaaaaagagcatannttcgaataactttcctgatataataatgcatcgaccaagttttttttatacaacattttttcccataaaattcctaagcatccactaagtctaatgcttatggttgcactgaaaaaaaaaataggtgccaaaatggtgtcctacccataaatctgccacattttacattttcatttttcatagtttcttataaaaaaatacatgtaaattctctccctatggcttattttagattaaataaaagacataacttgtgcttgcaattaagcaactcttattcaggctaaaatggaaaacagtgtgacctaatatcagcacaagcaaaagtagccttctttgtacattttgtagctaaacatcatcgtattacctatgagcagatgtatgcggcatagggtatgtcacgggtgcacctggaaccactgctcctggtaatgtagctctgactccgtaagccatatgtgccggagcaggaaggttcactggcgtgccaactgctgagatgaggggacctcctattggttgccc

SEQ ID NO: 5987 - DNA, 582 bp, Gossypium hirsutum
  Clone ID: LIB3828-011-Q1-N6-F6
cagctaccaaatagaccattcctgtcaccttgaaagatacttgagcaataacagtggctgctacgggcagcatatgtacaagatatatcccgagtcccattttatgcttcggaaataaaaaaaaaaggatattcggagtatgatagctcataacaagtgtcaatgtcttgcttgttagagagactacggtatacggaacttgctcggaaaaaaaaagtcttcctattctcttctggtcttaaacttgccgcctcatttacgggctatacttgtcaaagtcgtaaaactctatgttcttgtacttctgggatataatctctgcttgaacttttcttgcagtatcagttgcacatcccacaagaataagaaccgaagtgcccgcaaatcctcggaatgcagtcaagtgtgtggtttgctcgatcacggcaggaccagctgccaagattgctaaaaatactgaacccagaactgatatccgactaagaaccgtctttaaaaatgctgctgtacttttaccaggtcggaccagtggaatcgaagcaccttgccgcttcagttgttcactaacatcatcagggtcca

SEQ ID NO: 5988 - DNA, 486 bp, Gossypium hirsutum
  Clone ID: LIB3828-011-Q1-N6-G1
gtaggcaagtctttaattttaactatggaaacaacaaaaaatgcttctcttttctgggaaaaaaaaaagggtcaaacctccagaagtaaaaaaattggttactcgggaccaccaaaacccaaattctttcccaaagctccattatacttcaccacaacaagcttatccaaaagctgcttagattcagcaatatcacctaatgcacaacgggtaatgtatctgcccagcgggaaaagaagtcgggggcaaggccaaacaaggcaaaaaaagtttatcaccataaacaaaaactaccctttcgctcaacaccatccaaatgggtggcttcaacaactaacaaacaacaccccctgaaagccagaaacaaattgtttaaagaagcattatatcaaacaggtgaattgcatcgttaaaactagagcctaaagaaagaaaaatgagtcttgcgcgatatttgaaaaaaaaagacaagtaagaggcgttttt

SEQ ID NO: 5989 - DNA, 486 bp, Gossypium hirsutum
  Clone ID: LIB3828-011-Q1-N6-G2
gggggtggggggggtcggggggggggggggggggggggggggggggggggggggggagagggggggggggggggggggggggaaggggggggggggaaaccggggggggcggggagggggggaaaagggaagggggggggagggcaaaagggaaaaaaagcagaggggaaaggggggaaggaaggggggggaaaaaagggggaaaaaaggggggagagggggggggaaaaaggggccccaggggggggggaaaagggggggggaaggggggaaaagggggagggcccacaaccggggggggggggaagagggggagggccccagacggggggggcgggaaaaaggggaaaaaggcaaaaccggggggccccacagggggggggcaaaagagatggctgggggggccccacgggcgaatacccgaacgggggaaagaaccggggggcgggactaaagggggggacaaaaaaaggcggggcccaaaaa

SEQ ID NO: 5990 - DNA, 598 bp, Gossypium hirsutum
  Clone ID: LIB3828-011-Q1-N6-G4
cagttgatcttgcaattattattgccataaaatggatgaagggagtcaaaatagaaacccttctaatccacccaaaaaaagagtgttcacacgaaaaaaaaaatgttgcatacaatttctattattcgcatgaccaacacccaaaaggcaggcatatctcttctagttcctaaattgcttgccaaagctgaagttagaagctaaaacttcactcacttagcatgaagccatgtgtcgaaccaagtcgatcactcgagaactgtaaccccactcattatcataccacgcaacaagcttagtaaagttgtcattcaatgcgattccggccttagcatcaaaaatgcttgacctactgtctccgacaaagtcagttgagaccaaatcttcatctacgtaaccaagaattcccttcatggtggtctgagaagcctccttgatagcagccttgatatcttcgtaagaagccttcttctcaagtctcacagtaaggtcaactacggagacatcaacggtgggaacacggaaagccattccagtcagcttaccattcaatgctggcaaaactttgccaacagccttggcagctccagtgctgctg

SEQ ID NO: 5991 - DNA, 574 bp, Gossypium hirsutum
  Clone ID: LIB3828-011-Q1-N6-G5
cttcttgttcttggtcaatggtttacctttttacatcggaacggttgggactgttgcaagtctgtttctgtcgggttcggtgtcagtgatcctcaaagttccgggttgttgcttgccttgttgtttagcttgatgctgagaccagtatgcatgagcagctaataccctgtccaacagttcctgtggtactggctcccctcgtctttgctgtggggaaattttcgccgtgtgaaccaatgttttccatttatccttcaaatccacgtaagttcggtgatcggcattctcaaaagctcgcagtttgatatcacgccacctccccgtaccaagctcctcaactgcctgtaccaatgcttctacttctaaaactgaaaacggcctcctagttcgacgctgtgcaagttcggtttttcggacttttgggctggcagggatgacagctagtgcctcaacattcattgctggaacaggaactatagctctagactccgatagactttgatcagttagaacgtcagtttgggaggaaaccggttcatgattactatccacaggatgtgctgtatcggttagt

SEQ ID NO: 5992 - DNA, 551 bp, Gossypium hirsutum
  Clone ID: LIB3828-011-Q1-N6-G6
atcaaacatgccttttacaaggcattttacaatttcataaacgaggaaataaacaccccccccaaaaaaaaaaaacacaaataataaaatgtgggtcatttagtattgaattattcaagctttggagcctcgcagtgcccaattggcttcgctaccaactcggggcatcctacttgttctcgactgagcatcggccatgaaattggcaccacacatcaccccttcactgtcaattcttggcattgccttcattttgctccttggatgctcaaaactcatcaatccttgctcactgtggaacatacaccctggtggaaatggtgcaaatgatttagcacagctttcttttataagcttcaagttatctgaaacaactactgatccatcagctgctacaccccaatagagattaaccctttcatctgcacccaatgcagcaaatacacttccagctttgctatcatacaccacaaatccatagctgccttcaagatccttaaggacctggtcagccgggtacggaccacggtctcggagggtccgatatgctt

SEQ ID NO: 5993 - DNA, 531 bp, Gossypium hirsutum
  unsure (1)..(531): unsure at all n locations; Clone ID: LIB3828-011-Q1-N6-H1
cctttaaaaaacgccctttttttttttttttataaccaacagaacccttatattgacagatttgatttaaaacattttacaagaaataatttcctgccactatgcattttatatataatgcacaaattaacagcctaaagatctctgcactataaggtgggatccaccgggtggatactcaaaatggagggaaaatggagcagataaaattccagaaccacaataaccactgatgaacagataggaaggggaacctgttcttcatgtttaccacctcaggtgaatcatgggccagaaattgaattttcggcaatgactaccaggtgcacaagaagatttaattggctgaaaggaaaataatnagggtaagatatgacggaaaataaagaggagatcaggcagagggagggcnccaagatcagatgaacttggctttatccagcncaaatggaaacaacaaatttggtcagcttggcagcgacggttgaagttttagcacaaaaagctctggctnaatttgatgtttaaatg

SEQ ID NO: 5994 - DNA, 351 bp, Gossypium hirsutum
  Clone ID: LIB3828-011-Q1-N6-H2
attgcaaatcgaatattgttttgagctatttattcttcataattactctttttgtccaagaggattttatagcaaacccttctgcaacatcattacttcttattttgtataattaataagacgacaaccaactcttgctgggtatttcatcttaatatggtatcatctctctactttggtggactgggttcactgtccataacctcttctatccctttgctctttacagtttcagcctggcaacatcctgatgcgcacctgggctgaccacactcagcacaagtcccaccacaaccctgacggcaacactctccactctcacatcccgactgtcctggcattagtgggatt

SEQ ID NO: 5995 - DNA, 574 bp, Gossypium hirsutum
  unsure (1)..(574): unsure at all n locations; Clone ID: LIB3828-011-Q1-N6-H3
ttttttttagaagcaaaattttattttgatatattttgaaattttaatttgcagcatatctagaaaggagtaaagcatagtgctacaatcaaaatataaatatcgcctttattcttattatccaaggaaggctaatgccacattcaagagcttacatcagtcagtaattaagaaattctgacaagagagtggatcccagaaaattaaagaaaaaaggaaacaatatagtatctcactttcttccatgacagtggtcaatgggctccagccattccggttgngttgagagagagttgngttttgggattgggaagtgcaaattttgcccctnaagcactaatggcngccaaantngaccccaatacaaaggctggtnngtttccgccccccantgctgcntctatcggnccactnnntcctgntctnatcatctgtggggttccctcttgacaagtttagtcctccccagcccggccttgcccgccccccttctccggccntnnttgggtgcccctgcgattggggtgcttctgtccccccaggggnttccccctcaccccttccatgcccgtgc

SEQ ID NO: 5996 - DNA, 515 bp, Gossypium hirsutum
  unsure (1)..(515): unsure at all n locations; Clone ID: LIB3828-011-Q1-N6-H4
gaagaagaaaaagtgtctattagcaaacggtgttgggtacatgatcatcccagcatttattcattcaatacatggnaaagagaccagtatatgctcttttttgttttcatggttgcacctgaaaccaaatctggctaaattgttgattgttgtaatgattggccgagacctcaagaagggttgcagtaggatcaagcacatccattaccatctcagtcatcttatgcaaaatggttccatcgcttcgaaatacccatcgttcctcaacaaatccatcacacgtagccacgttgaccaacccactataatcatttgcatacttgaggcacccgtttctattcttttgaggcctgatggtcccatctggatatatcgcccattgttgttcagcatcgttgctcacgcagtcttccagccacacccgacttccacttgctngcaagcacatgtctttgtaaccgacactggtggtcactgctggctttgttttgctgctggccttgaaagtttgcctt

SEQ ID NO: 5997 - DNA, 569 bp, Gossypium hirsutum
  Clone ID: LIB3828-011-Q1-N6-H5
caaagtaattgaaggtaattcatatattcccaaaaatacaaaatatttagaggggaaataaccaaaaaagaaaggaaaacattggcctcaaagagggcatatgatacgcctaacaaatacttccaacacacagttattcaaatgatttaagacaaatttcctctggatcatcttcgatataaaggatgatgtccgaccttggatatgcctctcacttggcactcgcaagttgggtgcggagcagcttggcagctgcaaccatgttgttcagggctggcttcacctcggcatacttgcgagtcttgagaccacagtctgggttaacccacaagatgtttgtctcaagcacagcaagcatcttgttaattcggtcagcaatctcttcggttgatggtattctgggagagtggatgtcatagacaccagggccgattccagcaccatacttcactccttcacggaatacagaaaggagcttttcatctgaacgtgagttctcgatggttatcacatcagcatccatgtcgataattgagtggatgatgtcattgaagttggagtagcacata

SEQ ID NO: 5998 - DNA, 420 bp, Gossypium hirsutum
  Clone ID: LIB3828-011-Q1-N6-H6
gttaaaaaggggggacttggggggggggggggggggccggggggggccgggggggggggggggggggggcggggggggggcggggggggggggggggggggggggggggggggggggggggggggggggggggggggggggggggggggggggcattggggcgccttggcgctccccgggggggccgggggggggccgggggggggcggggggggggggggggggggggggcgggggggggggggggggggggggggggggggggggccccggggggcccgggggggcccgggggggggctgcttcgggggaggggcggggggggggggggggggccgggggggccggggggggcccgggggggcggggggggggggggggcccgtggtgggcgggccccggctgggcgggggggggggg

SEQ ID NO: 5999 - DNA, 577 bp, Gossypium hirsutum
  Clone ID: LIB3828-012-Q1-N6-A3
ggcaatcatgctatcattaagtcagttaatatgcaagtatctgtacacctaaaactatgattttgaagtttttagttttagaaaataataagctaaaatacatatttcatatgacgataacaaattagtatgtaatgggaccctttgttattcataaacaaattcaaccagccttttgctcgaaaatctcaaacttagaagacaaagtagccggcaacagcagcagctccggtgacagcagccgttaccccaaccatggttgcaccatcactgctaggaggctggccagtagcaacaccactgatagcaccagcaaccgcactgccaacagggccttcaactgtaccaacactagagggtgcacctgcaactttaccaatgtgtccaatgtcaccattactgtcgggtgtagcggcaacaacggtggtggcggcggtcttgatgtcagcagaaaccatcacgaaaagggaaattaagacgagagtaagagcaaggatttggcgtgccatttgttcttctataaggttttatgattaacaaaagagattttcctttttcgataatgattaacaaatag

SEQ ID NO: 6000 - DNA, 51 bp, Gossypium hirsutum
  Clone ID: LIB3828-012-Q1-N6-A4
ttttttttttttttttttttttttttttttttttttttttttgtttttttt

SEQ ID NO: 6001 - DNA, 577 bp, Gossypium hirsutum
  Clone ID: LIB3828-012-Q1-N6-B1
cctacgataactctgaaacatatatgacagcaatatatatacaatataatataatataagttaagattccaactagaaatgcggaacttaaatttggattatgtcctgtaattcccgagggccatcgaacgactgtgtttttctcaggttccaatggaggccgtcttggatgctggataagaaatcacttgtagaatcaacttgacatgctgtaggaacaggacatggtgccatactgcacaaaagagcatccccagcagctaactgttttctgtccttaccatcaaatgatgcccaagctggacttctgctattaaatggcaccactattcgcaatgtgacatgctcaggcaatatcaggggtcgaaacgataatgaatgcggacatatgggtgtgaacaagataccggggacctgtgggtggaccattgatcctccagctgccagagaatatgcagtgctaccagatgtcgttgacaaaattaaaccatctccttgcacgcatgtgacaaaggaattgtcacaatagcattccagatttgtgaggtatgatgatattccacggtctattgtaacc

SEQ ID NO: 6002 - DNA, 468 bp, Gossypium hirsutum
  Clone ID: LIB3828-012-Q1-N6-B2
aaaaacaaacaaacaaaacaccccttataaaaaaccaaacccggtaaaacaaaattgggaaaaaaaaaaaaaggccacccttggaacccgggcccaaaaccaaacaaaggggtaaacccaattccccccctgggggggggaaaaaaccccaaaaaatatttaattcggttaaaaaaacctttaaaaaggggccgaccccctttttttccttttttttttttttttttggccaaaaaaacaagggggagagatcccttttttttggggcaaaaacccttaaaaaagggcaaaaaaaaaattgggggttggggaaaaacaccaaagccggggaaaacaaaaagggggaaacaggggccaaatccgggtttggccaggggaagttaagggggcgggaaataaaaaagggggcgggggggggggcaccccccgtttgggggaaaaaaaattgggccgcatcccatgccggga

SEQ ID NO: 6003 - DNA, 433 bp, Gossypium hirsutum
  Clone ID: LIB3828-012-Q1-N6-B3
attcaaagctccattttattcaatttttttttcagtattcatcacatgtttctttcaaaaagaataaaataaaacattcgttcacatgttcatttttcatatatgtagcttattgtagcatgtaagaaaacaaagaaacaatggaggccccaaccaatgatccaagaacaggcaaggtagcggcagccatgctggaatccggtcctgatgctggagcggaaccaggagaggagctaggactagaaccaccggctgaaggggcaggagatggtgcatcggcggccatgacggcgctcattgaggcggcagcaacaatgatggcggtggagaccttcttcatgtccatggcgtataaaaggattattaaacgcaccggaaatgaatgagacctgcgtttaattacggggatccgccggtgattgttattatttgc

SEQ ID NO: 6004 - DNA, 606 bp, Gossypium hirsutum
  Clone ID: LIB3828-012-Q1-N6-B5
ggactaaatcaagacacatgcatatatctatatataaatatcaaacaccaaaattatactgagattttaaaccacaaatattgtcccatgaaggttcaaatcaaagtattttccttcatggatcaggttgagcttcggttccggttctgttatattccgatttcggttccgaatcagattcggcatcgaatttcccgccagaggggcttctcttcatcgaagatgtcttagttagatgactgtaactgcctttttccttaaacaattgagcgaaatggtgcttgcaatacaggaaaccgtccaatgcggcatatgacgatgttgtaagaaaacaacctccatgtgcacacctaaagcagtttttatggtatatttcaccttccacagtcaccttttctaaaggataacaagttttcttacagactccacatttgtcttgtgtgccagagaaaagggatgcaactttgcttggtgccctttgcagtccattgggcttgtctttggaagtgtaactcccggttcccctaaagaattgctcaaagtgaggcttgcaataaaggtttccttccctttgacaatggcttcccatcacaagaaggcctttgc

SEQ ID NO: 6005 - DNA, 435 bp, Gossypium hirsutum
  Clone ID: LIB3828-012-Q1-N6-B6
acatcaaactctccacttttaattaatacacataattaatagaaattacataaaatcttacgagtctgcactcacaaactatattattatatatatagcagcgaagaactatataaatatatatatcacacgtctttctcacaaatacttatgacattaattactggtattacactggctctaatccactgagatagtcatcaagggataccgatgatggggaagaaaggaacataatagctggatggggcaagtccccactccgggggtaggggcagatcgacggtcttggatgaaccgatccccttttgagctccacatgatttagcatcaatggatgccgaagggcatgaagtggaaaaagccactggagtggaaagggtgtaagtgttgggttgatgtcccaccttgacaaccttggacaccaggtttttc

SEQ ID NO: 6006 - DNA, 128 bp, Gossypium hirsutum
  Clone ID: LIB3828-012-Q1-N6-C1
aacaaattctatgtcactacatccggtttaatttaggtttagctatttacaaaagctttcctaagattattcatttggtgcagtgttgcacatttatttttggttttgtaatgaaacccacgctttcg

SEQ ID NO: 6007 - DNA, 602 bp, Gossypium hirsutum
  Clone ID: LIB3828-012-Q1-N6-C2
ataaaacacagataaatccatttgggtttttgtttttcacacttggcctttgaaaccatatgcatgataatcaaaataccacatcattaacttggtttagaaattggagaccgtccacgtcccattgtgaatccccgtgttccatcaggcattctaggtcccggtggtggcttcgatggttctacggcatggcatgaggatgtagttccatggccgtgtccattggcaccacgatttttctgtctcctccctcgtcctctgtttctaggtcgaaccccatttttctctttggacaaatgctccccatcctcatcatctggtatatcttcatgatactcacttgaagcatttttctcctcggttccagtttgatcagatacctgagcattgatgtttttttcatgagcaggtcccctccaagcttgctttcgctgtccatgcttaccctttcgctcaagaagcttaacatgcatgccatttctccagtcatgttcatcgttcaaagtagccacagctttttcagcagcctcaatagtctcatactccaccagtgcgtgtaacttactactgatcaatatatcggctctaccagttttctttgt

SEQ ID NO: 6008 - DNA, 512 bp, Gossypium hirsutum
  Clone ID: LIB3828-012-Q1-N6-C3
atcggaaaatatgtaaatttgctatttaatgcaatagattgaaatttgaagaggagttacagagtttgtgacaactttccagatcataaatcttacaagcattgcaacaaaatagtacatcttgcaagaagaacaagtaccttggacaaaagaagcagcagtttgatcaaatatgcaatcacgattcttcctctggctcttcttcttgaagaaggttctctctgttatcatgtgcccaaaacccgcgcacatctatgagcatgctggccacagtcccaccctgtttacaagctaggaggtcagccaacgtaatcctcaatggatcggctggctttaccatatcccatatttcatcccgaacatcttcgatacacaattcgtagttgcccccttcaatccatttctggtgtacatctctgaaaagagaatgaatatctgctgttgtgaggaatcccctaccattaagatcaagacaacggaacaaatatgttaacccttctggagtatctttg

SEQ ID NO: 6009 - DNA, 608 bp, Gossypium hirsutum
  unsure (1)..(608): unsure at all n locations; Clone ID: LIB3828-012-Q1-N6-C5
tnttttttactttaaatctcttttattcatataataattaaagataaaaaaaacagctagcacattgtaattcaatcatatatcaagctgcttggttattctttattttctttctctttgtatagaatccgtagtttctataatctatatataaatctatgaagattctggcgccatagcttgtatattcatggccttctttttccctaaaagaccattggcatcaagtttcatggtaaggtccttaatcgttcgtttgagttcatccatataagcgataccaccaccacacccattattgaacctgcggtaagggcatccgtaattgcaggtgccgcaaaagctgccgcccatgatatccacatcgtcgcagtcgatacagtaagggcttctttcataacctatacctatgccagcaccgaatccggtaggatcaggatcgatagaggttgaagaatcaggatcagcttcatgcggaaaaccgttgcttggttgaaacccatcggctccgtcagccatggtggagattccggtcctcttaccataggacgccgataaacatactgaaaacagtaaggttatggaaacccaatttgctgcgcctgccc

SEQ ID NO: 6010 - DNA, 572 bp, Gossypium hirsutum
  unsure (1)..(572): unsure at all n locations; Clone ID: LIB3828-012-Q1-N6-C6
gttgaaggttttagcagaaatttatataacanaagaaaatcatatatattagcatgcacatgcattaattacatatggctacaaaacaagattcaaggaactttaggatattgcaaatcgaatattgttttgagctatttattcttcataattactctttttgtccaagaggattttatagcaaacccttctgcaacatcattacttcttattttgtataattaataagacgacaaccaactcttcctcgttatttcatcttaatatggtatcatctctctactttggtggactgggttcactgtccataacctcttctatccctttgctctttacagtttcagcctggcaacatcctgatgcgcacctgggctgaccacactcagcacaagtcccaccacaaccctgacggcaacactctccactctcacatcccgactgtcctggcattagtgggatttttgggacttgtgggatctgtgggacttgtgggatctgtgggattagtggaatttgtgggatttgtgggatctgtgggatttgtgggatttctggaattcttgggatttctg

SEQ ID NO: 6011 - DNA, 568 bp, Gossypium hirsutum
  Clone ID: LIB3828-012-Q1-N6-D1
aagccttgcatatcatgtgaaagctaacttcgaatacaatcccctttaaacaacagtacacacactacaataccaaaattaaatactaaacctgaaactggtttatgcattccccccatctgccaataaaacttggctttaaagcaactacaagacctttacttcttcattctttgccatcggctgcacgaagtgagcccagctggactggtgcttgagttcccacgaccttggatgacccatagacagataggtctatgccttgagccttctctttctcaatttgttccttgatccagaagtatgtaattctcagcccatccttcaacctcattgtaggagcccaaccaagtttttctttgatcaacgtattgtctgaattacgaccacggacaccctctgggccaggaatatgatggattggaagatttttatcctcaaagctaagaacaatttctgccatctcattcatgctgaccatctcatcacttccaatgttcacaggttcgcggaaatctgactttgtcaatctaagtacaccttcgacacattcatcaatgaaggtgaa

SEQ ID NO: 6012 - DNA, 383 bp, Gossypium hirsutum
  Clone ID: LIB3828-012-Q1-N6-D2
aaaattaaaaaaaaaaagggaaaaattttttaacttaaaaaaaaaaaaaaacttcgggggaaagggaaaaaaaaaaaaaaaaaaggggggccccaaccaaagaccaaaaaaaagggaaaggggggggggggacccgggaaaccgggccaccgggggggggaaaagggggaaaagggctgggggaaaaaacccccggggaaggggaaaaaaagggggcattgggggccaaaagggggccaatggggggggggaaaaaaaaggggggggggggaacccttttaatggccaggggggaaaaaggggttaaaaaaccccccggaaaaaaaaaaaacccgggttaaaaaacggggaaaaggggaccccccgggaaatggggcaccccg

SEQ ID NO: 6013 - DNA, 570 bp, Gossypium hirsutum
  Clone ID: LIB3828-012-Q1-N6-D3
atctaaagaatcatattttaaaacttataatcaagaataaaatgtacaaatacttcaaaaaaaattaaataacatagatttcaacattatctctctcctttatttgaattttgaatcattatgcatgtatatatattaaaattaagaaaattatttggactatgagtttaataatagataaacttatgtttcatttaattattcatttattcatattagtccttgaagaaggaaatgctctaatgaagcaacattttaacacttaggaggatatgcaactccacacgagctagctacctttggaatgttgggattgttcatatactgtttaagagttgggtccttaatgtaaccacaaaagcatggttgctgttccttcaacttactgcaacaagcggctgaaggaggctgcgacggcaccatgattgccgctaagcatggactgagctcgatggggttacatgtcactgcctccaccatgcatgtttcacccgaaaacaccaccaccgctagtgccaccacacacaagataacaaaggaaaccctcttcatattctttattctttttcc

SEQ ID NO: 6014 - DNA, 592 bp, Gossypium hirsutum
  Clone ID: LIB3828-012-Q1-N6-D4
atatagacagtgcaaatcccatttcaatatcaaatcaaaccatattgtactacaagtctacaatgcattcatttcgaatcaaacataaaattcaacatgattcgcttcatcgaaacaaaaacggttaagatcaacggggggctttcttcttaccagcaatggcaactctcttacccttcaaagtccggcaattgtttttggtgtgctgtcctctacaaggcaatccctgaatatggcgaacccctcggtagcactgaatctctttcaatcgccgtatattaagagcattgaaccgcctcaagtcgccttcaatcatatatttggagacttcatcacgaatcgtaatgagctcttcctccgacaaatctttggtgattttgttctccatttggagatcacataggattttacgagccctcgtgcgaccaatcccatggatgtactgcagagagaattccactctcttgttgtttggaatttccactccgccaacacgaacgcatacaatgcttagaccatgatgcttgggagggtttgaaacggggagggaagcagtgttggagagagacatagagcttactttgttgcatat

SEQ ID NO: 6015 - DNA, 301 bp, Gossypium hirsutum
  Clone ID: LIB3828-012-Q1-N6-E1
gattgttaaaaccaagcaacattcctatcattatagaataaaataattatatgtaaacactacaaagcatgctagcatataacaatacttataaaccatatctcatacattcatgatggacgaaaataaaaaaacaaacaaaacaaaatgaaaaccacacaaggtaacagcaaaagaacacaagcacatatctagaagcacttcctatgaacaatggcaggcccagattcgtcatactccgcttttgatatccacatctgctggaatgtactaagagaagctaaaatagcccacgcgtccg

SEQ ID NO: 6016 - DNA, 510 bp, Gossypium hirsutum
  Clone ID: LIB3828-012-Q1-N6-E2
aaaagaacttggttcacaccattaatttaacgaagaaagtagatacataaatgtcaacattggtggtgaactcattaatttgatagattaaataatcctaaagtaaacccctaaatggatgaaacacattaatttgtagcataatcaatgcaaaacaaatttaaaacatgaattttacaaatgatgcaatttttgaatactaaccaacttcacatcatccaccactggtccacagagagaacccgagttgtcatttttcatggtgtaaaacgtgctatagaacattatcctggttcgtgtcgagtcagctttaaatcgaagtctcgcttgcttgaatcctcctttgcctttcgagtcatacgtgaccttgacagtgttcttgttagcgaatgcctcgaccaccatggaaccttcgcatgcattgttagcatcaccaatggtgaaggaaaggacgtagtcccgaccgatcgttgtcctcacaacttgtgagagggaactttctttaccggc

SEQ ID NO: 6017 - DNA, 586 bp, Gossypium hirsutum
  Clone ID: LIB3828-012-Q1-N6-E3
atcctaataaaatgtgggacacataatcgtagcctgtcggatacaatcataacaaccattattgaagagccaatgtaactgaacgtatagttgaccttttctctctccctaagatttatttctcaccatcgaggaaggaatctatcaaaggaattggagcttgaatctctcatacaccatttgacattgttttatttgaagcctcattgatgtcatcgagaggcttttccatggcgtttatggaagggtcatattgttggataaccaaaatggatgaagtagtggagaaatccgacgaggctaaatagctcccgacatgacctagttcaggacaatccgaactcctgtccgacaaaggcattgccggagacgttcttcctaccaaaaacagtgtagagttgctcattgatctcaaagctgcgattacgtcttctctgcttcccattgctatcgcttcatgttttacagactcactgcttttgcttaaattaaggaactccgagaaaatctcgttgtctttcttggattctgctcccatatcagccttgggaggattaagtgctgtttcaggtttgggtgtaaattt

SEQ ID NO: 6018 - DNA, 621 bp, Gossypium hirsutum
  Clone ID: LIB3828-012-Q1-N6-E4
accatgaaataagtttagtaataatgtaatatgtttgtattcaacaacacagttcctttatctaattaattacacctaaacccaactgccaggtaggacaaagagaaaggctcaaggcctaggaccatgctttcaagttctagtctacaattacattgtcttaattgtagagatgagatttattggtcccattcttgttcatgcatgctaaatgaaaatcttcctataagcattggggagaagaatgataaaagttcaagcattgaaggcaaaaataatcaagtttcaaccagcttaacagagcaagttatgaggaaaggatgaagcctgcctctaaaatgaatcacaaagatgaagctttctcctggatagattttctaactgcattaaacagtaatggcatcaacttctggttggtgacaatgatgcctgtgtccagatcaagatactttccctttgaaaaatccaatggctgccctgcagcatctgtgaccacacccccagcttcactcacaacaatacacccagcagcatgatcccatattttttctcgataccctttgtgtggaagacgcagatatatggctccatctcctctggatagagcaccatactttgcct

SEQ ID NO: 6019 - DNA, 446 bp, Gossypium hirsutum
  Clone ID: LIB3828-012-Q1-N6-E5
ggaaaaaaaaaaaaaaaaaaggggggggggaatttttttgggaaaaattaaggggggggcaaaaaaaaaacccaaaaaaaaaattaaaacgggattggggggccaaaaaaaataaaattaaaaaaaagccaaaaccccaaacttaaattccaaaaattccccggggagggggggactttttttttttttaaaacaggcccaaaaaaaaaacccatgggtaaaaaccaaaggttggggaaattaaatttaaagaagggggcaaaaaaaatttaaggggccccccaaagggcccctggggggtttaaaactttaaaaaacccaaaaaaaagggggaaaacttggcctttttgggggaacccatgggccgaaggcacggaccaggggttcccaaaccttgggccaccgcccacaaaccaaaagccaaaaaaacccttaggggggacaaa

SEQ ID NO: 6020 - DNA, 562 bp, Gossypium hirsutum
  Clone ID: LIB3828-012-Q1-N6-E6
agggacactactgcataatttgcttttcaataacaccctaaatttggtttcccagaagaaaaaaaaagaaaccaatcgttgcaactgataaagaataacaatggcaggtcaagttctcgttgctgccctcgttttcatggcggttgttgtggcgtttgcgggggattcagcgccgtcgccgtcccctaaaagttcatcgccatctaaagggggggcgtctccgccttccaagtcacctactccctctcctccttcctccaagaactcctccgcatcctccccatctccctcctccggcggcggctccagcaaaaacaacagctctagtagcagcagcagctcccctccttcgccaccatcaccaacgaaatcctccgacgcacccaagtcatcctccggtggatcctcaagcagctccaaatctcctcccgctcctgccccatccagctccagcaaaagccacggaagctccgccccaaccagcagcgacgaagaggagtccccttctgaatcccccaatgcctccaaatcccctcctataccagaagctgaggtccctaat

SEQ ID NO: 6021 - DNA, 577 bp, Gossypium hirsutum
  Clone ID: LIB3828-012-Q1-N6-F1
aaagcatattcctccttttaacaatttaattttaatattgaacaaagaaacaaagggaaagtcctgatattttcaaagaagttggagggttccaaaatgaattaatccccaaaaaataatcgccttcatttttcatattccccacctcactccctgtttttccccttctttacccctaccatttctttctgcttcgtagtttctccggccatgaagctacatgaagagttcagactgtaacaaagtatagtaattagcagcctcatcttcaagttcccataacccatcacacaatgcaaacccatttccgccattgttgaaaccttcttccaactcaaaaacttcaaagccaacatcactaccaccaccgctaccatctccatcgccatcttctctatttggaatccccagctcatcatcagaggcttcaagcaaatgtcttatgacttgcactttatcatcatcatcatcatcttctttcaaggaacaagttgctgatgtgcagtcttctaagctgaggacggtggtggcggtttccttgtctgggttcgagggcgatggtgttgctggttcacaa

SEQ ID NO: 6022 - DNA, 519 bp, Gossypium hirsutum
  unsure (1)..(519): unsure at all n locations; Clone ID: LIB3828-012-Q1-N6-F4
atattaaatttttttttgtggtttttataaaataaaattaagaatttgccattgaattttagttttaaaacatcacaggcatgaagtttggggcaaacattggtagaaaaaaagaagggcacgggggtggggaggaagaaggggccagacgggaaaaggaagcggggaactgggggaaaaaaaaaagggggggaattacatgctgtggaaaaggaagcgggaggatggaaaacaaaggaaggggatgtggcaacaaaattagaacgggggaaatagaacggaggaacatgctaaaaataacacgggggaatggggaagatataagggcaactttttgacaaaaggtgaacgggggacaaaaaccaagggggtgcaccgaagatatttccaaaaaaaagaaggtgcatagtagaacacaagaggaaagcacaggggctcaaaagctcggaaacgggagcaactaaagggaagaaacnaaggatctcagcgggaaaaaaattcggggaaagggaatcaact

SEQ ID NO: 6023 - DNA, 585 bp, Gossypium hirsutum
  Clone ID: LIB3828-012-Q1-N6-F5
aaaaaaactatttaattaattagtaaaaatgacataattagaacagtgatatgataataagcatacaaatggcgttggtatcaataataagctgtttagactccagggaccatgtcgggactatagggaacgccggaactcgaaatccaagtctcagattcgagatagacgcgaggagtccatttgttggcttcatttatatctatctttttgatacctttccatgctaccctacgactggtatcggcaccgggtcccctgtttccaaactcggcaatgaaagaagtgtctattcctatggtgcctgtcatgggggcataaccctctggttgaatgatgtcgtcgatctgagattgcattatgatagacctagcgaattgtttccagggacgccccaagtacgccttgttcgtatccttcactgggatgtaatcaggggcacccgagatggtgcagttttgaagcacaatggctgagtttgttccaagatcattccttccttgtgcagtaaccatgcaattttggccaggccctggctttctcatgatgagcatacagttctggaaaatgctcgccgcatccccg

SEQ ID NO: 6024 - DNA, 597 bp, Gossypium hirsutum
  Clone ID: LIB3828-012-Q1-N6-F6
aataacatcaatcatgacatagattaataaagcaaagtgcatttaaacaaacaaattatgagttgatacagctctcataacgaaagccttttatttcaacaacatacatatttataggtataatatatatatatatatattataacattttagtaattatcaatagccatttattcacttaagcagctgatggaatggctcagttgagtcatcattcagcttaggttgattgtcagtctccagcatcagtccaaaatgaatgtgagggaagcgagcccaattcttagcagcagtgctaaatgcctccctgtgagtgatatcaggattgttcagcttgatcctttgtatctcctctttgatgaactgattgtacaatgaaggagccctatgcctcttgtcaggaggtcgattaacaatcctttcttgagtggtagtgtttatagttgttgctcgctttggtaacttgttcttgcacctggaggaagaccctaagtcaattctgtactccgatgatgtgtaattaggcacctgtacatcttttccagcccttgattgaaaggaagctgccaggtttactgaacagagattggtgcactg

SEQ ID NO: 6025 - DNA, 534 bp, Gossypium hirsutum
  Clone ID: LIB3828-012-Q1-N6-G1
atattaagttttattttattccaaattatgttttctagagagaagaggactgcacggggcccaatagaacccgaacagcccaaattaacaaaaaataatcagtccagttacattaaacacaacaaacctaaaccctagcccaggaaattaaaaaatttcagcaacagagaaccctagctgctgcttgcccccaagcctccaagcgccgcatgctgccaggctcactcatgcacgcttctgaccacagccgtcggcctcgtctgacaccgggtggccgtggttgcgccgtcggaggatctctcctccgtcgcccgaatcgggtccaagcggtcgtggacctcctttgttttcgactcccgtgggttgagagagctttggctttcaaggataccgtgaaacaggggctaacgggaccactttccggcaccggtcgccgaacacgttggtggcgcgacggaggtcttgggaggccgtcggcctagcagagaaagggagtctcccttttgttttatttttatttttattttgtttttg

SEQ ID NO: 6026 - DNA, 610 bp, Gossypium hirsutum
  Clone ID: LIB3828-012-Q1-N6-G2
gactccaaatagaatgtctcaattagtaacaaaataacttgatctttgcaagctaagaagaagccactcctgaatatctaaattgaaaaaaccatcaatcttttcttgtttaataagctttaacctgatagaggtggacataaaacattatttaaggttatggttaatatcttctactaaatttttgcacaatgtacaacttgcaccgatactgaaatatctcctaactcattcttgcatcattatgaaccaaccaaagaaaactttaatcatttgcaaccaacaagagcaccaaatatgtttccattatgagtcactcctaaaggagtttgaatccaattcaccataagctgattttatcaagaaatgtcttcttttatcccatttccacttaggcatatcatcaatgtccttcatgcaaaaaaggattgtggctacaatttttgccaaacaagataaaggaagtaacttatctagttagctccaatctcattatttttaaggggagaccatatcacgaactggtagacatgatggtgcaactttccattgagaaaagaaccaaaaattggattgcaatctatcaaccaccaatctttccggacgcgtg

SEQ ID NO: 6027 - DNA, 581 bp, Gossypium hirsutum
  Clone ID: LIB3828-012-Q1-N6-G3
gttaatctccgctggaagggcaccaaggcgtcatatccattgggtaactgcccaataccctcaagaaagaagtgaactcctggacctcggccaacgcgttttgggctctaacctctgccatcgacgcttcgaaatccacgtagaacatatactcgaaatgcttggcggttccaacgttggcgtcatctaccaaccggatcggcctattgcggtgtggccgggattcgattttcgtcaaactgatattcctaaacgcaaacgctgatagtactttgaaaagcacgctcgtccctttatcatgcgcgaatacgatgctcgttttgaatggccggtcagtgcgcgggatgattggctcccgagctaacataacgaagcgcgtcacattactcgaatcgtcttggataccatcggctaggatttgaagtccataaagttcagcggcgcgtgcgcttgctatggcggcggtgtcacgaaggttgttggccgctatgtactccgcggctccggcggtgtcatcgacagcttcacgcgtgacgttgagcccgagtttggtgagcgtgtgttcacactgggagagggct

SEQ ID NO: 6028 - DNA, 455 bp, Gossypium hirsutum
  Clone ID: LIB3828-012-Q1-N6-G4
caattaggcaaaaacaaaaaaaccaaccccactcaggaagcccccggggggaacccaaaaccccaaaggggcccccaagggcaaaaacaaaaggccagaacccgggacgggcaggcagcaaacccaggcccaaaccaaccccggacaaaggggggcgggcgggcccaaaccaccacagaagggggggggggggcccaggggggccgcccccccccaacgaacgccgcaggggcggggaaaaacccggggggggggcgggggggggccccaaaggcgagggggggaagggccccccgggggaaacccgggggggcccaaaacccggggctaagccccccccatccctaacaaaaaaaccaccgggggccccggggtttcccacaaaacggggggggggggggggtttgaaccacccccagcggggggggggggtcttaggaaggggcggcaggggg

SEQ ID NO: 6029 - DNA, 568 bp, Gossypium hirsutum
  unsure (1)..(568): unsure at all n locations; Clone ID: LIB3828-012-Q1-N6-H2
ggaaccaaaaccaaaagaagagctaccatgcatccgcatatcaaaattaaaccctattttagttcaaagactatgggacgtttttcttttttacaaattgaaattcatctcacgcaggtgggggtgattttttgctacacatgaaagaagcttgaaacggacaggggagaacccaaaaccaaggggggcacaagggaaattattaactttcataaactaagaaaagggcccaatctcaagcacattctttctcgtacacttcactggcatttttccaattgatgactttccatatgttcttcaggtaatctgggctaacattcttgtcctgtaaatagtttgcntgctcccaaacatttttgccaagcaaaggaactaaatgtggccctttngtcacgagtggatcctgatttggagttgtttctataacgggtttctttaattccttgttcactccaagccccccccaaccagagccctggnaagcagccccctcagttttcatcttctgaatcaatggttcccttgaacccaattgtgtgtcttttgccccccccagggagctttt

SEQ ID NO: 6030 - DNA, 226 bp, Gossypium hirsutum
  unsure (1)..(226): unsure at all n locations; Clone ID: LIB3828-012-Q1-N6-H3
ctctaaaaagcccccctttttttttttttttttttttacaacgcaaaatggcaagtttctcctttgattgggcgtaaatacagcagttttctgtcaaagccatatcaactgaaaaacaaaagaatgaatttatttcttttttttgagtttaaggttaaaatttaaaagcgggggggggcatgccgtgtncccaaaatccgaacagagttcagctgggggggttcac

SEQ ID NO: 6031 - DNA, 487 bp, Gossypium hirsutum
  Clone ID: LIB3828-012-Q1-N6-H4
attgcaaatcgaatattgttttgagctatttattcttcataattactctttttgtccaagaggattttatagcaaacccttctgcaacatcattacttcttattttgtttaattaataagacgacaaccaactcttgctgggtatttcatcttaatatggtatcatctctctactttggtggactgggttcactgtccataacctcttctatccctttgctctttacagtttcagcctggcaacatcctgatgcgcacctgggctgaccacactcagcacaagtcccaccacaaccctgacggcaacactctccactctcacatcccgactgtcctggcattagtgggatttttgggacttgtgggatctgtgggacttgtgggatctgtgggattagtggaatttgtgggatttgtgggatctgtgggatttgtgggatttctggaattcttgggatttctggaatttggggaaattggttaacga

SEQ ID NO: 6032 - DNA, 591 bp, Gossypium hirsutum
  unsure (1)..(591): unsure at all n locations; Clone ID: LIB3828-012-Q1-N6-H5
ccataaaaacatacggaacaagatccataaaaccatacggaataagatctggtcttacttgaaaaatcacaaacaaaacaactctttctaatctctgcgttcctactaaagttctatgtataactgataacaacataaaaatatgggatgttatttcaataaatgaaaagaacatgatcaaccaaaaattgtctgctaccaaaaactgatagcttcccctacaaagagatctttccttagatgtaaggttctcttagtgaagttggcagcaccagttcaggctctaattccccgagtggcgtaaagtagtactcaaccatgtctttactaacctcttccaggcttgcggggtaccacttgggagcaaaatcgttgtccactaacctagcccgaacaccctcagtgaaatcattagagaccgatttggagatccaggcaagggaaatccgatattcacgtgccagacactgatcaagtgattgaaatctaccttctcgtatggatcttagagtaactttcaagctcaacggtgaggcttctttcatttttctcagcactgtcttgcaccaatcatcataagctncagctgct

SEQ ID NO: 6033 - DNA, 596 bp, Gossypium hirsutum
  Clone ID: LIB3828-012-Q1-N6-H6
aaatcttaacaaattcaattttatttttgaagcatggagactacaagagagccttttacatctcaaattcaaaaaataaaaaaaaatgaaaaaataattatatttataaaattataatagcaaatgctctagcaagtcaaagcagaaaagctttgaggaaaggataatttacatcttaggttattaaacttaacatcaattttcatataggacacaaatcgttaatttcatcgaattttatcatcatactttttttttattaacaaattaagtaatttatgttaatttcgttaaataactttaatgtcaaagcaagctcggaatgtatatcagaatgaagtttaccgagtcaaaattttccattaaaattacttaatgaaattaacatacagaaattaatttattaataattaaaattgatcgacttaattcgataaaattaaaaatacgtgacgtacatgataattgatgctaaattctgtgacctcaaatgtaaattacccgggtaaggaaaaattcaacccctggaaaatgggttacttggatggttggtgtccggggcattagaagcattattagtagcattgttcattccc

SEQ ID NO: 6034 - DNA, 450 bp, Gossypium hirsutum
  Clone ID: LIB3828-013-Q1-N6-A2
aagtacaaaaaataacatgcaagtatataaaagtacacaataattaatattcaaactaaaaaaaaaaagctcaaaactaacacaatttcaaatgttctcaaatggtgaaaggcaaaaaaaaaggacattttgatcttaatgatgaaatactcaaaagcaacaaaattttaggcagctcccttccccctctttctctgcatcttcttcatgtaaaactccagctctttgccctccaagatatatccatcagcacggccgcattgaccaggccgtgaagagatgcaagccagtaaacgaccactaccaaattgctcctcgatatgggggtcaagtgtgcgactctgctgacgtttctccagcttcctcaagacatggctgctcttcttcacttcctcagtagcagtttcaccttcctctccttctttcttggctcctgctgctgctttcttc

SEQ ID NO: 6035 - DNA, 602 bp, Gossypium hirsutum
  unsure (1)..(602): unsure at all n locations; Clone ID: LIB3828-013-Q1-N6-A3
ttttnttttatatatatantttgatccaataacacttaaaaaccaatagtatatactaatgtcaaaacctaaaatgaaacgaggagaaaagtaaataactaatccatagtttggtggagtgaagtctacacattctttggaacatggtttcccttgctcatttccatacctccattagagtaatcagcttcttcgacgaatcgggaccaataccagtgagatctccagacttggttcatctcttcgattggaatacccttggtctcaggcaagaagtagtacacaaagatcgacatcaccaccacaaagaaggcgaagaacaggaatagcccgaatttcaagtggcaaagcatggataagaacacttgtgccacagcgaatgtgaagatcatgttcaccgacacgttcacactttgtgcggctgatcggatttccaatgggaaaatttcactaggcaccaaccatccgaggggtccccaagaccaggcgaacccggccacgtaaatgcagatgaaaagtaccacagcaatggcgtaccatttgggaaggtcacctgggttcccgctaaccccaaactttgcaccgatgcatgccgccacaac

SEQ ID NO: 6036 - DNA, 611 bp, Gossypium hirsutum
  Clone ID: LIB3828-013-Q1-N6-A5
agcccaacgaataaggttggaatgcataacccattacattcaaccaacacaactttccaaatatccaacttattttaaccattaatgcacaacaaaatgcatttataattatttccttccaatattcaatgaaccaataagaaatccacttcacctgccatgagaggaggagaaaactagccccccattctcattgttgactctacagaggggaaaatggttaaccaatatgtataatttacaggcaaaagctctgtctctaaatgatttatatagacattagaaggcaatgtttcagtccaggtaaaaaagagtcacaatttttctgagattcttggcttcttggcatgtttccatcaacaacttgctatcatggaaggcaaagcaaatgacttgctgtacatgtgaaatgatgtccctattacacagcctgctggcttctatcaaaggtagatgatcattatagggcttctctatcacagtttgcaccttttccaacaattcctgactctcaggaggttgtttcttcaagctctgtggtaatattactgtaagcaactctggtttctctgctcttaaagcacctctgatgacagctgcattagtacctg

SEQ ID NO: 6037 - DNA, 558 bp, Gossypium hirsutum
  Clone ID: LIB3828-013-Q1-N6-A6
ggacgcggggggcgagccgggaatcgggaaccggggcctggaggcggaccgggttccactatagcgagtagtgtgagagcttggagctaggatggacataggtgatagctgtgtgaagtgggaatatcgttcacagttccaaacaccatacaacccggaagcctaaagcgtaaagcctgaagcgcgtagtgagtgatcagacacacatcaaacgtgtagtgcttactgcccactgtccagttgggaaaccggaaacgcgagctgccttatggattaaggaatcgcccaacgagaggggggaggcgttttgggcgccaggggggatggtgtttttacctttgacacgggaaacaggtaatagccctttaccctctgccccttggacattagagagaagcagtacacgctggattgtggtatgacgcaaaaagccaaaatgctggtggataacggcgaaatgtaacatgaaccgtgatcggtcttggggtttgccacttccgagtatatgagaataacgcccaacccggactcgggaatggggaatgttgcgcacagcgc

SEQ ID NO: 6038 - DNA, 613 bp, Gossypium hirsutum
  Clone ID: LIB3828-013-Q1-N6-B1
aagcaaaatttctaacagcttaaatagaaaagaaaattcatgacgatctacactgaagaaaacaacaggctgacatccatatatccatttcctcgatgttagtttacatagcttgagaattagcaggcattccattcatctcttcatcagtgccagggaggagatgccacggatgttggtctgaaaaattttatgtttcatttagtatcacggtcacggaatactaactgagggctccattttaaatggagatgaagctttcctgatttagcaccatctattgtgaaattgtcttgaaattccccttctaataacaccctagtgagtgtcatgacgattcttccaattttttccttcctaaaagtgtcgtggtcccaaacttcaataattaacatttcatgtaatgcgtcttccactacaaagtcgaaggtttggttccaaactggattcaatgtctcattagcaacccttgtcttggattttgtctcggatttcttcattgtgaggaccacaaaagggtctgcctttccattaaaatcaactggtggcaagttttcacctgatataaccatcactgacagtactcctctaacaatgacctctcttttctttt

SEQ ID NO: 6039 - DNA, 554 bp, Gossypium hirsutum
  Clone ID: LIB3828-013-Q1-N6-B2
ttttttttttttttttttttttttttttttttttttttttttttttttttttttttttttttttttttttttttttttttttttataataaaattttttttaaaattttattttaaaaaaataaaaaaaaaaaataaaaaaaaaaaaaaaaaaaaaaatatttttggggaaaaaaaaaaaaaaaaaaaaaaaggaaggggggggaaaaaaaaaaaaaaaaaaaaaaaaaaaaaaaaaaaaaaaaaaaaaggggggggaaaaaaaaaaaaaaaaaaaaaaaaaaaaaaagggagaaaaaaaaaaaaaaaaaaaaaaaaaggaaagaaaaaaaaaaaaaagggggggggggggggccccccaaaaggtggccgaagggggagggggaaaaaaaaaaaaaaaagggggggaagggggaaaaaaaggggggaaggggggggcacaagaaaaaaggggaaaggaccgggggggaaaaaaaaggttaaaaaagggggggaaaaaaaaaaagaggggagaagaaaagaagaagggcaaagcgggggaaaaaaggggggggc

SEQ ID NO: 6040 - DNA, 602 bp, Gossypium hirsutum
  Clone ID: LIB3828-013-Q1-N6-B3
tctttttttcatttggatagtcaagatccgattatacaagtttttcagttctacctgaatattctatttataatctttacaaatccctttctggctttctcaagtacctcagcatatcttacccattcaaagataatatcatataacaaagatgtgactgaaatccatgaagaaatgaatgggacaatttgataaccatcaccaacctgttgtggaacgacagtaacttggtttgtaatgagattcatggagatgatgatgaggttagattagcctccaagttccctagcaatgtcccgcaaacaagaggctgtgccgaaggaattctcagacaactcagcccacttcctggtattccagagcactctggttgtggtctttgcatgtctctaccagggatgcaattgagggagaaatcaaaaccgccatttctgatgaacaatttggagcattcttggctgaacccagagaagaaattgtaggcaactgtcaaattcatgaggctccttaaggaacaaaccaagtcgggtagctcaccagataactggttgtgtgccaaattgagaacctcaatgtcatttaggcaagatattgtgtctggc

SEQ ID NO: 6041 - DNA, 491 bp, Gossypium hirsutum
  Clone ID: LIB3828-013-Q1-N6-B4
gatgaaaggagatatatatatcaaatctaggggttctattctatgtataatagctacaatgacaaggtctgataagttgcaaacgactgctaaggcttgaatatacaccacacactgattatacgatcaagcatatgtatgtacctactactactatatggagtgaccaaatatacggattcttttcagcacatgaaccctatcccttgaactaattacaagtcaaccgattgcccaaaatcccgttgagcttgctggcttcacctgatccaccttctcgccaacagaattgtggctgccgtcatggcctttcagacacaaacctaagtccaaattacccatgcttgaatcctgagtttctttcttcaaaatgttattcatgttcagctcgttatcagtcttggaagacagccaatctggggatcgcttggtcttattctcatctgtcttagcttcattttcaacctgttttgcagcagctgcccttctac

SEQ ID NO: 6042 - DNA, 523 bp, Gossypium hirsutum
  Clone ID: LIB3828-013-Q1-N6-B5
acacaacaaaagggaggtcttattcaaattccaaacatttcacatcgtaagcatatctctctagtaaatatatcttcagtttttccctacaaaacgaacagaaaagcaaagcccaatgcatgaccagtctcctcgcagttccttaacatcagaagtgcagacttatgccatacctccgctggtcgctgtcctgataatctggaagagagatgatccaatgacgacgaatatgaagaacccaagaagcacaggaccgacaggataatccttccccttctttgtggtggtctcaggcacagctcctctctttgttatgttcttttggaacttctccacctttctttctgcaagtcgccttgatgttgtcatgatgacggataaatcaggtagccggagaagattgaagagagaaaacgcaggaaaatttcaggatctcgctaattccctgcgaagtattttctctctcgatctctcactttctcgcgaaaatctccggatttgatagaggatgtcagctatccat

SEQ ID NO: 6043 - DNA, 598 bp, Gossypium hirsutum
  Clone ID: LIB3828-013-Q1-N6-B6
attaatagaaataataatgaattctgcttcttattgaaaacttcctatttgttaaaaatacaagccttaggaaggaaaaataaaatgaaatagaaggctagttatttccacccggcgaagaggtagatgagggtctacttggatttctaatattgcgaagatatgctacttgcgtgattaagttgacaatgaatgaattaattaggtactgttggagaaggaagcaaccatttggtagcttcaacatagtcaagaaccaagaatggttgagcttctgcatccggtagttgtttgacgaatggctcccgtgtcttgggattggcgccttgccccgtgcatttatattctccatagtaaacagttttggctcgttcaggttggagattatgagaccaaccagcaggattgacaacgttgcccatttcagtatatgcataaacaacccttgggctgctcttccaggccctgcccaaaaatgcattcttcgctgttccagaaatgctaccatgcacaaacgaataacccgtgtcctctgatgaactttctctcgcttgtgctgtaattactgtaagtcccggatctccttccacaaatattt

SEQ ID NO: 6044 - DNA, 613 bp, Gossypium hirsutum
  Clone ID: LIB3828-013-Q1-N6-C1
ataaataattacctcataacaaattcgaaaaaaatatcacaattttgagtaatactcatttatttcaagcatacaaaacaggaatggcgtcatgtttttaaaagacgaatggaagactcaaacctacatagatcgtagctcaaagactaaaaacaatgggccttcaaccttggagacgaatgaaattttgtttttcacactaaaacgtgtctcgactgttaaaacaattgcagctgggatggggatatgaaaagagggacggattcatgaacgttgggtttcagattaggaagtaaaacaccatggacactgcatggcacgcacaacgaggaagacacaagcatacatacaagattcatgaacatctgaaacatctactgatggagaatagactggattgcaccagtgatggctcgcgctccggcttcttgtgatgaagatgcttaagaaatgcttttactgctccagtcaccccatcctcattctccattgccttggcaagttcattggccctctccttcacctttggatctagcatgaattttattgcaccaaccaacttgggaagtgagaattcgtcaactgggatgggtggaggtcccactcctctggc

SEQ ID NO: 6045 - DNA, 613 bp, Gossypium hirsutum
  Clone ID: LIB3828-013-Q1-N6-C2
gaggttaaaagtcactaacactccattgaaacaaggtacaaaataaagcctgcaggtatttacaaaagcaatatattacagtgaacagaagaaggattggttatcatgcttcccaacccctcaaaaccgtagcacgagcgaccttgttgactcctagggtgaaggctcccattctgaggttgcagttatgagtatggcacattgctttgatgtcattgaaagctctcttcatgtacctcttaagctcatagttgaccttttcttcttcccacataaatccttgaatgttctgaacccattcaaagtaactgacagtcacaccaccagaatttgcatatatgtctgggagtatagtcactcctttcctggataaaatttcatctgcttctggatcagtaggatgatttgcagcttctatgatgaactttgccttaacatcagcagcattttccttgttaagaactccacctaatgcacaggggatcagaacatcacattcatgaacaagcacatcatttagatccatggcatctccaccttcaaaatccttcaaactatcagctttctctttgtgtttcagtaaagctgggatatcgattccatttgggttttt

SEQ ID NO: 6046 - DNA, 247 bp, Gossypium hirsutum
  Clone ID: LIB3828-013-Q1-N6-C3
tttattttttattttttttttttttttcttttttttttttttttttttttttttttttactccaaattccctttgcttaaaaaaaaaactttttccactacaaagaacaacccaaaaggggttaaaaccaacaaaaaggaccaacttactccaaaaataaaccccaaaccttgggcataacgggaacacaggaaaaagattacccatatgatccccatttgggacccaaagattactttccttgggc

SEQ ID NO: 6047 - DNA, 339 bp, Gossypium hirsutum
  Clone ID: LIB3828-013-Q1-N6-C4
atgaaaataatatctttgcatataaatcaaaatgaatattagccatcatttgaggcttaatacaaaatgatgggtttccaacccaagccaacacatttggctggttctcaatggcacagaaatagtaaagtttaagccctatacatgccatattcaaaaatataaatcaaactacactgactgcttctattgatagtgtgatcaatatctttaacttcctttggtccttgagctagataggcggcactcggattacaaaatgtggtgactagtcaatttagtcgatttgcttggctttcccctagtctagatttggattcggtatttcttaatttgtga

SEQ ID NO: 6048 - DNA, 543 bp, Gossypium hirsutum
  Clone ID: LIB3828-013-Q1-N6-C6
aaagcccggtattttcttaagtctaatgtcttatcagcaaagattggagcttacccattttttacctggagaagtatttgtattgcgcgtgaagtgattggagatggggtcctgtggcgggttggcaagggggatcgcattaacatctggaacgatccttggcttcctgggatagaacgctgcttctaaagatcgttgatgagaatacagtggaccgaattcttactattcccatatctgtaagtagaccagaggatagggtggtctggaaatatgaaggttctggggagtatacagtcaagagtgggtatcgggtactatttgcagctcatctacagagtactgcttacatgcctattattgaggaggtttacatagatttttacaaagatttgtggtcattaagtattcctgataaaatcaaaattcacatttggaggcttgttaataatctggtgccgcatttcgataatctggcgaggagaatgttgtgtgtggacacatattgcccgctgtgtaagtacaaactggaagacactaatc

SEQ ID NO: 6049 - DNA, 489 bp, Gossypium hirsutum
  Clone ID: LIB3828-013-Q1-N6-D1
cagcccatgaacggcaatcttattgatttcataaaaccaacattcctcaacatagtagatttagtagtccacaattttaacaaaatataacatggtaatccagttcgagaacgtaaatctcgagtttaggacccaatttattattgggaacattaatttaaaaccaaaaccaaacttttacttgtctatatgagcatgattttaatgggaaactgggggggagaggccagcaaaaacatggagcaactccccgttgtcgatgtgccttgcaggatcggaaaaggcataaaggaaaaaccccatgaaatctaagcccttgaaaagccgaggatgtgggccatctataaactcttggggggtcttgattatagcaccctcatttggaatgacaaaagctgctataaagtatcgatctttgtctccgctcatcatcactctgggattcactgatttcaatctcccattgctccaagccttgaggggatctcc

SEQ ID NO: 6050 - DNA, 576 bp, Gossypium hirsutum
  unsure (1)..(576): unsure at all n locations; Clone ID: LIB3828-013-Q1-N6-D2
atagataaatatataatangaattaatattctaacatctaatataaattatatattatatattataagctcaataataagaaataaaaaattcacccttaacaacaatatatgttgtatatgtaaatcctagatgtgaaaacagacataattctcagcacctttgtccaatcccaatggttggatcgcttggagcatcaatccaacaactacacatatggtaggttctcaagccatcgttgccttcaaaaacaaatgctccttggttgttaaaacttacaacttaagctcatacaactctattgtggaaggaaagttgtcttttgatgtttgggaactagaagctgaaactaatgatgatgagaagatgataatttatggttctttgaaggttccgagcagtgcagagaaggtgaaccaggttcggcaagttgggcctggggttactaatgatcacccaaggaagcatggatttgcaaaagacaatcttagttctttcggagaattgaagttgatgaataaaatgagttcgggtgcctcattgcttgctccaacgccgcaagttgctaacaatgat

SEQ ID NO: 6051 - DNA, 586 bp, Gossypium hirsutum
  Clone ID: LIB3828-013-Q1-N6-D4
catcaaagaaagggaattattttcttattattaagaattataagtacattaagagatttgatctctgagttcatcaaatcattcatgatgaagcatacatattaggaaatacattacatctacaaacaataacaacacagacagaggcccttacaattattatttgaggaactggtcaaaccaatcactcgcttctttcaccattaatggtgtcatttgatgccctattccaggttcagccacaagcttaaagttgtctgaatgggcctctccataagcctcgtatgcccttgtcttgggaatttctaagccttcaagagggcaacggggatcttcagctccatttacaattaacaaagggcgaggtgcaatagccggcaccgtgttaggtgcatcgaactgagaggctagaccaggagcaatcctatcccaaaccttctccaccacttctttatcaatttcattcttgcctaaatcagtccttgcttcttcaaatacagcctttatactgtcaactcgagcctgccacttatcattatctattgcccatcgaaatccctgaacaccaattattggggctgccact

SEQ ID NO: 6052 - DNA, 592 bp, Gossypium hirsutum
  Clone ID: LIB3828-013-Q1-N6-D5
aagaacaagaaaataaagtaaggctgcaaatacaatggctgtacctcacttccctaacccacattgacaaattgttatcatcatcaccccacccacccaaaactgctccttacaagactacaaacaaaccaggaccattttgaaaattaaaaagaaaaagatgaactccctttgattagtaataactcaacaatcttgtcataatatctaccaggaaatctaacagagaaaaccaaaaagaaatagtaatatgaaattgcagcttcacatgacagaacatgcatttgggttttcatcactgaacatggtgatgtaaggatcttcatatctagtgacggtagcagtgctgcttacattgttgtctactttcctaacataaccaggaggtgccttcttgtcataagcagtaacagcgtaaggttgagccaccagattgtaaggaacataaggccaaatctcagcctttttccctgttgacttagctttcttcaacactttgttggcttcaacatatcccgttacagtcaccttctgctgtttcctgtttatgttcaccgatttcactccattcaatgaagagagggccttcttg

SEQ ID NO: 6053 - DNA, 604 bp, Gossypium hirsutum
  Clone ID: LIB3828-013-Q1-N6-E1
gacattgaatgtatgtatgtgtatatatacataaatcatctgctagttcagtgtttcttttccttttttggctccagtacataacttggggaaaatatttagcacatcaataaattactccactgaagccagattcttaaccaacacaatgcggcttggaggcaggaaagccacgaatacaagttggaactgtttgtcttcaattaagtaatgagaattgtaaattttgcttagcatagaggtcaatactacctacttgcagccgtgacgttgatttaacatctcttaccgccaagaaccgaaatctgaacatatttgataagaaacctgcagatttgacattatacgttttgcgttgaaaacgtttatcaaacatctcggaccttcgttcatccaaaacatgccagctcgatcctccatcattacttccctcaaccacccaatccattggatctcgttcaggtgcatcattggcagacattaactcatatgcaacaagttcctgcatattcgctgatagtttgtacataatccaacaacctttagcaccattatgttcctcccatttagacatgcgagttccatcaaatgctgctgtggcaat

SEQ ID NO: 6054 - DNA, 604 bp, Gossypium hirsutum
  Clone ID: LIB3828-013-Q1-N6-E2
aattctggaattcgcagatcttcatttaatatttaagaaatacaaataaatagttcaagcactcctccatgcaccgtcttagctcaattaaaaaaaataaaatgtgaagcttaacccaagctgtgtcgaagcacgcatttgtttaggcacatttgacttggacggccaaagtcttcctgagatgggtacatgcgccattttggtcactgaaatgaatgctatctagtgggatttggcagctgggcttccccaagcaatacttctcaacaacttgcttggattctggcgctgtgcaatttccaataaagtaggctccgcaagcgccaaatggatcaccatagctggcaaactccactgccacgatttgcttcttgcctggacatattaattcagcccttggtttcaaatcattcactttgggttggagagtaccatttttggtttcgaacaatctcggggatggtgggtgaatttcactcacagcactgcagattgtatccctgttcactgttactatatggacatctttaggattgccttcttcttcctcaaggaggacaatcaggttctttggcttcaagtatgcccgtgggatgtggtactc

SEQ ID NO: 6055 - DNA, 591 bp, Gossypium hirsutum
  unsure (1)..(591): unsure at all n locations; Clone ID: LIB3828-013-Q1-N6-E4
aaagagaacagaactcaattaaaaggcatgcaagggagaaaaacaacaagctacaaaatgctaaggttttgctactaagttacaggagattattccaaatcctaccaatgactgcacattattccaattcctcctatctccatagcagtttagcaactatgacccttgcaactaagcgtcagcggtctcggcggaatctgcagcggccaagatcagctccgggtgaatgcttcccacatatgttccatcaattgcattaggcaatcctaatgatttcagggcaagatgggctgccttttgccctgatatcatcattgctccaaatgttggccccattcttggggatccatcaatctcagcaacttccatcccggtgacaatcatcccaggcacaatttccctagtcagcctcactatagcatcctcagctgtattcatatccagtgccttcatccctggcacactatcaatcatcccaatgcttttcaacctcttcaccccggtggctccaaatggcccatcatgaccacaagagctcaccaccaccttggcctccatcacattanggtccatgcaggactgtgtgtcatg

SEQ ID NO: 6056 - DNA, 597 bp, Gossypium hirsutum
  unsure (1)..(597): unsure at all n locations; Clone ID: LIB3828-013-Q1-N6-E6
tttnttttttacctaatgaataatttgattagtattccaaaaattttgataatataagagtcgaattatatccaaccaaatttgaaaacaaatgcaaatgatgaaaaaagaaagaatgcaagctcaacatataagaaatggttaggtggcgatgatacccgctagaacatcaatttttcctcgtgcataaattgtgtaaactaagcggagagcgtcaagccacccatctagggattcccacgaatcagcaaccaagaaaacttgaccggatgtggtattaatgcagaggccagcacctggaggtaaagttagatcagcagaggctgatacagaaatgatgtctggaatatcaactctgatagcctttttgtccgtatttcctgcatccacgattcttccagagaggcttcgggaaacttgtttctgctcaactttgatgacctgttgaagtgcttcttgattcagaaagaactctgttctcttccaatcactatgaggtggaaatgtgtttccgaatggtggtgcagtcagatacccatctttaagatggggtaaaggtagcattgaatgaacaagcttcaaggcactgctgtaaac

SEQ ID NO: 6057 - DNA, 595 bp, Gossypium hirsutum
  Clone ID: LIB3828-013-Q1-N6-F1
aaaagattaaaaaaactatttaattaattagtaaaaaatgacataattagaacagtgatatgataataagcatacaaatggcgttggtatcaataataagctgtttagactccagggaccatgtcgggactatagggaacgccggaactcgaaatccaagtctcagattcgagatagacgcgaggagtccatttgttggcttcatttatatctatctttttgatacctttccatgctaccctacgactggtatcggcaccgggtcccctgtttccaaactcggcaatgaaagaagtgtctattcctatggtgcctgtcatgggggcataaccctctggttgaatgatgtcgtcgatctgagattgcattatgatagacctagcgaattgtttccagggacgccccaagtacgccttgttcgtatccttcactgggatgtaatcaggggcacccgagatggtgcagttttgaagcacaatggctgagtttgttccaagatcattccttccttgtgcagtaaccatgcaattttggccaggccctggctttctcatgatgagcatacagttctggaaaatgctcgccgcatccccga

SEQ ID NO: 6058 - DNA, 448 bp, Gossypium hirsutum
  unsure (1)..(448): unsure at all n locations; Clone ID: LIB3828-013-Q1-N6-F3
atggttgggaggattattaaaaagggttaaaagtatggaaaagggggggaaattgaaggaaggaaaggggggaaaaggggggggggggggggggggggggggggaggaaaaggggggggggggggggggaaagaaggggaaaaagggggaaagaggggggggggaaggggcggaaaagggggaaaaaaaaaaaaaaaggtgggcaaaagttggaaaagggggggcgaaaggacccaaaagggggggaacatgggggggaagaggggagaaaaaaaaagggaaaaaaaggaaaaaaagggaaccaaaaaaaatccctttaggagagccattaagggaaaaaaaaaaaaatggttccgattcctaccccaaaaggggcaaaaagggccaaaaaatggtaaaaaatgcgggcaaggtgccgaaatnnncaatcgtaagggggggaatgggg

SEQ ID NO: 6059 - DNA, 465 bp, Gossypium hirsutum
  Clone ID: LIB3828-013-Q1-N6-F4
aatagcaaatgaccagtatcattccaaaaaaaagacacaagtacattatagtcgaaattatgagtaaaaaatagttttcaaataaaattttatttattgagatgccaggttatcccagccagagatagtcaaatgaaaccaaatgggattctagcaggtggaagaatatgaaactccacacaatttagccattttcgcaatctcaactctgtcaaaaacacgtttgacatcttctatcttcatgtactcacaatagcatggtgcttgttccttcattttctggcaacaaccagctgatggaggtggcttcttatacgcgttcaagcatgagctatactccaaggggttatcacattttggcgctggcgctgtctctgcacccgaaaataacaccaccactagagtcaccacgcacaaaacaataagggaaaacctcttcatgtttttttaaataaaaagtttgct

SEQ ID NO: 6060 - DNA, 592 bp, Gossypium hirsutum
  Clone ID: LIB3828-013-Q1-N6-F5
agaagcaaacaggaatttattgacatattaacatgaagattcaagaaatttccatgcagcagaggaagcattagagaaataaaagaaatcataaggcgtatgtgctgaaatacagtttttattcattcacatacacttatccttttattaaagactttcaacaaacatgcatccttccatccaccactcacatacaaccgtacaaccatatcaatttctggacataaagatgagtggatgcagtatgttactgacatagagaagcgagtaccaccaacaaggaagcggcaaatttcatttgggtctcctcatctatggtcaagaagagagggacatggacaaagagagatttgatcccattctgttcggcaaagcgaagggagtgatagtaaacataattgcacacaaaccgtcctgcatcatcggaggtcatcacctcaaatcccttctttgctaaggcctttgtaatctcctcaacaggaagagaagtctctcttacacgtgaaattccaccatctgcaggaataatgggtactttctgaggtttccatcccatctcatcagggcaacggaaagtagcttcattcgcagc

SEQ ID NO: 6061 - DNA, 601 bp, Gossypium hirsutum
  Clone ID: LIB3828-013-Q1-N6-F6
aagaaaacccatggcaatacataaattatatattgaaaatacaaagcaacaggattactttgcagcaagaagtcaccactcaacaagatgaactaattaaggatggatcctagacaaatattctgaagtgggatccttgcatgttattttattactaagaaaacatgagagaatccattaaacagggctaggatcatgcatggcatggcatggcatggcctggcctctctaagccttaccgtgaagatagtcatcgatctccttaaagttcttcactgcaaattccttaatgacgcttggatcagggatctcttcacttgccttctcaaactcacaggaccatttaaccaagctcgactctcccttgggaaccacaatgatcttgccaatgaaagtcttgtagtatttcaggagatccccatcaatgatgctgtaaacatatttcttctcagcttcatccactgattcgattctctcttttgataccttaacgattggagacccttcggcatagttaataagacgaacagatccagggggccttgccatcgccttctagcacttgaatgctcttgtaatcatgggacaaggcttgagggaa

SEQ ID NO: 6062 - DNA, 478 bp, Gossypium hirsutum
  unsure (1)..(478): unsure at all n locations; Clone ID: LIB3828-013-Q1-N6-G1
ccccccccnncctccccccccccccccccccccccgggcctcctcccggccgccctccctcccccccccccttccttctccccccccccccccccctccccccccgcctcccccccccccnnccccccccctctcccccccccccccncccccctccccctctccctccccnccccctnnnngncnngtnccctggctctccccccctcttcctncctcccttcngcncccctcngnccncctcctctccctccccccccccctccccccctcctccggcctcccgnccccccgcccccccccccccccccccccggcgctttntcttttctccccctttcctcctcttccccccccgccccccctccttcgtctttccccccccctctctcccccctccccctccccncctcctccnccccccctcccccctcccctttcccccccccggccnccccccccccnccccccccgcccc

SEQ ID NO: 6063 - DNA, 609 bp, Gossypium hirsutum
  Clone ID: LIB3828-013-Q1-N6-G2
cgatccaaaatttattcgattttcattttataaaaggaatagttaaaagagaattggtgtatgtactgtaaacatttgcttagctatgtctttgcagtgctcagtcaaatggaacaatctttttttttccaatccaatatcttctgacttctggtaccttacaaggatgctatctacacataattgtcctctctacttaagctgattgcatgtggatgctcagatttgaccttgtatgtacagaatctgtggcggtggtggtgccttctttagtaggcagattgcctgaatgcggttcaggttggttcagtttccggacaaactcaatgaacaaaggaaaatgctccggtgcgaagaattgagctccaatcctctggaaaatgaatgagtcattaagattctcactcaacatgttcttcttgatctgcttaagaccatcaggagctccgacagtcgagttctggccggaaattctgaccccgtgcttattgcaagctgttccaatttcagcaagtaataattcagggcttgagagagattccttaagctggtacttatctgactggtccatcccaggcaagatgattttgcatgaattccttgcaaaca

SEQ ID NO: 6064 - DNA, 608 bp, Gossypium hirsutum
  Clone ID: LIB3828-013-Q1-N6-G4
aaatgatgacagaacaagctcgataatcacattgcaaaattataaaagagggaaaagaatttcctacacgcttaaaaccacaaagccttttccatcattacaacacaagcaatcgggtgtggggggaacaaaggtcgcatatcaaaggggaataaattgagaattctttgaaatgaaaggataatcacgggaggcaaaacaacgtgcaaattattcaagttgcttaaaatctaagctccattgattaaggcaagggcatcggccacggttggtagtgcagggattgctccctttttggtcgtcgtgatggctccacatgcatttgcaaatttcaacacttcccttaattttgcttcatcctcaagaatggttgggttttcaacaatcttgcatagcaatgcaccaacaaaggagtcaccggcgccagttgtgtccacggtattgacatggaaagcatcgactgccccacggaaattcttggtgtagtatcggctacccttttcaccaagggtgaccaagagcagtgtaaagttgggtcgccaaagtttatggcagtttcgtcgtcgactttgttgctaccggtgaggaactcgagctcgacatcacta

SEQ ID NO: 6065 - DNA, 604 bp, Gossypium hirsutum
  Clone ID: LIB3828-013-Q1-N6-G5
gcttgtgaacatcaaattcatttataacaaataaaagaattagaagacaatgaaacccctcgctttctctcaatgttcaagacgacaaaacaaatagatgaaataagaacggtagaacaaagcagagctgcactaatagcagtcattgctttctctttttgattattttctcccattgaactgtttagaaacatttgcggtgaacgattgacggaccggattcgtcgtactctgccttggcaatccacatttgttggaaggtgcttagggaagccaagatcgagccaccgatccagacactgtacttcctctcaggtggtgcaacaaccttgatcttcatgctgctgggtgctaatgaggagatctccttggtcatcctatcggagataccgggaaacatggttgtaccaccactgaggacgatgttaccgtacaagtctttcctaatatccacgtcgcacttcattatggagttgtatgttgtctcatgaatgcctgcagcttccataccgatcaaagatggttggaaaagcacttcagggcatctaaaacgttcagcaccgatggtaataatctgaccgtcgggtaattcgtaggttttctc

SEQ ID NO: 6066 - DNA, 591 bp, Gossypium hirsutum
  Clone ID: LIB3828-013-Q1-N6-G6
agcgaatagccaagtctaaagaacaattatatttggttctcctcaaaatccgggaaaattattcagagttcagagaaatatcaactggctgcagttgcaattattccagttacaaaaacaacactaacaatgccctcaaagtccaaggcaaggaaaagcaaaattctgtaacaaaccttcggcattatctaataaaattataaaacttacgaaaacccaaaggaacgctaccaattcttaaccgataagcagtttgctctcatccaagaaggtgtaagtgggtacttccaggttgtatggtgctggacccttgcgaatcctgccagagacatcataatgggaaccatggcaagggcaaaaccatccaccataatcaccagcatttggcaagggaatgcaacccagatgtgtgcaaaccccaacaacaattaaccactctggattcttaacccttgctgcatcctcctgtggatcacgaagagaccctagatcaacactgtttgctaacttgatatcctcatcagttcggcgcctgatgaagactggctttccacgccacttaacagttacagtgctgccaggttcaatgct

SEQ ID NO: 6067 - DNA, 575 bp, Gossypium hirsutum
  Clone ID: LIB3828-013-Q1-N6-H1
aaccaaaaataacttgtcaattactcaaataaaaaacgagacattcatagcatgtccagaatacaaaaacggcttataaagtactgactaaaacaacaaaattctccactcccatggtgtttaatcttcttccaattcctcaacgattagccttagcaactctctcaatttcatccttcttcttgatggcatagctgttagatgatcccttagcagcattaataagctcatcagccaaacactctgcaattgttttaatgttcctgaatgcagactcacgtgcaccagtggtcaaaagatagatggcctgattcacgcgacgaagaggagaaatatcaacagcctgacgcctgacaacaccagcagaaccaattcgagtagcatcttcacgtggcccactgttgataatagcatcaacaatgacttgaattgggttctgatcagtcaagagataaataatatccatggcatgcttcacaatcctgactgccataagcttcttcccattgtttcggccatgcatcataagtgagtttgtaagcctttcaacaattgggcactgagccttcctgaaa

SEQ ID NO: 6068 - DNA, 492 bp, Gossypium hirsutum
  Clone ID: LIB3828-013-Q1-N6-H4
ggggggggaaaggttcccttgggaattcaaaccttttttaaaaacggccaaacaaggaagggggaaaaagccctttttaacaatgaaaaaaaagaaaaaaagccccccaagggggttttttccattttttaaacccccattttttttttgggtttttcaattcttcgggggttcccccctttttgggggggggttcccggaaaaaggggggaaagaaaaaaaacaagggggggcccaacccggggcccaataacagggtttggggggattgggaggcgggaatttgggccggggcccgttgccgaagctgaagctgccgctgggggtggggctgaagccggggatggggctggggaaccccccccggccgggacccggcttttgggggggggggggcccttggcgggccctgggaatctttttccgggccctgggttttgaaaaattccgccccgggggggcgcccggggtttccgggccgggccccggagg

SEQ ID NO: 6069 - DNA, 582 bp, Gossypium hirsutum
  Clone ID: LIB3828-013-Q1-N6-H5
gacaagccaaaaaagatttatttggttgggcgtttagacaatgagttatgaaatatggatagtcatggcatccgcatactactcctatcctacataaatattatattatctaaattaaacccatgagtcgattttttttatacataaaaagagtatactacataaatctgcaatcatttgaatatatatatatatataactctatgtcgatactatcagcttcatacgaggggaccgtgaaaaacccacctagaaactgcttttctctcacaccctaaaggcccagacttgccataacatcaaaatacagccgacaacccacctttgatatggtctaaaacttgcactggtatcagtcacaccaacaagaaacctgcaatcaccaacagaagggtccagaaaagtgaccataccaagtccatcaaaattacaacttttttcattctgcatttgcagctgatagtaactgttgaatgcatatgacacatttccttttgctccaattgcattacatgatcccccgtagttgagcgtggtgcaatctgcgacattacaagcaagcttcatgtgatttgccacttc

SEQ ID NO: 6070 - DNA, 536 bp, Gossypium hirsutum
  Clone ID: LIB3828-013-Q1-N6-H6
agggagaaaatctaaagtaaatgtttatttaaacaatggagaaattaatgtgcattttaatggagtgatgatgctccgattcaagcatacaaggaatccacccatcgcctggaaaacatacataatagccaagatactagaaaatgtttatttaaaagagtagcataattgttatggaaagcaaaaaaattgttgaagaggggccgtggtgttgggaaacagagatgaaaaaatcaacagactccagctctcttgcgatctacaaggcgtttccagtacctaaagacctcttcctgagtttctctttcggtcttcttatgttgaaggcgactcgggaggccatccatttccttgaggacttgctcaatgtgtgccaccagtcttttcgccagcccatggctgaaatcttctcggatcactgctcggaggacagccacgtgctgtgcattggcaggcattgtataagccggaaggatccatccaaaccttcgcaagttctcggctatctcgaacactgtatgtttgctgctatcttt

SEQ ID NO: 6071 - DNA, 602 bp, Gossypium hirsutum
  Clone ID: LIB3828-014-Q1-N6-A1
acgggcccaatctagagtggtcaataaatatatgggtctgttattggtaaaccaacaacgtttactgcacccaggctggttataacatctacaatatatgattatcccgcatatattttcccatattttctaatgtaatcaaccgctgcacctagaacaattctccctcccaccaaaaattaatgttatatatacatacatactactatactaatcaatatgcaggtcaattttagtcgaaatgaccacaaccatccaacaagtgttgcagtgacagcaattaaggtgtaccttgctttcctttcgtcaagttatcacgttgacatattactctgcgccatgttatgccccatttcagtcccaaaaccaccaggaccaaactcatttccaggtacctggccagaagttgatgcagcagctgcagtagtaattgctggttctaggttttcatttacactcttctttggtctcttaggccttttgggtctctgtgattgcatatcatcttgaagggcatcatctaactcattatccacaaagctaggttcacttgtcttctgagaaatcctttgcttagcagatgtttgcctttcagaacactt

SEQ ID NO: 6072 - DNA, 585 bp, Gossypium hirsutum
  Clone ID: LIB3828-014-Q1-N6-A2
gatggcatctaagaagtatcatttacagatttgcaaattacaacaaagcatacatgcttttacctatgtatccatgatctcaacttcaatatgccagttttgtctgtctttatatacaagttttgtttaataaagcctgttgcgctaccaatggagccggaaactagctgcctgcattaccggatgcagaaaatatgcacctagtgtcattgcagtgatagccaaatagggcaatcgaatgaattctttgtagtaatctttaggcaatttttggcggccatcgaggattgctgcaaaagggatgatgcttgttcgcttctttacaacttcaaaagcctccccatgtcgtacagctagtctcctatcaccattccatacgccaaatagatgatgtccgatcaaaccaacggaggctgcaacagctacagagtttccaatccaaattgtgtgggccaagcaccagattacctgccctaccatctgtggatgccgggtgattctcatgatgccagtttcccacagatgcactttcggctgttcaacagctgctacctctaatagataaaggtaggaagatataggaaa

SEQ ID NO: 6073 - DNA, 605 bp, Gossypium hirsutum
  Clone ID: LIB3828-014-Q1-N6-A3
tttctttttatagtatgattgaatcttgtgtaaaattcgtttttgacccaataggggtaaaattgtaacacgaccctcacttgggcaaacgggcaacgtaatgaaacactagagctctcgtctttttaagctaatcacatccacaatgaggatccattctaccaatgatttcactaacaagtccctcccatttttacatatttacatttataccaccctcatctctattcagggatagaactcaacacagccttgaacttccctctccctactctccctctcttctccccgccgttcccaccaccagcaccggcggcgggtgaaaccttccggcgaggagacccttcagaaaacgcgaaaggggtaaccgccttactcccgcgcctgcatttttcagaggcggtggttttcatcaaagcggagctggctttgacggccaatgcagccatttcctcagcttgtaaaggatggttgagccaactcaagggcaaagcgaagtaaagttgaccgggttgaagctcctcgtcttcctcgatggcggatacgaagtcatcgaagtccatctcatcggcgttgcagatgaaacactgggattcttctgcaaa

SEQ ID NO: 6074 - DNA, 284 bp, Gossypium hirsutum
  Clone ID: LIB3828-014-Q1-N6-A4
ggataaaaataaataaataactaacaaaaacaggggactttatagctgcaagttaaataaaacaatacccgaaagggggcccacctatctttagaaacaagaatcccacctaaatgggcatcaacacagcttaaacttttatctagggttttattcatttcaaagcaaaccaaatagactaaccccaaaccccattgaaatatgccgcccaagaaagaagttgctagctttgggaaaagcattatagtggcaaacaacccacccctagctagaaaaaattcttt

SEQ ID NO: 6075 - DNA, 529 bp, Gossypium hirsutum
  Clone ID: LIB3828-014-Q1-N6-A5
acatacttcaaaaaaaattaaataacataattcaacattatctctctcctttatttgaattttgaatcattatgcatgttatatattaaaattaagaaaattatttggactatgagtttaataatagataaacttatgtttcatttaattattcatttattcatattagtccttgaagaaggaaatgctctaatgaagcaacattttaacacttaggaggatatgcaactccacacgagctagctacctttggaatgttgggattgttcatatactgtttaagagttgggtccttaatgtaaccacaaaagcatggttgctgttccttcaacttactgcaacaagcggctgaaggaggctgcgacggcaccatgattgccgctaagcatggactgagctcgatggggttacatgtcactgcctccaccatgcatgtttcacccgaaaacaccaccaccgctagtgccaccacacacaagataacaaaggaaaccctcttcatattctttattctttttccgacacaaaa

SEQ ID NO: 6076 - DNA, 601 bp, Gossypium hirsutum
  Clone ID: LIB3828-014-Q1-N6-B1
aataagttaaaaaagtgataaattttgacatttttaaaataaagcaaataccgaccaaacaatagctcagaagaagcccattctaagatgttgccatccttcgaacaatgggatactacagattccttcaagcagcttgttttgttgatttcataagccctatgaattctctaaaagcacaatctgaatcatgaggccctggggatgcttcgggatggtattgaagagacataacatttaaagcaggataagctaaaccagcacagcttccatcattaagattaacatgagtcacttctactccctccgggagtgatgccggatcaactgcatagttgtggttctgccatatcataaaacctaaggtgatgacaacccgaaagacactgagcactaatctcaacacgaccattgcgaaggttgcgaacaggatgatttcctccatggtgaccaaacttcatcttaaaggttttaccacccaaagcctgcccaagtaactgatggcccatgcaaattccaaaaacaggaacttttcccagtatttcctttactgtttctacagcataaggaactgcagatggatctccaggaccgttgctga

SEQ ID NO: 6077 - DNA, 579 bp, Gossypium hirsutum
  Clone ID: LIB3828-014-Q1-N6-B2
aaatctaattatccacattttatataagatcttcaaataacaacttgggaaacaaaacgtgaacaatgattcgtattacatataggggctctgacaattcaatgcttgttgtgaaagatctaaggtaaaattcgaacccacattgatcgacggcaaggtactccattgtagttcacaaagagcatgtaataaccaggtggtgcaatgttgctattaacgggagcttgaagaacaatgttgtttgtatttatggcaacatttttgttaaattccacaattcccaattgaatcaatctttgattcatagcaaccccgtgcgtcacaaatggcggggagtaaatcgtcacttgaagcttttgttggtcaatttcgacatttccacggatttgcactgtaaatttctgaccgtatttcacctggttattggaattttcaacaatgatctcttgttggaacatacccaagttcgggtccaagtaatgtggcgagaacttctcaacccgaacttcggtggggaacaatgcgtcatcaaggtaacctgggtttgtgttgcttccacaatgaggatttttgcatcgg

SEQ ID NO: 6078 - DNA, 613 bp, Gossypium hirsutum
  Clone ID: LIB3828-014-Q1-N6-B4
cacatcaaatgggagatgtttcattcatatttacaaaaaatctgattctgttcaaaagtatgacatatgagacttaaaattaaaaattctgatatactagtatactgggaaataaatatcttagatgaacactctggtttgtccacaatgataacaattcgcgttgttgtataaatgaacactcccagaaccagaaacttgtatttgaaagttctgaaccagccagacacaaatgggtgagcttttaggttacaagaaccaatcaggttttttgatgttttagtagagaacatccaactgatggaaggtaattggaaaagttataactaagttgttgatttaatgaagaataaaaaggaagataggcaaaaagtaaatagtgaaactaagaaaagactaagatatccaatgaagatagatggagagagaaatgagcaacatcgcgttgattctccatcgtatttggactaaagccagatttgaatctaaaacctattcctatcccatccatatctagtttcagtggaggcagccaaggcgtcattaggttgcacgtgcaaaattttgaaggagaaaacacctttgggagttccttccctatctgatttcactg

SEQ ID NO: 6079 - DNA, 606 bp, Gossypium hirsutum
  Clone ID: LIB3828-014-Q1-N6-B5
gtcaaacccatttttctaaaatcaaattaattttttaaaaaaaacataaatttattatttaactattaaaagctcaagagattccacatgattcccaaattggttcctaaaactaagcaacacttggtttttctcccataattatgaaagaaattagccctaattgtagttactaatcatgggattaatcaaacacaaattgagtttagatggtaaagctaccacgcatcatcaacaccaagagctgttccttttagccgcattgccttttgatggagtgacgcgtgctgtcttcgtcaccgttggatcggtgtttatgtcgaagctgatgccatcaaccatttctgcaaacatcctttgcaaatcctcaaaactatcaccctcgtctttcacattattcatcatggacatcatctcttgcataaaatcacagaagtcttggtcttcttcttccaagggatcgtaaaagccggcgtcatacattgatcgcttgctctcgtcggagaggacggaataagcttcctggatttgctgaaaccgacgtttggcttctccggcgatccctgagtttctggcgtatctgtctggatgccatttcatagcgag

SEQ ID NO: 6080 - DNA, 562 bp, Gossypium hirsutum
  Clone ID: LIB3828-014-Q1-N6-C1
agttgagaattcaaatatatagtaaccattcattaaatgcaaacacaatatttttcacttcttctaaaaccaaatcctacagtgcaggaacgcaaatatttacaggcaacacagcatcatttcttttcaaggttttgggctttcgttggatctttataaatttaaatcatacacatatatagtttatggccattgaaaacctcaggtcccctttatgctgcttctgcaaacccaactctaagcttaccaaaatcgaacacagtgtggtagcgacccatgaaggcatctcccaaaatccagagaggtccacgaggaggagggacatccaaagcagtaaagccactgatgcattgagcttcagcaccttcacccaccttcagaatgtactcttctggtgtaagatcaaaagctttgccaccaatagtgaaggaaatggttggcatggaagaaagacttccacagtcgacagtagattctcccattgggtttggcacccgatcacaaagctgattggcatagtccaatatgcggtcttgagtctgattctcaatcagttggttct

SEQ ID NO: 6081 - DNA, 583 bp, Gossypium hirsutum
  Clone ID: LIB3828-014-Q1-N6-C2
ttttttttttttttttttttttttttttttttttttttttttttttttttttttttttttttttttttttttttttttttttttttttttttttttttttttttttttttttttttttttttttttttttttttttttttttttttttttttttttttttaaaaaaaaagggggggaaaaaaaaagggaaaaaagggggaaaattttttttaaaaaaaaaaggggaaaaaggggggggggaaaaaaaaaaaaaaaaaaccccaaaaaaaaaaaaaaaaagggggccgggttaaaaaaatctggggggggggggggggaaaaaaaaaaaaaaaaaggggggggggaaaaaaggggggggggggggggaaaaaacctttaaaaaaaaagggggaaaaggggggaaaataaaaaaaaggggggaaaaaaaaaggggggggaaaaaagaatttgggggtttttttttgggggggggggggggcacggggggtttttggggggaaaaaaaaaaaaaaaagggttttcgaggggggggtccccgaacccccttgggggaaaaaccccgggaaaaaaaaggccctttcac

SEQ ID NO: 6082 - DNA, 588 bp, Gossypium hirsutum
  Clone ID: LIB3828-014-Q1-N6-C3
tttaaaaaattttatttttttttattttttttttttttttttatttaatttatatataaaattattttttttttttatttttttttttttttaaaaaaaaaaaaaaaaaaaaaaaagaattaaaaggtttttaatgggggaaaaaaaaaaaaaaaaaaaaaaaaaaaggaaaaaaagggaaaaaaaaaaaaaaaaaaaaaaaaaaaaaaaaaaagggggggggggaaaaaaaaaaaaggaagaaaaaaaaaaaaaaaaaaaagggggggaaaaaaaaaaaaaaagggggaaagaaaaggggaaaaaaaggggaacgcgagaggggggaaaaaagggggggggaaaaaaaaaaaaaaaagagggggggggggggggggaaaaaggggggggggaaaggggggggaaaaaagggttcaagggggggggggaaaaaaaaggggggaaaaaaaaggaaaaaagggagccgggggggaaaaaggggacgggggaaaaaaaaaaaaaaaaaaaaaagggggaaaaaaaaagggaaaaaggggggggggcaagggggggggacaacccaaaaaatggggggggggaaaaaggggg

SEQ ID NO: 6083 - DNA, 392 bp, Gossypium hirsutum
  Clone ID: LIB3828-014-Q1-N6-C4
aaataaaccataattcattaatataacttaatagcaataaaacatagtacattgcttattcatagttttagaccttttcaaacccataggtatcaaagggcttgaaaattacaccattttctattctcacacacacgtcaagaagatgcagcagcagcctcttgcagctgttttacattagtgatataatcgttcattgcttcctccttcgatttcccttcaacagccttccatgcatcccacttgtacttttccttcatgttgaacattccaggacggctggtgttcactggtccaacagtagcttgcttgtagagtccatagagaatgagcttgtcgtcgttggtagtgttctggggaagggtcttagctttctccgccggacgcgtggg

SEQ ID NO: 6084 - DNA, 595 bp, Gossypium hirsutum
  Clone ID: LIB3828-014-Q1-N6-C6
agctaatgaaatcaaatcagacataaaaaacaaaaaagttggggaaaccgagtacttaaaacatattacttcgagttcaaagtaaacaggatatatatatatccattgcacctaactagaaatctaggcttttaaaactacacgctacagcgaaatgtcagaatccagctctaaatgtaattgccgaaacagttttcgtcacaaaagaaaagcaaataaaaacacttccaactgagttctgccatgaagacgaaggttcctcctttaaatgctttctctagatcctaatcattcctctgctgcaggagattgacttccatatctttcattgactgggctttcagcttcaccaccataagggctggcccttctttctggcatagaaccagggctgctaccacggccattctctgggctaattctctctcttccatatgggctatggctgggtgcacgaccattgtcagaagtgggcctttctcttctatatggactgcgactggggctacgatcattttcagcactacgcttctctttcctataaggactgcggctagagccttggatattctcagggctagccctctctttcctg

SEQ ID NO: 6085 - DNA, 599 bp, Gossypium hirsutum
  Clone ID: LIB3828-014-Q1-N6-D1
gaatcagaacaagcaaattgacactaaaacgtctactgttcctctccaagcaacttcaaaattctttaactaaagacaccactgaattcttactacaattcctgatcatatacgctatatgcataaactcatagtaatgacctaagaatttcatttcatgctttaaatatgaatcacagccaacagtccacagcaaacctggaggcgcgatttagccaaggaaattcatgatcactaaatggagcaccaaattgcaaagaacaaaatctgcaaaagctcgctcaggtggtagatccttgaattccttgttttctttattcacttgaatacgaagacaaacggcaaggactgctgttccaacacaagaaagcactccagaaagaaatgaattgaaaggaaatgatcccaccattgccatgtaaactacctggatcagagcggtgaagattgcaaaaccaacatataaatcaatgatcttgaattccttgttttctttattcacttgaatacgaagacaaacggcaaggactgctgttccaacacaagaaagcactccagaaagaaatgaattgaaaggaaatgatcccaccattgccatg

SEQ ID NO: 6086 - DNA, 533 bp, Gossypium hirsutum
  Clone ID: LIB3828-014-Q1-N6-D2
caatgggaatttttttcctttctttttttccgttggcttccttcactaatatctactaaaaacaaggctaagagacaggtaaattttcattaaaaaagtctctgtttttttcttttactcgccatttttcagctttttcacccatctttctttccgtaaaatgaacaaaattattcaccgcctaattcccataccaagaaaaaacacagcccagttttttctcatcttttactctcatttttaacctttcactcgatcttactcaccccgactcggttcacagccataagattcctgaaccccccatccaaacacatccccattcccgctcctcccgaaactgcgccgttttgttgctgctgctgttgctgcatctgggtcatgtaattcctcacctcaacccttataatcttttgcatcaccgccataaactccacactgaaccccatcaccccacctccccttttttcactccgattctgagttgactcggttattggctgggttgacaccaccttgcatgactccacccc

SEQ ID NO: 6087 - DNA, 453 bp, Gossypium hirsutum
  Clone ID: LIB3828-014-Q1-N6-D3
aaaaaaaaaagggttttttttaaaaaaaccaaaaaaccgggtttgggatttaagggtttccccgggaaccaaaaaaaaaaagggggaagggtttttctttttttctttttgaaggaaaaagggggccggggggggaaccggggaatcgggggcggggcccggggggggaaacaattttccctaaaggggggggtttaaaaggggggggaaaaaaggggaaaaagggttcccgggggaaaaatggtttccccaaaaaattccaaaaaaaaaaaaaggcggaaaaaaaaagggaaaacccgggggggccaaaagggggggccaacccaatttttggggggggggccaacggccccttttcaaagaggaaaaccgggggggccccctttaaaaaaaaaacccccaacccgggaggaaggggggtttgctttttgggccccaggggggttttttttt

SEQ ID NO: 6088 - DNA, 416 bp, Gossypium hirsutum
  Clone ID: LIB3828-014-Q1-N6-D5
gagtaaaaaaatagttttcaaataaaaattcatttattgaaatgccaagttatcccagccagagatagtcaaatgaaaccaaacgggattctagcaggtggaagaatatgaaactccacacaatttagccattttcgcaatctcaactctgtcaaaaacacgtttgacatcttctatcttcatgtactcgcaatagcatggtgcttgttccttcatcttctggcaacaaccagctgatggaggtggcttcttatacgcgttcaagcatgagctatactccaaggggttatcacatttcggcgctggcgctgcctctgcatccgaaaacaacaccaccactagagtcaccacgcacaaaacaataagggaaaacctcttcatgtttctttaaataaaaagtttgctagctaggcgac

SEQ ID NO: 6089 - DNA, 579 bp, Gossypium hirsutum
  Clone ID: LIB3828-014-Q1-N6-D6
agcagaaatttatatagcaaagaaaatcatatatattagcatgtacatgcattaattacatatggctacaaaacaagattcaaggaactttaggatattgtaaatcaaatattgttttgagctatttattcttcataattactctttttatccaacaggattttatagcaagcccttctgcaacatcattacttcttattttgtataattaatacgacgacaaccaactcttcctcattatttcatcttaatatggtatcatctccctactttggtggactgggttcactgtccataacctcttctatccctttgctctttacagtttcagcctggcaacatcctgatgcgcacctgggctgaccacactcagcacaagtcccaccgcaaccctgacggcaacactccccactctcacatcccgactgtcctggcattagtgggatttgtgggacttgtgggatctgtgggattagtggaatttgtgggatttgtgggatctgtgggatctgtggaattcttgggatttctggaatttgaggaaatggtagaacgaaaccaccaggattacaattaccg

SEQ ID NO: 6090 - DNA, 584 bp, Gossypium hirsutum
  Clone ID: LIB3828-014-Q1-N6-E1
gccaaaaaactactcataatattgtcaaatttatcctgaaaaaggcttctcctaactaggaaaagtgcccaatgtcacccaaaatagtctaattcacgcataaatgaaaaatgaaaatgtaacaacttgctaagatctaaacaggcagtaaggcagtaaaggagcttaatcaaagagagagaatcccatatcgtcatcactctcctctttctcttcctttttctcctcagctgcaggagcttcagcggcagcggcagcgcctccagccggagcagcagcagcacctccacccccgatgaaggctccgcctacagcacctccaataaccacctggaaaacggcagaattaggggtaacgacagagaaagaggaggtgacaccaccagaggagtcgcaggcggtggcagcctggacgagtttccgctggagctcgtaagtggaagcagcagagctttcaatctctccctccaactgcttggcagaccactcaccgcctttgctcctgcacacaaatgtgaaaacacccatcgtttttttccttttattacctgtttcacacacgaactaacaaaccgtaaattcgc

SEQ ID NO: 6091 - DNA, 421 bp, Gossypium hirsutum
  Clone ID: LIB3828-014-Q1-N6-E2
agaattcttaaaacattgttgaagtatatatttctggaatacatgggttacaataataaggaatgaataaacatatgaaatgattaattgttctttttttacatataatttgatagcaaaaaaaaaaaagagagagaagttaatgaagtgcattttctagttgtggtcaatgaaagatgggcattgtatgatgacttcgacatcttttttggggtgaacatcctctgtcataatcgttggatggtggtgggaggcaattaccgcctccaattttgcatggaacttgacggttttttcccagtcctgggtagctaattggtgtcgcatttgcaccctcttccataaccattgagcttatcaccattgcacaaatccacaacaccatgatcctcttctccattcctattttcttccaagaaat

SEQ ID NO: 6092 - DNA, 599 bp, Gossypium hirsutum
  Clone ID: LIB3828-014-Q1-N6-E4
gataaaacactactccatcaagctcaagattttctttctagagtacaaattaaacaacacttccttttaaatacttaattcttttttcacacataaaattattaaaatgaaccaagataggaacaccagcactacttttattctctgtgattagcaatgacgatgaagaaacataaaagctgaaggcaggcatttagtttgactagaagcaaatagaagagctttgatcagtcgaaaaaaatgctgcatgcatcctcatattgctaaagtgggtgaaatcttgaaatccagattccacagatcaaacttcccattcacgaaatcgtaatgtgcacctttcagggccactgttttcttcaccactgcttctctcacaaatggatacgtcaataggttccccagtgatacattcactgcctccttctcgcagttggtgcattgctccgagaaacttagctcattctgttctgatttcactttggtctttgctggtgtacagatgctaacccattgttctatgaaatcactagcagtggtcccgtcgtctgggatggacataagccctttgatacctccacagcaactgtgtccaataacta

SEQ ID NO: 6093 - DNA, 549 bp, Gossypium hirsutum
  Clone ID: LIB3828-014-Q1-N6-E6
aaacagagatatacattttccaggagaaaaaacatccatcatttcatatctgaatacacttgtttggtataaaattgctgaaatgaaaattctacaaacctcagtaagagagatttcagatgtaatttttcaacagactaagggggaaactagggaatgcaaagaaagacagtagtagagtagcaactacatcatggctaaagatccagagcagcgtgttgcgcacatgcctcctattgttgcaccaggccctggatcaagagggaaaaataaaccatatggctccaagtattcattaagttccatccatccaattccgggctcaactacaacatccatgtcccaaatatgcaatgccttaactctctcgagggatgaatttttctcgactgtggaccctaatgttttagggtttcttcagaatacagaggcaaggccgacggtcgaccgacagagacgacgatgcaaagatggtgcggtgaggccaacgaacggagatgaggagtcggaggaagagggagaacaactacttagaagagaagagggaaa

SEQ ID NO: 6094 - DNA, 584 bp, Gossypium hirsutum
  Clone ID: LIB3828-014-Q1-N6-F1
agggtggaatcaaataataacatttcctgataatcattcccaataaatcccaaatgtacaatgcatggatatcaaaatgttgtacataacaaaagagagaatgtatgcatatcaaaataatgtttttaacaagggcgaccaattctgcagtggagtgttccggcataccttgtgagtttggggactaatcgaccaggttggaaaggcatcattttttcagcaccgaatagcttgctagcattcggatcaccggatgtaataaaataggcaccgttcatgaagtggtcaccctgtgatacccagttccatttattccactgttccagtgataagtagcccctactagtcacttgcttagttacgtagatgcttgacgcgatatacctgttgccctggctgataattgtagggtggctactgccaccaatggcatacatgaaccaatgagtgtagtcattgttgacaacatgaaaaaaacctaatcgacacctaggcatcctgtccaccaatcctttaccgaagcggttcaaagcaacagtgatctgcatcttctcgtcagcaacgtaggtgtcgcttgctccaaa

SEQ ID NO: 6095 - DNA, 441 bp, Gossypium hirsutum
  Clone ID: LIB3828-014-Q1-N6-F2
ccaaagctccatttcaattttttaatattcatcacatgtttcttacaaaataaaaaataaaaaataaaataaaatattcgttcacatgttaatttttcatacatgtagcttactgcagcatgcaagaaaacaaagaaacaatggaagccccaaccaatgatccaagaacaggcaaggttgcggcagccacgctggaatctggtcctgatgctggggcggaagcaggagaggagctaggactagaaccaccggcggaaggggaaggagcaggtgcaccggcagccatgacggcgctcattgaggcagcagcaacaatgatggcggtggagaccttcttcatgtccatggcgtataaagggattattaaacgcaccggaaatgaatgagacctgcgtttaattgctggcgaatggggatccgccggtgattgttattatttgc

SEQ ID NO: 6096 - DNA, 598 bp, Gossypium hirsutum
  Clone ID: LIB3828-014-Q1-N6-F3
aatgccagaaaaaaaaacacgactaaaatagtaaacgatttgagatacgcaacattacaccctaaatatataatttgccaaaacaataagctttcaatcagaagcaaggggactcaattgccttttttagacaataaactaccagtttactaagaaaagcataatctctcaaaaattaaacatgcacataagagcatgtaatcatctcatttgccaccatgcttggccttcttgtgggactctagaccaccctcggaaccaaaggacttgctacaagatccacaagagaattgaccaccagactttggactctttccagaagttttcccagcttgctttgatgggtgtggggttgcagtgtgaccacccttcttaccatctgttttctgaggtgtcgctgcaggtttagccttctttgcagaaacaggtgttgcagcttctgccggtctctttttgctcgactcaaccttcttaggtgtctcctcatcctcatcatctgaactttcatccacagacatctcttcatcttcatcatcagaaccacttccatcctcggaatcactatcatcatcatcgtcctcatttttcttgttatcac

SEQ ID NO: 6097 - DNA, 495 bp, Gossypium hirsutum
  Clone ID: LIB3828-014-Q1-N6-F4
gtataattaatacgacgacaaccaactcttcctcattatttcatcttaatatggtatcatctccctactttgggggactgggttcactgtccataacctcttctatccctttgctctttacagtttcagcctggcaacatcctgatgcgcacctgggctgaccacactcagcacaagtcccaccgaaaccctgacggcaacactccccactctcacatcccgactgtcctggcattagtgggatttgggggacttgtgggatctgtgggattagtggaatttgggggatctgtgggatctgagggatctgtggaattcttgggatttctggaatttgaggaaatggtagaacgaaaccaccaggattacaattaccggaacatccagaagaacaacatttttcaggaccaccttcaaaaccaaaaccaagagtaccaatttcggaaccttttgggacaacatgatcttcgtgaatgccaacaccgggtccattca

SEQ ID NO: 6098 - DNA, 294 bp, Gossypium hirsutum
  Clone ID: LIB3828-014-Q1-N6-F5
ggccccgccctctttcttttattttatttttattttattttttttcttttttatttatttcttttctttctttattttttataaatcgcttttcttgttgccccaaatatgggacattcccaaaacaagagttccactttttaaccggaaggcagatatgatttgggcggacgcggggggccacccggggaagccgggaccggccccggggggcggaccagcccccccgggggggggggggataaaagcggggggggagcaaggggagagggggggcccgggggaaaagggtag

SEQ ID NO: 6099 - DNA, 545 bp, Gossypium hirsutum
  Clone ID: LIB3828-014-Q1-N6-F6
tttttttttttttttttttttttttttttttttttttttttttttttttttttttttttttttttttttttttttttttttttttttttttttttttttttttttttttttttttttttttttttttttttttttttttttttttttttttttttttttttttggggggggaaaaaaaaaaaaaaaaaaatggggggtaaaaaaaaagggggggaaggaaaaaaaaaaagggggggggggttttaaaaaaagggggaaaaagggggggggggggggttaaaaaaaaggggggggggaaaaaaaaaaaaaaaatttttcaaaaaaggaaaaaaagggtgggggggccccccgggggggaaaaagggggggaggtttttaaaaaaaaaaaaaacaccccccccccaaaaaaaaggggttgggggggaaaaattttggggaaaaaaagaaaaaaaattggggggaaaaaaaaatttttttttttggaaaatttttaaaaaaaaggttgggggaaaaggggaaaaaaatttggggaaaaaggggggggg

SEQ ID NO: 6100 - DNA, 460 bp, Gossypium hirsutum
  Clone ID: LIB3828-014-Q1-N6-G1
acacacgctataaatgactatcgattatttcttgctgtgaagttgtttgtaacattaacatacaaacttgattataggttgagaatacacaacttccaaccagctgagaagtgcataatcaaagttgtgaaatgcactgtatgagcatatacttccattcaacgaagatgatgcctgagagtttctttggttcctcgtcgaactttgcaacggattgttgggagtccaaggcgctggtgagcttcataccgatgacaaccagagaaaccatagtaaactccatcaacttcaagcacatcgataggcacttgaagtccaattgtcgaatgctgtccatgagttcctggactttgttaggatcatttgatctggtgcgcattaggggtctcctaatcttatcaagtggaagctccaagatcattggccccccattttgtgagccactacccggaggagcccc

SEQ ID NO: 6101 - DNA, 262 bp, Gossypium hirsutum
  Clone ID: LIB3828-014-Q1-N6-G2
aaaagtaaaaataggggaaaaaaaagaagggaaaaaaaaaggaaaagaaaaaaaagaaaagaaaaaaaatggaaaaaaaaaaaaaaaaaaaggaaaaaaaaaaacccggagaaaaagaaaaaaggagggaaaaaaaaaaaaagggaaaaaaaagggggggaggggtaaaaaaaactaaaagaaaaaaagggggaggaaaaaaaaaaaagggggaaaaaaaaaaaggcaaaaggaaggtgaaggaaagaaaaaagactaaaaa

SEQ ID NO: 6102 - DNA, 538 bp, Gossypium hirsutum
  Clone ID: LIB3828-014-Q1-N6-G3
aaaaaaatccttgggggccttttcaattatttttcaggggctactgaaagatacaacaatttcacacaagggtggttggttcacaatctcacccataccattccattacatgggtcccactgcatatgggatatatagcagggctaacagatacaacataagggttttttttttgggtttttgggggcccaacataagggttcctggttggtccacaacgggcatttaactttatagagataattacccactccctttggcacaataaaaagcagagctactggcccttccccaattacaaccatttttttgccttattccaccaaccaacctaactggaacttgcctttttttccagcttttttcaaatattgcatgccttatcggttaccccgggcatccttattggttctaccatccttggtgcttggaggggaccgactagttgatggtggggaatatccaggggccctaggagaatacccagcacttggactgtactggggcgagcttgggctgtagtctgggctcactccaa

SEQ ID NO: 6103 - DNA, 553 bp, Gossypium hirsutum
  unsure (1)..(553): unsure at all n locations; Clone ID: LIB3828-014-Q1-N6-G4
tntttttttttttatttttatttttttatttttttttttatttttttttatttttttttttttttttttggacaaggccaacagcaagatcgaaaaaattgaaaatgaaaacacggggaaataaaaaaaaaaaagggggaaaaaggaagagtttagaaaaataggggagagtttccgaatcctagctgaaggggttttaaaatcagaagaatcaaggggggaaaccctaagggaaatagaaaaaatgggggttgaagctgaaactaaaaggggggaaagggggcttaaaagaacagagatcatagccaatacccaatgggaaattgctaagctctttgctggatcaagtaataaagggatcgatccttcgttggggataggaaaaagttgacatacatatgcccaaatgggtatgtatgggtaggtttagggtattgacaatgaaacaatgggggaagggaatttaacttggaataataggggagggaggtggtgatctaaattatgtaaccggtacaatgcagggggaaaatgactttcatgttgcgtaatg

SEQ ID NO: 6104 - DNA, 460 bp, Gossypium hirsutum
  Clone ID: LIB3828-014-Q1-N6-G5
ggtcccgggggggggcccgggaacccggggaccgggcccgggggggggcccagccccccctatagggggggggagaagagcgggggggaggcaggggcaaggcggggcccggggggaaagggaaatccgcccacagggccaaaaaaaaaacaagccggaaccaaaaagggaaaagccgggggggccaaaggggggagccaacccaaataaaagggggggggcccccggccccggtccgaggcggaaaacggggcgcgccagggggaaaaaaaaaacggccaacccccggggagggggggggggggtttggggcacaaggggggggttttttttccccagggagaggggaaaaagcaaaagggcctagcccccccggccctgggaaaggggaagaagggggcccaagctgggtgggcccacaaggaaaaagaccaattccaggggggggaacggggggaaa

SEQ ID NO: 6105 - DNA, 602 bp, Gossypium hirsutum
  Clone ID: LIB3828-014-Q1-N6-G6
aaatatgtaagtagtactttttttcctgataggccaacatgcaacatagatgcatcaaatcaaataaacaggtctcttcccctctttcccctctcaccaccccacattcttatcaccctttcaaacaaaagcatcccatcaaaaggtagggttgccagacacattattatataaaaaccccatactgaaaagaaagccaaaaaagatggaaataaaaaaataaaagaattattaggaaaaaggaaaaaggtcagtaagcttcaaatgactgttcttcccagcagccttcaaaaccacatttctgaccttttctttgtacttgggtagcatcggtgtatgaaaaaagagaaggatctgcttttctttttatatgttgtccaaatctttaattttcctttttcatctctgtttcccctgtctctaagcattcaatcaacttgaaatcatgtcaatgaagcaatcaataaaaacaacacacactcctctaattagcagtaacagtccactgctaaaatcttctaaggcatttttccagcagagagccgcttctcattagttacttggtcactattgctcacatttttattgaatgcgagcctttt

SEQ ID NO: 6106 - DNA, 171 bp, Gossypium hirsutum
  unsure (1)..(171): unsure at all n locations; Clone ID: LIB3828-014-Q1-N6-H1
gtgtggggttnttggttgtggggggggagttgtnttggtgttagttggatggtggttgttggtctgttgggaggagctcctttggtggcttacatgtcagaccaagatggtggctttgctccggtgttgtttgcgatggctcccgtgtctgggttggcgccttgcccggct

SEQ ID NO: 6107 - DNA, 594 bp, Gossypium hirsutum
  Clone ID: LIB3828-014-Q1-N6-H2
aaaataagaagggttccatataaatcacatgaaaataatttttaaaaaaatctactttttttttccgtcaaaactttttgatgtgggcaaataatttagttacatattcacacttcatctctgtacaaattaaatatataataaccggagataaaattgacaaatctaataaatatctccaacagatttactcaaaaacaaaaaaaatccagattaaggaaagcttgctatactgcagaacgcaactgtttagagatcttccattggtgcaaaatcaggccttcaacatcataaaacaaaatcatggcttcattctcattcatctccactgacatgaaaccttggccgtcgtacaagaacttcgcgctgtgattaacgtcatcgtcgggtttaaggtcacccctccatgcttttgaccctcctccactcgttaagtattgcattgctccgttcatgcttgtaatatgctccaaacagtggtcatggccattcatgtaaacatcaacattgttgtccttgagtactggaagtaagaacttgataagctgggcagtgtcaccatgatggccaagacttttaattgcatggtggcca

SEQ ID NO: 6108 - DNA, 578 bp, Gossypium hirsutum
  Clone ID: LIB3828-014-Q1-N6-H3
ttttttttttttttttttttttttttttttttttttttttttttttttttttttttttttttttttttttttttttcttttttttttttttttttttttcgaaaaggcaaaacgttttttttttttttttttttggggggttgggggggggcccccccggggggaaaaatttccccaaaaaaaaaacccccggattcccggggggggggggggggttttttattccaaccggcccccggggccaaaaatttaaaaaaccaaaacaaaggggggggggggaaaaacccccctaattcaccccagggccaagggcccttaaaccctttttcccaaaccgttttttgtttttaagggggggaaaccccaatttcccggggtcccaagccttaaaaagggggaaccaaaattttgggggggattgaggggtttgtttttgaaagggggggggggcgccccccggccctgtttgggggttttctcccccaccctctcccccccccggtgggtttgccccggggccccgggttttaaatttttccccccccgggggggggggggggtttttttttggtgcccac

SEQ ID NO: 6109 - DNA, 452 bp, Gossypium hirsutum
  Clone ID: LIB3828-014-Q1-N6-H4
gggaaaaagaatatggggtggggccatttattcttaaaaaaaacccttttgggccaagggggttttaaagaaaaccctttgggaaaaaaaaaactttttatttgggtaaaaaaaaaagacgacaaccaacctttcccgggtttttaaactaaaaagggggtcaaccctctacttgggggggggggggtcacgggccaaaaccctttttatcccttgggtttttacaggttgaggcggggaaaatccgggggggccccggggggggccacactcagaaaaaggcccaccaaaacccgggggggaacactttccactttaaaatcccgacgggccggggtttagggggattttggggaccggggggatccgggggaccggggggatccgggggattaggggaatttgggggatttgggggaaccgggggatttgggggatttcgggaattctgg

SEQ ID NO: 6110 - DNA, 612 bp, Gossypium hirsutum
  Clone ID: LIB3828-014-Q1-N6-H5
gtcaaaccgatcgatactagcttcgactccactcgaaaaataggactaatcttcctaatgcaaagaaatatacaaatactagatataccaatatttcttaaccagtcagacacccaactaaactgagttacttccatttatagaactttatcttacatgggatcatgaatctttgatttcagtctctctccggagcattttctgaaacccttctcgcgctcaggctatctgtatacgaccacaccttctcaaattcactcgcgaacggtttttcaaatttccggtcaggttcttccttaatatcatttctcttcaaagaggaagctgctcgtcgtggacttccggtgagtggggttggagaacaaaaggtgggtgttgcgaaaggagaggcataaggagtctgttgaattgagaagggactaggagacaatcgcctttggattggacgaccactgaaaccgctcctgctgaaaagagaaactgtttctgccgcagcacgttgctttatagcatcatcaacataaagaacatcatctatccttgccataatgttgaaagccaaactctccatcaccctcgagtagctttcaagaattgaccggacgcgtgggt

SEQ ID NO: 6111 - DNA, 543 bp, Gossypium hirsutum
  Clone ID: LIB3828-014-Q1-N6-H6
aactggaaatccccacttgaataaacaaaattaaggcacatgtcagtcactgaatcatgatacttttggaacatataaccaaaatatttcaattgatattatcatctcgtcatcggctctttctaatctaatctaagcacagattgcgaataccatccaaatgcagctgctacaatttgcatgtttgtagattcccaaagaactttagcagtaccggtagataccagttgcactcaaaattgacgccttggcctagactcggccactgagactcgaattggtctgccatccaactcaacaccattaaatgttttgacagcaccatccacctcttcactagaattgtaagttacaaagccgaaaccccttgatctaccactttccctgtcataaacaacttttgcttccacaaccttgccttgctcactgaacaaggtctccagtgctaaatcatcaacgccccacgaaaggttaccaacatagacacgatttgaagcacccatggttgaaccacctctcgccctaggagaaaattcttcccta

SEQ ID NO: 6112 - DNA, 582 bp, Gossypium hirsutum
  unsure (1)..(582): unsure at all n locations; Clone ID: LIB3828-015-Q1-K6-A2
aaaaagaaagaggcgtctgtaataaaatctgcaatcttaattctgtcggtgtttttatctgtacgcttcagttcgggtgttaggttgctccaggaacagcccaatgatgaccccaaaaacatggacgctattcctcccattgatgcactcaaccctaccgagttgaatggacccggtgttggcattcacgaagatcatgttgtcccaaaagtgctgaaattggtactcttggttttggttttgaaggtggtcctgataaatgttgttcttctggatgttccggtaattgtaatcctggtggtttcgttctaccatttcctcaaattccagaaatcccaagaattccagaaatcccacaaatcccacagatcccacaaatcccacaaattccactaatcccacagatcccacaagtcccacagatcccacaagtcccaaaaatcccactaatgccaggacagtcnggatgtgagagtggagagtgttgccgtcagggttgtggtgggacttgtgctgagtgtggtcagcccaggtgcgcatcaggatgttgccaggctgaaactgtaaagagcaaagggatag

SEQ ID NO: 6113 - DNA, 611 bp, Gossypium hirsutum
  unsure (1)..(611): unsure at all n locations; Clone ID: LIB3828-015-Q1-K6-A3
cgaactgtcacaactgtttngaaataacagagtgatcaaatctcctcaaatttttatcttctaccacaagttttcagaaaaagtcgtttcttattctttaatctggagctctcgactttaccctctccacttctccttgaacccagcttgagacgcctccctccagcctctgccacaaacgatgatgcaacgtcagagtgaagtatcaatttagaagccaagatttccccatccatcgcacgtacaatcaaacccgaagctgatctgaaaaacttttggttgaaagccatatcaaaatagatggttggacgcgttctttgttcatcatgtttgagatctctatcagaatcaaagctaagtattttctcatctaaaccttttaactccgaaacataactattaatgtgattggaaatatctgagcttgttgtgtttctattttcataaaggagcttgtttctacttgtctagatgatccataatccacagcagaaaagacgacactgttcgcttgtcccccgttgaaagcccatgacattgccgaaaaactaaatactgtcttcttcattccaatgacacctggggcattgagtctcaacagcaactcgttt

SEQ ID NO: 6114 - DNA, 531 bp, Gossypium hirsutum
  Clone ID: LIB3828-015-Q1-K6-A4
gttttctctccctccaataagagcagatcttcgttaagaccctgaccggcaagaccatcaccctcgaagtcgagagttccgacacgatcgacaacgttaaggcgaaaatccaagacaaggaagggatcccaccagaccaacaacgtctcatcttcgccggaaaacagctcgaagatggccggaccttggccgattacaacatccagaaggagtccaccctccatctcgtcctccgtctacgtggtggcatgcagatcttcgtcaaaaccctgaccggcaagaccataactttggaagtcgaaagctctgacaccattgacaacgtcaaggcaaagatccaagacaaggaaggcatcccaccagaccagcaaaggctcatatttgccgggaaacaactcgaggacggtcgcaccttggccgattacaacatccagaaggagtccaccctccatttggtattgaggcttcgtggtgggatgcagattttcgtcaagacgttgactgggaaaaccatactttggaggtggagag

SEQ ID NO: 6115 - DNA, 632 bp, Gossypium hirsutum
  Clone ID: LIB3828-015-Q1-K6-A5
ctcaaattacctgtacagtttaaagttaaggggaattaattgttaatattaggaaagaaaaagaaaagcgccagaggaacaaagatgcagtgtgggatccaacaaagcgaaattggaagctgctctgacgagatgcggagctccgtttcggttacggttacggatcggaaagataccatggtctgcccgaaaccacgtcgtttgggtcttttaaacacccccttcaacgaccaccctgttagatccctgagatggcaactcagccatcaagtggagctttgtgattcaaaagaggagagtgatgctttggattttattcttacaaagggtggatgtggagtggaacaaagttgtacacaagtagcgttgtcgcccccatttttttgtgggtcgccgccgagcagagtatctaacccgttaatacaggatgctcgatttggggagcagaagaatatgagcccattgtcaccggtgccaccttcatcgggcttgtactcatcttctccctcgtcgtcatcgaggaaaggaagctatgttagggcgaattttggtagcaaaccagcggtgagagtggagggggtttgattgcctcgacagggatcgtcagaattgtagcatctctgcactggcgt

SEQ ID NO: 6116 - DNA, 616 bp, Gossypium hirsutum
  unsure (1)..(616): unsure at all n locations; Clone ID: LIB3828-015-Q1-K6-A6
gtttatgagcaatcgatagnaaggatgcatgttccttatatagttccaggggagtccggaggtagagcggatgtcagatgggtgacatttcaaaacaaggatggctgtggaatttatgcttcnaacatacggaaaatctccacctatgcaattaaatgcaagttattttagcaccgctgagcttgatcgggcagtgcgcaatgaagaacttatcaaaggggataccattgaggtccatcttgaccacaagcacatgggtatcggtggagatgatagctggacaccctgcgtacacgagaactatctggttccagccgtgccgtactcgttctcaatccggttatgtcccgtaacttcagctacttctggccaaaatctctacaggtcccaacttcaaaactgagttcattctcattgtgttttatttgcaagatatgagggatgcccttagtttgacactgtaataaggcgttcccattgaactttcttttcatggggattcaaatgtggctttatgttaataaataagtaaaagaaaatcttatttccatacccaaaatgtcttgtaattntggatacaatatgaaaatgctgtacaaatatggcaatggctctg

SEQ ID NO: 6117 - DNA, 521 bp, Gossypium hirsutum
  Clone ID: LIB3828-015-Q1-K6-B1
gctaggcctaaccctcaggctcctacaaaatggttccattaacattacccgcaccatcaggcttgccaacactgcacaaagagtagatggcaagctccgatatgctcttaatggagtctcctatgtcgaaccaaccactccactaaaacttggagaatactacggcgtagccgacaaggttttcaagtatgataccattcccgatgagccaccaagtgacaacactagggtaactttggcacctattgtcctcaacatgacacacagaagctttgtggaaatcatcttcgagaatcacgagaccgccattcagtcttaccacttgtctggctactcattctttgccgtgggcatggacattgggaaatggagccctgagaagaggatgaactacaatcttctcgacgccgtgagcagacacaccatacaggtattccccaacttctggtcagcaatcctattgacattcgacaactgcgggatgtggaacctgacgtcgtgaatattggacacgcattacc

SEQ ID NO: 6118 - DNA, 603 bp, Gossypium hirsutum
  unsure (1)..(603): unsure at all n locations; Clone ID: LIB3828-015-Q1-K6-B2
ggcactagtatctcaaactcctgtttattatgtactggtggtgttttatggtataatgctggcgtaaatgtgtttaaatacatagccatagtctgaaactcctatgttgtatttgaatcttcccaatagcaactaagtaatctcataatttcattgttgaattaatttgcttcctcatgtttaaggttcaaacctaactcttgatgctatttatcttttgttacgaatactgtacaatggttctttttttttggggaaattgacagattaaagtgacatgcagccattttattgtcatttaatgctatcttagctatcatcctagattaaatcatgaacttcaatactcctgtgtacaggtgttctcttctcaacaaagaagcatccgcgcaccaaggatctctcgcctgaagatttttggtttagcgcaccaaagaaaggagttatggtctttgctttgcctgnggagcctggtctaactcagttggctggggacttcaaagttcattttcatgatcgccaaggagatttctactgttggttaaacacaacaacgatagaaaacagaaaagttctgaataccaaggagcttgattggtttga

SEQ ID NO: 6119 - DNA, 597 bp, Gossypium hirsutum
  Clone ID: LIB3828-015-Q1-K6-B3
cgtcgtcacctccctcgaaggaccgaccatcatgcctcggctaactccgtttcctctgtcgccaagtcgcttttgccgactcgtcgccggctcaaacttgatccggctaataagctctattttccatatgaacctggcaaacaagtgaggagcgcggtcaggataaaaaacacgagcaagtcatatacagctttcaagtttcaaactacagcgcccaagagttgtttcatgcgcccaccaggtgctattcttgcacctggggagagcatcattgcgaccgtctttaagtttgttgagcaacctgagaacaatgaaaagccaatggatcaaaagagcaaggttaagtttaaaatcatgagtctcaaggtgaagggtccaatggagtatgttcccgagctgtttgatgagcaaaagaatcaagtggcaatagagcaaattttgcgggttgtttttctagatcccaagcgcccttgtcctgctctggaaaaattgaagcgccaattagctgatgccgatgctgcagttgaggcacgcaaaaagcctccggaggatgcaggtccaaggataattggggaaggacttgtgatagatgaatgg

SEQ ID NO: 6120 - DNA, 580 bp, Gossypium hirsutum
  Clone ID: LIB3828-015-Q1-K6-B4
gtctctccaatcctatcaagtcctgtttgcatccaactagttgtttccaggacctaggctttgatagttaaaataaaaaccactatgggttttgctggttatagttatagttggtttttgttgtcatttttcgccctaatcccaacactaagagctcacatcgctgaatatgatgagtattggaaagcacgagaattggaagccattgagaacctgaacaaggcttatcaccccaatccggaggaggtggtccggcattacaatgaccactttgtcaataccatgcttgagtataataacaccagaagggtgttgaaaggaaagaaaaatggtccctgtgagattactaaccccgttgatagttgttggcgatgtgatcctaactgggtaaagaacaggaagaggttggccgactgtgcccctggatttgctcgtggtactaccggtggaaaggacggaaagttttacgtggtcactgaccctaatgatgatatttctaaccgcaagcctggaactttgcgtcatgcagtcactcaactcaggccactttggatcactttcaaaaaatcatgatcattaa

SEQ ID NO: 6121 - DNA, 616 bp, Gossypium hirsutum
  Clone ID: LIB3828-015-Q1-K6-B5
ctctggctagaagacacaccctgagttttgctggttgtaaaatggacgatgactccacttctcgtcttgttcgtcatgcttatagcctcgaagaactcgacatttcaaggagtcgttggggttgccaaataactgacaatggactataccaaatctcattagcaaagtgtgttagcaacttgacatcagtttccctttggggtatgacagggatcactgataaaggtgttgttcaattgataaccagagccaattccttgaaacacctgaatattggtggtacatttatcaccgatgaatccttatccgcaattgcccatagctgtccacatttaaagagcatcgtgctatggagttgccgtcatgttacagaaagtgggctgtttgttcttgtcaataaatgtcgtaaactagagtcgatcaatgtgtggggaactagagttcccttagactgtttcattggtttgcttactatccgaccagctcttcaaataaaaccacaaggtttgccattaaacatcggagcagtcgccaccatgttacctgttgtttaaggtgttcatccttctggggatttcgattattgtcatatgaaatttgttgattcaataaattg

SEQ ID NO: 6122 - DNA, 610 bp, Gossypium hirsutum
  unsure (1)..(610): unsure at all n locations; Clone ID: LIB3828-015-Q1-K6-B6
caaacttaatttatcacatagtaaaatttaaaattgttaatatttaataaattgtataatatttttataacatatctaatattnagaaaataatgttacttcatattaaaattaatttaatattattaatatttaatataacctaaactgatatgtttctaaataatgttatataatattaatttaattaataatattaagttatttaattatattggatgattataaagttatcttatattaagtagtagttcttgatactatttttcattaataccatatggagatatcatctaaattatatgtactgtaatatcacagtgttaaagtatttcctgtgattatttcttttcaatatgcttatagattacctttttaattttgaggcatttaattttagttatatattttaaatatattattattttatttatatttaatttaataaattttgtttacaaattaattaatttcatttataatttttattttgaatatgttaatacattcatgtgaaagtgctagaagcaaaaacattatctttggaaacaatgaaagcaagaaattctagctcctaagaatctgggagtaatcttttctttctatccgg

SEQ ID NO: 6123 - DNA, 645 bp, Gossypium hirsutum
  unsure (1)..(645): unsure at all n locations; Clone ID: LIB3828-015-Q1-K6-C1
ccccgcgtccgctactctgcctgtaagttttactataactttccacatttttaatttactcaaaaactcaatgtatataatctacgtgattgaatacatatatacgggngaaatattcacttacagctttacatatatttttatttcatttttttctatcattaagattttatgttctgttcatgtaaatgatgcatgttgagttttgagtaaattaaaaacatcaaactatatacttgatgtgaaaaaaattgcactcattaaatatatattgataaaggcaatactctgaattgatatgataaaatatatctaatcctttcaaaattttatgtgacaagtacacatacataatgacctatgcataatgacttatttgaccctccaacttaataaaaaaaatcattttagccatacattaaatttatcgtttttttagtctttaattttgcgttgtttgtcaaatcaccctaaaatgaatgaaaaaattaaagtttgttaactttgctacgtggaataaaacgtcatccccacatggattgcatgtaagcaattaattaaaattttttaaaatttaaaaaatccaaaaatgaaaaattttgaagatttttttaaaaaaatgaagaaaattgaaaaaaagaatta

SEQ ID NO: 6124 - DNA, 635 bp, Gossypium hirsutum
  Clone ID: LIB3828-015-Q1-K6-C2
gcaggtggctgttgttgcagatgaaaacaacaaaatgtggaaagtcaagggaagatgaggacaatatgggtcagaatttggaagctgattcaagaaatatcgatgaattatatcaaacttcaccagcaaacaacactgcaatatcatcagatcaggataacaaaaagtggttgagaacaaagcaaactatgatgataacaacgctgccgctgctgccaacaagatgaagaggaaaagggtgaagaaacttgagttgttcaaagggttttgtgaagatattgtgaacaagttgatgatccaacaggaagagatgcataataagctgattgaaaatatggtgaagagagatgaagaaaaagttgcaagagaagaagcttggaagaagcaagagctggataggattaaccaggagcttgaacttagagccaaggaacaagctattgctggtgatagacaggccaccataatcaaattcttgagcaaattttcacaaactggatcctctaagaagcaatgttttggaagggttaatgaagatgttgtcaaggtaccaagtgaatgttcaaatcctcctattgcttcttcatctcctttagtggcagtagcagaaaaccctaattccattgagactgacc

SEQ ID NO: 6125 - DNA, 622 bp, Gossypium hirsutum
  Clone ID: LIB3828-015-Q1-K6-C3
accattctttcctaagggcattatggatgcgagattcgggctcttgttcctcttcatgttgggtgctacttgggcatgtaacgcccgacaactagaagttgttgaggtagtaatctcggatccatcagttgtccaggtaaactggaggcaagatgaaaaatgatagaaacggtagctcggaatgacaacgtgtgcaccttgtgtgaggaatttactactgaggcagttgattacctttcacagaataaaacgcagactgagataattgagattcttcacaaaagttgctcccgtttacgagcttttgagccccagtgcattacacttgtggactactatgcacctctcttcttcttggaaatatcttcagtacaacctcaagatttctgtacaaagttcaacctttgtcaaaaagttgcacttatatcttcacaattccgcgaagatagttgtggcatgtgccaccgtgctatttctgaagtactaatgaagttgcaagatcccgatacaaagttggagatactcgagcttcttttgaaaggatgtaattcagtgcagaactatgtgcaaaagtgtaagcggttggttttcgagtatgggccattgatcctcgcaaatgccg

SEQ ID NO: 6126 - DNA, 463 bp, Gossypium hirsutum
  unsure (1)..(463): unsure at all n locations; Clone ID: LIB3828-015-Q1-K6-C4
natggaaccctatcggacaaaagtatctattcttgaagatactatagctcataaacaatattcaatctgtaatatcctaaaggaccttgaatctggtgttgccaccatatgtgattaatgcgtgtgcatgccagtatatatgaagccatttgtggatgcaaggaatgaagcaagcccctacgtaactccatcaacagttgtagattcctaaaggggggtggtcgttataaaaggtccactcttacggaccatgccatgctactatatagattaatgatcagggcacttaacaggatccgactgaccctagtgctacacacaagaccctatgggaaaaccatgctataacccaacaaaattcaaaatgatcagatgacgaattttccatggggaatgaagcataacatatcagaacaatacttgctagaatactgaatttcattccaaacttccagtggatata

SEQ ID NO: 6127 - DNA, 482 bp, Gossypium hirsutum
  unsure (1)..(482): unsure at all n locations; Clone ID: LIB3828-015-Q1-K6-C5
gggataatctccttcagaataagactgctttcacaacaaagaaggattatggaagggaagagagggaggcacaatgggccacggcacaacgaacccttcatggattgcaggctcccggagctgaagaaatcttgaatgagaagagcagctaccctgagttgtcggagattgccgaacaagccaagaagcgtgctgaagttgcaaggttgagggagcttcatacgctgaaagggcatgttgactcagttgtgaaactcaaaggacttgacattgagaccatcaaccaaaactacactgtatgagaaatgcagggctgaacattgcaaattaacgatatccaattttttttctttattagttgtttctgtaataacagagtggcaatataaaagacaggcttcattcagctggttcgtgttgtccgtatcaatgtaataaagaaaaaaatttcttccatttaatgattgaaggaatatttcntt

SEQ ID NO: 6128 - DNA, 628 bp, Gossypium hirsutum
  unsure (1)..(628): unsure at all n locations; Clone ID: LIB3828-015-Q1-K6-C6
cggccgcgtggnggaacagctaagttcaaagcaatgtgaggatctgggtttcacgggtttagccctttgttctgattgcaacactttttctgagtatgtcaaggacaaagagttgatatctgactgcttgaaatgttgcacagaagactcagatgattctacaagtaagattacttattcaggtgcgatactggaagtttgcatgaggaaactagtattctatccggaaattgttggtttcattgaagaagagaaggacaagtttccaacagttaaagttcaatatcttttcaattctcctcccaagttgatcatgttggatgacgagggccaatataaggaaaccataagaattgacaattggaaacgtgaacacatgctgcaattcctgcagaagaaagttcagccctattccgcaagctcatagacagtcgttcacattcctgttatcgcaagataaagtaaaaccgaactcagcaagattgaactatttattcgtgttagccttgtcgttttaaattatgtgcttgagcttactgattttctgtctttaaagagagaataattatgaataaaggaagatacagttgatcagatggtatcactataagccaagtgacataattta

SEQ ID NO: 6129 - DNA, 514 bp, Gossypium hirsutum
  Clone ID: LIB3828-015-Q1-K6-D1
ctcactttgagccaaggcttagagtgcaaatccgaatgcagagcttaaagcttttggtaacaagtcgtcgttgtgacagtctaatccggttgaagagaaacctatcctcgcttccaatcaattcttctgctgatgatcttcaaaatcaagtgctggttgaaggtaaagcgagttctcgagtagcgattctcaacagaccttcgtctctcaatgctctcaatacaaatataggcgctaggttgcatgaattgtacgcatcttgggaagatgatcccaatattggatttgtggtcatgaagggcagtggaagggcattttgtgcaggtggagatattgttgctctttatcatttgataaatgaagggaagatagaaaagtgtaagggcttttttaggacgttgtatagctttatataccatcttggtacatatttgaagcctcatgtgtctattttaaatggcattacctgtagagtggggtagcttgaatttctatacctgggacatttcgggtt

SEQ ID NO: 6130 - DNA, 637 bp, Gossypium hirsutum
  unsure (1)..(637): unsure at all n locations; Clone ID: LIB3828-015-Q1-K6-D2
gcttcttttgactacaaaccgtggcgtcggcaccttacggtgagtattggaggcaaatgaaaagtatatgcgtagtaaatcttttgagtaacagaagggataaatcttatcaaggtgtgcgagaagaagaaacggctctagcagtggagaagatcgaaaagtctagctctttgtgttccccggtgaatctaagcgaactcttttccgcaaccaccaacaacgtcatctgcagaatcgctttaggaagaaaatacagtgaagataccaacaagtttggtaagcttttgaatgagtttacggagttgttgggtactccggatgttggggattatcttccatggcttgcatggttaagccatgttaatggactccatggtaaagccgagaaagtggcgaaggagttagatgaatttctggatggagtgctcgaagaacatatgaatcggcatgacagacacttaaatgatcatgcagggatccaaggtgaatatcaaaaagactntgtggatattttgctggagattcagagggaaaacacagttggcttccctttagaaaaatcaggcttaaagctcttatcttggatatctttgcagccggtaccgatacgacatacgtggtcctggagtgggcaatg

SEQ ID NO: 6131 - DNA, 619 bp, Gossypium hirsutum
  unsure (1)..(619): unsure at all n locations; Clone ID: LIB3828-015-Q1-K6-D3
gttcaagcttgncctgaattcctccttctttacttcctgccagtacgagttcccacatgttcacatcttcttctttatcatctgccacttcatcttctctgcctcctgcaccctcagctacgctggcatcagaaaccttgtctgcttccttgcctaacaaagctccaagtcccgcacctcctccagctacactcagtgccagctcgccagcacttgctcctttgacgagttctagtccagaattaaattccattgcaccaccaattgccaacaaacgaagtgaaattcctactttgccatatcaaagtgcttctcaggttgcatcctctgtcatcggggtttcaaattctattcatgtggaaacatctacacaatcattggtaacccctggtcagctcttgcagtcaggatctactgttgttccttcatctcagcctgcagtaactgcacataaagatgtggaagtggttcaagtgtcctcatcattatcgcctgaaccatcagtacctgttgtctcagaagctcagcctccattattgtcattacctgtttcttcacatgttgccccaaagccaaatggagcttnctttcaacctcgccatggttatagaggatatga

SEQ ID NO: 6132 - DNA, 590 bp, Gossypium hirsutum
  Clone ID: LIB3828-015-Q1-K6-D4
gggtcttcatgctccaacaattctttcaccatttcaacgtcgccatactttactgctaaatgtaaagccgtgttagattcctgatccgtgatcctcagcatctctctcactgcatttacttgacccatttctagcatctctaaatctccatctctagcttttgcgcatgacttgattagaagtttaacaatagcagaatgtccattcattgctgcaacgtgcaagggagtttgacctttagcattcgtttggagtagtagtgacggacacttgttaagaatttgtccgattaaatttgatcttttttcactttttttcttaataatgaaaaaccacaaaaacaaaaagatgaaaaaatataatttgggtaaggatctagtgcttgagagaattccattagaaaaccaggcagcaagctcgtgggttgccaagttaacatggagcacgttgtcatggtttggggtcttttgcgattcaaggtcaagctcctggtaattattgaatacttcaatttttccttctgctgctgccttatacaacgaaacatccatgtaagtgatgttctgttcaagctcctcaggtttaccggc

SEQ ID NO: 6133 - DNA, 524 bp, Gossypium hirsutum
  unsure (1)..(524): unsure at all n locations; Clone ID: LIB3828-015-Q1-K6-D6
cggccgcgtgggcggacgcgtgggctcagnatcatcatgcatcacaatctgttgcacctacctccagcacggctgccccatatgcatatgaattcactgatccaactcatgctcaaatgtattacactcagcctatggcacccaacatgcctcctcagtaccaaaccatgactgcagtagtcttgccagatgcacccacgcaacttccgactgacaacatcaagccacagatcagaacttcacagccaatatagatcagtcaagaaggaagcgacaaaaattttgaaagaagggtttggtttatatctttatactctgttttaaagtcttgtgtttttcattggtattggcttgcgatatgtatttgtgaaaggtaataaggaactcaatggtcttttactatcttgtggatgtcatattgttggtattgtcataggaaatgaaactcatctgaagatttatactgtaaaagctcgaactcagatattgtgtgctttgtgcaattcatatatcttttacttagt

SEQ ID NO: 6134 - DNA, 375 bp, Gossypium hirsutum
  unsure (1)..(375): unsure at all n locations; Clone ID: LIB3828-015-Q1-K6-E1
gtcattcaanagcttcaacatcaaatagagtgtacgcaagccgagatcgaccagatttattataccatcgctatttgtagaacccaaaatgcgcatcgtttgcaaatgcaaaagatagatgatggtgatcgttgccaaatgatgaacaagttgccactgatcgggtttgaaactgaaaaattagctaatttgtctattaaatcagatgataatataggagaaaaataaatgtggggaatcaagttttgatacctttagtttgtttcttgtaattaatttaggattatttgaaataattttttcttttgttttggaagttaaaattaattaggtcacttaaccattgttaaatttacacattcgatactcaatttc

SEQ ID NO: 6135 - DNA, 621 bp, Gossypium hirsutum
  Clone ID: LIB3828-015-Q1-K6-E2
cttcagtcttcacttcaccctctttctctttcacacgggttgtggcgtagtttaagcagagaggttgcgcaggataaagtctcttcaccattgtttcaacatgaaggtttgtaataaaaatttgtttctatcagcattgctttgcattgctattgcaggagttttgggtcaagctcctagtaatcctcctacgtctacgccggcgcaacccccccacctgcaactcctcctgctaccccaccaccagctccattggcttctcctccagccacagtcccagctatctctccagtacaaacaccattgacctcgccaccagctccgccgaccgaggccccagcacctaccctcggggctgctacgccaggtccagctggaacagacacgagcggagcaaatcaaatgtggaccgtacaaaagatgatgggaagcttagccatgggatgggctctgctcaatctgatggtttaaaacaaccgtgtgcctcacatttgatgccatagctctgtaatgtttcattcaattgcttatttcggccttgtttttctcgtattttatgggctgatgtctcatatgggacttttctactatacgtatatgagagcctacattactttacca

SEQ ID NO: 6136 - DNA, 526 bp, Gossypium hirsutum
  Clone ID: LIB3828-015-Q1-K6-E3
aatgtagcaaatttggaggtagagttgcttcagctgttaggcgaagatatattcaagcaagttcaaagcgagaggctcaagcatgtgagagagcaaaggaaactgtcaaacaaggagttaatgaagcaaaggaggtgaacaagaaggcaaatagcaaagcgcaaagtgcatgggactccgcaaaagagactgctcaaaaggctaaagacaatatgtttggaaaagccgatgaatcgaaggaagttattaaacaaaatgcagaaaagattaagcaaagcatgaacaaaaaggactgattatttatttcattttaaaatcttaagccatagaacaaaataaataaatttgccctaaggtcaactacccacttcttatttggttccatcattcaaaactatttaccttttactagttttttaggctattttcatgggtagctaattgccatttattatgatatgtattactattttgattactaaatttttgggaatttaaagaatatatcaatatttgttggattctc

SEQ ID NO: 6137 - DNA, 551 bp, Gossypium hirsutum
  Clone ID: LIB3828-015-Q1-K6-E4
tggacctcctcttcctaaagaagttctcatctctcttttcttcaccatcatctttgctatcttagtctctaaacttcgtggcaagcgctttaaactcccccctggcccccttcccatcccggttttcggcaactggctccaagtcggcgatgacttgaaccaccgcaacctcacagacttagccaagaagttcggtgacatcttcttgctccggatgggacaacgtaacctcgtggttatctcttccccagagctagccaaagaagttctgcacacccaaggagttgagttcggttccaggacaaggaatgtcgtgtttgatattttcacggggaaaggacaggacatggttttcaccgtgtacggtgagcactggcgcaagatgagaaggatcatgaccgtctctttcttcaccaacaaggtcgtgcaacagtacagacatggatgggaggacgaggctgccagtgtggttgaagacgtgaagaagaacccagaagcggccaccaatgggattggtttaaggagggaaatgcagctcatgatgtacaata

SEQ ID NO: 6138 - DNA, 632 bp, Gossypium hirsutum
  Clone ID: LIB3828-015-Q1-K6-E5
cggccgcgtgggtctggaggggctagtagatggagccatggtcatcaccaccatcatcacaaaagcaataaaaatttgaaaaaaaggatgaagatgctgcgcacagaaacagttcgcaaccagtaggtgacacaccggacgactctttgaatgcagataatgtatctcagcctgaaatcagtaagataaagagttctgctggtaccaatgatggtaaatcagatatcggttttgcagatggctctgcctatagtgttaaaacctcggcactaaaggaaacttctcattcacaatcgaacttgatgtttggctatcttaatctcttctctgatggtgttcacaattttactgatgggatggctttgggaagtgcatttttgcttcatggatctgttggtgggtggtccagaactttatttttgcttgcacacgagcttccccaagaggttggtgatttcggtatactggtaagatctgggttcagtgtttccaaagctctgttcttcaacttcctttcagcactggtggctctagcaggaactgcaatggctttgctttggggacaagatcctggacagtcatctttgattgaggggtttacagctggtggatttatatacattgctgttgct

SEQ ID NO: 6139 - DNA, 629 bp, Gossypium hirsutum
  unsure (1)..(629): unsure at all n locations; Clone ID: LIB3828-015-Q1-K6-E6
ctttcactagnactctcatggcttcctgcatcgctcccgttgccatctcaggtggttctcatcttcaggcaagtgaaatttgtttcgctaagtccagcacctttggcaaaataccaagtttggcagttcagaggaaaccaaaggcatctaatcatcggttttctgtttgtgcagagtaccgtgatggcactaagggtggaggaaacgattttgctgctggttttcttttaggaggtgctttatttggaactctgggatatatttttgcaccgcagattagaagatccctgttaaatgaagatgaatatggattccggaaggcaaagcgaccaatttactatgatggaggtctagagaaaacgaggcagacactgaatgcaaaaatccgccaactcaattctgcaattgacaatgtatcctcgcgtttgagaggtggaaacaattcaccaagtgtgccggttgagacagaccctgaagtagaagctactatgtaagacatatttcaatgtggttagtcatgaagttccaagtttacagtgattgatggatttacctgttctgctatgaattctgaattccaagtgtttgagaattttatatgggattaatgcagttttattatattttta

SEQ ID NO: 6140 - DNA, 467 bp, Gossypium hirsutum
  Clone ID: LIB3828-015-Q1-K6-F1
accaattccaattggagctttggcctcagcacttgcaaatgctactccagaacagcaaagaacgatgctgggggagaatctctatccactcgttgagcagctggaacccgatgcagcagccaaagtaacagggatgcttctggagatggaccagacggaggttttacacttgctcgagtcaccagaagctctaaaagccaaagttgcagaagcaatggaggttctgaggactgtagcacagcaacagcagcaagctggtggagctgctgatcagctggcttcattgtctttaaatgacaaccttgtttcatgagttggtagtagtgttggcctttaatgtgctgaaaatgagtatgattggttagaaggatgatagctgggttcttttttattgattcagtactgttttggaacttgaaaaatactgtcactgttatggggttatagttgtgactgaacttggtttt

SEQ ID NO: 6141 - DNA, 614 bp, Gossypium hirsutum
  unsure (1)..(614): unsure at all n locations; Clone ID: LIB3828-015-Q1-K6-F2
tttaaacttccttcagatactaaagtgcccatcataatgattggtcctggtactggattggctcctttcaggggattccttcaggaaaggcttgcactgaaagaagctggtgctgagttgggtccatctgtattgttctttggctgcagaaaccggaaaatggatttcatatatgaagatgagctcaacaactttgtcaacagtggtgcactatctgagcttgtggttgccttttcacgtgagggacctaccaaggaatatgtgcaacataaaatgatggagaaggccaaggacatatgggacatgatttctcagggaggttacctgtatgtgtgtggtgatgccaagggcatggctagagatgttcatcgagctcttcacactattttccaagagcagggatcactagacagctcaaaggctgagagcatggtgaaaaatctgcaaatgagcggcaggtacctacgcgatgtatggtgatgattacgatgaaagaaactntataaaaatatacggcggtcaaaaagaaacttgcgagaagggttaaatgggtggaattgaatttattttgtatcaaagttaagaagtgttgcgattcttttatatatatatta

SEQ ID NO: 6142 - DNA, 605 bp, Gossypium hirsutum
  unsure (1)..(605): unsure at all n locations; Clone ID: LIB3828-015-Q1-K6-F3
catgnacgctattcctcccttgntgcactcaaccctaccgagttgaatggacccggtgttggcattcacgaagatcatgttgtcccaaaggtgctgaaattggtactcttggttttggttttgaaggtggtcctgataaatgttgttcttctggatgttccggtaattgtaatcctggtggtttcgttctaccatttcctcaaattccagaaatcccaagaattccagaaatcccacaaatcccacagatcccacaaatcccacaaattccactaatcccacagatcccacaagtcccacagatcccacaagtcccaaaaatcccactaatgccaggacagtcgggatgtgagagtggagagtgttgccgtcagggttgtggtgggacttgtgctgagtgtggtcagcccaggtgcgcatcaggatgttgccaggctgaaactgtaaagagcaaagggatagaagaggttatggacagtgaacccagtccaccaaagtagagagatgataccatattaagatgaaataacgaggaagagttggttgtcgtcttattaattatacaaaataagaagtaatgatgttgcagaaaggtttgctataaa

SEQ ID NO: 6143 - DNA, 140 bp, Gossypium hirsutum
  Clone ID: LIB3828-015-Q1-K6-F4
accgccctttttttttttttttttttttttttttttttttttttttttgcttaaccaaaatttttaattgcaaaatttaagaagggaatttaaattttcacattccattcccttatttgggcttctactgatggaggggg

SEQ ID NO: 6144 - DNA, 238 bp, Gossypium hirsutum
  unsure (1)..(238): unsure at all n locations; Clone ID: LIB3828-015-Q1-K6-F5
cacanataccgttacttcgtttttaaaaaaggcgcatattgttgaatgatttttgtgttggagggattttatttaaatattcatgccttgtttctctgtagaattggttagtcttcacaaagaacttttccatactcttcttatggtacatctattgatactgagagataattctctaatcagcgaggcttttgatttgctatatatatatatacacagataccgttacttcgttttt

SEQ ID NO: 6145 - DNA, 300 bp, Gossypium hirsutum
  Clone ID: LIB3828-015-Q1-K6-F6
gggagtctcaaacatgaaaactggttaatttgtttggctctaattggcatagtggtgatggaggaagtggtccaaattgatgcagtaatgacaatccaccatcctgaggtctccggtcttgtttcctaccgtcgccttctccaagaagctgttaatccttggaatcgtggctgctcaagacacactaggtgtcgaaattaatgtatattttgataatatgtgacggtatctttcgtatataaatgtagaaagctctgcatattaaggcaacataattaatactttttatctctttctttt

SEQ ID NO: 6146 - DNA, 389 bp, Gossypium hirsutum
  unsure (1)..(389): unsure at all n locations; Clone ID: LIB3828-015-Q1-K6-G1
atttggttctccttgctngacttagcaccagnatccagttcaaggctgatggagagggcaagttccacactttccatcctgtggctacaatcctcagttacctcaccaaagcccctcttgttccaccaggcacaccggtggtgaacgcactgtccaagcagcgtgcaatgctggagaacatactaagggccagcattggcttggctcctgaaaacaacatgattttggaatacaagtgaaaaagttgagagaaaagtggaacaaagctttggttcttagaactttaggaccattttccctttctctgtcgttttcataaaagctgtggttactgttgtcacagattgtaacggttgtatgatggtttatgctatgcttctttttttctc

SEQ ID NO: 6147 - DNA, 567 bp, Gossypium hirsutum
  Clone ID: LIB3828-015-Q1-K6-G2
atcgacgatcgcgaccatcgcttttttctttgtgtttaataattctatctaattaaattcgacacagatgtctgtgaagcgtaaaccagtctatcgaagagaaaccatcattgttccagttggtctcaaacaccttttctttgttgaagaaatcccatcaaagttcatgggtaaaggtcaaaaccgtcatccatgagttccagttgcagttcactccttcaagtctagattttagaggcacaggagggaaagacccatgtaaggctagtgatggaacaggagagaaggtgaaagaagcagtgaaggacagcattgaaacaagtgaagcaatagctgaagaaactgcaaaaactgccgcagaagctgtccacaaaactgatgagaaggtgaaagagagtgcttcttctaaaccagacgattctcatgaggaactgtaaactatatatcccaacctatttagatgtgggtgttttttctagttctttttttggggtaagtttatttctgttatatgatttttgttgacatattaataatttatattatataagttttgatatgtttgta

SEQ ID NO: 6148 - DNA, 629 bp, Gossypium hirsutum
  Clone ID: LIB3828-015-Q1-K6-G3
gccagcggcgcccttttttttttttattacccttttcatcaaaaagcttcaatctttcgacctgttgcttaaagcttcccctgctttttctttgttgaagaatccccaagttgaaactcgggttcctctgttttcaagaaacggttctgggtttgggtctggggctgttgttgtttgtgctaccaaaggagccaataataagccattaacaggtgtgatttttgagccttttgaggaagttaagaaggaacttaatcttgtcccaactgtgcctcaaatgtccttggctcgtcaaaagtttgctgatgagtgtgaagctgccatcaacgaacaaatcaatgtggagtacaatgtttcatatgtctaccatgctatgtatgcctattttgatagggacaacgttgctctcaagggtcttgccaagttcttcaaggaatcaagtttagaagagagagagcatgctgagaaattgatggaataccagaacaaaagaggtggacaagtgaagctgcaatccatattgatgcccctctctgagtttgatcatgcagagaaaggggatgctttatatgcaatggagcttgccttgtctctcgagaaactaacaaacgaaaagctcttgaacttgc

SEQ ID NO: 6149 - DNA, 626 bp, Gossypium hirsutum
  unsure (1)..(626): unsure at all n locations; Clone ID: LIB3828-015-Q1-K6-G5
cttngacagcaacagaggcttcattcagaacacatatcagtagccatggtgaagtattcgaaggaacccgataatcccaccaaatcctgcaaggcaaggggctctgatcttagggttcatttcaagaacacaagagagacagctttcgccattagaaagttgccattggtaaaggctaaaaggtatttggaggatgttattgcccacaagcaagccataccgttccgacgcttttgtggtggtgttggacgtacggcacaagcaaagaacaggcattctaatggacaaggtcgctggcctgtaaaatcggctaagttcattctagatttgctgaagaatgctgagagtaatgccgaggttaagggtttagacgtcgatgcactccatatttctcacatccaggttaaccaggcccaaaaacaaaggcgtcgtacttaccgagctcatggaagaatcaacccttacatgtcctctccttgccacattgagttgattttgtccgagaaggaagaacctgtcaaaaaagagcctgagactcaattggcagcaagcaagtccaagaagtcccaagcttcttcttgagtgaacaaatttgaaactttatcaagtcagttaatgtagtgatt

SEQ ID NO: 6150 - DNA, 620 bp, Gossypium hirsutum
  Clone ID: LIB3828-015-Q1-K6-G6
gaaaatctgcaggggaaagcttagtttgaccaatgtcaaggcgcttctgttgaatctattcacagctggcaccgacacatcctcaagcataatcgaatgggcattagctgaaatcctgaagaacccaaaaatctgaacaaagctcacgaggagatggataaggtgattggcagaaaccgaaggcttgaagaatccgacatacccaagcttccctatcttcaagccatttgcaaagagaccttccgaaagcatccatctactcccttgaacttgcctagagtgtccacccagccttgcgagatcaatggctactacatccccaaaaacaccaggctgagtgtcaatatttgggccattggccgagaccctgacgtgtggggcaacccactggatttcacccctgaaaggtttctgagtgggagatttgccaaaatcgacccaagagggaacgactttgagttgattccatttggtgctgggcgaagaatctgtgctggaaccaggatggggatcgtgctggttgagtacatcttaggcactttgttgcactctttcgactggatgcttcctcccggtactggggaattaaacatggatgagtcctttgggcttgctttgca

SEQ ID NO: 6151 - DNA, 628 bp, Gossypium hirsutum
  Clone ID: LIB3828-015-Q1-K6-H1
ctcagctcgtaaaacatatgagacaccaaaggtggttggaagaattggagtggattttttcccgagtcatttggactgaggtcgattcttgtagtcgtaatattgggaggggctttacctgaacaccaccctagcttgaacaggattggtctcagcccataaaacggacctgagataaataaaagagaaatggtttaaagcaaaatttcctaatgtcccttctttcccacttcattcaaatcagtctgtgcttctatcatttataggtggctagtaatgaacttagaaaacaaccagtttatgtgacgggtttcgaaaaaaagtcataaaatttgcctgttcttttgatttttttcacatgttcttgaaaaggacacttcctccttaagaaatcatatcgaaataacaagacacgtgatcttgtttgtttgtttgacatcacttgttttgactcttagtttcacaagttatacaagaacaagtacactttttcctgtaagaatttgaaagttgcctcttggtctgttatttttgctgaatgaaagttgagcatattgatttcaactagttgtggtatttgcggtccatgtcagtttaggcatagattgcattgtttctgaattggttt

SEQ ID NO: 6152 - DNA, 619 bp, Gossypium hirsutum
  unsure (1)..(619): unsure at all n locations; Clone ID: LIB3828-015-Q1-K6-H2
cttggnatcatcaggttggacttgatggagaaaaaaacaaattatacccaaaatggcttcccgaaggtacaatgggtaaagggtggaccatccgaaggtgtaacatggtacaagggatattttgatgcacctgaaggagacaatccagttgctgtcaagatgactggtatggggaaaggtatggtttacatcaatggtagaaacattgggcgatattggatgtcttacctctctcctcttaagcggccaactcaatccgagtaccatatcccaagatcataccttcaaccaacaatgaatcttattgttatagtagaggacgagaaaggtgaccctaaagatattgagatagttctggttgacagagataccatttgcggttttataactgaaaaacacctaccgtcagtgaggttattcgaaggcaaaggtggcaaacttgtagccttggagaaagatttgaaaccaagggttgaacttacatgtccaagccagaaacaaattgttgccgtggagtttgccagctttggtgatccttttggtgcctgtgggcacttacgtcgaagaaactgcacatctnccgtagcaaacaagttgttgaaaagttttgcttgggaaa

SEQ ID NO: 6153 - DNA, 387 bp, Gossypium hirsutum
  unsure (1)..(387): unsure at all n locations; Clone ID: LIB3828-015-Q1-K6-H4
tctaattatagtacagctgtnggaggttagcaatatcttgtataatgatttaaaagggacaacaagtggtgaaattgcggtggaacttttatgcagtgagtcagttccatgcaaaaatatccgcatgaaagacatacaattggattacggaataaatggtaaaatatatgatgggcaccccaaatgtcattgtttgagtgttgttcagagttgggatgaaggaaatgtttatccaaatgttccatgtttaacgaaaaaataagttattaacttttttattttggatgtaataattaggttatattttggttgggactaaggaaatgattattcaaatgttccttcatgttgcagatttaaaataagtaaatgcatgttttttatatt

SEQ ID NO: 6154 - DNA, 549 bp, Gossypium hirsutum
  unsure (1)..(549): unsure at all n locations; Clone ID: LIB3828-015-Q1-K6-H5
ggnattgttgtgaccagtagaatggtcatagcatggaacaatggggagatgcccttacatcatggggtgcttcctcctttcctatatggaaagggagtttacaaccattggctaatcaacgaggctttgtctagtggattaaggttcgtgtttgatgccagttggactatctcaaacattgccctgggggattcaagttatcagtctaactgtttcgttaagagttccaatgtttcggatattgaaaagggaagttgggagtatgattgcaattctcatcttgcagcagtgtatggattatcatctcttcacggatttaattattctgctgtgatgaaacttgttaaatgtgatggccgataccttcttattaatgccacagaagatttccttcatacatatgcctacaaaaggaagagcttatggaaaagacacatcccaaaatgccggagatcaaagacaactttggcttgtgttgttagaactataaagacgcagaacgaaacgtcaggttgctctctgaaagagggatcggttcacacaaaaaca

SEQ ID NO: 6155 - DNA, 264 bp, Gossypium hirsutum
  unsure (1)..(264): unsure at all n locations; Clone ID: LIB3828-015-Q1-K6-H6
tgttactagggattgggggtaacaatgggctgcgcaagctcaagnatgcattccatgcggattattgtgatccaaaaatctcatcttgtggaaggccgttcttggtttatccagctcctcctccattctaaactctatactttttaatttcatagaaataatgggtgggattgtttgtctctttgatgggggattatcaactttatttctgttgttgctttgtaatgtggtatgatgcttatattataataaagacatgctatt

SEQ ID NO: 6156 - DNA, 518 bp, Gossypium hirsutum
  unsure (1)..(518): unsure at all n locations; Clone ID: LIB3828-016-Q1-K6-A1
gctaagcagaatgaacgtgtgctgngaagaatctcacaccagtccttacaacttcctggtgggactcaacccggcagataccaagttttgtagatgtctgaggactggagatgtaagcctattattttcagatttgggagcacgttgttttgggttttgtgcattctgatgcattgccttgacctcggattcactagtcctttagtcaattttatatggatggtggtttaaatcctgcttctgagtgcttgctcgagaaattggtgttaactgaaagtcaaatcatggaacaagatgctttagttccagaaccatatgatatgatgaagtttcttttctttatggtcaaaaagtattcgatgatgttcctatactattaaattactcttttgatgaggaatatgatgtattttttttttcttttttcatgtcttaggtgttactgataacattttgctccgtaatgcgaactttcatgctatttcaagaggatcaatttgagattgcatttttggttt

SEQ ID NO: 6157 - DNA, 627 bp, Gossypium hirsutum
  unsure (1)..(627): unsure at all n locations; Clone ID: LIB3828-016-Q1-K6-A2
canacgtgagctccggtatccatctcaccgtgggtttgccaaaagtggcacagttccgggagctggggagttccaatgttacgacaaaaacatgcttcaccttcttaagcaacatgccgaagcatgncggaaagccaaagtggggactaggtggccctcataatgcgcccgcttacagcgagttgccaactgcaaacaccttcttcaaggatcatggtggatcttgggaaagtccttatggtgatttcttcctttcttggtactcaagccagctcatagctcatggagaccgcctactctcacttgcctcttcagttttcagtgatagtgcggtgaacattttcgggaaagtcccattgatgcactcttggcatggaacccgctcacatccttctgagctcacagctggcttctataacactgccacgagaaaaggctacaaagaagttgcagagatgtttgcaaggaattcatgcaaaatcatcttgcctgggatggaccagtcagataagtaccagcttaaggaatctctctcaagccctgaattattacttgctgaaattggaacagcttgcaataagcacggggtcagaatttccggccagaactcgactgtcggagctcctg

SEQ ID NO: 6158 - DNA, 474 bp, Gossypium hirsutum
  unsure (1)..(474): unsure at all n locations; Clone ID: LIB3828-016-Q1-K6-A3
cccacaaattccactaatcccacanatcccacaagtcccacaaatcccactaatgccaggacagtcgggatgtgagagtggggagtgttgccgtcagggttgcggtgggacttgtgctgagtgtggtcagcccaggtgcgcatcaggatgttgccaggctgaaactgtaaagagcaaagggatagaagaggttatggacagtgaacccagtccaccaaagtagggagatgataccatattaagatgaaataatgaggaagagttggttgtcgtcgtattaattatacaaaataagaagtaatgatgttgcagaagggcttgctataaaatcctgttggataaaaagagtaattatgaagaataaatagctcaaaacaatatttgatttacaatatcctaaagttccttgaatcttgttttgtagccatatgtaattaatgcatgtacatgctaatatatatgattttctttgct

SEQ ID NO: 6159 - DNA, 495 bp, Gossypium hirsutum
  Clone ID: LIB3828-016-Q1-K6-A4
ccccgcgtccgatttttccaactaaggttaggctttaaactttaaaacattatgggtttagcagcagccctcctcttcctcctcctagcagctccggcggcttttgccgagcaatacaccgtaggagacagcagcggttggacctcgaccggagattaccaaagttgggttcaagggaaaacattcaccgtaggcgacacacttttgtttacctacggtggcagccactcggtggaggaagtatccaagagcgactacgataattgcaacaccggcaatgctattaaatcctacagcgatgggaacactgtcatcacactggccaacccaggggcaatgtatttcatttgccccaccataggtcactgtgctggtggcatgaagctagccatcaatggtgtagcagctagtggcaactcaccctccaccccctctactccgtctggttccaccactccttccgggactcctccgagtggggggacaacaacttct

SEQ ID NO: 6160 - DNA, 621 bp, Gossypium hirsutum
  Clone ID: LIB3828-016-Q1-K6-A5
aaactctgtacgaggttttcttttagcggcatttgtcattgcgaaggaaaacatgggagctgaaaggagattctttgttaagtttgagttgatgttaatggcgattttgatggtttcaatggaatcttccatggcggcattacatcgtgttggaggcaagctaggttggaaccctaacgttaattattcagaatggtccgaccatgagcgattttatgtcggcgattggcttctcttcaacttcgacaagcgctacttcaatgttctggaagtgaacgagacaagttacgataactgcaatgatcaaggtttcgtaaagaacatcactcgcggtggccgtgatgtggttgagctgacacaggcgaggccgtattactttctcagcagcggtggctactgctaccatgggatgaaagttgctgtcaatgttgaaatgcttccacctgctccggagccggctccggtcaaaaatggttccctaacatccgatgctgttagccttaagattttccgctatatgatttcctttgctgtggcatactattatttggtccttttgttttagatcagacggttgattgagattaagcagcagcaaatgttggattatatcaatagtca

SEQ ID NO: 6161 - DNA, 610 bp, Gossypium hirsutum
  Clone ID: LIB3828-016-Q1-K6-A6
ctggtcctaagcagggcatgagttcggcaagaaaatgctgctaagagaaaggggatggtggagacaattctggttgcttctaaaacgtgcatggatgcaagcttctcgtgatggaccaacaaataaagttagagctagaatgtcaattgcatcagctataatatttggatctgttttctggagaatgggaagatctcaaacgtctatactagacagaatgggtttgcttcaggttactgcaataaacacagcaatggcagctcttacaaagactgtgggtgtatttcccaaggaacgtgcaattgtagacagggaacgtgctaagggatcttatgcattgggaccctatcttctttccaaattgatagctgagatacctgtgggagcagcatttcctctaatgtttggtgctgtgctctatcccatggctcgccttcatccaaccttttccagatttggaaagttctgtggaattgtgactgtggagtcttttgctgcatctgcaatgggtctgacagtagggtccatggtcccaaccactgaggcagcaatggccttgggaccctctcttatgacagtcttcattgtgtttggagggtattatgtaact

SEQ ID NO: 6162 - DNA, 605 bp, Gossypium hirsutum
  Clone ID: LIB3828-016-Q1-K6-B1
gtgatcaccaacgttaatatatcggctccggatgaaaccccacacggacggcattcacatgagcaaaacaaataaggtcagaataagcaacagtaccatcggcactggcgacgattgtgtctcaatgatccatggaaccaccaacgtcaccgttgagaacgtcaaatgtggccccggacacggattcagtattggtagtcttggacactacgatgctgagttcgatgtttttgggatcaccgtgaggaattgctcactagcctacacagaaaatggtgcaagaatcaaaacatacagaaatgaaagtccatctaaagcttcgggcattattttccaagatctcactatggaccatgttaagaaccctattctcatcgatcaagaatatgcaacgattccaggcagtgtggactcaaaagtgctcatctccgacgttgaattctcaaacatcagaggaacaacaataagcaaaattgctgtagtcctagcttgcagccaatcatttccatgcaaaggcattaccctcaaggacattcacttagagtataccgggtgatcccgatcataatgaagacactcccttcagttctaactgcaccaacgtt

SEQ ID NO: 6163 - DNA, 629 bp, Gossypium hirsutum
  Clone ID: LIB3828-016-Q1-K6-B2
accatctcttcataaaaccgtaccaaaaacacacacacacacacacacacacaaacacacacacacacagagggaaatcgggtcggatcccaaagatgggtgtaacaccaaaaatcgctccatccatgctttcatcggattttgctaacttagcatcagaggcaaagcgcatgcttgacttcggagctgattggcttcatatggatatcatggatgggcacttcgttccgaacctaaccattggtgctccagtcattgaaagtttaagaaagcacacaaaggcatatttggattgccaccttatggtcactaatccgattgattacgttgaacttttgggtaaagctggtgcatccggtttcacttttcatgttgaggtatcgaaagaaaactggcaagaacttatccaaaaaattaagttgaaaggcatgaggcctggtgtggcgttaaagcctggaacaccgattgaggaggtttatcctctgatcaacagcgaaaatcccgtggaaatggttcttgtgatgactgtggaacctggatttggtggacaaaagttcatgccagaaatgatggataaggtgcgcgtgctaaggaacaagtatccatctctcgatatagaggtcgatggc

SEQ ID NO: 6164 - DNA, 436 bp, Gossypium hirsutum
  Clone ID: LIB3828-016-Q1-K6-B3
gtgtatttgtgaagcttacctttattgaaaatctctcgtgtatgtgggacagcgtctaccactgtaagctgtcgcaatatggcaatcttctgctatgctaacacatgctgagggtttgtaattggtttccactaacatcctgctgcaggattcagtggtgcacctgaacataacaatcattatgctctggactgaccatctatatcctcctgttaacaccacatgggatgaccgttcatggatgctgactcttggtgctcgactgatctttcagatacccaccaactgcagcttttgtttaccaagtcgtgcatatagatgttactcctgaacgacgcatctggttttacattctacaatatcggcctactccaatttatgatgtaccgtgaaataatgacgtgctatatcatacatgcgttttgtgatccaaata

SEQ ID NO: 6165 - DNA, 624 bp, Gossypium hirsutum
  Clone ID: LIB3828-016-Q1-K6-B4
cccagcgtccgctttaaaaaaaagaaattactgaaataaaagaaataaaaagaacacctttgcgaaactttttcctttcgattctctgatatctcgtttgtattcgttgtgttcaatcaatcttttttttcttccccaaaaatccccctttacaaattgatttcgtttcggttttataactgattacaatagaaaaaaatcgctactatttctcagttgttgctgctatcttttgctgttttttgtcctcttttcttgctgtttgcaggtccttggaggtgcaggtgatgggacggggccagggagttgttgagcctcgagcgttggacgtgctgaccaggcacgtggggagcggcacatactgctgctagggtttcttggatgctgaaactattttaggtttgggccattttgggcttgttttagtttgggtttagctgattgggtattaaggttggttttacaaaatttgggctttatattttttgtctattattgtaatgggcccgggcaaaatttggttttcacaatccttatggcaactcctgttaggtatttattatgtggatcataaatgcaaaaagtctacttatgaaggtgccaaaaaataaacaaaagaattat

SEQ ID NO: 6166 - DNA, 625 bp, Gossypium hirsutum
  Clone ID: LIB3828-016-Q1-K6-B5
gttctgggcaagaaagttggcaatactggtggaatggctgctatgcagttgtcaactgaacacaatgcaaacattgaggctattaggcacgaactcaaggaattacacccaaatgatccgcaaatcgttgtcctcaagcatggggtttggcgagtaaagggcattattcaggtttcaagatctataggcgatctttatatgaaacatgcacagtataacagggaaccgattaatgcgaaatttagacttcctgaaccaatgaacatgcctttattgagtgccaatccaactatcatttctcatcctctccacccaagtgattctttccttatatttgcatccgatggtctatgggaacacttgagtaatgaaaaagctgtggatatcgtccacagtcatccccgtgcggggagtgccaaaaggcttgtcaaagctgccctacaagaagcagcccggaaacgagaaatgagatattcggatcttcgaaagattgacaagaaggttcgacgtcattttcacgatgatattactgttattgtgttattctttaatcacgatcttatatcgagaggtgccgtccaagaccctccagtatcgattcggagtgcactagaacactgatgat

SEQ ID NO: 6167 - DNA, 605 bp, Gossypium hirsutum
  Clone ID: LIB3828-016-Q1-K6-B6
cttgcttcaactttccaatctatctctttccttatgatttgattcgtggacataagcgatgaagcctgtagatctcactcttcgttccacagctaccaccaccaccaccactgcgtgaacccccatctgaccccagaacctttgaagaaggatttcaatattccctaccctttaattctcacggcggacgaaaatgagcgcctcgagattcataaagtgcgtcaccgtcggcgatggagccgtcggaaagacctgcttgctgatttcctacaccagcaacactttccctacggactatgtcccgactgttttcgacaatttcagtgcaaatgtcgtcgtcgatggcagcactgtcaacttaggtttatgggacactgctggtcaggaggattacaatagactacgaccactgagctatcgtggggctgatgtgtttattcttgcattttctctcatcagcaaggccagttatgaaaacgttgccaagaagtggattcctgagctaaagcattatgcccctggtgttccgatagttcttgttggaactaagcttgatctccgagatgatcaacaattcttgacagaccatcctaacgcagtgccca

SEQ ID NO: 6168 - DNA, 626 bp, Gossypium hirsutum
  Clone ID: LIB3828-016-Q1-K6-C2
ggcgacccctctcattttccaagcttcaggattacccctgctgctgaagatgccatcgttgatgctctacgttcggctaagcataattgttattcgaccactggtggtattcttcccgcaagaagggcacttgcagattacctcaaccgtgaccttccctaccacttatcgcccgatgatgtttatctaacaattggatgtactcaaggaatagaagttgttatatcaattctttcccgccccggtgccaatattttgcttcctagaccgggcttcccactctatgaagcttggtgtgcttataaccatcttgaaatgcgtcattatgatcttcttcctgaaaaagttgggaggttgatcttgatgctgtagagactcttgcagatgagaatactgttgctatggttattataaatccaggcaacccttgtgggaatgtcttcggctatgaacatttgaaaaagattgcagagacggcaagaaagcttgggattttggtcattgctgatgaagcttacgacaatatcgcatttggaagcactccatatgtgccgatgcgagtgttcggattaaccgtgcctattctcaccttgggttctatatcaaagagatgggtagttcctggt

SEQ ID NO: 6169 - DNA, 630 bp, Gossypium hirsutum
  unsure (1)..(630): unsure at all n locations; Clone ID: LIB3828-016-Q1-K6-C3
nnctttccganaaaaaaaaagctcaagaaaaaaaaaccatgngccgatcaacttacggacgatcagatctctgagttcaaggaggctttcagcctctttgacaaggatggcgatggttgcattactaccaaggagctggggactgtgatgcggtcacttggtcagaaccctactgaggcagaactccaagatatgatcaatgaagttgatgctgatggaaatggatccattgattttcctgaattccttaacctaatggcaaggaagatgaaggatactgattccgaggaagaacttaaagaggctttcagggtgtttgacaaggaccagaatggtttcatatctgctgctgagcttcgccatgtcatgacaaatctcggtgagaagcttacagatgaggaagttgatgagatgatccgtgaagctgatgttgatggtgatgggcagatcaactatgaggagttcgtcaaagtcatgatggccaaatggagagagttgcatagtcacaagcccagcagtccaaagttggagaaaaagaaacgcaaagcaaagcgtcgaaagagagacagggttcgtgactgcgttttcctctaaatatgtnttctttttccttttttttttcctcatttt

SEQ ID NO: 6170 - DNA, 552 bp, Gossypium hirsutum
  unsure (1)..(552): unsure at all n locations; Clone ID: LIB3828-016-Q1-K6-C4
gncaacactaaggtaactttggcacctattgtcctcacatgacacacagaactttgtggaaatcatcttcgagaatcccgagaccgccattcagtcttaccacttgtctggctactcattctttgccgtgggcatggacattgggaaatggagccctgagaagaggatgaactacaatcttctcgacgccgtgagcagacacaccatacaggtattccccaactcctggtcagcaatcctattgacattcgacaactgcgggatgtggaacctgaggtcggagatatgggacaggcattaccttgggcaacagctttatgctagtgttatttcccctaaccgatccctcaaggatgagtacaacttgccggaaggtgtattgacttgcggcatcgtgcaaggcatgccaaggcctccacctttcagcagttaatttaaataagcttataaatctgtatccaattctggtgtatgaggagagagagggtgagaaagcttgagttccaaatgtatttaatgaaataaaatattttggaccatttgtttgtattc

SEQ ID NO: 6171 - DNA, 637 bp, Gossypium hirsutum
  Clone ID: LIB3828-016-Q1-K6-C5
ctgctcctacctttgtatcttatggagatgctcatggatcttatgatttgatgaaggctgaatccattaagacccacatgtaaatttctagcagatatggtttgggttcatgaagaacatgatgtctgtattgagacacaggaaggagttaagcattgtaaattaattgctgttcatgctggtttagagagaggcaaaaatgtccgaaagcagttggaatttttgaaagccaaggatgctcgtgtgcccaaggtcacagatctcagtggttgaaaggatgtttgggacatccccaaagagctaactgaaacaattttggtgagtggtcaccatgggaaacttcacatataaagtcttagattgatcattgacgaatgcggaggattggatggtaatccggtggctgcaattgtgcttccttcaatgaagatagtccgcgacactgataatttttcttagtttcatgttttagtcatcaattagctctgctttctgaatttaagaaagcatataatcccttgttttggggacataaagtatggtcaagctcataggagtaaatgtggatttggaggtacttatatggtaattttggttgtgataagtttgttataacgtccattaacagattatctgg

SEQ ID NO: 6172 - DNA, 624 bp, Gossypium hirsutum
  Clone ID: LIB3828-016-Q1-K6-C6
ctacattgcaagattcattgagtttacttcctttaggcttatgggcatggttagaatttttctgtgcatggcttccatcaccatagaattcttccttccttctacaataaataccaccccctccttcatcctccaaagcatcatcccaatcaaaaatctgtgtttcaccagccgtcctttcaactgttttcttggccaagctttgtggccctattatcgcacatgaaataagtgattttctcccagtactctttcctaggtcaacttgatcatcaagctctgtcatcttatcatttacaaacctttccacaaaattaagtgcattagcttgtaataactccccaggttcttcagagtcaatatagcttaaacctgctgactgaccatcacttgcaggaaactgaagcaagtcatctcttgcatccgcattttcacttctgcaagaagacctttcggcaaaaagttttctcacagttgaaccaaccctgcaactggttccatgccttaaaccaattgagttctcttcacgattaaccagatgttgtgcctgattcatcttctccacaacattagggtttgaaccatcacttttaattgtgcactggtctgaaaactgacaaccag

SEQ ID NO: 6173 - DNA, 580 bp, Gossypium hirsutum
  unsure (1)..(580): unsure at all n locations; Clone ID: LIB3828-016-Q1-K6-D1
ctcagctgccttggagggtagtgttttgaagtctcttaatctttcaaacaatgccttaggtgagaaaggtgttagggcttttggttctcttttgaaatcacagagttgcctagaggagctctatttgatgaatgatggtatttcagaggaagccgcaaaggctgtctgtgaattgattccctctacagagaagttgaaggtgcttcactttcataataatatgaccggagatgagggtgcacttgcaatttctgatgttgtgaagcgctctccttttttggaggattttcgatgctcctcgacaagggttggttcaggaggaggagttgccttagcgaaagcactcgagtcttgcaccaatttaaagaagcttgacctgcgagacaacatgtttggtgtagaagcaggaattgccctgagtaaagcattttcaaagcatttggatctggttgaggtttacttgagttatctcaacttggaagatgagggtacagtagcaatagccaatgctctganagaatcggctccttctcttgaaagtttagaaatggctggaaatgacataacagctgatgctgct

SEQ ID NO: 6174 - DNA, 303 bp, Gossypium hirsutum
  Clone ID: LIB3828-016-Q1-K6-D2
ccttggtccagctatggttccatgccatatgaccacattgtggctatggtcatctctacgccaagttgaagccatcgagacccacagcgggtataattttccttggagtcccaccaaattgataccattttatggaggaccagagtatcatgattttcatcattttgttgggagacaatgccaaagcaattttgcatctatatttacatattgtgattatctatatggaacagacaagggttatcgtcgccacaaacaagccgttaaaaaaggtatttttaattaagaaagtatttttctctt

SEQ ID NO: 6175 - DNA, 471 bp, Gossypium hirsutum
  Clone ID: LIB3828-016-Q1-K6-D4
cagattggtgcacctgcttatatcgaatgcagtgcaaagtcacagcggaacgtgaaatcggttttcgattcagccattaaaatcgttcttcaacctcctaaacagaagaaaaagaagaacaaaccatgctcgataatgtgagtagaaacagaaaatgtagaacccccttctttccctttgtttttttgcactcgaagaaattagaactaccccggattttgatctcccaaaccgacgcaacaaaggatcatcgcgaagcatcttatggttcagtagtatattatgttattgcaactcctttggcatctctaattgtttgaaatgaaatagatcgatgttagttaggaaactgctcggaaagtctttaattttatcgttttgtatcgatttatgttcgtgttttttgtttttctgttcttagtttcttgtaaatcgttcgttttggattgaaacgagtcctttcatccgcgt

SEQ ID NO: 6176 - DNA, 622 bp, Gossypium hirsutum
  unsure (1)..(622): unsure at all n locations; Clone ID: LIB3828-016-Q1-K6-D5
gaagattagtcncacgaaaattaattagggtgtatttgtttgcctggaaaacattcttgattttctggtgtttgtttgactgaaaacattttacatgggngaaaatgttttcaaaatctcgggtaaaatgcctatgcttttagggaaaatgtcttacagattttttttccctaagacattttccaattctcactagtctttcccccttgcgcagttctccatcttcctttttctccatccagctgctttgccataaaccaagtgggtgcttccatctatgaatatcaaaaccaaagctttcttcaccgttctagttctttcttcttgcatggtggaaacgaaagcctttatgcttcaaagcttcacgctgatactgacaaaaagccttctcctgaggaaaatcatctcaatggcaagtcttttatcaggctcccaggcagtggttagttttgtactgcagcgggaacttcatgctgaattcttattagttgccgaggaggattctaaagatcttcgcaaagatggtgcccaggaatagtagagcacattacagaacttgtgaacgattctttaactagtgatggatcatacaatgttactttatctacaaaagacgttctca

SEQ ID NO: 6177 - DNA, 601 bp, Gossypium hirsutum
  Clone ID: LIB3828-016-Q1-K6-D6
ttcctctagaagggataattaataaattactgtcgggcgaaaaaaagggtaagagatggctcgattaatgttaatatcgatgctatttctcttggcaggatcaatgcttatggtccagggcggagatcccaccctttttttcgaatggaacgtcacctatggcaccattgctcccttgggagtgccagtaaagggtattcttattaacgggcaattcccgggaccaaatcttaactctaccaccaacaacaatatcgtggtcaatgtgttcaataaccttgatgagccattccttgtaacatgggacggcgtgcagcataggaagaactcttggcaagatggtgttctgggaaccaactgtcctatcccccctgggaagaattacacctataaattccaggtgaaggatcagattggcagctacatgtactatccggtgacggctatgcacaaggcggttggtggtttcggtggcctccgtgttaacagccgtctactcatccctgttccctacgctgatccggctgatgactatactctcttagtgggagactttttcaacaagggacacaccagcctcaagaagattcttgatagcggt

SEQ ID NO: 6178 - DNA, 153 bp, Gossypium hirsutum
  Clone ID: LIB3828-016-Q1-K6-E1
ctcggctctcgcatcgatgaagaacgtagcgaatgcgatacttggtgtgaattgcagaatcccgtgaaccatcgagtctttgaacgcaagttgcgccccaagccattaggccgagggcacgtctgcctgggtgtcacgcatcgtcgcccccat

SEQ ID NO: 6179 - DNA, 561 bp, Gossypium hirsutum
  unsure (1)..(561): unsure at all n locations; Clone ID: LIB3828-016-Q1-K6-E2
naaatctgagggtaaattggttacctctaagattatagctcttgcaaggtatggttagttggagatgacttgaccgaagaagagcaaagaaaggcaaataaaggaacactatttattcccttttcgcaacttccaaccaaaaaaattgcgcaaggactgcttctatcacacaacaccagcgatgcagactccgacggcccttgagaatgtggattcttgcgagaactggttgccaaggagagtgatgagcgtatggcgcatagctgggatactgcatgctctggaaggatgggaagagcacgaatgtggttacaccatgtctaacattgacaaagtttgggaagcatgtctcaagcatggatttcagcctctgaaggtcccaactcaatcaaagtcctagaagatatttggcgatttatctaattaatctacttgatatctatgtttaatgtataagcatttacctaaataacattatccttatcctggattcatcatgtgactctatcgggtcataggttgctctcagagttaaactatatattatatattatactcttt

SEQ ID NO: 6180 - DNA, 58 bp, Gossypium hirsutum
  Clone ID: LIB3828-016-Q1-K6-E3
tcacaacctttgtaaatattcaccaaattaataatgcttacattttattttttacctc

SEQ ID NO: 6181 - DNA, 477 bp, Gossypium hirsutum
  unsure (1)..(477): unsure at all n locations; Clone ID: LIB3828-016-Q1-K6-E4
cccagcgtccgccccgcgtccgagcactcagaccatcatctccggagttgcgccagtgaagatgacctttgagggaccagagatgggcactactgaatcaggacatggatgcagctgtggatcaagctgcaaatgtaatccatgcacctgttgaaaagcttgatgaaagccatagattatgaaaaaagaaagcagcaaaataacaggcctctgtaatgatttattttcaaggatggatgcctgcaaggtctataattatgtctctctctgtcttgtgtaatagaagctttgtttgtggtgaaaataatgtataagccatttggttgggagcaaattttccttttgtccaaaggatttttgctgctcattcatggtgacttggtttatggttttatctgttgttgttaaaatcttataaaaatatatatcgattgctgcttttggtttgtattaaaaaaaaaaaaaaaaaanannnnn

SEQ ID NO: 6182 - DNA, 613 bp, Gossypium hirsutum
  Clone ID: LIB3828-016-Q1-K6-E5
cttcctccgagccgttaggttgtatcgttttagttttaagtctcttattttttgaaagttcctagttaatactacataatgggtaaggagaaggttcacatcaacattgttgtcattggccatgttgactctgggaagtcaaccacaacgggtcacttgatctacaagcttggaggtattgacaagcgtgtgatcgagagattcgagaaggaagctgctgagatgaacaaaaggtcattcaagtatgcctgggtgctcgacaagttgaaggctgagcgtgagcgcggtataaccattgatattgccttgtggaagtttgagacaaccaagtactactgcactgtcattgatgctcctggacatcgcgacttcattaagaatatgattacgggtacttctcaagctgactgtgctgtccttatcattgactccacaactggaggttttgaagctggtatttccaaggatgggcagacccgtgagcatgctctccttgccttcactcttggtgtcaagcaaatgatttgctgctgcaacaagatggatgccacaacccccaagtactcaaaggcaaggtatgatgaaattgttaaggaagtttcttcctacctga

SEQ ID NO: 6183 - DNA, 192 bp, Gossypium hirsutum
  Clone ID: LIB3828-016-Q1-K6-E6
tttgcatcctagtagacattcaaaaagggaccaaatacaggacagtttgaaagaactactcaaaataggagttgcctgttccagggaacaacctagagagcgaatgaaactgagtgatattatcaaagaattgcagttggtactaagacttcttattggatctgccattgaataagatgaaacagaattcgg

SEQ ID NO: 6184 - DNA, 612 bp, Gossypium hirsutum
  Clone ID: LIB3828-016-Q1-K6-F1
cacctgctatgtatgttgccatccaggctgtgctctctctgtatgctagtggtcgtacaaccggtattgtgttggattcgggagatggtgttagccacacagtccctatttacgagggttatgccctcccgcatgctattcttcgtctcgatttggctggtcgtgatcttaccgttaacttgatgaagattctgaccgaacgtgggtattcattcaccaccacagctgagcgggaaattgtaagggacgtgaaggaaaagctgtcatacattgctctcgactacgaacaagagctagagacctccaaaacagactcatcggtagagaaaacctacgaattacccgacggtcagattattaccatcggtgctgaacgttttagatgccctgaagtgcttttccaaccatctttgatcggtatggaagctgcaggcattcatgagacaacatacaactccataatgaagtgcgacgtggatattaggaaagacttgtacggtaacatcgtcctcagtatgtggtacaaccatgtttcccggtatctccgataggatgaaccaagagatctcctcattagcacccagcagcatgaagatcaaagttgttgcacca

SEQ ID NO: 6185 - DNA, 594 bp, Gossypium hirsutum
  Clone ID: LIB3828-016-Q1-K6-F2
acagaagtgctaaagcagatgatggaattcttggctgcatagctgcctgactcctttttaggaacttatatgaaaaaatgaaaaatggtgatgatttcttgaatttcctcccttgcgacttgtcaataaagatacttactgctttagagggtccatctgatcttgttcgcatcactgctgtctcacgcaactggcgacattttgtgattagacatggtctatgtaagcatctgtccctccaaatgtttccccaattatctagagttgatcgtgtcaatgagctaggtggcagtacaaaaggtcatgctggagctggatctagtaattttatggagtgggaagctttggagagggagcatagagcttatgcctttttagctcgatgttgtttgtcaactactgctggggattgcatctcagaagcaataattgcttctagcactgataattatccagaggaaagcatatgtaatactttggaaccaagagatagggtggctcggacagcttcatactggtctagtaaaggacaaaagaatcctgccgtgcctgaaacattgacatatagattgattgctgatttgtgtgttgtta

SEQ ID NO: 6186 - DNA, 609 bp, Gossypium hirsutum
  unsure (1)..(609): unsure at all n locations; Clone ID: LIB3828-016-Q1-K6-F3
anagcgcttaagtttgtcaagagtgttggatttatcgattgatgacttgcaattgtcgtttgataagatgggggaatacgatatgagtaagatcgatgattacttactgaacctgagagtgtggttaagcggtgccttaactacccaacaaacatgtgtagacacattcgcggaggtaagtaatgaacaagcggagaagatgaaattagtgctgaagacttccatggagcttaccgctaatgctttaaccatggtcactaagttatccaccgtcctgaaagaccttaacattccaggcctcgaaggcatcgacacgactgggtttgaacgtaagctcttgtctaatgatggacctgagtggatgggccatgctgagaggaaactacttcaggcaccaattattaagcctgatgttgtggttgctaaggatggtagtgggaaatatgacaccatcaccaaggccttggaagaagtccctaagaaaagtcccaatcgatttgttattcacattaaggctggtatttacaaggaaaaaatcaatgtgaccaagcaaatgactaatgttatgttcatcggtgatggcccaaccaagaccattatcaccaatga

SEQ ID NO: 6187 - DNA, 351 bp, Gossypium hirsutum
  Clone ID: LIB3828-016-Q1-K6-F4
atctaacacatgcatggaacacaagatctacgactggagagtacctgcagtgcccttatagtgaacaccttctgggtggggcatgaacagagacatggctgtgaatagacatcatcaataagctggttcttttataaactattctgccctctttcgaccgttcaaattttaacgcgaatgaagtggaaccagtcatcatgcctcaaccttttgcaccatccaatccatattgcaccatactattacatgtgctgcaacaccctatgaactatgatgactctgacgtccaccatgatgtgcagcaaaatgatcagtggagctacatcgtcaatatatgataacaacattcaa

SEQ ID NO: 6188 - DNA, 558 bp, Gossypium hirsutum
  Clone ID: LIB3828-016-Q1-K6-F5
aaaaaagggatccccttacatattagaatcggcctcatatagccgaaataaaaaagaaaaataaaacaaaaatctccctttttttcatattttcgtcctttttttgctgttattctctgctattctcgtgtcttctctgttgttgctgcgttttttgtccgtctttgtttgttttctgtgcaggtacaggtacggagaccgtacggtgacgtggcgcggtgcaacgcgtgaaggcgtggtccctggtggcggcgtggctcggctcggaggcgtggctttggcgcggaggcactacatgcgcgcgggcataacacgtgcgagggggaaggctggctctgttgcggcgctggaggctcaccctagctgctagggtttcgcttatggctttgggcttaggtgatttgggccattgggtttagtgggtcaggctggtattgggttaacagtttaggcttgggactttggattttgtaatcgggtttgggcttaatctacttggtttgtaatttggactgttaataatttaattttttatattattatttttttatttggctt

SEQ ID NO: 6189 - DNA, 620 bp, Gossypium hirsutum
  unsure (1)..(620): unsure at all n locations; Clone ID: LIB3828-016-Q1-K6-F6
aaaaagttagctgaagaagaaagctgaagggaaagtcaaaggagaagctaagaaagaaaaacatttggttgcagagaagggcatgtgaagcctgcaaattacttgngattcacaggaaaagtttctaatcggtattgctacaaaaggagtggtgaagttattcaatgctgtgaataaagcacaaaaggctcagaaaggattggacccttcgaggtctaaagatgcaaaagtgataaggaagcgaaggaaagaagccttcttttcagagctaggcaagacatcattgcccgcacgcgattcttccagtaagggtaatacatctgattctaggaatgatgaaggacctgcttgggccccattgcgtgataattacatgctaacaaatcctaaattgaaggactgggataaaatggcggactcggcaatagttgatgatgttggaatgatgtctgaagatagtggttcagatgatgattgatgtcctttgaggttaaggagattaagtagtagtgttcttgcgggccatggtataacagctgaacctgaatttttttttcctttttctttacttcttcccaattttgtgtagtggtctatttattatttataaatgaattaaa

SEQ ID NO: 6190 - DNA, 641 bp, Gossypium hirsutum
  unsure (1)..(641): unsure at all n locations; Clone ID: LIB3828-016-Q1-K6-G1
gttttaccagnagtgaggttacagcaactggcatcatccgttacaagaatggtaagggagctgcctcatccgagttgccaccaccacctgttggttgggcttggtcactcaatcaattccgtaccttccgttggaacttgacttctaacgctgctaggcctaaccctcagggctcctacaaatatggttccattaacattacccgcaccatcaagcttgccaacactgcacaaaaagtagatggcaagctccgatatgctcttaatggagtctcctatgtcgaaccaaccactccactaaaacttgcagaatactacggcgtagccgacaaggttttcaagtatgataccattcccgatgagccacaaagtgacaacactaaggtaactttggcacctattgtgctgaacatgacacacagaaactttgtggaaataatcttcgagaatcacgagagcgccattcagtcttaccacttgtctggctactcattctttgctgtgggcatggacgttgggaaatggagccccgagaagagatgaactacaatcttcttgacgccgtgagcagacacaccatacaggtatttccccaactcctggtcagcaatcctattgacattcgacaactgcgggatgtgg

SEQ ID NO: 6191 - DNA, 623 bp, Gossypium hirsutum
  unsure (1)..(623): unsure at all n locations; Clone ID: LIB3828-016-Q1-K6-G2
gtaacaaaaaagtgagaacgaagnaaaggcaaatattcccataatcgctcttttctgcttcaccatttttgtttcgtcctcactcaatttcgtctatggggctngaaaatatgagctacgtcgtcgtaggccatgtttactgtgacacttgccgtgttgagtttgagaccaaactcagcgaacccatcgctggagcagtagtgaaactggaatgcaggaatcgtacagacaatcaccttaccttccagagccaagaaatagtgactgacgaacgtggagactatcacattgtagtggaaggcgattatgaggaatcagactgcgacgtcgccttggtgaggagtcccaacccggattgcaatgatccctccgaaatgtggaggatatccagggtggttctcaccacacttgacggcgtcagcggtgaacttcggtttgccaacaatcttgggtttaagaggaaggttgctcttcctcagtgtactcaagttcttcaagagataggctattatgagcttagccaagaagctggagacattgccccttggtcagaactataatatgtattttcacttcaactttttctaaaagctcggcattagcctataataaaaattgaatca

SEQ ID NO: 6192 - DNA, 383 bp, Gossypium hirsutum
  Clone ID: LIB3828-016-Q1-K6-G3
atttcctattggctgccattctcgctgctgttttttgtttcctttcgcaggtacaggtgcgtggcttgtgtacgaggctgtactggcgtacaagggttgttgacgtggaggcacgagcggcgttggggctgtacggcggctgagagctgtggcgcaaagagagagaaccctaatggtctaaagttgtaattttttgggcctatcgggcctgtatttgggtcttgggtctttaatcatgtaacttggactgttataagacttgggttttatatttatttattttgtatttattttgggtttcaaaggggccgagcaaattggcctgtttacaacattgatagcaataaatctcttacatgaattatatctacattttcgaattt

SEQ ID NO: 6193 - DNA, 617 bp, Gossypium hirsutum
  unsure (1)..(617): unsure at all n locations; Clone ID: LIB3828-016-Q1-K6-G4
aaaaanaggcgtctgtaataaaatctgcaatcttaattctgtcggtgtttttatctgtaagcttcagttcgggtgttaggttgctccaggaacagcccaatgatgacctcaaaaacatggacgctattcctcccattgatgcactcaaccctaccgagttcaatggacccggtgttggcattcacgaagatcatgttgtcccaaaggttccgaaattggtactcttggttttggttttgaaggtggtcctgaaaaatgttgttcttctggatgttccggtaattgtaatcctggtggtttcgttctaccatttcctcaaattccagaaatcccaagaattccacagatcccacagatcccacaaatcccacaaattccactaatcccacagatcccacaagtcccacaaatcccactaatgccaggacagtcgggatgtgagagtggggagtgttgccgtcagggttgcggtgggacttgtgctgagtgtggtcagcccaggtgcgcatcangatgttgccaggctgaaactgtaaagagcaaagggatagaagaggttatggacagtgaacccagtccaccaaagtagggagatgataccatattaagatgaaata

SEQ ID NO: 6194 - DNA, 627 bp, Gossypium hirsutum
  unsure (1)..(627): unsure at all n locations; Clone ID: LIB3828-016-Q1-K6-G5
gttgagtcaaaggaaananaaggagtttctcacaccgtggnaaatcagtgaatgtgatgacgtggaggtttatgtggaaactgtggttttgatgtactctgatgatttgaagaagaggttgattggtgaaaatgttaacaaggtcttggctttgcttcaggtttctgcggctattatgtttgatgctggaattagttcgtgcttggaatatctggaagctgtcccctggtccgaggatgaagaggagaaagtcctatctcttctctgccaacttgagcttcatggctcgatgactgaagttcttcagagagtattatccgaaccatctacttctgtgagaacagatgacatcttcttgaagctacttagtggtgttcttcaagcaaaagatgataaagcgcgtcgagaaatgaaaactcttatttcacggttactcagagaagattcgtttgattataacagccgggttgatgtctccaaagatatcctttatcatctttgtcatagatgtctttgttctctcgtgctctgcttatctgaagctatgtgcatggacagcagcaagcaagatcgaagagttttaatggctgaaatagctcgagaagctgacaacttgcagtggctagt

SEQ ID NO: 6195 - DNA, 547 bp, Gossypium hirsutum
  Clone ID: LIB3828-016-Q1-K6-G6
attatgtaggatatgtattatagttttttaataaattataattcttttaaaaaaaaaaaaaaaaaaaaaaaaaaaaaaaaaaaaaaaaaaaaaaaaaaaaaaaaaaaaaaaaaaaaaaaaaaaaaaaaaaaaaaaaaaaaaaaaaaaaaaaaaaaaaaaaaaaaaaaaaaaaaaaaaaaaaaaaaaaaaaaaaaaaaaagggggggggcgctttggggggcccaagtttaccccccggggggggggaagaaaaaacttttttttgggggcccccaaaaaaaaaatacgggggcggggtttaaaaaccgcggggcggggaaaaccccgggggccccccaataaaacccctgggaaaaaaacccctttttcccggggggggaaaaaagaaaagggccccccccaaacccccttcccaaaaaggggccccccctggggggaaaggggccccccccctttcccgcccaataagggggggggggggggggggtccccccaaggggcccccttactttggcgggccccttagcgcccgtcctttgggtttttt

SEQ ID NO: 6196 - DNA, 629 bp, Gossypium hirsutum
  unsure (1)..(629): unsure at all n locations; Clone ID: LIB3828-016-Q1-K6-H1
attgtccacaaaagganagattctccgccattaatatgagatttcgatcaacacctgtgcacaaatcagccgcgactgtgatctcggcggttatcttccttttcctgatacacggcgcccactgcttcgaccttcctggtgccgctaccgagatcttccaaaagataggagaagagagaaagatatcgttagctcctcattgcggctcaaatccacccatattggaccctgaaagtggagttgggcatgttgagaaacttgctgatttcaacagttatgtctctggctctcctgagtgcaagcatgctgttcttcttgcctctgatgtttacggatatgaggctccaaacttgagaaagatcgctgacaaggttgcagatgctgggttctatgcggtggttcctgacttctttaatggagaaccctatgaccctaataatcctgaaagacctaaagatgcttggctgaaggatcattcaccggaaaaaggttttgaagatgcaaagctaatgattgatgctttgaaaagtaaagggttttcatcaattggagctgctgggttttgttggggtgctaaagctggtgttgaactgacaaaggctaaacttattcaagctgctgtgatatta

SEQ ID NO: 6197 - DNA, 615 bp, Gossypium hirsutum
  Clone ID: LIB3828-016-Q1-K6-H2
gaaacccttagcggcgactactcgacttataacacccgagcttttaactatggcggatgtagagacggaggttgcgacggccggtgtgcccaagaagagaacattcaagaagtttagcttccgaggtgtcgatttggatgctctccttgatatgtccactgatgagcttgtcaagctcttccctgctcgagctcgcagaaggttccagaggggtttgaagagaaagcccatggctctaattaagaagcttcgcaaggcgaaaagggaggctccacctggtgagaagccagaaccagttagaacccacctgcgtaacatgatcattgtacccgaaatgattggaagcattatcggtgtgtacaatggcaagacattcaaccaagttgaaatcaagcctgaaatgattagccattaccttgctgagttttctatttcgtacaagccagtcaagcacggtagaccaggtattggtgctacccattcttccaggttcattcctctaaaatgaagtcttatccttgcaactttggatactttatttggtgtttgtatgaagagatattttatgttgatcaaattttgattgatgcactgtgacatttttatttcgttccg

SEQ ID NO: 6198 - DNA, 485 bp, Gossypium hirsutum
  unsure (1)..(485): unsure at all n locations; Clone ID: LIB3828-016-Q1-K6-H3
gttaaagctttggnaaatctgtaatgaggagcagaagaaatgttatatgagaactatgggaaaccagaccctgccaatgttgctaaagtgaaggctctatacaatgagcttaatctcaagggcgtatttgaggactacgaaagcaagagctatgagaggctcgtaacctcaattgaagctcatcctagcaaaccagtgcaagcagtgttgaagtcattcttagggaagatctacaagaggcagaaatagaatccagtttccaaagatgaatgtggctggaaaacctctcccactcttctgttctatgctcatttgtttgtcttaatattttataatcaatcatcttcttgttttctattccgacaaacattcggtttcagatttaaataaatttcatagagttctgtctctaaaaaaaaaaaaaaaaaaaaaaaannnnnnaaaaaaaaaaaaaaaaaaaaaaaaaaaaaaaaaaaaaaaanaaa

SEQ ID NO: 6199 - DNA, 494 bp, Gossypium hirsutum
  unsure (1)..(494): unsure at all n locations; Clone ID: LIB3828-016-Q1-K6-H4
gntttttacctttgtgctcnatgctggatgatagggaccacaaggccgacccactatcatgttctcttagaccaggttgggttttcagctgatgatctgcaggagcttgttcattctctatcctacgtgtatcaaaggagcaccacagccatatctgttgtggcccctatttgctacgctcatttggcagcttcacagttggggcaatttatgaagtttgaggatgcttcagagacatcatcgagccatggtggggtgactgctccgggagccatttctgtacctcagcttcccaggttgaaggataatgtcagcagctccatgttcttctggtgaaaaccgttgaaccatgtttttgtatagggcttttggattttggctaccaaaaactatttatgctgctttttcatgtctattagacttttgggttgcaacactcttaggtgtttcgtatgttatctgaacttatgaacggttgtctagctaagctcact

SEQ ID NO: 6200 - DNA, 626 bp, Gossypium hirsutum
  Clone ID: LIB3828-016-Q1-K6-H5
atcgataacccatttggatccggcattctcttgtcagatccaaaaccctccatttctttttttcttgcgttaaaaaatggcgacaatggagagcttgatcgggctcgtaaacaaaatccaaagagcctgcaccgtccttggcgatcatggcggccaaggaatgtcgctatgggaagctcttccttctgttgctgttgttggtggccagagctctgggaaatcttcggttttggagagcattgtagggagagatttcttgcctcgtggatccgggattgttacacggaggccgttggtgttgcagcttcataagacacaatcaggggcggaatatgcagagtttcttcacgcaccaaagaggaggttcactgatttcgctgctgttcgtaaggagatttcagatgaaacagatcgaataactgggaagacaaagcaaatctctaatattccaattcacttgagcatatattctccaaatgttgtcaacttgacacttatagatcttcctgggttgacaaaggttgctgtagaaggacagtcagatagtatagttgaagatattgaaaatatggtccgttcttatgttgaaaagcctaattgcatcatattggctattactcctgcta

SEQ ID NO: 6201 - DNA, 530 bp, Gossypium hirsutum
  unsure (1)..(530): unsure at all n locations; Clone ID: LIB3828-016-Q1-K6-H6
naaattatgcatttcctgctgggtgtgtctgtttttcaggtcctaagaaactgttagtaaaaccttgaaagtcttgtaagtttatattctacttcatcctcggaagtagtgtctgtgttattggaattgttgctaaaggctttagattcttcaagctccatggacatttcagaagactctgaagtggcctggatagacatactgcattggacgattggcagcttgtgataagaaaattttcgaataaggaaccagaattgcttctggcccttcttcaaaggattctttatatgatcgggacaaatgaggcatcaaaatccgaaacagtaggccatccgacagcttcagagggtagaccggaggcttgccaagtagaacatgtctcatctttgtttgcatggctagttagacatttagaattaaaaggaaaaagcgtgtcaaatgcaattctactggagctactgcgtaaatgtctgttggtggcgtctttacgtaacaaccatctcatggattctgcccttcatttgcac

SEQ ID NO: 6202 - DNA, 580 bp, Gossypium hirsutum
  unsure (1)..(580): unsure at all n locations; Clone ID: LIB3828-017-Q1-K6-A1
anaatgtgatgtcattgaagaagaaggctccttngagatggagagcgtgagaagggacttcctcggcgatgctattttttagcttttgttcttggcttcttcattctgttctccatgttttctttgattctctggggagctagcagaccccagaagcccaaaattacaatgaagagtataaaatttgagcaattcaagatccaagctggttcagattttacgggggtgtcaacagatatgatcaccatgaactccacagtgaaaatgatttatcgaaacactggaacattttttggcgtccatgtcgcatcaactcttcttgatttatcctattctcaaattaacattgcttcaggaaccatgaagaaattttatcaatcaaggaagagccaaaggtctgtaactgtaatggttatgggaaacaaggttcctttgtacgggagtggagccagtttgagcagttcaacaggcacgacatcgcttccggtttcacttaaactgagtttcgttgtccgatcaagagcttatgtgttgggcaaattggtgaagccaaagttctacaagaaatagaatgcgacat

SEQ ID NO: 6203 - DNA, 617 bp, Gossypium hirsutum
  unsure (1)..(617): unsure at all n locations; Clone ID: LIB3828-017-Q1-K6-A2
aatacatgnagactactgatggatcctactcgaagataagaaactgcccttgtctggtgttatgaggatgcagatccggattttggatcatgccaagctaaagaacttcttgatcatctcgaaagtgtgctggccaatgaacctgttacggtaaagagtgggcagaattttgtcgaggttaagccacagggtgtaagcaagggtctagttgcaaagcgcctactctccacaatgcaagagaggggtatgttgccggactttgttctctgcataggagacgatagatctgatgaagacatgttcgaggtaatcataagttcagtattggggccgttgatcgatcccagagcagaagtgtttgcatgtactgtgggtaaaaaaccaagtaaggctaagtactacctggacgatacggtggaaatctgtaggttgatgcagggtctggcttctgtttcagatcaaatgcattcggtgttggcttagctagcgaagggaaaaaacgaaaggtgcactgctcttctttgtgtttgtaactctaatatttgctcaccttgttttgcaatgtacatcatcttagtgttactaagagaaactgcttgcaagcggatacttttttc

SEQ ID NO: 6204 - DNA, 570 bp, Gossypium hirsutum
  unsure (1)..(570): unsure at all n locations; Clone ID: LIB3828-017-Q1-K6-A3
cccgtgtcgcccatcttcgcgaacggttccgagccctcgaattcttttccaaccatccatgatcggtatggaagctgctggtnatccacgaaacaacttacaactccataatgaagtgcgatgtcgatatcagaaaggatttatacggtaacatagtgcttagtggtggcactactatgttccccggtattgcggatggggtgagcaaagagatcacagcattggctcctagtagcatgaagattaaggtagttgcaccacctgagaggaagtatagtgtgtggattggtggctccatattagcttccctcagcactttccaacagatgtggattgcaaaagctgaatatgatgaatctggcccttcaattgtgcataggaaatgtttttaaagcacaagcaaagaagagataggctaagcctcaagaactgctctgtctaaggtttcttgcaatttcatattttggtttcattatctgcttttttttttggtccatcattttgtccgttgggacaattattttgaaacatttgatgattgttggaatatttatttttttcaggtatcat

SEQ ID NO: 6205 - DNA, 509 bp, Gossypium hirsutum
  unsure (1)..(509): unsure at all n locations; Clone ID: LIB3828-017-Q1-K6-A4
gcaatttcaaaacatactcaaaagggtccaattgggcaggttttctcaatgcttccaggatttagtgctgaactaatgccgaaggtcgtgaaaaagaaagccaggcaaagatcaagcgctacatgaccatgatggactcaatgacgaatgaagagttggatagctcaaatcccaagctcatgaatgaatcaaggatgatgcgaatagcgaaggggtcgggacgtcatattcgagaggtaatggaaatgatggaggagtacaagcggctagcaaagatatggagcaagatgaaggggctgaaaattccaaagaagggtgaaatgagtgcgttgtctcggaacatgaatgcacagcacatgagcaaggtcctgcctccgcagatgttaaagcaaattgggggtatgggtgggttgcagaacttgatgaagcaaatgggttcttaccaaagacatgatggggatgtttgggaggtggtgggggacaagtaaatgtaattttncacacccact

SEQ ID NO: 6206 - DNA, 600 bp, Gossypium hirsutum
  Clone ID: LIB3828-017-Q1-K6-A5
atttgattcaatccaattctgggtttagtttctttaacttcaaaatccattacccatattggatttattagggtcttttgttttgtttttataaaacaaatcaaatatcttgatgctcaacctttttgtgttaatgtttgagattcatgtttccaattctcagtgaaatcttcttttctgggtttatgataaattccacattcatacgcaggacccatcttgttcaatctttctctgttgttttcctctactggttatattacgtttcataaagaaataatcatctttttttaacttatttatctttactactaaggttttttttttttataattttatttgggtcctgctattatatattataaacaaaactcctataatggctacatcctcgggttcatcagcaacacaaatcaactcaggctcagaagaagcattaatggacgaaaggaaaaggaaacgaatgatatcgaacagggaatcagcaaggagatcaaggatgaggaaacaaaagcatttagatgatctaatgactcagttgactcagttgcagaaacaaaaccatgagatcatcacaaacataaacttcaccacacaaca

SEQ ID NO: 6207 - DNA, 117 bp, Gossypium hirsutum
  Clone ID: LIB3828-017-Q1-K6-B1
gtgcatgctaatatatatgattttctttgttaaaaaaaaaaaaaaaaaaaaaaaaaaaaaaaaaaaaaaaaaaaaaaaaaaaaaaaaggggcgggccgcttctagaaggaatccaag

SEQ ID NO: 6208 - DNA, 524 bp, Gossypium hirsutum
  unsure (1)..(524): unsure at all n locations; Clone ID: LIB3828-017-Q1-K6-B2
ccccgcgtccgttccaacantgtggatttccaaggtgagtatgatgaatccggtccatccattgtccacaggaagtgcttctaagttttgtaattgcttttgatggtggtctacattttgcatttagttggctttttttggtgtgccgtgttaagtgaactcaaaagtctggtttatgtcggggaagttagggatcattgtacgatggtctacttgatattaatgtactattattttagcctttcaccgtatcgccaccattaagatgacgggccctatggggctggcggtgggcggacaattggtgcttaattccctacttgcttaccttccatcttttaagcattttgcttaagaggatgtttggagctggagactgtattgtggtgcttattattatttaatattcaagggttttgagaacattaatgttaatagctattattgtacgagatttttttttgaaaaattagtcagtttgcggtcaaacttgtatgggaattatatttaatgcctggttttgg

SEQ ID NO: 6209 - DNA, 599 bp, Gossypium hirsutum
  Clone ID: LIB3828-017-Q1-K6-B3
tggagttgaagagatcgaaacaagataaatcgacaagtcacatttgcaaaacgaagaatggtttactcaaaaagcttatgaactttccatcctttgtgatgctgaggttgctcttatcattttctctaatcgtggtaaactctatgaattttccagttctaacagcattgctgatatactagagaggtacaacaggtgcacctatggagcattggaacctggtcaaacagaaattgagacacagagaaactaccaggaatatttgaagctcaaagcaaaagttgaggtccttcaacattcacaaagacattttctgggggaagatttaggagacttgggctctgaggaacttgagcagcttgagcgtcagttggacttctctttgaagaaaatcaggtcattaaagatggagcatatggttgagcagctttctaaacttgaaagaaaggaagaaatgctactggaaaccaacagaaacctgagaaggaagttggatgaaaatgcttcaacactaagaatcaacatgggaaactggggagcaaagtgttccatgcaacctccagcatcctcgatttcttgagcctttacaatgcaccact

SEQ ID NO: 6210 - DNA, 297 bp, Gossypium hirsutum
  Clone ID: LIB3828-017-Q1-K6-B4
atctccctccacctccacttcactcagcccaagttgtacatcttgtaacgccccgatttttgggtttggaagtattgggccttgagtctagcatcgggtgagccctagttggtagacttggagctgggcgggatttagagtggccacgaggattaaatttttggtttttaaataagtttcaagtagcttccttttaaatttcgcatttattttatattatttctattttggttaaagttgtaataaggctgctctattatatttattttgggtttttaaattacttaaatcattttc

SEQ ID NO: 6211 - DNA, 606 bp, Gossypium hirsutum
  unsure (1)..(606): unsure at all n locations; Clone ID: LIB3828-017-Q1-K6-B5
cttggtgatgtctgcaccagnacctcgaggcgccttgaaaatagtctcttttaattttgcgaggagccgaatccaaacccaaacaaaagtgcttaacatggatgccgccggcaatcgaagttgtaagttactattatttttctttgctgccataatcccagccctgcaaggtcacatcggagaatatgatgagtattggaaacaacgtgaattggaagctaaagaaaacaccgagcaggcatataaccccaatcctgaggaagttacccagcatgtcaaccaccttgtttccaggtcgctgatgaggctaaatagcacaagacgacatttgagggcaagaaaaaaaggcggtccctgcgatccaaccagccccattgaccagtgctggcgctgtgatcgtaactgggagaaaaaaggcagagactggctgattgcgccattggattcgcacgtggtactattggtggaaagtacggtagaatttacgtagtgaccgatccttcagatgatgatttgttaaatcctaaacctggaaccctacgtcatgctgtgattcagaaggaacctctttggatcatctttgcacgagctatgatccatcagcta

SEQ ID NO: 6212 - DNA, 497 bp, Gossypium hirsutum
  Clone ID: LIB3828-017-Q1-K6-B6
attctccaaaaagttccttataatagctttattaaagatgtcccttaaactatacgagattgtacttaattgtaatagctaccaggtagaacatttaccagcaattaagcgaggattatataagggagtatcctttgggaaactctctcctagggttaccaaaaaagggtaccccaaaaggttaacaaaaaatattgataaaaaaaaggaaattggcatggctttagaataaacaaatatggcttgccgtcgaaaactaatggctgcttcaaccttaccaaaaatataatcaacattaatgcttgagacaaacctgataaaccctatagtatatgcatcaccaatgacccacaacagatgccactctgaaatgccttagcaagtaagcgaaaaggagccactccataacttcttgttaaaacagtcttatcatatactctaaaactgaggcttctagcattttcagcaccagtaatgcttcttttttctcaaacctt

SEQ ID NO: 6213 - DNA, 524 bp, Gossypium hirsutum
  Clone ID: LIB3828-017-Q1-K6-C1
tgattttccgtttttatcctattgcttgttactctttttgatccaattttttaaacagtagtaaactgtttgataagcatgaaagtgaaactgttagcagatgattaattgggacgtggacgcgatgtcccccgcgcgtgaacagtaccccaacggtataaaaatttgaccgttgcccccaccccaacggtaaaaaaaaaactataaaacccaccaccccttttttttccacaaacaaatcctatctcgatttccttccaaaatcctctcaatttccttccaaaattctctaaaactctcaatttccttccaaaatcctctcattttccttcaaaaaatctctcaaatccatattaaatttcaattttccctcaatttcatttttttaaaaataattttaaattttttatatttcggccattgattcatcttgatagcaatcacatatcggtggagcaaatgaaaatgtctgaagatcgggtattggaatgcaatatccggaatatgcatgcttcttttatcac

SEQ ID NO: 6214 - DNA, 599 bp, Gossypium hirsutum
  unsure (1)..(599): unsure at all n locations; Clone ID: LIB3828-017-Q1-K6-C2
cttngattattttttaggtgcataatagtttggaaaaagngaagtatcatcgttaggagggtcatcccctcagataacagctgccttttcaatgctattgggtatgttatggaccatgacaagaccaaagcttcggaattgagacaggttatagcagcaacagtggctagcgatccgacgaaatattctgaggcatttctcggaaagccaaatgtagagtattgttcatggattctcgactcggaaaagggggaggtgccattgagctttcaatattagcagattattatggacgtgaaatcgcagcatatgatattcagacatcccgttgtgatttgtatggtcaggaaaggaactattcggaaagagtcatgctgatctatgacggtctccactatgatgctttggctatgtctccgtttgaggatgctcccgaggagtttgatcagactatatttgctgtacaaaaggatagaaccatcgggccggttgaaggcctagcactgaatctggtcaaggatcaacaaagtaagaggagatacaccgacactgccaacttcactttgcgttgtggagtatgccaaattggcgtcattggc

SEQ ID NO: 6215 - DNA, 619 bp, Gossypium hirsutum
  unsure (1)..(619): unsure at all n locations; Clone ID: LIB3828-017-Q1-K6-C3
ctcgtactaaaaaaccaaatgattttcttgctatttctcagcaaacaaatggatgccttcacttccttcttcgattcccaatcgagaaactctggagttacgatactcttaagaatttccgtcagatctctcccatcgttcaagctcatctcaagcaggtttatttgaccttatgttgtgcactgattgcctctgctgttggagcttatctccatattctttggaacattgggggttacctgaccacatttgcatgcttaggaaccattatttggctcctttccacccctccttgtgaagagcaaaagagggtttctcttctaatggcatcggcagtgtttgaaggagcttcaatcggtcctctaattgacttggctattcaaatcgacccgagtgtattggtagcttcatttgtgggaacagcattggcctttgcatgtttttcaggagctgctatgttagcaaggcgacgagagtacctttaccttggtggcttgctctcatctggtgtgtccgtgcttctctggttgcattttgcttcctccatctttggtggttccacagccctctttatgactgagatctacttanggcttttggtgtttgtgggatatatgat

SEQ ID NO: 6216 - DNA, 447 bp, Gossypium hirsutum
  Clone ID: LIB3828-017-Q1-K6-C4
gtattagcttttgatacgtaatgtgagctctgtaactctaccgtcctatatcctcccaggacgatattacacactataaaatgcatgggtgggaccgaaacgtgtggctacatgtactggctgcaggcgtggctgcgtctgggggagatgcgagagagtgtgcacacctgatacgccagccagatgcaccacaactgacacttttgctcttgcagttgcacactatactgcacactctggagaagctgacatcgaattacacgcctgccaacggctgacaagtgtgagagacaactgcacctgcgacccttgcgattgtgaatgatttgataccaaagccaatgctcgctgtaagcacaagcacctttgtctttaaaaaataatatgcaaagccgactatgtgatgatagaataaactagccatagcttgtctttggtcttgcctgt

SEQ ID NO: 6217 - DNA, 606 bp, Gossypium hirsutum
  unsure (1)..(606): unsure at all n locations; Clone ID: LIB3828-017-Q1-K6-C5
gtggnaaatgaagctcaaagttatgcagatcgaatgtctcagccatgtcgtgctgtcatcatcttctgcaaggtaaatggtatagactatgaggagatcaaagtacacatatcgaagggtcagcatttaactcctgaattcgcagaaataaatcccatgaaacagctgcctgccattgctgatggaagatttaagttgtttgagagtcatgccattcttatctatcttgcttgcgcatttcctggagttgcagaccattggtatccagctgacgttttcaagagaagtaagatacattcggtgttggattggcatcactccaacttacgtcgtggtgcagccccatatgttttcaatactacaatagcacctatacttggccgtccattgaatccacaagtagctgctgaagctgagataattctgtcctcatctctttcaaagctagagtccttttggctcaagggtaatgggcgttttttgctaggcaggaaccaaccatccatagcagatcttagccttgtttgcgagttaatgcaacttgaggttttggatgagaaggatcgcactaggttattgggtccgcacaagaaatgcagcaatgga

SEQ ID NO: 6218 - DNA, 625 bp, Gossypium hirsutum
  Clone ID: LIB3828-017-Q1-K6-C6
agatggaagtttggaagaacttaaggcgaagatctggtctagggtggaatcctataaaaagaactgttgatgcatcggatgattggtgggagagtaggctccaggttgtgcctgaagctaaaaatttagaacatcgggcattgatcctgaattcgaagcgaagttggaccaaatgttcatggggatagttgcaacaggtgataaagcatgggcaccttcttctggtacactccgtagtgatttttttgaggatgttaacaatgaaatacctgaagagaatgaagaagaaaatatgagaaatgatgttcacattttaaatgatgttcacatttcaaaatatgttcacatctcaaatgatgttcaaatggacggaaacggttaaaaaagaaaaaacattgagatatcaagttcacgttttaaaactggaagaaagaaatcctcaaagcaaattggaggggctgcaagattatctagtcaaatagaaaaattatgcagtgcagctgacaatatgagtcaagccacatctagtttgactcctgttatggatccatatggtattccataagcagtcaaagtgcttgacagcatgtcggaagaagttccagaagctagtccgctttacttt

SEQ ID NO: 6219 - DNA, 570 bp, Gossypium hirsutum
  unsure (1)..(570): unsure at all n locations; Clone ID: LIB3828-017-Q1-K6-D1
gaaacagttaaattccgattcagcaaccggccgaagnaaggggactagaaatgacgatggggtgtaccgatggtctaaacaatctcaaaggtttcaggaagtcgatgggatactagcattaggactcgacccgttgtcttttgctgtgaaagcagcacatgagttcgggggcaagttttccttctgcttggagaatcattggatcataaaatcggagagcagctacctcgtctttggtaaagaagatcaagtgccaaacatgcaattcacagatctgttaaacgaagaatcaaaaatgacctcactttatcctataaaggtcaccggtatctcaattaatggcacgatgctggatattccatcatatgtatgggatatgactgacaaaggagccggtgggatgattgtggactcaggtactaccgtaacgcatctggtggaacaggcgttcgataaagtcattgctgctttcgaaccttctttaagcatgtataacaagacaaaaggtaatttggattattgcttcaatgctccaccagctgaaatttttgatgaaagtgattattcccc

SEQ ID NO: 6220 - DNA, 636 bp, Gossypium hirsutum
  unsure (1)..(636): unsure at all n locations; Clone ID: LIB3828-017-Q1-K6-D2
caacaacaccctccgctgccttcgcttccgttgctnaaaacaaccactgccttgcctaattccactaaccttcagctctccaccgtctcctttcgcttttcttcgaggctaaaccttcgattcttctccaagagtttgcaacatggtcagaactctaaagcagtggtgaaagcccaacttaatgaggttgccatagatggatcatcaaatgcttctgctgcacctacaatcaaatcaggggcaccaacagcagaagcaaaggatgctaagacatcaagcgatgtatctcctccagctatggccacagaagagtcaattgcagaattccttagtcaagtttcaagtctagtaaagctagttgattcacgagatattgtggagttgcagcttaaacaacttgactgtgaactggtaattcggaaaaaggaggccttgccgcaaccaccatctgcagctccagttgtgatgatgcagtcaccctctcaaccaccagtaatgcctcctgtcccatctgtccctgcacttcctcctggtcaagcatctgctgccccaactccagcaccttccctagctgcttctaagtcagccaaatcatcacttccgccttttaaatgtgcaatggccggtacattctac

SEQ ID NO: 6221 - DNA, 603 bp, Gossypium hirsutum
  Clone ID: LIB3828-017-Q1-K6-D4
gtggtggcctctacccgttttaccagacgtgaggttacagcaaccggcatcatccgttacaagaatggcaagggagctgcctcatccgagttgccaccgccacctgttggttgggcttggtcactcaatcaattccgtaccttccgttggaacttgacttctaacgctgctaggcctaaccctcagggctcctacaaatatggttccattaacattacccgcaccatcaagcttgccaacactgcacaaagagtagatggcaagctccgatatgctcttaatggagcctcctatgtcgaaccaaccactccactaaaacttgcagaatactacggcgtagccgacaaggttttcaagtatgataccattcccgatgagccaccaagtgacaacactaaggtaactttggcacctattgtcctcaacatgacacacagaaactttgtggaaatcatcttcgagaatcccgagaccgccattcagtcttaccacttgtctggctactcattctttgccgtgggcatggacattgggaaatggagtcctgagaagaggatgaactacaatcttctcgacgccgtgagcagacacaccatacaggta

SEQ ID NO: 6222 - DNA, 628 bp, Gossypium hirsutum
  unsure (1)..(628): unsure at all n locations; Clone ID: LIB3828-017-Q1-K6-D5
acttaaccaagnaagaaacatggtgcaaaccggtacaaccgtgagggaatatatgttacacattcatcaagagctttccgcgatgaggaaggcaaaagcttttggctggagattgagattgtggataagcatagatatccatcagggttccaagcaccttacaatgtcacaacaacattgttagtccctggtaactaccaaggagaaagaaggataacgcaaaggcagatctttgagcgtccaggaaaatataagataaaacttccaacagtagcggtaaggactacagggaccgttattgtggaaatggtggacaggaatggactctatttctctgatgacttttcccttacattccatttgtattactatnaactactgaagtggcttctcgtcatcccaatgcttggtatgtttggtgtgcttgtcatccttcgtccgcaggacgccgtgcctctgccatcattctcccgaaacactgacttgtaacaaccgcaattcaagctacggtagatgcattttaattcttagatagatcgaactaaattagacagccaagttccaattggttttctgctactctaagaacttggccttttccaacgttttgttttgagttcttcataaa

SEQ ID NO: 6223 - DNA, 439 bp, Gossypium hirsutum
  unsure (1)..(439): unsure at all n locations; Clone ID: LIB3828-017-Q1-K6-E1
ctctgatacccngatatttagatttggatccaaataagcctgcgtctctttttatctccatctctctcttgatacgtttcgtctctatttagatatctccggaattttcaagatccgatgccctccgtgatattttttgaagacggtggacggatttgaaaatctggaaaattttaggggcgattagataatattccctgcttatcagtttatgcgttaaacaagtggggtttctttaaggaaaaaagaaaaatcaagggggttgatatgtaatattaggggaatagtgggcgagggttgagttttaaaatgttgagatgggaaaaatgcttttctgctccgttgtgaaaaaagtttgtaagagatttgcaatttagtcccttcgatgtaaagtaaagataaaattagggagaaatttgagcagatttctattattatt

SEQ ID NO: 6224 - DNA, 612 bp, Gossypium hirsutum
  Clone ID: LIB3828-017-Q1-K6-E2
gcttcatcaccaccgtatttctgtggatcaccgccgagcagggcgtcgaatccggtaatccaagatgcccgattcaacgacgagcagccggtgctacctccactaacatccccagcaacctcctcaaggggaggatgcgtgagggtgaaattcgggcagatgccagctgctgtacgaatcgagggatttgattgcctcaccagagatggccgccatcgcagcatctccgccgtggcttaaaaaaaaccaagatatgagaacaaaaatgtgagaggagagagggagatgataaaattaagtaacaacttggaatagtgtgggtagtgttggatttgtaaatagaagattaaaatgagatgatgggtgttaaattgttgggtctttgatgattttgggatgggattttccttgcataaaagaactagaggggagcaaaaacaaggttgattgcccccactcttgttagggttcctttttctttttttgctttctttaattattaattactgtatttggtgagaggagaggatggatgggagacatttttgtaatatatcgtgtttgatcaatgacactctcatccttcctccttcgcatgtaattgtaatttga

SEQ ID NO: 6225 - DNA, 611 bp, Gossypium hirsutum
  Clone ID: LIB3828-017-Q1-K6-E3
ctttgaagctgagagaaagagagactaatacagggggaaagaggattctttttcaactggttcaagcggaacaggatctccccaaatttcaacagatgaattcagggaccagatgaaggctcaacttgcccaggcttatgctcaagagttcctcgaggttgccctctctttcctctttcttaattccgttcctggggttttcgcaactttatgtgaactatcaaaatcttgaatttacaagttcttttttccatagttatctaatgtttaggttgcattgaaacccagaaaagcagccaccatcctaaggtttctattaagtggtttaaacccatcgaccccatttgacttagcatgtctcaatagttcattttcgtttgtcacaaaagcatgcttggtaggagcttgttgactaaggttatcactgattaacttgatctctagaaagtttgtttatcatagcttgtttgtatgtttatctctatgcttagatatttgtacccaattcagattctttagtttcttcatattaacataatgcaatcttggctgttgctataaaatgtcagctttctgagaataagaatgcgatgttggttatttgattacag

SEQ ID NO: 6226 - DNA, 587 bp, Gossypium hirsutum
  Clone ID: LIB3828-017-Q1-K6-E4
ggcctagcgggcatcgtcagctgcacagagctgggtatcttaagtacgccaatgacggtgtgtgacactcttgtgcttcttctgattacatgcatcgctccgaccctacgtgtgtgccaatctacactatattcattggccctaatgatgaacagcctttattgcttggttggacccactcgcatcttggcatctgggctgcagccaatcttatagctcatggcgtgtatactgggccaagacatatgagacctgtgtacaagtctatcaagttcaaggctccttccaattaccagttatgtaacctaagaccatcttaggctggatacaatgatccctcagatgatacttctagcttcccaaaggggtcatatgcaacctcacctgcctttcctcccatttgcagttctattgggtccctacatgctgcttttgtcggttcaggtgctaactgagattttgacctggcattggaagtcaccggtttggttggtgactccgattgtgtacgagggctaccgtgtgttgcaactgatgaggggattgaaactctgtgcttaaatctagcaccatcatgggtgatgcac

SEQ ID NO: 6227 - DNA, 614 bp, Gossypium hirsutum
  unsure (1)..(614): unsure at all n locations; Clone ID: LIB3828-017-Q1-K6-E5
agcaaatgnagtgactatagtggataacatgttcagtggatctaataagggggttgatatagtccagttagagggtcctttcacacaaattgatcaggttgtagttgataggaatagtgccaaggggatgaacattaaagcaacagttgcgagaggatctgttgaagggaatagcagctcctggacggttgattttaatcctgttcttttatttcctaacctgattaagcatgttcagtattcactaagctcaagcaggggcagctcatttcctagccatgccctgagaaatgtgtctgaaaatcaagttgtgattgagtctgatctcgctgtgccggcaaatgttttcgtcacggtggatcaagcttaagcaccatgacctgacttattattattattatcatcatcatcatcatcattatcagcatcatcatctgatggagagttaagatcctttgacaattgtgaatatggggtgaaagactagtattgtctttttctctgaaagttcaactcaaatcaaacatatatcggctaaaaggatagacttccagaagatacaaaattgacaagaaggaattgaatgaataaaagctttccctcacccatttact

SEQ ID NO: 6228 - DNA, 614 bp, Gossypium hirsutum
  Clone ID: LIB3828-017-Q1-K6-E6
ccccgcgtccggcctctttatctgaggctaataaacaataaagaaaaaaaaatgaaggcctcagtttcaaaatggcttcaatgaggctccttgcaataattgccattctggttcagggcttagttaatggtgattctcacgaattgcctagtttcgatccggaactagccgtagccaaagtttgggaagttgctgaaggcaaggtcggccctgatgttaaagtttttaatgtggtggatttcggtgccaagcccgatggaaccaccattagcactatcaattttattagggcattcaaagcagcttgcaatcacaatggccgtgcaatgctggtgatccctgagggaaatttcttattaggatcgatgttattgtccggaccttgcacttttcaacctccgttgatggttcaattcaacggaaaccttttgccgcaaggttcaacgtccacggccgaaaatgcagactggatcacattcataaactttaatggcttgttcataagtggaaaaggtacccatcaatggcctagcgagaaggaggcatggaaggctgtatgcgatggttgccgtcgaaaggctgctaatttgaagttaatcaagttgaacgacgtg

SEQ ID NO: 6229 - DNA, 610 bp, Gossypium hirsutum
  Clone ID: LIB3828-017-Q1-K6-F1
aaaccctaacacatagcaaataataactagaaatagagcaaaaataaaaaataaaaatcgaagaaacatctctaattcctttctctacaattgtttctcttaatacccttttagtctcaaagacccaatttttaatcgctttgtgtttcatcgtctgagatttgtttttcaggtgacattataaatccgggttttggttcgatctactggtattggctagaagcatttccagcaaaatcttgaatgttcttcaccaaaagattttgaacttttccctgtttgtgagctgaagctaagtgttaaataatgagcacattttatatgtgcggtggttgtctctttggggtcaaaatgtttactgattggggcttttacttgctgacatacgctatatgcggaatttaaccggtcaatcttacatgacctgagaaaattgaaaaaaaacacgggttttagcatctctggcatatttctgggtggaagatatcgtctcttatgcaacgtcaggggggcaccattaattcgttccctgaaactgttaacgttgacatggggtctaatcctgataacactagtatttggtcaaccaaattctttgggtaacatgctg

SEQ ID NO: 6230 - DNA, 621 bp, Gossypium hirsutum
  unsure (1)..(621): unsure at all n locations; Clone ID: LIB3828-017-Q1-K6-F2
gnaacacattattgcagtcactgtttgggtctagattgcctgctgtgattggagggtcttatacctttgtcccaacaacaatctcaattattcttgctggtcggttcagtgacagctcagatcctattgagagatttaaaaggataatgcgggcgactcaaggtgccctcattgtagcttccactcttcagattgtccttggcttcagtggcctttggcgtaatgttgcgaggtttttaagtccactttcagtcgttcctttggtatctctagttggttttgggctttacgagtttggctttcctggggttgccaaatgtgtggagattggactgcctcagctgattcttatagtatttgtctcacagtacgtgcctcatgtgataaagtctggaagaaatgtctttgatcgatttgctgtcttgttttcagtggtgattgtctggatttatgctcatttactcactgtgggtggagcttataatggtacagcaccaaaaacacaaacaagctgtagaactgatcgttctggtctaatagatgctgctccatggataagagttccttatccctttcaatggggagcgccatcatttgatgctggggaagcctttgctatga

SEQ ID NO: 6231 - DNA, 625 bp, Gossypium hirsutum
  unsure (1)..(625): unsure at all n locations; Clone ID: LIB3828-017-Q1-K6-F4
ngaaatctcaaaaccctgatataattttgttgatttccctttttgattcatcattcgaagcttgccaattgacaacagtaatctccctcgaagaatcatcaaggttttagcttttagggacatagctccccaggctcctacgcacattttaattattccaaaatcaaaggatggcctaactggtttgtctaaggatattgcttatggattcctcaatgaagatatctttcaatcgttgcattagagatggagatttgattattgtaaatgagaggcacgatactatgaaagctgttaaagtgtgcgagaatttgattcttcaaaatcatgtcggtgtatttaaacattcagattgggtcgggaagccatttggttccataactttcagcaacaaaggtggatttgtttacctattggctccggcaccggagttatggactttggttctaagtcataggactcagattctttatattgcggatattatctttgtgattatgtacttggaagtagttcctggttgtttggttcttgaatccgggaccagtagtggctccaacgggacatgtgtatacctttgatttccattaacagagggctgcctcagctagggactatgcctaac

SEQ ID NO: 6232 - DNA, 454 bp, Gossypium hirsutum
  unsure (1)..(454): unsure at all n locations; Clone ID: LIB3828-017-Q1-K6-F5
gccaggcgaatctcctgggnatagtatcagagtacattttgaggatattatcgtgaataatgtctcttcccctatcctaattgatcaaaaatttgcccatggagtaaatgcaagataaatgaagaatcgaaagttaaactaagcaacattagcttcaagaacatccgtggcacatctgcgcttccagaagctgtcaagtttatttgcagcggttcttcgccatgtcaaaatgtggaacttgcagacattgatattaagcacaccggacctgaacccgcaacatcccaatgtttgaatgtcaagcctaaaactagtggcaaattaaacccgactccatgttccagccctgtcccaaaaaccctaagtgccaccgcttaaaccataccaacagattcagtgcaattgtaattaatatatttattcatattacataaaaacagttctttttcatttt

SEQ ID NO: 6233 - DNA, 584 bp, Gossypium hirsutum
  unsure (1)..(584): unsure at all n locations; Clone ID: LIB3828-017-Q1-K6-G1
gcatcccaccanaccagcagcgtctcatcttcgccggcaaacagctcgaagaggccgtaccctggccgattataatatccagaaggaatccaccctccacctcgtcctccgtcttcgcgggggaatgcagatcttcgtgaaaaccttgaccggcaagaccatcaccttggaggtggagagttcggacaccatcgacaatgtaaaggcgaagattcaggacaaggaagggatcccgccagaccaacaacgtttgatctttgcagggaagcagcttgaggatgggaggaccttggctgattataacatccagaaggaatcgacccttcaccttgttttgaggcttcgtggaggcatgcagattttcgttaagacattgactgggaaaacaatcacattggaggtggaaagttcggatacaattgacaatgtgaaggcaaagattcaggacaaggaaggtatccccccagatcagcaaaggctcatctttgctggcaagcaattggaggatgggaggactttagctgattataacattcagaaagagtccacccttcaccttgttcttcgtctccgtggtgggcagt

SEQ ID NO: 6234 - DNA, 466 bp, Gossypium hirsutum
  Clone ID: LIB3828-017-Q1-K6-G2
ctgatggtgggggtagccacgtgcttcatgtgcctatggggctggtcttaccatgcattcgccaacacgtcatcatccataacatacatctcgataacatagtctccctcagcacaaggatgcgcgcgtatgcaaggactaggctaggaaccaccttgcgtagaggaccaggcgcgaccgagatcgcttttcccttcatcggagcagccaacgggtgtcaccaccatttatccggtgaccagtgctgcgacagtatcatgaacgctatctaaggagccaccggcatcaccatttgcaactgccacttgacatgaccacaacgacaatatgctgttgggagctacccacatactcgggcgttggaaaagattcagaaccacaagcttacacacgattaacaataaatgtgggactacgatgctctaggtccttcactgttaccagcgtgacttgaacaacagaaaca

SEQ ID NO: 6235 - DNA, 608 bp, Gossypium hirsutum
  Clone ID: LIB3828-017-Q1-K6-G3
ctctttcccataccctttcacccttgctaataaaaccaccttattaacatacctaaccatgtcgtggcaaacctacgttgatgagcacttgatgtgtgacatcgatggcactggtcatcacctttctgccgctgctatcgttggtcacgatggcagtatctgggctcagagctctaacttccccaagtgtcagcccaaggagatcactgacatcatgaaagatttcgacgaaccaggtcaccttgcccctacaggcttgcaccttggtggcgcaaagtttatggtcattcagggtgagcctggtgctgtcattcgtggaaaaaaggatctggaggggtgactattaagaaaacagcacaagcacttgtgtttgggatatatgaagaaccagtgactccggggcaatgcaacatggttgtggagaggttgggcgattatcttgcagaacagggcctgtagtcgaccacctagcttttcatattcaatgccttaattcccccatatgtttttgtttcttcttttttaagtcttggattccgagtaatttgcgttttcttccattgaaaaatatatacggtttgataagatggtttgactggcatttggac

SEQ ID NO: 6236 - DNA, 607 bp, Gossypium hirsutum
  Clone ID: LIB3828-017-Q1-K6-G4
ggtctgggtatcaacctgactgcagctgatacgtgtatactttatgatagtgattggaacccacaaatggatttgcaagccatggatagatgtcatcgcattggacaaaccaaacctgttcatgtttacagacttgcaacagcacaatctgttgagtgtcgcattttgaaaagagcttatagtaagttgaagctagaacatgtggtgattggaaaagggcagttccaccaagaacggaagcagagtaatgatcttgttgaggaagaagatctacttgcactactccgggatgaagaaactgccgaggacaagatgattcagacagatatcagtgatgaggatcttgagaggattcttgatcgcagcgaccttattgctgatactagtgataaagagaaggcccaggctagtgctgatgcagttcccctcaaaggccctggttgggaggttgtgctacctactggtactggaggcatgctctcaacgctcaacagttaaatgggcatcgactacctcttttgattttttgtggtcaagctgaaatatagctttaaagaaaagctctctttttcattgaaccatggatatatgaatgtccgagggagct

SEQ ID NO: 6237 - DNA, 615 bp, Gossypium hirsutum
  unsure (1)..(615): unsure at all n locations; Clone ID: LIB3828-017-Q1-K6-G5
cggccgcgtgggttttggttttgaagtggtcctgataaagttgttcttctggatgttccggtaattgtaatcctggtggtttcgttctaccatttcctcaaattccagaaatcccaagaattccagaaatcccacaaatcccacagatcccacaaatcccacaaattccactaatcccacagatcccacaagtcccacagatcccacaattcccaaaaatcccactaatgccaggacagtcgggatgtgagagtggagagtgttgccgtcagggttgtggtgggacttgtgctgagtgtggtcagcccaggtgcgcatcaggatgttgccaggctgaaactgtaaagagcaaagggatagaagaggttatggacagtgaacccagtccaccaaagtagagagatgataccatattaagatgaaataacgaggaagagttggttgtcgtcttattaattatacaaaataagaagtaatgatgttgcagaagggtttgctataaaatcctcttggacaaaaagagtaattatgaagaataaatagctcaaaacaatattcgatttgcaatatcctaaagttccttgaatcttgttntgtagccatatgtaattaatg

SEQ ID NO: 6238 - DNA, 628 bp, Gossypium hirsutum
  unsure (1)..(628): unsure at all n locations; Clone ID: LIB3828-017-Q1-K6-G6
gcagactccacttatgttggctgcanatgcatgggaagatctcctgtgtgaagaggctcattgaagctggggcaaatatattaatgtttgattcccttcatggaagaatttgcttacactatgcagcctattatggtcactctgactgccttcaagccatcctctctgctgctcaatctagccctgttgctgtttcatggggatatgcacggtttgtgaatataatagatggtaggggagccactcccttgcacttagcagcacgccggaagcagcctgaatgcgtacatatcctgttatacaatggtgctcttgtttgtgcatcaactggtcgatatggtttcccaggaagcactcctcttcatttggctgctagagggggctctcttgattgcattcgtatgttgttggcttggggtgcagatcgtcttcaaagagatgcatctgggagaatatcatttgtcgttgcgctaaaacacaaacatggagcttgtgcagctcttctaaatccttcatcagcagaacctcttgtctggccagcaactttaaagttcattaccgagcttaatgaagaggcaaaatcactattagaacaggccttaatggaggcaaaccgggaaagggaaaa

SEQ ID NO: 6239 - DNA, 543 bp, Gossypium hirsutum
  unsure (1)..(543): unsure at all n locations; Clone ID: LIB3828-017-Q1-K6-H1
gcgaaatcgttgctgttggcgaagtaanagcagccaatgccatatcttttataccttcaaggagggcctggttttgagtgccctagaccaactgaagccagtggatggatacttaaagcatgcgaagaatttcgggttgtattgatggatcagcgaggaacaggtttatcaacccctttgactccatcatctatgcagcaaataaagtctgccccaaaactggctgattacttgacacattttcgagctgacagtatcgtgaacgatgctgaattcatccgtgttcgtcttgttcccgaagctaggccttggagtgttctgggtcagagttatggtggtttttgtggtgttacttatctgagttttgcaccccaaggtttgaaacaagtgcttttaacaggagggatacctccaattggagatggatgtactgcagattctgtttatagagcttgctntgagcagattattcatcagaatgaaaaatactataagaggttccctcaagatattgaaaattgtcgagatgttgttacctttttg

SEQ ID NO: 6240 - DNA, 537 bp, Gossypium hirsutum
  Clone ID: LIB3828-017-Q1-K6-H3
caggctcggtaccgaagcaagatttacccgtgaacgtggaagctcggaccaaagttggagtaggtgtggcagggttgaagatcggcatggtcggggtgaccgttaagtgcgatggaatgtccaagaaacaacttgacggtggtgacatgcccaaatgcgtcatcaacatgttaaaatggtaacaatgcgtcaaacttgtcgttataatatgttactgtgttaggcttcgtttgcaggctggatgagaatctcttccccttgggtttattctgtcattttgtcttttaagtttcctttgattcgccaaggaaaaaaaaagatttcttttattcaattatttattctcaatgatgagcttcaatgtgtgatggaaatcgttgctttggctgcaggctcaacattcattgacacaaatcacatgcgtcaaagttttcaatcgtaagaaggatttgttcatttgatcaatcggggtgtaattcatgaatattttgtatcccacattggattgtattgtagcaattagttttgtctttcctt

SEQ ID NO: 6241 - DNA, 576 bp, Gossypium hirsutum
  Clone ID: LIB3828-017-Q1-K6-H4
gggttctacaggatgttggtagccaggataaggacaaaataaatgtatggagatcaagcacacaagataattacctgcacttaaagattgaaattgatattcgtggggggagttctgtggctgatgcatcagtctcaaccaaaaatttctctagtgagaagcggaataaggatgaaatcaaggagagcttgaactttacgatgtgtaaaaagcttgtgcagatgatgcaaggtaatgtctggatatcaacaaactctgtgggctttgcacagagtatgacacttcttctcaggtttcaaatccagtcatatgtccaaagaaccatgttcgcagctggaaactctgagcgatcaaattcctactccaggttccgaggtctacgagttctactagctgatgacgatgatataaacaggactgtgaccaagaagctgctagaaaagctgggttgtgaagtgacagctgtttcttctggctttgaatgcctcagtgcagtaagtcatgctgaaaattctttcaggattgttgttttggatcttcatatgccccgaaatggacggattcgaagtggcaatg

SEQ ID NO: 6242 - DNA, 600 bp, Gossypium hirsutum
  Clone ID: LIB3828-017-Q1-K6-H6
cggccgcgtgggcttcattccttctgtcattttgggttttactcctttttttgtgaaatcagggaaatggatcttgatctttctccaaagctggcaaagaaagtgtacggtgacgatggtggaagctactacgcatggtgccccaatgaactccctatgttgcgtcaaggcaacattggtgcagccaagttggcccttgagaagaatggctttgccctccctcgttactctgattcttccaaggttgcttacgtccttcaaggggctggtgttgctgggattattctccctgaatcagaggagaaagtgattgcaatcaagaagggtgatgcaattgctcttccatttggtgtcatcacctggtggtccaacaaggaggacactgaattggtggtccttttcatgggggatacctcaaaaggccacaaaccaggccagttcactgatttcttcttgacaggcgccaacggcatctttactggcttcacaaccgattttgtgaagagggcatgggatgtggatgatgacactgccacggccctaattggtaaccaaaaggcaaaggcattgtcaagcttgatgccaatttcaagatgcctg

SEQ ID NO: 6243 - DNA, 624 bp, Gossypium hirsutum
  Clone ID: LIB3828-018-Q1-K6-A1
gtcttattcaagccttttttgccctccatgataaaaatacaaatggtgtaggggatgcagaaaacataattggaaagggtgttgatcttgctttagaacaatggtggcaattgcctgaaatgtcggtgcatgctagggttcctcttctgcagcagtttcagcaattagttgaagttcaagaatctgccggaattcttgtggacattgccaatgggagcaaactttctggcaattctgtggttggtgtgcatggaaatctttatgctgatctcaaggacattcttgagacttggagactaagaactccaaatgattgggataatatgtctgtctggtatgatttacttcagtggaggaatgaaatgtataatgctgttatagatgcattcaaagagtttagcacgacaaacccacaactgcatcatcttggtttccgcgataaggcatggaatgttaataagcttgctcgtattgctcgtaagcaaggcctttatgacgtatgtgtaacaatacttgaaaagatgtatggccattcaaccatggaagtccaggaggcctttgttaaaattacagaacaggcaaaggcataattttgaaatgaagggagaacttactagtggcctt

SEQ ID NO: 6244 - DNA, 482 bp, Gossypium hirsutum
  Clone ID: LIB3828-018-Q1-K6-A2
cggccgcgtggggccgtagcttccacttgtgacggtggttgaagccgcaggaacccgggtttttaactctcttaaaacaaccttgaaggccatgccttcttagccccccaagaaaaaaaacgacagaaaagcccctcccccttttggattcgacttcgacgacggcgtagggactccgccgacatgaccccgggtttcaggtctttggaggtgcaggcaattggacggggcgcctgtctcaggtgttgaaagagctgacaccaagtggcgagcagtgcggtgctagagaggggaaccctagggttcctccgaaaaatgttaaacattttaggctatagtttgggtccttattttgggcttatgcgtaggcttacaaaattaggtagtgaattttgaatccaggcttgtaactttggtattgggcctgtagcctgttttgtaatttggaccttgtaataatggactgttgttatttatttttt

SEQ ID NO: 6245 - DNA, 605 bp, Gossypium hirsutum
  unsure (1)..(605): unsure at all n locations; Clone ID: LIB3828-018-Q1-K6-A3
ccccgcgtccgcagnatttcgcagctatgactgagtattgggtgagtncagggaaacaaatggtgtgatttctgcaaaattttcatatcgaataacccatcgagtattcgaaaccatgagcttggtcaacggcacaaagagaatgttgctaagagacttactactatgcgaaaagagagtgcagccaaagagaaggaacagaaagacgctgctcgtgctcttgaacagatcgaagctaaagctaagcggagctatcagaaggacgttgctagttttgaggcgagagattctagtgaccaagcattagacagtcaagaagattgggactatgacagtagctcgggttattactacaatcaaaacaatgggttatactttgatccaaagtcaggattttactattctgatgctatagaaggaatgcaacaggcaggtgggtgacacaggaagaggcatactccaaggttcaagcttcatcaaatactaaatcaagagatcctattttgaaaaagccatttccaacttcagagacgggaccagttgcagatagcaaaagtgtcgctaaaagtcaaaacaagaccgcaccagggcctgtcatttccgct

SEQ ID NO: 6246 - DNA, 592 bp, Gossypium hirsutum
  unsure (1)..(592): unsure at all n locations; Clone ID: LIB3828-018-Q1-K6-A4
cccaacacaatccttcacgcattgtctatttgtgccttctaagaaacttcaaattcgaatattttctttgttttctcggcctaattgtntcgaaaactccatggaagacgatttcgagttcccaacagccagcaacatggaggaagacgagatggacattccagaagatgacccagttagcccaatcctaaaagttggtgaagaaaaagagattgggaaaaatgggttgaagaagaaactggttaaggaaggtgaaggttgggagaatcctagcagtggtgatgaagttgaagtgcattatactggaactttgcttgatggaaccaaatttgattcaagccgtgatagagggactccattcaagttcaagcttggccaaggacaagttatcaagggctgggatgagggtatcaagacaatgaagaaaggtgaaaatgcaattttcaccatacctgctgagttggcgtatgggggatccgggtcacctccaactattcctcctaatgcaacccttcaattcgatgtggagttgttttcttggacgagcgttaaggacatatgcaaaggaggaggaatcttcaagaaaatactt

SEQ ID NO: 6247 - DNA, 341 bp, Gossypium hirsutum
  Clone ID: LIB3828-018-Q1-K6-A6
cagctgaactgtaaagacaaaggatagaagagttatggacagtgaacccagtccaccaaagtgggagatgataccatattaagatgaaataatgaggaagagttggttgtcgtcgtattaattatacaaaataagaagtaatgatgttgcagaagggcttgctataaaatcctgttggataaaaagagtaattatgaagaataaatagctcaaaacaatatttgatttacaatatcctaaagttccttgaatcttgttttgtagccatatgtaattaatgcatgtacatgctaatatatatgattttctttgctatataaatttctgctaaaaccttcaac

SEQ ID NO: 6248 - DNA, 319 bp, Gossypium hirsutum
  Clone ID: LIB3828-018-Q1-K6-B1
gttttcccttatgtaagattcaaaaccaaagaccagtgaaagcatttggtgcatattcaggtgaggaattctctcttcgaccatgttaaactcccttaaagtctgattttggaactagctgttgtttttggaaggtcacaggcataggattcacaattctttttctacttttgtgtctttaacaagggcaaaattatatatatttgatgtaaatgataatttaatgttgatattgttggcggggctttcctttttttttttttgactgtaacactagtctttttgcttagcaatggagaatgagaagtcgtttggtccc

SEQ ID NO: 6249 - DNA, 636 bp, Gossypium hirsutum
  unsure (1)..(636): unsure at all n locations; Clone ID: LIB3828-018-Q1-K6-B2
gcctgcccatggccatggacatcaacagacacaacaaccacatggacagagttcatctatgggtgcctgtgttgaggttgggaaatttgggcttgaggaagaggttgagaggctcaagagagacaaaaatgtccttatgcaggaacttgttaggttaaggcagcagcaacagactactgataaccagctgcagaacatggtgcaacgtcttcaggggatggagcagcggcagcagcagatgatgtcattcctggccaaggctgtgcagaaccccagcttttttgctcaatttgtgcatcagcaaaatgagagcaataggcgcataagtgaaaccaacaagaaaaggaggctaaagcaggatggcatcattggtgaagaccattcaactgcctctgatgggcagattgttaaatatcaacctttgatgaatgacgcaaaagcaatgctcatgcagatgatgaaaggggatgcttcacccagacgagactcctttaacaacagtaatgaacataccctgataggtgatggttcattgtcatctagtggattggatggtgggaacagttcaagccatgtatcangggtgactcttcaagaagtctcaccaaacttcagtatctcggggcattgcccctc

SEQ ID NO: 6250 - DNA, 120 bp, Gossypium hirsutum
  Clone ID: LIB3828-018-Q1-K6-B3
gaaaacccttagcggcgactactcggacttcataacacccgcagctgtgaactatggagggagtagaaactgtagtagcgacagccggcgtgcccaagaagagacattcaagaagtctag

SEQ ID NO: 6251 - DNA, 585 bp, Gossypium hirsutum
  unsure (1)..(585): unsure at all n locations; Clone ID: LIB3828-018-Q1-K6-B4
gtcgaacatggnattaacggtggtagaaggtgtcaccagactatgagaggaatcctcgtcctaactatttggaagttaaagaaaatagatcagtaatatatggtgatggaattcagtcagctcgatcagatggcaaatttggtggttctaagttgcagccatcaccgtcagaagcatctgagcggcccaagttgaagttacttcctcgcaccaagccattggataatctagaaccacctgttgttgatgctaagcaggagcagcagcagttgagcgaatctgttcttactcatgctggaattggtaatgattcatatggatatgtgaatactgtgaaacctggttcagctggcagtgagaatgggaaccaggcagtggagcgtcctaagctgaatttaaagcctcgatcacagcctgttgaacagttggagggtaacattgagaaagaaagaaatgtgttgttcggcggtgctcgcccacgagaactggttctgaaggagagagggattgatgacagcatccatgagccggaccaacatcctgatagggtcgtcaagcataatgttccgaggagtgaaaaagtag

SEQ ID NO: 6252 - DNA, 588 bp, Gossypium hirsutum
  Clone ID: LIB3828-018-Q1-K6-B5
gaaaagaaagaataaagagtgagatggggctcaaaaacagagaagaagaagataattgttcagtgaatgaagctttgttgtttgccaccatctccatcattggtctgcaagtagatgtacacttgaaagatggctctgtttactctggaatcttccacactgcttctgttgagaaggaatatgtgttgtagagacgcttgtaatccttgctggtgatcttgttcaagtttttgcgaagggagtcccacttcctcttgatggctttgctggaaatttagcctgcggtaatggagaacctgctcctgaaattcccccttcttctgccaattcgctgaatgggaccaagaagttcaataagtctaccatggatgaaagaataagtaatacgaaaagaaattcagctcccaacgagaatggatttgttgatggttttatatccatgggtgctggaaaggaagatgaaggtcaaaagttgctagagaaacctatgggaaatggagaaggagttgaatatcacaaaagagaggagacaaacatcgagcagagagaagatgtttctggtgccactgttgctaggagacaggttgg

SEQ ID NO: 6253 - DNA, 563 bp, Gossypium hirsutum
  unsure (1)..(563): unsure at all n locations; Clone ID: LIB3828-018-Q1-K6-C1
agcatcttcgaaatcccganaccgccattcagtcttaccacttgtctggctactcattctttgccgtgggcatggacattgggaaatggagccctgagaagaggatgaactacaatcttctcgacgccgtgagcagacacaccatacaggtattccccaactcctggtcagcaatcctattgacattcgacaactgcgggatgtggaacctgaggtcggagatatgggacaggcattaccttgggcaacagctttatgctagtgttatttcccctaaccgatccctcaaggatgagtacaacttgccggaaggtgtattgacttgcggcatcgtgcaaggcatgccaaggcctccacctttcagcagttaatttaaataagcttataaatctgtatccaattctggtgtatggggagagagagggtgagaaagcttgagttccaaatgtatttaatgaaataaaatattttggaccatttgtttgtattcaagtcatccgcaagctttcaacaatttcattgctgccatgttttaattctaaaaaaaaaaaaaaaaggcggcc

SEQ ID NO: 6254 - DNA, 598 bp, Gossypium hirsutum
  unsure (1)..(598): unsure at all n locations; Clone ID: LIB3828-018-Q1-K6-C2
cggccgcgtgggatttttcataacccatagcaaaaacatcccttcttttctctcttgncctgaaaaccatacatacaacgagcgaaacaacaaaaaaaaatggagtgaaccactcttcaatcttagctgttctatctctgactttttctgtttctcataaggtagcatttttggtggaaaccagaaaggcaaaaacaatgtctagttatcaaggtgtcatcgtttctgatccttggcttcaaagccagttcactcaagttgagctccgtacccttaaatccaagtttatcaacgtgaggactcaacatggtcgtgttactctcggtgatttgccgccagttttctccaagttgaaggcttttactgaaatgttcaatgaggatgagattaagactgttttgggagaatccaatagtgatatgggtgaagaaattgatttcgagggctttcttcgggcttatttaaatttgcaaactcatgcaatcgaaaaatcgggtggaacaaaatcttcgtttctcaaggcaaccacaaccacttttcatcatgctattaatgaatccgagaaggcttcttatgttgctcatattaataactacct

SEQ ID NO: 6255 - DNA, 632 bp, Gossypium hirsutum
  unsure (1)..(632): unsure at all n locations; Clone ID: LIB3828-018-Q1-K6-C3
catcaagagaaactgggacacccttcttcttaactccactaacatgatgattcttactgctgcaactatggctggtgttacagcaactagccatggtgtttctgttttgggcttgaagttgggttccattctcttgttctcaggagccactgcaacgttggtgattatgaacaagatccaaccttcaaagcttttggaagagcaacgtaaggcaacgaaattgtttaaacagcttgggagccaagtacaaaccctaatcactgttggttccccaagcaaagaagatgtgaaaggtgttatggcgaaaatcttggtcattgataaagcttaccctcttgccctgctaggtggtgcaatgcttgaaaaattcccggaaagtttagagcatgctgtttggtggcctagaaacgagtctcagaaagaaaatatcaatagaaaggtggagatgggcaatgggtggactaaggagctcgaatcggaaatgagggaaatcgttgaggtgattaagagaaaagacagtcaagattatgagagattaggcaacaaagcattgaagataaacaaagttttagctacatcagggacattactaactggaattgcagctntggcatctactttcnatggggtct

SEQ ID NO: 6256 - DNA, 409 bp, Gossypium hirsutum
  unsure (1)..(409): unsure at all n locations; Clone ID: LIB3828-018-Q1-K6-C4
gnaccgaanaaccaaacctgaagaaaaactgaggagcaggcggcatttgctcgataacgtaaaggggctggtaatagtaaatcattctcttcatggtttcctcctcgttaccatgattgccactattttcctctgcttctgcagatccttctttcttcccttcttctttgttttcaccttcttcaggggactcttcttcttttttctctgcttctccttcatgtttggcttcttcggtctgtttctcttggccctgtttcttttcttgttgaggctctagctcaggctgaggctcaggctctggatgtagcacgatccttgcctggtttgctcgccgtctgatatacatatgccactagctcggttgcatccttggtgcccgtcactgtaactcttcctgtgctatgct

SEQ ID NO: 6257 - DNA, 612 bp, Gossypium hirsutum
  Clone ID: LIB3828-018-Q1-K6-C5
cttccatcggagtttggcatggatgcagaccgtatccacgcagtggagccagctgcgagcatattcaggatcaaggctaaaattcgaagagcaattgaggctgaagggataccatatacgtatatctcatccaatgcctttgcagggcatttcttgccaaatttaatgcaggaaaatgccactgttcctcctagggataaggtagtcatacttggagatggaaatccaaaagtatttttgtccaggaagatgacatagcaacttacaccattaaagcggctgaagatccaagaaccttgaacaagattctttatataagacccccttccaatgttttgtctttcaatgaagtagtctccctatgggagaggaaaattggcaagacccttgaaaagagctatgttcctgaggaacagcttcttaacatcattcaagagtcacctgttccctggaatttctttttgtcattcgcccatcctatgtttgtgaagggagaggcttcgaatttcggtatagaagcttggttcggtgtggaggcatctgagctttatcctgaactgaaaatactagtgttgatgaatacctgcatcagtttgtgtaaaatacaccaac

SEQ ID NO: 6258 - DNA, 629 bp, Gossypium hirsutum
  unsure (1)..(629): unsure at all n locations; Clone ID: LIB3828-018-Q1-K6-C6
aaatatgggcaccttntcatcaatatgtggtgcattagtgattattttttacaagggccccaaagttttttcattatcatcatctgctatacaccaaaggcctctagggttaatgtcatctgaatcaaattggatcattggtggcctcctactagctgttgcctttgttcttgtttcgttggggtatattatccagtctcaaataatgaagatttaccctgaagaggttactgtaaatttcttttacaacttgttcgggaccattatctctctaccaatatgcttccttgctgaaccaaacttaagttcctggagactaagttctgatttagctgctgttgctgtcttatactcgggactttttgggttctcctttttatgcgttgtacacatatggggcatacacttgaaggggcctgtatttgttgcaagtttcaagccaacttcaattgccattgcagttgttatgagtgccatattccttggcgaagcaatatttcttggaagtgtgattggaagcctaattttatgtacgggactgtattgcgtattatggggaaaagcaaaagaagaagaagaaacgattgatgatgattgtggcctaagcacccncattaatggaagggtcc

SEQ ID NO: 6259 - DNA, 426 bp, Gossypium hirsutum
  unsure (1)..(426): unsure at all n locations; Clone ID: LIB3828-018-Q1-K6-D1
ggagcgaactcataatccttccatcaccagaaaaccagntgaggagtattggattactatnaccgcggataagtcggaagaagaccgatccaaggagtcatgcacattgttcgagcctatcttgaatgactctgtatataaaaattttcgatttgtccatgttcaatctggatgctatttatgcttctggccattggctaaatcggaactcagtcgtggcgtgttggcaaacaacaaaaatgttgcggataatggcaatgatatcttcaaagttattgactgggagtcgttggtgattctgcctcggtacgttgctttcaaaggaaacaatgatatgttccttcgtcttacccaggtcgatggtcacccatatttaaaattctccagtgcggatgttgatgctggatctgtgccaatggaggttgt

SEQ ID NO: 6260 - DNA, 517 bp, Gossypium hirsutum
  Clone ID: LIB3828-018-Q1-K6-D2
gtcgtctgttatcgcaaaggctgagggggcagcttgttgaagctgttcgaatgcttggaggtgggtctttagaagaagtaagtcaagccggagagcttctagctactttggagcatcaccttcctccatttttggttcgtgctcccagtgttggttagacctcttggattttcgcatgcccttgaccctatattatcccatgtgccatacgtaataatatcattttagcagttagtacgtcacaaagcttctaagtttgtcaaatttccttccatcgtgtgatttgcagcgcttcttctatggcacgtatatcatatagtaggtatagatatgttgttcatctataatgcaagacagagagcaactattttcgcaaaaagggttgatataaatacatactatgatgggattgtattattatcgttatatatgtaatcctaaagtactgtaatgtactgatatctccacctccacaagagtttttgtgaaccagaaataaaatcctcttttcaccagt

SEQ ID NO: 6261 - DNA, 628 bp, Gossypium hirsutum
  unsure (1)..(628): unsure at all n locations; Clone ID: LIB3828-018-Q1-K6-D3
tgctgttattggtatctgttcagtgttcttggtggcagcagtggtggcaacagtggtgggtgtcacacatttaaaaaacaacggtgattcgaaagcggtgaaatatcgagttcgacaaaagcagtgcagacggtttgtcaacccacacagttcaaagaggtatgcatanaagagcctggagtcatctaattccaccgaccctaaagagctgataaggacgagtttccaagcagcgatagaggaaataaagaaagtgttggcgaattcagcgacgatacaagacttgaataaagatgacaacaacaaagcagcccttaaggtttgtaaagaagtgttggatttatcaatagctgacctgcaactttcatttgataagctggggggatacgagatgagtaagatcggtgactacatactgaacctgagggtgtggttaagcggtgccttaactaccttacaaacatgtgtagactcatatgcggaagtaaataatgaacaagcggagaagatgaattcaattttgaagacttcaatggagcttacccaaaattctttaaccatggtgactaagttatccaccatcttgaatggccttaaaattccaggcctcaatatcgacacgactggg

SEQ ID NO: 6262 - DNA, 612 bp, Gossypium hirsutum
  unsure (1)..(612): unsure at all n locations; Clone ID: LIB3828-018-Q1-K6-D4
ggnaactgcgtttgctatcaggaagttggctttgggtaaggctaagacgtatttggaggatgttatggctcacaaacaggccatacccttcagacgcttctgtggtggtgttggacgtacagctcaggcaaagaacaggcattctaatggacaaggtcgctggcctgtaaaatctgccaaattcattctagatttgctgaataatgctgagagcaatgctgaggttaagggtttggatgtggatgcactctatatttctcacatccaagttaaccaggctcagaaacaaaggcgtcgtacataccgtgcccatggaagaatcaatccttacatgtcttctccttgccacatcgagttaattttgtcggagaaggaagagcccgtcaagaaagagcctgagactcagttggcagctagcaagtcgaagaagtcccaagtatctgtgtagacggtcagcaaaagataaagattgaaattttagtcgatgaaggaagttgtatctgggaattaatttctgtcttactctttgagtaagtagttttgatgtttattcaaagtagaaagagttgttatgccttttgaaaccttgtttaatcaaatgttattgatctg

SEQ ID NO: 6263 - DNA, 502 bp, Gossypium hirsutum
  unsure (1)..(502): unsure at all n locations; Clone ID: LIB3828-018-Q1-K6-D5
gccccttctatggcatgctttgagataccttaataagtcgcaattcttcccaagagaaaaaacgtgtttttgtagcagggtgtatataaaatcatgcttgggtatgggattttcttgtattctacaaagcagttgacaaaggttgtagatcctttttcatttttgcctgtaaagttggtcacgatcacaagccttccagcagggttggtgaattcagatttctgtgcagtaaaaagaaaaacactgattttaacttagggtaaaaacaaaattaccatattgaaatgaatggaagaaaatcatattcctttgagtgtatcagtatctcagcatccccgggggggggggtgggngggaggattnantcttatacattaattaatgctccaataaaatgattggtcagtaccttattcagatttaacaaattgtatcatgttcatctatgttatcttatcataattggtgttaaatgtttatttggagcaatggtggttattta

SEQ ID NO: 6264 - DNA, 632 bp, Gossypium hirsutum
  Clone ID: LIB3828-018-Q1-K6-D6
cggccgcgtgggtttctcctcactcagctttgcctatgcttcagctccagctccagctccatcgtccaatcaacaaatgagattcgaggtcttaggtcatgtttattgcgacacttgtcgtgttgaatttgagacatctatcagcgaacctattcccggtgcaacggtgaggttagaatgtaggaatcgtaccgacgaaaagatcacctatcaaagtccagaaataacggctggtgataaaggaaactataaaatccaagtgacgggcgattatgaagaatcagattgtgatgtaatgctagtgaagagccccagagcagattgcaatgatcccaccgaagagtggaggaaagcaagggtggttctcaccacattggatggggtttcgggtgaaattcgctttgccaacaaccttgggtttaaaaaaaaggaagctcttcccgaatgtaccaaagttttaacagaaatgggttactttgaacttcaaaaagaacttggaagcgaagctgtttgaggaaatatgttgggtaagttggactttttccatgaattggataattatgattatccttatgtatattcataatttattcaattgtctactaataaactcatgaaagaaaaaaacccta

SEQ ID NO: 6265 - DNA, 468 bp, Gossypium hirsutum
  Clone ID: LIB3828-018-Q1-K6-E1
tttcaatccattccgtcgttggtgacaccgccgcaacgtcacctacagcatcaacagaatcaaacgctgcaaaagctgaggcaccaggtcatgagggacacgatagttccaatgaatcatggaccgactgggccaaggacaagatcagcggtattgggggcatgttcgcttcttcaccatcatcctcaccagcatcggaaccagcaccaacaccagcaagctcatcagcggaaacacccgaagtcaaggtttgagctgcacctgtagccacaagcttggtttaatatgggatatcaaagcatggttctcatcctataatatagagattgatgggaaaagcactatcactatcaccatcactactttatttttttttttattttttggatcaaacctttcatgtggtttgaacccattgttaataaaatgttataataataacaagaatgcaaatattattatcttttc

SEQ ID NO: 6266 - DNA, 222 bp, Gossypium hirsutum
  unsure (1)..(222): unsure at all n locations; Clone ID: LIB3828-018-Q1-K6-E2
gnaaagtatgattttgatggatgtcatgaatgttgaaggaatgacggttgatgtaatacatacaactttaaaggtatggcaatctggttcatcgaggttgttggtgttaatgagtgcggtcctgaaattttcctctgctgaaaaggaaatgttcagtcatttcaaaccagcatagttgaaccttgttttcaaaattaacgttatcttcgaatgtattttatt

SEQ ID NO: 6267 - DNA, 551 bp, Gossypium hirsutum
  Clone ID: LIB3828-018-Q1-K6-E3
gtgaattgtgtagaccttcaaacgacgtcgaagtaagagcaggcgatccattagagaagttcaaaaaacttaattaatggcgaacagagttcaaatccccacgagcaactcagctcttattgcaatgattgccgacgaggacacggtggttggttttctaatggctggtgtgggtaatgttgacttgcgaagaaagacaaaagatcttattgtagattcaaaaaccacagttaaacaaattgaagataagtttaaggagttcactacaagggaggatattgctgccgttctgattagccaatatgttgcaaatatgataaggtttctggtggatagctacaacaagcctgttccagcgatcttggagattccatctaaggatcatccatatgatccggcacatgattcaactctttcacgggttaaatacctcttttctgcagaatcactggcatctgggaggcgttaaatgccattagacacttagtctcattgagttactatttccttcatgattcgactattatggggagactaaaattattcttttc

SEQ ID NO: 6268 - DNA, 393 bp, Gossypium hirsutum
  unsure (1)..(393): unsure at all n locations; Clone ID: LIB3828-018-Q1-K6-E4
gnaaaaccccgcctctgaaaaagcaggcgcgggagtaaggcggttacccctttcgcgttttctgaagggtctcctcgccggaaggtttcacccgccaccggtggtggaaacggcggggagaagagagggagagggagagggagagggcagttcaaggctgtgttgagttctatcccggaatagagatgagggtggtataaatgtaaatatgtaaaaatgggagggacttgttagtgaaatcattggtagaatggatccccattgtggatgtgattagcttaaaaagtcgtgaactctagtgtttcattacgttgcccgtttgcccaagtgagggtcgtgttacaattttaccccaatttgggtcaaaaacgaattttacacaagattcaatct

SEQ ID NO: 6269 - DNA, 631 bp, Gossypium hirsutum
  Clone ID: LIB3828-018-Q1-K6-E5
tggccattttttctgttaggctaagcagagaaggcaagaaatttctcaagtcgagatgatgggaaaatttgctggtgcagttggaaactacaatgcccatattgttgcatatcctactgttaattggcctcaaatcgcagaacagtttgtgacttctcttggattaaagtttaacccctatgttactcagattgagacccacgattatatggcaaaactttattatgcaattatccggtttaataatatattgattgactttgacagagatatatggggctacatatctgtaggatactttaagcagataaccaaggcaggtgagattggttcatcaacaatgcctcataaagtaaaccctattgattttgaaaacagtgaaggtaatcttggtaaggctaatgaagacctaacttacctgagcatgaagttgcctatttcccgttggcagcgagatttaactgattcgacagtcttgaggaacatggggggaggacttggtcattcccttcttgcttacaaaagtgcgctgcaaggaataggaaagctccaggtcaatgaagctcggttaagcgaagacttgaaccaggcatgggaggtacttgcggagccaattcagactgtcatgcgt

SEQ ID NO: 6270 - DNA, 613 bp, Gossypium hirsutum
  Clone ID: LIB3828-018-Q1-K6-E6
gctagccttactccttgggcaatttggacagggcttggactgctgaagaaacaggcatggtgatctacttaataagtatctctacttgtccggaagggtcgacatgaggcaaattgagaagacaatccagtatttgattggatcaggaatggatccacgtactgagaataatccttatctgggattcatctacacatcattccaagaaagggcaactttcatctcccatgggaatacagcccggctcgcaaaggagcatggtgacatcaagttggctcagatatgcggtaacattgcctctgatgaaaagcgccacgagactgcatatactaaaattgttgaaaagctctttgagatcgatcccgacggaacagtcctggcttttgctgacatgatgaggaagaaaatctccatgccagcacacttgatgtatgatggccaagatgacaatctttttgataatttctcagctgttgcacagagacttggtgtttacactgccagagactatgctgatatactagagttcctggtgaacaaatggaaggtgacggagttaactggactttcagccgatgggcgtaaagctcaggattatgtgtgtggacttccg

SEQ ID NO: 6271 - DNA, 551 bp, Gossypium hirsutum
  unsure (1)..(551): unsure at all n locations; Clone ID: LIB3828-018-Q1-K6-F1
cttgacgaggcataatgtggcaagtcatctccanaaatatcgaatgcagaggagacacattttacctaaggatgatgatcgaagatggctacaaagacctcaaacgcaaagaatttgtaattatccgcataaaccgatcatggccttccctccatataaccatgtcccggttggtccagtctatcccatgtggcgagcaccttctcatccacccaccatccagatgtggggcacccaaggttaccccccatggcaaccaaccgaaagttggcattggaagccctatcccggggtgcaggctgatgcatggggttgcccagttatgccgccacctcaaggatatttctctacattccctcaaaatgcgtccgggtttcaaccgtgcaacgtggacaaaagaaatggcatgccgcaaaccttagttgaacatcatccggaagaggaggtgattgacaagatggtgaaagaggcaataaacaaaccttggctaccattgccattaggtctaaagcctactttcactgatagtgttcttgctgaactttatagac

SEQ ID NO: 6272 - DNA, 565 bp, Gossypium hirsutum
  unsure (1)..(565): unsure at all n locations; Clone ID: LIB3828-018-Q1-K6-F2
ggtgaaaactggngaaancaattatcaaattatcacaatcggaggcgaatctgagtttgttcaactgcattggagcaaatgtttgaataaaaatatccaaccatttaccaccctgcagtatgtgaaaattccaaacaaatttaaactagcataatcttattgtgaagattgttcaaattatctcttggggagtctcaatgcttaagatgaagctggtgttttggtataggagcggacaccgaaggccaatcccaagattagcaggggaacaaggaattggagaagctttatgacaaattctgaggtcttgtcttgttcgtagtgaggctgctttggaggagtgtacttcctcttagaggggatggtcgatgtatcgatgtcacccacataaaactcatccatcattgctcgagcactgctactatgaccaacatcttcaaaatcatcagttgcatccttccctgtggaagacagcaagacatcatcaccaccagggtggtcctccaagaatttagtcacatcaaataccttgccctcaatgacaagccaacagtctttagcatgg

SEQ ID NO: 6273 - DNA, 546 bp, Gossypium hirsutum
  unsure (1)..(546): unsure at all n locations; Clone ID: LIB3828-018-Q1-K6-F3
tgatgaggtttcttactttgttgacctcaaaaaaggagagttaccaaaggtaaatatgaagggggaaagcctgatgctatattttcgttcaaggatgatgattttatgaaggttgccactggnaaagatgaatccacagattgcttttatgaggggtgcgatgaagattaaggggagcttgagcgcagctcagaaattcactcctgacattttcccaaagcctgcaaagatgtgagcagagatgctaatgtattatgtgttagttctttcgtatgttgccccaagtgggaaaattataaatggactgtcaacctctttctttgatagtacacttgacttttgtcaaaaaaaaaaaaaaaaaaaaaaaaaaaaaaaaaaaaaaaaaaaaaaaaaaaaaaaaaaaaaaaaaaaaaaaaaaaaaaaaaaaaaaaaaaaaaaaaaaaaaaaaaaaaaaaaaaaaaaaaaanaaggggcgggccgttttaaaaaaacccaattttacttccccttgtttggcaacaaataatcttttttttggggccccca

SEQ ID NO: 6274 - DNA, 492 bp, Gossypium hirsutum
  Clone ID: LIB3828-018-Q1-K6-F4
gtaacttttctggcatggttatgcctatgatgtggcccgagattcaactttcagcaacctgtttgggggagagaagaagtctgcaataattacttaactccggagaacttgcttttaagctatgattcctctgcaaactcagtgtcgttgcactcaaatcaattgaaaatggacctatgaagtccgaaagaagctcaaaatggttagatttatccaaaaaaaaaaaaagttctaatgatagctagtattgtatatatattatatatatatcagaaattagcagggaagtagaggagaggcctcaccatatatatatatcttttggtttccatgtgttctatttagccgacttcagatggaaaccttcgatttctaaggactggagacatgaaatctcagtatgctgttattatatatatatgttatatactaactcggagtcattcaatcaaaatactcggtttgagggtgattgattcatattgtaaaatc

SEQ ID NO: 6275 - DNA, 630 bp, Gossypium hirsutum
  unsure (1)..(630): unsure at all n locations; Clone ID: LIB3828-018-Q1-K6-F5
gccggagtgaaagacagnacacagagagagancagagagagagagtcgggaggaatagcgcgtggtcgactcgccgaggaacgtaaggcatggaggaagaaccatccccatggttttgttgcgaaaccagagacgttgcctgatggaacggtcaatttgatggtgtggcattgcacgatccctggtaaagcaggaactgattgggagggtggctacttcccgctcacgctccatttcagtgaagattatcccagcaagcctccaaagtgtaaatttccccagggctttttccacccaaatgtttatccatctggtactgtttgcctttcaatcctaaatgaggatagtggttggagaccagccataactgtgaagcagattcttattggaatccaagatcttctggatgctccaaaccctgctgatcctgctcaaactgaagggtatcacctcttcatccaggatgctaatgaatataagagaagggttcgccagcaagccaagcaatacccacctctggtctagtctgttattaaaaaatagtaactaagactttccatgaaattgctggtaaatgccggctgggttggctgcttgcctcatgtataatgctagacttggcttttgcta

SEQ ID NO: 6276 - DNA, 611 bp, Gossypium hirsutum
  unsure (1)..(611): unsure at all n locations; Clone ID: LIB3828-018-Q1-K6-F6
attacaccatttgtctatttgagtatcgttgtgctttgtgacaagagttgtaaggaatatttctgagagagctattagttcattatctatataagttgtgttgggtattgaaatagataatgatttggttggtatactaatggtaatcaaatccttttaggtatttaccaaagtgtaaatattcgttagtgaacattgtctgtgaatatctattttaggataattattgtaagttgtttgaatagaaaataagaggtaatatcatttggtatgatctaaagtcagccaataagtcaagttaataatgattcgttaagaaaagtaagtagcgtctaagtatgtaattacataactgacgacaggaaggaatctgccaaagacaaatatggaaaaatccaaatattcaagatgaagaaatcaataagaaaggttaaaaggtatgttgtgtctaaactcactaatttcctctgaacttacacatattatgtttatgttttaggtgttgctttgtaagtgagttcgccaggagggacaacgccatgaatgagccagagaagcggcgaattaggatactatgcatanaagtgaacatttttggaaaactggcgtct

SEQ ID NO: 6277 - DNA, 616 bp, Gossypium hirsutum
  unsure (1)..(616): unsure at all n locations; Clone ID: LIB3828-018-Q1-K6-G1
gcaaactganagacatcccttcagttatgtctgcgcttcattttactgtaactttcctccttctgactctgttactggaagtaaataaagcaaaatcccaatcatttattggcgtaaattatggacaagtggccgacaatctaccatcaccggcagccacggcaaagcttctccaatccacttcaatccaaaaggtccgactatacggctccgacgccgcaatgatcaaagcgctagccaacaccggaattggcatcgtcatcggcacggccaacggtgacatccctgccttggcctccgacccgaattttgccaaaagctgggtggatacaaacgtagttgcttattatccagccagtaaaatcatcctgattaacgttggcaacgaggtcatcatgtcgggtgataacaatttgatatctcagttgttgcccgccatgcaaaatgtcaagaatgccctcgatgcggcttcgttgggggataaggtgaaggtctcgacggtgcattcaatgactctgttgaaacagtctgagccgccatcttctgggagcttcgacccggcttatggagacatgttgaagggagtcttagcatttaacaatgctaccggttcacc

SEQ ID NO: 6278 - DNA, 615 bp, Gossypium hirsutum
  Clone ID: LIB3828-018-Q1-K6-G3
ctcctactcatttacctttacagctttggttctgctcctctccctaatctccctcaccttcttcactgcgaaactgaaacaaaaacagacaaagaacaagtaccaccccgttgccggcacgattattaacctgctactcaactttaatagattgcatcattatatggctgatcttgcagccaagtatcggacctacaggctgctttctccttacaggagtgagattcatacctcggaacctgccaacgttgaatatatactcaaaaccaacttcgataattatggcaagggtgagtataatcacagcctgctaagggatttttttggtgagggaattttcacagtggatggggataaatggcgtcaacagaggaaggcatcaagctatgaattctcaacaaaggtgttgagagatttcagcagtgttgtctttcggaaaaatgtggcacgacttgccaatatagtgtctgaggcagctatttccaatgacacaatggatatgcaagacttgtttttgaaatcgactttggattcaatattcaaagttgcattcggggttgaactagacagcatgcgtggatccaatgtagaaggcaaggagtttgcaactgcttt

SEQ ID NO: 6279 - DNA, 629 bp, Gossypium hirsutum
  unsure (1)..(629): unsure at all n locations; Clone ID: LIB3828-018-Q1-K6-G4
gnattaggaagcatggtgtaccccaatgaatcccttgaagactctccccagaagaaaatggggagaggaaagatcgagatcaagcggatcgaaaacacgacgaaccgccaagttaccttttgtaagaggcgcaatggtttgctcaaaaaggcttatgagctatcggttctttgtgatgctgaggttgctttggttgtcttctctagccgtggtcgactctatgagtatgctaacaatagtgttaaagcaacaattgagaggtataaaaaggcttctgattcctccaatactggatcagttgctgaagttaatgctcagttctatcagcaagaagctgacaaactccgaaatcaaatcctgaatttgcagaatgcaaacaggcatatgctgggagagtccatagggggattgcctatgaaagagcttaagagcttggagagtcgtttagaaaaaggaattagcagaatccgttccaaaaagaatgagctgttgtttgctgaaattgagtatatgcagaaaaaggaaattgacttgcataacaataaccaacttgttcgagccaagattgcttgaaacgagaggaaacaaccatagcatgaatttgatgccccggaggtttaagtgctaac

SEQ ID NO: 6280 - DNA, 632 bp, Gossypium hirsutum
  unsure (1)..(632): unsure at all n locations; Clone ID: LIB3828-018-Q1-K6-G5
gnaaacttcaataatatatagattcccattctttcatgtccctcgctgagaaagagctttccgagtttcagtcacaaacgcctgcccaaccccagcccaacccacaccctgtcgccaagaaacgcacccgccaagacaaccactccccgtttcgcggggtacgtaagaggaggtgggggcgttacgtctccgagatacggtttccgggtcaaaagacacggatatggctggggtcgtttgggtcaccggagatggcagctcgggcatatgactcggcagctttcttcttgaaaggcgactctgctatcctcaacttcccggagttagtggggtcacttccccggccagggtcttgctcgaggagggatatacaatccgcggcggccaaagcggctttggaggaaccggtgggcagggtaaaagatgaggagggtccggaaagcatcgggtggtgggatgatgtggggatggcggcgtttgaggaagtgaaagcaagtccgttgaggtttgattcaatggagggagagctgttgtctttcatggaggatgatcatcatttcttcactccctgctttgagttgtaaatatatataagaaatgatttctattctatatattatttgatatcttct

SEQ ID NO: 6281 - DNA, 602 bp, Gossypium hirsutum
  unsure (1)..(602): unsure at all n locations; Clone ID: LIB3828-018-Q1-K6-G6
cggccgcgtgggttcacggtcacttcaaaactcagagaagaggggatttcgctgaactttacatgttcaaatggacaacccttctcatcccaccaaccactctcctcattataaacttggtgggggttgttgcaggaatatcgtatgccatcaatagtggctaccaatcatggggtcccctctttggtaagctattttttgccttctgggtgatcatccatctctaccccttcttgaaaggtttgatgggacgccaaaaccgtacacccaccattgttgttgtatggtcaattctgcttgcctccattttctctttgttgtgggtgcggatcgatcccttcacaaccagagttaccgggccagatgtagaacagtgtggaataaactgttaaagagagaacctataaagactgaagatttgttctggtgtcacttaagtttccaatgccaaaggtttgtttagttgtaatttgtgtatgtcagttcacatcatgtgcagaatatacggttgttgatatatatatatgtcaacaaccgtacacccaccattgttgttgtatggtcaattctgcttgcctccattntctctttgttgtgggtgc

SEQ ID NO: 6282 - DNA, 607 bp, Gossypium hirsutum
  Clone ID: LIB3828-018-Q1-K6-H1
cggccgcgtggggcaaaaaaatggcagccatggctgcgttgcaaagctcaatgactgctctttctctatcctcaaactccttcttgggccaacgtctctcaattcctccttctctctcccctcttcacatcaaaccaagagagaatccatgtctcattgtagtgaagcttaaacgatgggaacggaaggaatgtaaaccgaacagccttccagttttgcataaaatgcatgttaaggttggagataccatcaaagtaatatcgggtcgtgataagggcaagattggagagataagcaagatcttcaagcataacagcaccattgtagtgaaagatataaacctgaagacgaagcatatgaagactagaggagaggatcaaccaggacagataattaagattgaagcaccaattcacagctcaaatgtgatgctgtattcgaaagagaaagaagtgacgagccgggtgggtcataaagtgttagatgacgggaaaaaagtgcggtacctcataaagacgggagaaatccttgacagtgacgagaattggaagaaactgaaggaagctgcaaaagagaaaactgaagtagctgcagctgctcctgctgc

SEQ ID NO: 6283 - DNA, 619 bp, Gossypium hirsutum
  unsure (1)..(619): unsure at all n locations; Clone ID: LIB3828-018-Q1-K6-H2
gnttaaagaagacaggccttattgctgaagctgcagatttaatgcaagaagttgctgtggaaacttttggtgccatggccaaaactgagaaaatcgccttcatccttgaacaagttcgcctctgcttagatcgtcaggattatgttcgtgctcaaattctttcaaggaagattagccctagagtttttgatattgacagctcaaaggaaaagaagaaaccgaaagaaggtgacaatgttgtagaggagcctccagctgatataccttcactattggaattgaagcgtatctactatgaactgatgatacggtattatttccataacaatgactatcttgaaattagttgttgctataaggcgatatacgagattccttccatcagggaaaacccatctcaatggataccggtcttgagaaaaatctgttggtacttaatcctggctccacatgatccaatgcagtcaagccttcttaattccacattggaggataagaatctttctgagattccaaaacttaggttgctgttgaaacagttggttacaatggaggtcatccagtggacatccctttggagttcttataaggatgaatttgagaatgagaagacatgctt

SEQ ID NO: 6284 - DNA, 623 bp, Gossypium hirsutum
  unsure (1)..(623): unsure at all n locations; Clone ID: LIB3828-018-Q1-K6-H3
ctggntccatttaaagatttcaagattaatgggatttgagtaaaatattttgtttcagtgtgaatacagaatcaattgcgtacatgattacttacggacttagtgctgcagcaagcacgagggtttcgaatgaattgggggctgagaatccgaggaaggcaaagaccgccatggttgtgtcactcaagctttcaatccttctggctctaacagtggttgttgcattagcatttgggcataacatatgggctgctttcttcaccaacactgcttccattattaaccaatttgcttcaatcacacccttccttttaatctccattaccatcgattcttttcaaggcatcttatcaggggtggccagaggaagcggatggcaggtgttggctgtgtgggccaacttggggaccttttatttaattggaatgccagttgcagggattcttgcttttaagttcaagctttatgctaagggtttgtggatagggttgatatgtggtctttcatgccaagctgctgccctcctgcttcttactttgtgtagaaaatggactaaaattgagctttcctaacaaattaatattcaaccatagttaaatcttaaaaaaaaaaaaaaaggcggc

SEQ ID NO: 6285 - DNA, 103 bp, Gossypium hirsutum; identical to SEQ ID NO: 560
  unsure (1)..(103): unsure at all n locations; Clone ID: LIB3828-018-Q1-K6-H4

SEQ ID NO: 6286 - DNA, 620 bp, Gossypium hirsutum
  unsure (1)..(620): unsure at all n locations; Clone ID: LIB3828-018-Q1-K6-H6
gnacgattggggtaatggtgatggttcatggggataacaaaggcttagtgctgcctccaaaatttcagctttgcaagttattgtgattcctgtgccttacaaagatgcagatactcaaggtatctttgatgcctgtgctgccaccgtagtaaccctctctgatgctggtattcgtgctgaagctgatcttagagagaactactcacctggttggaagtactcaaactgggaaatgaaaggtgttcccctaaggattgaaataggacctcgagacttggcaaataatcaggtgcgtgcagttcgccgtgacaatggagaaaagactgatatctctagagtctttttggttgaacaagtaaaaggaatgttggataagattcaacagaacctattcgatgtagcaaaacaaaaaagagatgcctgcattgaagttgtaaaaacttgggacgagtttgtaaaagctcttgggcaaaagaaactgatcttagctccttggtgtgatgaggaggaggtggagaaagatgtgaaagctcgaacaagggtgagatgggagcagctaagtctctttgtatcccattcgaacagcctgaactcccagatggtactaaatgctttgcttc

SEQ ID NO: 6287 - DNA, 560 bp, Gossypium hirsutum
  Clone ID: LIB3828-003-Q1-N6-A1
acattcaatcaaaccagttttactattacgcctcttttccattacattcaaccaaacagttgattggctgttacacctctattccgtgtacgacctctaatccaatccaatacacctctaatccaagacagagaaccaaacgtgctcttagctaaagaaggcattgatgttgatactaggaatagaaagttaatctaattaacagttccttttctgatgagaatgcgttgaaaatcttatgaactcctttgcttgggaagggattgaagatatatgggtttggagggggaatcttttagggaattttctatatgaggcacctattaactattacataaaggtacttttaaccgtaattatagacattatgagtcttgggagctatacaatatctaaaaaaaccttcaaaaggaaaaatttatccgcggaaaaccacttggaatttactgactactttcgctaatctccaacacagaaggattagaggacatatcttgtgtccaggtgtcccggagcaataaagtccctggctttttcgaatgagtttcagaggccggtgc

SEQ ID NO: 6288 - DNA, 504 bp, Gossypium hirsutum
  Clone ID: LIB3828-003-Q1-N6-A2
gaaagaaaaaacaaaaagacgcatcattgaccatatagtatacaacaaagtccatttacattttaatggggtgttttaacttccaccctctattccctatgactacaaaggagaggaccaaaaggaagttcacaaaattgggaaatttatgattcactcgcaccccctcaatttccttcttataaaaacacaaacctaaaggaaggtgatggaaagaaaaatagttgttcaaattttgtttctactctacagttatttcaagtatagtggtaagtctgggctttttatatctccgaagaagtaaagaagagcacaccacgcttacagaggaaagggccatacaggcaccagctgcccatggtggcaactttatccctaatgatggatacaaaaccccagcagcaattggtattgccaccacattgtacgccatcgcaaaaacatagttccaccgtatccggctaaatgttttcctggacagatcgatggctgtgatcacatctt

SEQ ID NO: 6289 - DNA, 481 bp, Gossypium hirsutum
  Clone ID: LIB3828-003-Q1-N6-A3
aaagagagaaggcacatttacagccctgacgctggttttcaataatataagaaaaaaaaataccgggggtcactcatataccattttttcagggcatgcaattggaaacatctgccattcatgaggatcatggtggggggtgggaatgaaaaaaacaaaaagtaaacaaggtcggcggccccaaattaaacacaaaatacaagggaagggatgggggactcaaatgtaatcggggaaaatccggtttcaaagggacagacaaatcaattaaaccctgattaggcttaaaaatcggggggtgggagctgctcgggggtgttgctgataaaaaagaactcgtaaatgaaaccagggagcccaccaccgataaggggtcccacccaataaatccaggggttgtcccatgtccagctaaccaagggtggtccaaatgaaacagctgggttcattgaggctccatcgaaggcacctcctgccaaaa

SEQ ID NO: 6290 - DNA, 508 bp, Gossypium hirsutum
  Clone ID: LIB3828-003-Q1-N6-A4
ggaaaaaaattctaaaatgggccatagccggaaggatccagccccccccccaggccccatatttttctagccctacccaatccccaaaacaaaacccttgaaggcaacttgcaattttaagggccgggcaaaaaaacctttcaggccaggggtttaaccccccgaaaaccctgtttagggccaattcaaaacaactttttgaacccgggggggaacccaacccctcccggggggttgggattaaaagaatcatccctcaaaagcccttcaacaatagaacccccccctttcaaagaccgaaagggaaaaccaacccccccaggaagggtcccttcattcttatcccaaaaggcaaaatactgaaaaacaagtcccaatttattcccgcggggcttttctcccccaaaggaaaaataaggggaaaaacaaaagccaccctctccccgggcccttaaggaaaaaagaccaactttcaaggctttatttataaaaaaagccaccccaaaaa

SEQ ID NO: 6291 - DNA, 401 bp, Gossypium hirsutum
  Clone ID: LIB3828-003-Q1-N6-A5
attgcaaaacgaatattggtttgagctatttattcttcaaaattaccctttttggccaaaaggattttatagcaaacccttctgcaacaacattactttttattttggataattaaaaagacgacaaccaactcttcctcgttatttcatcttaataggggatcatctctctactttgggggacggggttcactggccaaaacctcttctatccctttgctctttacaggttcagcctggcaacatcctgatgcccacctgggctgaccacactcagcacaagtcccaccacaaccctgacgggaacactttccactttaacatcccgactggcctggcattagggggatttttgggacttgggggatctgggggacttgggggatctgggggattagggg

SEQ ID NO: 6292 - DNA, 580 bp, Gossypium hirsutum
  Clone ID: LIB3828-003-Q1-N6-A6
atactaaaacatgtccggtattatttgtgaaaaaaaaaacatccctctgccatgtacttggaacataacaataaatttttcttgatgccaaatctcaagacttttggagcaaataaaaaagcaactaataaataaaaaaaaagatcatttttgagaggacttttgctctttatctggtaggacattgtctggaagaattagttctggtggagtttcacggacaacacccagcattgagtcatactcttcatccctcttcgcaaacttcttgcgaagaattttctcaaattcaatttcatcaaagggttttgcattctcagcagcatgtacctgtgcaaggttggtataattggtggctgactgggaaataaacgctatctcttcttcagttagcttcctcaggaatttagcaggattgcctccccacacctatccagcagggatccttgtattctgtcttacaagggctccagcagcaaccatagcatgtttttccacaactacaccatcaagtagtgtggctcccatgccaacaaatgcttcatcctcaacggtacagccatgtaaaacagcactatgc

SEQ ID NO: 6293 - DNA, 572 bp, Gossypium hirsutum
  Clone ID: LIB3828-003-Q1-N6-B1
agaatacttcatatatttttatatatagaaataaaataattatatatagcgtattcgacgattaaatgcttccggtgaaatatttatggcaaaatttgtacccacatcgatcgaaggcaaggcaccccattgtagttcacgaagagcatgtaataaccaggttgcgcaatgttgccattcatgggagcttgaagaacaatgttgtttgtatttggggctacatctttattaaattccaaaattcccaattgaatcaatctctgattcatgcaaatcccgtgggtcacaaacggcggcgagtagatcgtcacttgaagcttttgttggtcgattacaccatttccacggatttgcactgtgaatttttggccatactttaattggttatcggacttttcggtgatgatctcttgtcggaacatggccaagttagggtccaagtaaggtggcgagaacttctcaacccgaacttcggtgggaaataatgcgtcatcgaggtaacctgggttcgtgttgcttccggcgatgaggacttttgcatcaggaaggacagcgaacgaggagtggtacat

SEQ ID NO: 6294 - DNA, 582 bp, Gossypium hirsutum
  Clone ID: LIB3828-003-Q1-N6-B2
attgtaattctggaattcgcacatattcatttaatatttaagaaatacaaattaaatagatcgagcactcctccatgcaccgtcttagctcaattaaaaaaaataaaagtgaagcttaatccaagctgtgtcgaagcacgcatttgtttaggcacatttgagttggacggccaaagtcttcctgagatgggtacatgcgtcattttggttactgaaaggaatgctatctagtgggatttggcagctgggcttccccaagcaatacttctcaacgacttgcttggattctggcgctgtgcaatttccaataaagtaggctccgcaagcgccaaatggatcaccatagctcgcaaactccactgccacgatttgcttcttgcctggacatttcaattcagcccttggtttcaaatcattcactttggcttggagactaccatttttggtttcgaacaatctcggggatggtgggtgaatttcactcacagcactgcagattgtatccctgttgactgttactatatggacatctttaggattgcctccttcttcctcaagaggacaatcaggttctttggcttc

SEQ ID NO: 6295 - DNA, 587 bp, Gossypium hirsutum
  Clone ID: LIB3828-003-Q1-N6-B4
agaaaaaagttcgcataaattcaaagttaaattattctcgaaagtgattgtatagaccaattgaagtaaacccaaattttataactcattcgattacagttctagcatcatgcagacattggtgaagttttgtgttcaattccagtgatgaactaacaacatttgaccgaattggaaagtctcaaaacaaatgttacataaaaataaacacttgtagataagtctggaataagaagacaagttactccacttcagccaaataatcatcaatttcagctggggtaagcaccctgaattttctgtcagttccaataatcccaatttcaatgtttttccctgagatttgtccttcaaatccctctttgagagtcaaaatagcagtatgcacagcatcatcaagttccatatcatcagtgtatctcttttcaagaaatgtttttgcattagagacattcttccccatcgctgaggctttccatgagaaataagagccagatggatccacctgatacaattgtggaccattgtcgtcatatccagcaactagtagagatacaccaaaaggccttacaccaccagattgagtg

SEQ ID NO: 6296 - DNA, 580 bp, Gossypium hirsutum
  Clone ID: LIB3828-003-Q1-N6-B5
aagaagcttcctacacgttttagaactcagataaaatctggaaatacgtacgattgatacaatcgacaaacatatgctatataaagataaaaagcaggatggcatgcagcctcactgctatccaagggaaaatacatttaaaaagccttctcctatttagaactcaaattaaaaacctgcaaatacaggaaataaggatattaccacacaaccacttatttctttatatgttactgatagtacattagctgctgggcagcagcaacattcgggtatccaccatcatatatagcctggcttgctccagcagcacccacccccattgctgcctgcttcagaggatgctgtccctgtgggtgcattagagcatgaactccacccatcttgctcatggcaagttgtcgttcgtaagctaaaaggtcagtggctgaaagaccaggtaatggtgctgcgggtgggggaagtggattggagcttgtccctggtggtgtaggcttgctgccccaagaacatttatttgcttgccgcatagatatgactgagcattccccatctgaatagccaaagctgcctcagcatg

SEQ ID NO: 6297 - DNA, 577 bp, Gossypium hirsutum
  unsure (1)..(577): unsure at all n locations; Clone ID: LIB3828-003-Q1-N6-B6
gcctcngataagagttgaatatagtattattattattataaaaataggacaaagttgttcagattaatcaataatcgacaacattatttcaaataatgataataaaagaagactaatggcgatggttttggaagattaaactccaggggtcatatcgggatcaaagggaacaccagtttgtgccagccattcgtcggattgcaaaaatacgcgaggagtccatttcatggcttcatccatatcgattttcttgatagctttccatgtgaccctgccctcggtgttggcaccgggtcccctattttggaactcggcaaagtaaccagtgtccagtcctacagtgccttccatgggggagtaaccctctggtgtaatgatgtcatcgatttgacattgcattatgatagttgtcgcaaattgtttccagggacgaccaaggtacgtcttattcttgtccttcaccgggaggtagtcaggggcgcccgagatggtacaattttgaagcacaatggctgtgttagtttcttcttctttctttccgtgtgctgtaatcatgttgtgctggttttcacctggc

SEQ ID NO: 6298 - DNA, 556 bp, Gossypium hirsutum
  Clone ID: LIB3828-003-Q1-N6-C1
ggaatcaaataataacatttcctgataatcattcccaataaatcccaaatgtacaatgcatgggtatcaaaatgttgtacataacaaaagagagaatgtatgcatatcaaaataatgtttttaacaagggcgaccaattctgcagtggagtgttccggcataccttgtgagtttggggactaatcgaccaggttggaaaggcatcattttttcagcaccgaatagcttgctagcattcggatcaccggatgtaataaaataggcaccgttcatgaagtggtcaccctgtgatacccagttccatttattccactgttccagtgataagtagcccctactagtcacttgcttagttacgtagatgcttgacgcgatatacctgttgccctggctgataattgtagggtggctactgccaccaatggcatacatgaaccaatgagtgtagtcattgttgacaacatgaaaaaaacctaatcgacacctaggcatcctgtccaccaatcctttaccgaagcggttcaaagcaacagtgatctgcatcttctcgtcagca

SEQ ID NO: 6299 - DNA, 464 bp, Gossypium hirsutum
  Clone ID: LIB3828-003-Q1-N6-C2
gtctcaaattttgcaaaccactctacattaaacagtccagcaagatttagttttggggttccagatggctggaagcaagattttttgttcttatttccataggcattgaaatttccgccggttttggggtcggtgagaacttcgccggggttgccaggggcagcaccacgaccgaaaagcctttgcaaacggtggctgggccgagttctttagccttgtttgaatggtagagagcatcgttcattgggttggtgattgcatcaaccaatgcacccgcgaaggcaacaaccatagcatctgctgccatgttgccgcttggtggtttaaggactggtccctttggacccatgtcagccgggaagaaaggccatccgcattctccagggcactccgtttctgggttaccgactatgatgtatggtcgcggatggggatcctcagtaagtaaatgatctgcacattgc

SEQ ID NO: 6300 - DNA, 556 bp, Gossypium hirsutum
  Clone ID: LIB3828-003-Q1-N6-C3
aagaaacaataccttaaaatgcaatacatagatgaacaaattactaacaatgtaaaaccaagatttcggccctcccaacttctctcatccccatttttattattttataattcgaaaaatgttttaccaaacaaagcaattttaaaaagtctctttcgtcaaaacgcatcgttggagtttcaaccacccaacgtaaaatgcaaattctaggattattaatgttacaaaaacatttacaattacatctaattttacaaacctcaaaacattaaaaccatgactgaacctaacttaaattacaacatttcactcgaaaccccactccacatatcagcaaatcagttgacctcttaggaacccttcaacactgaccataccaacttgcttaggcatggctcaaagtacatcatactgatacagtgaactgacttgacaactcttccttgtaagagcatggacacaattatgatccctttctggcagagtcagcttgatcaagtcgagctgctctccaggaaatcaaattagttgattttagtaataaactgaaagctaa

SEQ ID NO: 6301 - DNA, 552 bp, Gossypium hirsutum
  Clone ID: LIB3828-003-Q1-N6-C4
actacgcacaaacaacagattcagtgcaaaatttccattcgcggccaattgtgaatgtcaaaatattttattcatatgcatggcttaattctcaaacttattgagctcaaaaacaatacttggaatcaacaagaaaatggcagctctgaatcaatggcaactctcatcaaaccatgtatgtcatgcccacttgcaagatattcatgtgaggtacactcatatttgctgcaccaactcgacagtttctctgcaggaacgcatagaagtagtttatgacaagtttcttgagaaaaaggatgttctttttcgccctcacatctccatgtgccaagaaataagtaaatcctgaatctattgcttgtcgcagtgctgatagctcatattccaaacctaggtcttcatccgatgacatgacactagacggtaatgatgccggtgctttttttaatagacaactttattgcttcttctgatcttctctcacgtatcaatgggattttaagctccttgttaccaggaacatccctgtttctgtgatcctttgagctcaca

SEQ ID NO: 6302 - DNA, 576 bp, Gossypium hirsutum
  Clone ID: LIB3828-003-Q1-N6-C5
aacaacaaattaacttgttcaaagaaagagcactttatagctcacacagatggagtttgttatagtgcatcctaattaaaaacacaaagttacaataataataataataataaatccatggcactacatatttcttttgtttcatacaataacataaaataagtttcttatgaagaaatccatacccatggtttcttcttctttatatagatatatagagatatatatgctatggtaaccaacctgtcatataattattcacacttggccctgcagtcaccactgacattggatcatgctgatatccgatttgtaaagttggctcacagtccagtggatggaagaaggcatcgccatgaggctgatgatgaacctgttgacggccatagccgacgtcttccgttgcatttggattcaattgtaacgaatttacttgatacccttccaccaacctttgttttagggtcttattggcttcattaagaagatgttcctttctttggagatcattgagctgatcaagcatgtattgggtccgtgttgatctgattagcttcaatgatgaatcaagttgtt

SEQ ID NO: 6303 - DNA, 550 bp, Gossypium hirsutum
  Clone ID: LIB3828-003-Q1-N6-C6
aaaagaccaatttatgttttgcagataaaatggtaaatattattactaaaacaaggaccaaatcgttaaatgctttcgtaaccgaacatgcgaaattcaccttcattagctgaatatttgttctcgtcattccccgcataagcaagtaaatgtttttttttttaatcaagactccattctacagaccttcatctcatgaatgaacacaccttactctcttatcctatatggaaacttgtatatcaacttggccattcatatgattattggaaaacaaagaaacaaaggacacttcattgctgagctaccaattaatgtcatcatcacttgatatgtatatatgttgattcagaccgtcccttcttcctcatcttcgtcatcttccgcatcgtcgattccaacccaatttgtgaatgcaaaaagaaactctttgaaactcactgatccatttttatcccagtccatttcttcaaatcttttcatggctattcgtccagacgaacgctccccggattcatttatggcttgaaccatctcgttcttgctaaca

SEQ ID NO: 6304 - DNA, 438 bp, Gossypium hirsutum
  Clone ID: LIB3828-003-Q1-N6-D1
ataaattcgacattttttcaaataataatagatgaaattgtttagaattgaacctcatgcttcgcaacttagtatttttgccactaaattaagtagttggtacattcatagctgttaataataactaagttggtgagtcccttaatattgatatttgcttaagcacaaattaaaggtacgagtgtcctatcaaattaagccatcatttggtggaactcatgaaaatcaagcaccccattaccatcaatatcataaacctgaatcatagcgacacattcatcataagactttgcatccccaaggcgattcaacatcttttgcaaccctttgggagttatgcaacccgaacctttctccaactcgaacatctcgaacgctttcttcaggtcatcatcatcatcatcatcatcccgcttttctattttcattagcttcaag

SEQ ID NO: 6305 - DNA, 77 bp, Gossypium hirsutum
  Clone ID: LIB3828-003-Q1-N6-D2
tagaagtagcttgacatactgcacttgccctataaggaaaataacctgatggaacctgtttaacagctgaatataac

SEQ ID NO: 6306 - DNA, 560 bp, Gossypium hirsutum
  Clone ID: LIB3828-003-Q1-N6-D3
agggagaaaataacatgtttccctatataaaattttcttcatctacaatttaccgtttacctccctccccagtttaatataataaaggtttccacttactctaactgtacataaacaccatataagcagtaaaaagccaccaagcagcaactgaagaaggaataaaggaaaaaagttcttttaagaaaatgacactgcaatctttggtctcttatctatagaccaactacagcaaagcttgatgcagaataacactggatgccaaatgcacaactagtcaattttcttctttcagaaacattataaccataattcagctcatcagtcttaccgctcatctaatcttgagcagaattaacatttgccactgcagcagcagccgtggccgctttcttgtttgcctttgtcttgcccttaccaggaggtttgtcatctccagggacttcagcagtgagccttcccattttcttctgtagatcagcaagcgaatcctttggaacttttgctttgggactcttcttttgattcgcaagcttcagctccagtctatataaagcaaa

SEQ ID NO: 6307 - DNA, 482 bp, Gossypium hirsutum
  Clone ID: LIB3828-003-Q1-N6-D5
aagatataaaagaggtccagcttatatataataaaactatttcataccaagtcataatgacacgaattaaaagataaaatacccaaacgccatgcatcctaaccaggagcaatttatttataatagaaaacaaaaacataaaaccataaaagagattttcaactactcttcttcctcttcttcctctttccagcagcatttcagagttgatcttggtgatccacagccaccagtgctcttaaatttctggtacatcatggaacctccacttgcaagcccttcaatgcccatctctccgcaacagtattcttttacgtccagcaggcagctctgctcaagtgactgaccaccaccaacatcaacgtgaactgctacagaaaagtcactcggtttgaagcatttcaacaccctcccgaccaactgcttcagattcttatctttcagattatatcccacagcttcaaagcttgcatagctaaatc

SEQ ID NO: 6308 - DNA, 562 bp, Gossypium hirsutum
  Clone ID: LIB3828-003-Q1-N6-D6
cacaggcagtctattgacactaacatcttataaatttcttgcacaaaataaaaatgaattagacacaacaatgtttgggaattagccaccacagcaagagccgcaagcaggaagggaacctgaaaattagcagtggcaaatgacaaattattttagttgacaaattgaaggggaaaaaagagaaggggaacatggcctggtgataaaaaaacactgataattggaagttcccaggcataataataataaggcacagcacttactatgatcaattcctcgaacattgtctagtccacgtgatggtcgacgtgggccgccaccaccaccatacggtccacttcctggtcctcctggaccaccataccatttcttgcttgaaccagagctttttctataggcatctgacttttccatcgagaacatggtcgaaaaaaacactccgataaaattgatgattgcccagaagaaatcgatgatggtcctcagtcgccatattgatcgctttgatttcacaacacctcgctcaacataagccatgagaagaattccagcgtcttccggt

SEQ ID NO: 6309 - DNA, 577 bp, Gossypium hirsutum
  Clone ID: LIB3828-003-Q1-N6-E1
acatcaaactctccacttttaattaatacacataattaatagaaattacataaaatcttacgagtctgcactcacaaactatattattatatatatagcagcgaagaactatataaatatatatatcacacgtctttctcacaaatacttatgacattaattactgctattacactgtctctaatccactgagatagtcatcaagggataccgatgatggggaagaaaggaacataatagctggatggtgcaagtccccactccgggggtagtggcagatcgacggtcttggatgaaccgatccccttttgagctccacatgatttagcatcaatggatgccgaagggcatgaagtggagaaagccagtggagtggagagggtgtaagtgttgggttgatgtcccaccttgacaaccttggacaccaggtttttcttcttgctgtatagctggtttggtccacctaggagcttggcaaggcagttagtgtttgagatgcctgatggaagctggaccttgaaagaaccttttcttcagtggtcgcagtggctagtttcttcactttctcacacttcac

SEQ ID NO: 6310 - DNA, 496 bp, Gossypium hirsutum
  Clone ID: LIB3828-003-Q1-N6-E2
gggcaatcagacaagaatttaatgttaatttcgacatcaaactggtacaattgcaaaagctctaaaaagagatcatataagggaattttatgaaaaaccagtcagggaatcatccaatggatcgataattgctaaagtttattggtttcaatattctttaaaattatgactggtcttcattggcatcttgattagccgctgcagtttcgaggtcagcttggttttcagcaaagtccgtggatgatgcaggggaggggttcctcctatgtgtagcaaactggaggacatggttgtagttccctttcaccatgaaaagttgagcgtaatgatgcttgcagtaaaggataccattcaaagccgcataggatgagtgtgtcaaagggcaccctccatgagcgcacctaaagcatgttttatgaaagcattccccttccattggaatcttttctaaggggtacactgttttctcgcaagcagcacatttatcttgggttcc

SEQ ID NO: 6311 - DNA, 494 bp, Gossypium hirsutum
  Clone ID: LIB3828-003-Q1-N6-E3
acttatcgtataaaaacagataaaatagtttaggttaaggtatgaggccttgaaagggccagaaatcacaatcattcacataaaatccagaaacctgattttcataggagagcttagaaaccacccccaagacgcacgacaagggggagagtggattccttctgaatatgtaatcagacaaagtcctagcatcttccaattgcttcccagcgaaaataaacctttgctgatctggaggaattccttctttgacctgaatcttcgccttaacattgacgatcgtatcggaactctccacctccaaaggtatggttttcccagacaacgtgttgacgaaaatctgcatcccaccacgaagcctgaataccaaatggagggtggactccttctggatgttgtaatcggccaaggtgcgaccgtcctagagttgtttcccggcaaatatgagcctttggtggtctggtgggatgccttccttggcttggatctttgcc

SEQ ID NO: 6312 - DNA, 206 bp, Gossypium hirsutum
  Clone ID: LIB3828-003-Q1-N6-E4
atcagcgagctcatcacaaggcaaataataatggcaataaaaccagcccaaactaaacagtggggggtgttttttttcgccgacccattaaccctttaaggaaaggatataaatgagctaaaacccaaaaagcaaagaaagctcctacgatgaacatataccattgtccggatcccaaaagtgttcttgcataagcaatggtagga

SEQ ID NO: 6313 - DNA, 556 bp, Gossypium hirsutum
  unsure (1)..(556): unsure at all n locations; Clone ID: LIB3828-003-Q1-N6-E5
attcatataataattaaagataaaaaaaacagctagcacattgtaattcaatcatatatcaagctgcttggttattctttattttctttctctttgtatagaatccgtagtttctataatctatatataaatctatgaagattctggcgccatagcttgtatattcatggccttctttttccctaaaagaccattggcatcaagtttcatggtaaggtccttaatcgttcgtttgagttcatccatataagcgataccaccaccacacccattattgaacctgcggtaagggcatccgtaattgcaggtgccgcaaaagctgccgcccatgatatccacatcgtcgcagtcgatacagtaagggcttctttcataacctatacctatgccagcaccgaatccggtaggatcaggatcgatagaggttgaagaatcaggatcagcttcatgcggaaaaccgttgcttggttgaaacccatcggctccgtcagccatggtggagattccggtcctcttaccataggacgccngataaacatactgaaaacgtaaggtt

SEQ ID NO: 6314 - DNA, 196 bp, Gossypium hirsutum
  Clone ID: LIB3828-003-Q1-N6-E6
aatccacacaccgcgcccgacaggggattctttgccccacggggggccaagaacaaaaatgagaaggggcccaaggccccctctattttgccgggcaagccccaaattcgccaaacataccatagttgggggtggacgcgcggcgggctccacactggcggccaggctgaaccccaactccggtcccagggccccc

SEQ ID NO: 6315 - DNA, 584 bp, Gossypium hirsutum
  unsure (1)..(584): unsure at all n locations; Clone ID: LIB3828-003-Q1-N6-F1
gngaagttgtaaaatcattatgataattatgtatataaactaggaaagatacattcagtatttatttgatgcatctttaattagttgacgtattatatgactcttatgctcttgtattccattgattggaatcaggctctcaacataaaaaaaaagagagagacgtactctcgatgatgatccaggtaagtattgattccaagcaccttaagttcttgggtggagggatcaaacaagactacttcataatttgtgtttaaaagaaacatttcaccatttttccaaaaccctaattgtctgacaactccaggaataggttcaatactgaattgtttagtccatacttctccattcataacccataaatcaaaagacgtgtcagttctttccactgtgtaagcaataacaccaagagatccattaaacaccaatacctcgaggatatcattttgtgggtaaaacccgacaaattctgggataagtgaaacccaaaacttctcattagccatgtcaaatgaaagaatcaatttttttttcataaggagtgttccctatagttgtttgccaaaaaaaatcgaagtaat

SEQ ID NO: 6316 - DNA, 549 bp, Gossypium hirsutum
  Clone ID: LIB3828-003-Q1-N6-F2
gattccaatctttttcaacccttgaggcattgtagagttcttacaatatttatatgtaaatttaaataattaaaaaaaatcaacagacaatcaatttggaatttggctaacataagctagaagcctacaacagaagaagaaagggaaaggaatgaaatcttattattttaattattcaagaagaatatatttcaaaaaacttggcagtcaagaatacaatcgtctttatgccttactttcatccaattttgaagaattgtgcaaatggattttatttagggtcagagaagaagttattaacggagggcataatctgaggttgtctgttgcgcacaaatttcctcagtccatgttctgcatatttttcaccttcttcaaagttgttaagaactccagctgccctgttttctttggttaccctgacttcagggttggtggtgatattcctgacgagttgcatggcgcaaatgccgaccgccacacccaccgatgcaaatagcggatacacctcaggtttgagccatctgtttgcagaaaccatgtagatgc

SEQ ID NO: 6317 - DNA, 486 bp, Gossypium hirsutum
  Clone ID: LIB3828-003-Q1-N6-F3
aacaaaaaaaacatatatattagcatgcacatgcattaattacatatggctacaaaacaagattcaaggaactttaggatattgcaaatcgaatattgttttgagctatttattcttcataattactctttttgtccaagaggattttatagcaaacccttctgcaacatcattacttcttattttgtataattaataagacgacaaccaactcttcctcgttatttcatcttaatatgggatcatctctctactttgggggactgggttcactgtccataacctcttctatccctttgctctttacagtttcagcctggcaacatcctgatgcgcacctgggctgaccacactcagcacaagtcccaccacaaccctgacggcaacactctccactctcacatcccgactgtcctggcattagtgggatttttgggacttgtgggatctgtgggacttgtgggatctgtgggattagtggaattt

SEQ ID NO: 6318 - DNA, 434 bp, Gossypium hirsutum
  Clone ID: LIB3828-003-Q1-N6-F4
agcacataatcagtactaagttctaatttaaaccaaaagtataaagaatctaatattttcattataatataaaataaaagatgttgtaagacctaaccaaatctaaaacatgataaagagaacctgaaatgattcaaatacaaaataacccggaaccaaacatagttgaatacaaaatgcacggaacccaaaatgaccgcccaaccctggtaaagccagtccaattgccacccttagctcccactctgaagttggtatggaatttcaatctcgaccctaagttgagatcagaggataccctgggatacaacatacaaatgaaagaatcgaacgattaggagttgggacaaaatttacacatttacatccttttcatccttgaccgcatccagggacttcagttccgccaacaactgtccatactcgcgttgcac

SEQ ID NO: 6319 - DNA, 533 bp, Gossypium hirsutum
  Clone ID: LIB3828-003-Q1-N6-F5
aaacaaaaggactaagattattataaccaagacaacatgcatacttgatactgcctctcctaataaccatacaagcaaaacaataaacataagcaaagaaaggtggtttgggacccaagaaacccatccctttacagataacagatgacccataaaaattcccccacaatggaacttgaagtatgtcactctttgacatatgcaaatgcatgttaacctagccacattgcaggactactatcggtgggcctccatcagccacattactacatccttattgacctacatagaagaaaactagttgacttgacatgcaaacttatcaaactgtagccatttgaaacacacttccattgacacccgcattttcatcacaaaagctttattatttactcagtcttctctgctggatcagcttctgtttcaactttctcctccacttcagctggttttgcttcttcttccttcttaacttcctctttgggtgcttctgctgctgcctcactagactctgtagtttctttggtttcaac

SEQ ID NO: 6320 - DNA, 586 bp, Gossypium hirsutum
  Clone ID: LIB3828-003-Q1-N6-F6
aaatccaatagtccacattttgtattgtatatgatctttaaaagataatgtgtgcaacaaaacgtgaacaaagtgattcattaatttttctttataagagaatataataatttcatataacgactttgcgattcaatgcttccagtgaaatatctatggcaaaaattgaacccacatcgattggcggcaaggcaccccattgtagtttacgaagagcatgtaataaccaggtggcgcaatgttgccattcatgggagcttgaagaataatgttgtttgtatttgaggtaacatttttgttaaattccacaattcccaattgaatcaatctctgattcatggagatcccatgggtcacaaacggaggtgagtaaatcgtcacttgaagcttttgttggtcaatttcgccatttccacggatttgtactgtgaattttttgccgtacttcacttggctattggacttgtcaacaatgatatcttgtcggaacatggccaagtttgggtccaagtaatgtggtgagaatttctcaacccggacttcagtggggaacaatgctcatcgaggtaaccagggtttgtgttgc

SEQ ID NO: 6321 - DNA, 494 bp, Gossypium hirsutum
  Clone ID: LIB3828-003-Q1-N6-G1
agcataaccataattttttattgcaaaatataagaaggaattcaaattctcacattacagaacaagtgaagaaaaagaaatcttcaatcagtagaagtcaaaataaagggaacggaacgtgagccttcttgaatacaaatggtatgtaagttatatatgatctcttcaaatactgcaggtaacccataatttaagcaaagaaagagacaatgaaggctccaaccaatgacccaagaacaggcaaggttgaggttgcaacgctggagtccgggcctggtgcagaagctggtgcagcgccaactgaggcggagctaagtggggcgccatctggtgaggaagctggggcggtgcttgctgccatgactgcgctcattgaggcagcggcgaatatgacagcgcaagagatcttcttcttcatgtccatggtgttggagagacctgccttaatttgttgcagaaaaactttagttttttttttttttctttgtgttttc

SEQ ID NO: 6322 - DNA, 574 bp, Gossypium hirsutum
  Clone ID: LIB3828-003-Q1-N6-G2
aaatattatgtttaaataaataggcaatctacctcaggctcacagctcatctgatttatataattaactcggccaattataaaagaagctacaaaactcgtaataattaaccatcatggttaaagaagctggtacacaacgtagctacaaaaccctatttccataacacaattcaagttctgactaagatgaatgaccatggaatgcaacattaaataacgcttcacttgaagaagtgctaagccttggcttttccagcttgaagagattgatcctctgctgcaccttcaatatcagttccatgaactttcgtgaaaacattgatatcaaaaccaccggaaaaccttcctcccttgccgtaagaacaatagctttaacatcgttttgcctcgtcgcctcagcgaatttctccttcaatccatcaattacttatgaccttttatccaaagcttgaaaatttctaaaatatgccaaaagatatatagggagccaataacatcttttatcgcagcaacagtggtagtccaaacagcagctttcaagtgatgcattcccagcaacagacgtttccatc

SEQ ID NO: 6323 - DNA, 307 bp, Gossypium hirsutum
  Clone ID: LIB3828-003-Q1-N6-G3
aacatcaaaaatagatcattgcactacttgttagttggcgatgatcattggtcatcaagtaattacagcccttcaaccaataaattaatataatttatatatgcacgtacgtgagatacatcgatgaacaggtaattaaaccatgtaagaagcgtctattccaccgggttcctgccatacagatcctgctcggaatttacaaacagggcacgtaccttgttgtcgtagccacgggtcgatgcaattagcatggaactgatgcaaacagggtaaactgcggataagatcgccggcattaacttgctcc

SEQ ID NO: 6324 - DNA, 589 bp, Gossypium hirsutum
  Clone ID: LIB3828-003-Q1-N6-G4
gctatgccaaaaacaaacaatttccatacacatttcataccatcaatagaacaataatcggtattcactcaaacataatctaatcaatgctctattatccacccaaaagaagtggggaaaaaaaacattgtaaaagaataactacaaaaaatgatctccgagtagatggggtggatgacaatctacatcaactcaaaataaatcaattgcctgtggcgcatcagttggagaagattaatgtacagcaatctgaacaaaagaagagtaccttcacccttcactttcctcacaaaactttgaagctggtatcatatgctccgttctaccagctggtataatgaatcaacaacagcaacagatactgatatagttgttggaacagttatgcattcaactcccaaggcatagcttgccaaataacgacctctacacaaattcaaactcagaaaagttcctctgaattgaacttgttccatgcttccttgagtaagtcgaacaccttttctgaaatatatttctgctgaagattggcacctttttgctgaaccttatcaggatggatgcaaagagtagcctttctgtaagcctt

SEQ ID NO: 6325 - DNA, 136 bp, Gossypium hirsutum
  Clone ID: LIB3828-003-Q1-N6-G5
gaatacaaacactttattgggttatcaatatttaattaattgggtaacacaacaagaacaatacaaaattcaactgtggctttaaatacatacaaatggaacaacagttgcattaggaaactcaaattcaaaacca

SEQ ID NO: 6326 - DNA, 587 bp, Gossypium hirsutum
  Clone ID: LIB3828-003-Q1-N6-G6
caaaaggaatgagggtcagattaaaagtcaaccataatttcagatagaggtttgatagcaggagtcataagcaacaattatgagaaaaaaaagtcggtagaaagtttacaatattctcaacactgaaatgtataacagggcaaggctctaaatagaaaaaaagtttaggctggccgtctcctttttaaagtttagcttagctcctggcctaacgaattccacgcctttcttaatctttggccaacatggagcttggaacctatctaaaatcattaaaccgatcgcccgtcttttttgggacgatcagcttcctgccccatgaactgttctcccacttgctcttcacatcagctttttccatagcatcaatcaaggtcttcttcttaggaaccctattaatatcaatcttgatatcagtgagagtcagtcttttaaagttcatttggcttcttaccgtatcaggtgcatcaacaagagccctgttttgatcaacgacatcgacaatgacaacaagcttgccgtagtcctttccgaagttaaccagagctactcttccaatctccacgtaccttttgaacggatttttg

SEQ ID NO: 6327 - DNA, 589 bp, Gossypium hirsutum
  unsure (1)..(589): unsure at all n locations; Clone ID: LIB3828-003-Q1-N6-H1
attataattcatgggnaatttttgcaccgctaaatatgaatataaaatactntgaaattaatatctttatgtacaaattatatgctttgttatgttgatacatgagcttcactaagcaaacaaggaaatggagcaaattgaaacctgcaagagagaaaggttaagatagtagtagggaaagtaaggtgtccatggctaagctccagtagataatttaaatagtaattcaataatttaaaaaaggtatactgagttgagcttagataattaagaataaaaggtaaataaagtaggatagagattgcaacataggcaaaaggaaaaaataaaagactagacattctgatttaccttgaagctaagggttttgttgcgtttatggagcagttcatcagcactcaaggattcagctctatttttgtattttcatcataaatctagaatgagaaaatgagacaatgatatagccacagatgacttgccgatcaattaacatttattataaattaattgatgacaacatatacaggttttagcttagtgctctaacttttagctgcttatgtagagagcatgatttatgttaagt

SEQ ID NO: 6328 - DNA, 581 bp, Gossypium hirsutum
  Clone ID: LIB3828-003-Q1-N6-H2
aactgaataaaattcaagattaattcatatacccttcattgaatttcagaaggcaatatcaaaagcatccatataaatacatatatatttttatccatgcttaaaaagtctactgcttcaaaagtaactaggatgttttaggaaatgaaagttgccttctacaaagatgaaatctgacgtacgtaccccaagggcaaggcccctgtggaaccaaatacaaagacccaccttcagaaagtgattaggtaaaactgaaaatgcctgtaaaaggttggtgaaacaatcagggggaaagtgtatcgcaagagaaaagaataatcatgaagcaaattgacattcttgttttagaatggcatgcactaatttagtgccatagcttactacaaaatccatttcgaggcctcttgctagatatgatatctgaaaatgagtcaactaactgccctgccaagctatttggatcatcgatcagtgtttgaatgaatgtgttgaccaccctgcgttcttgctctgttgacctcaagctaaaccatgttagtaatttcagtctgaattcctggttgatatgaccctcgcattct

SEQ ID NO: 6329 - DNA, 532 bp, Gossypium hirsutum
  Clone ID: LIB3828-003-Q1-N6-H4
ataaaagcctcaaatctatttttatttcctctttttatgtacaaaaaaagatatatcaacttccagtttttgtacatgcagttcgatatctaccattcttcccatcaatcatcattttcctaaaacgttctgaaaaaagtcgacaaataatgcatctatagcacaacctccaaataatcacggtgaaaataaacccatcactaaaatttttagaaccatcaatatctttgcagtctatgttttacaagcttaaatcgcataagattaggtttcaattagatcaattcagctccatctctaatattatctcaaaatgactgcctaatttaaccaaaatgaaaaaatctaaaacaaaattataaatttaaaagaacaacacagtgtccaattgccaagaagtgaaaataatagacaaacccgcccgatttattgaaccaataatggaaaaaaaatttaggaactaaatagaaaatttaacttaccaggaataatgactcaggtttcgcaacaaattcatgaggatggtttttcc

SEQ ID NO: 6330 - DNA, 571 bp, Gossypium hirsutum
  Clone ID: LIB3828-003-Q1-N6-H5
aaggaacaatgatgattaatgttcattattaataataatattattattatgggttcagcttctctccattaaaggaagtttcactttccaccaatggattatggagaattttccatttacagcagaagagataaattaaaaggtcccaattacgatctaatcattcccgcacgccccttctttttggtgtttgtcaccttttgcccccatcccacgtgaaccccccccccctcttcttcttcttctccatattcccttcttttcttttctgcattattgacttccatcacaggctgaagatcatggtattgggtactagtttttaacttcttacataattcccatcttacaaaaatcttggagcttcattttagttccattgttcaggagaataccaatgaagacttggagcttgttcatctgaaaagaaatacaagcttcatctgcagtgaagaaattatgttcttccatcttcacgtactggtggggttgatagcttgtttttgtgaaaatgaagcaatccatggaggatgttggtgacgaagaaagagatatcaaaaggtggtgttgg

SEQ ID NO: 6331 - DNA, 569 bp, Gossypium hirsutum
  Clone ID: LIB3828-003-Q1-N6-H6
attggaaatcaaatattgttttgagctatttattcttcataattactctttttatccaacaggattttatagcaagcccttctgcaacatcattacttcttattttgtataattaatacgacgacaaccaactcttcctcattatttcatcttaatatggtatcatctccctactttggtggactgggttcactgtccataacctcttctatccctttgctctttacagtttcagcctggcaacatcctgatgcgcacctgggctgaccacactcagcacaagtcccaccgcaaccctgacggcaacactccccactctcacatcccgactgtcctggcattagtgggatttgtgggacttgtgggatctgtgggattagtggaatttgtgggatttgtgggatctgtgggatctgtggaattcttgggatttctggaatttgaggaaatggtagaacgaaaccaccaggattacaattaccggaacatccagaagaacacatttttcaggaccaccttcaaaaccaaaaccaagagtaccaatttcggaaccttttgggacaacatga

SEQ ID NO: 6332 - DNA, 555 bp, Gossypium hirsutum
  Clone ID: LIB3828-004-Q1-N6-A1
gcagaaatattcaattatttatgtgtgcattcatgtcgccagttattggcaagtgaccataaactacgcatcattaaatcaaatgaaaaccagcaatttgatccatttttgcatcattttgctttgcctgttttctgtgaacaaatgaagcctaaagatcaaccacccaagctgtcttaccatccgtaaacagtaatataaagcaagcaaaatatgctgcaaacggttgggttttatgagatgatgccccaagttccccggaatatatgattggttaaaatgaatttttccgacccaactttctccgcaatctccaatttaatccctacacagaagatctgtccaaactctcgaccattctctctcatctaggaatcaccagctttcaactctgttttgttaacagttcaatgtcagctccaatttctgcaatcttggcttccttagaagcctttgctgctttggcaatgttcccaacatcaaagtccattgctagttttttcaccagaccctcaagcatcagtgatccaatggcaactaaagctcggaatcttg

SEQ ID NO: 6333 - DNA, 582 bp, Gossypium hirsutum
  Clone ID: LIB3828-004-Q1-N6-A2
ggcgaagcagcagtaaaatgaaattccatttaaaatccatgaaagtctgtgtttctctgtaatcaacaggcttattattcaagcacttatcataatcctaccctatagaccattcgtcttaacaatgaagctttcacgagctctcgagacccgatacccgacctttcaaatgatcaaatcataagttcttaagagctgactcatgagttgctttctggggtgtgagtcttgccaacaaagccttgttatggcaatgctcagcatctacaaagtagaagttcccattggccttaaatgtcacgaatggcctgttggtctcggctggacggatgtctgcaaacttaatggttcgtggaatatatgttgctaaccaagacatcatctccacctcgaagctgtctgaaccaggctgccaccggattttgtggatgtaagggctcacgaaccagtgaagtgcggcagttgttgtagcactaaagaatatcacagaggatgctaccgcacctttcacaatcacattcatatcaggagaagtcatgaatgtaatgacagggcctaacgataccgagaggcagcaggtcg

SEQ ID NO: 6334 - DNA, 576 bp, Gossypium hirsutum
  Clone ID: LIB3828-004-Q1-N6-A3
aaagaaaacatattattccttgacacaaaattaaaacttaaattaccgacaagaagaaaaagaaaggaattatacccaacaacattaacaacagcatcggcttgattttcgtgattaaaaggccgagaagcgtggcctgatctgatctgtgtttgtactaaataccttaagattaatgcaagtcagcttgtgcacccaggtcggcactggccacattaacgtatcacagtactaaaaaccatgctccagttttatctgtgtatcagctgaactttctaaatcgtgggaagtctttttaattttatcgatgaaagagaaattgcgaaaaccggaaaacgatttcatcttccatgaaaaccactcttttatcgattagacaatccaaccatctagtttctatgcacgcgcctaaaaaggacaccattcgcatcgcacgtgctcctatcaggctttggtttttttggtacggtaaaaagtacacgtgtcaccccaagacccccccactgcaaaagtctagccgaattgtgtaggttgaaactgattccccttatattctccccctatccctcgctcttt

SEQ ID NO: 6335 - DNA, 563 bp, Gossypium hirsutum
  Clone ID: LIB3828-004-Q1-N6-A4
gaaaactgctgagtggtaaatattttattacattaaagccaatacaaatcagagattctaccggctaaaaagacaatcccagagacaacacagtctcaggtaacagaatcttaaaactagatgcaaataaatgcaataggaaaaacatatatttagagtagcccaaccttgaaacaagtttggttcagaatatctctaagccacagctggcatgtccttaagccaatcatccaatggcttcccaatggaatagacgatgaatccaattttccgcagcttctctgcgtcgacgacgttccggccatcgaacacgaaggccggcttctgcatgtcattgaaaatcttctggtaatccaggtttttaaactcgtcccactcggtgagaatgcaaatcccatgagcatccttggttgcagtatatgcatcccaaaccacacttacgtccttcaccgaagtagggctcatcggctgaagatggaccggatggtcccagtcgaatttcttcatcgaaagatccctctgaatctggtcttggttcacttgtgggtcgtatatgctcagtt

SEQ ID NO: 6336 - DNA, 421 bp, Gossypium hirsutum
  unsure (1)..(421): unsure at all n locations; Clone ID: LIB3828-004-Q1-N6-A5
gggtactggnaagnaagcaacagttatcttcccttggtgaattgctttctggttctgctgggatgggttttactccgcatgtcatcaccattgcaataggagaagacattgcaacaaaattaatgtcattttcacagcaaggaccaagagaagtatgcattttgtcagccaatggtgccgtctctaccgtaactcttcgaaagccgtcatcgtcgggtggcactgttacgtacgagggacgatttgagatattatgtctgtcaggctcgtacctgctgacaagcaatactggctctcgcaatcgaactggtggtcttagtgtttctcttgccagtcctgatggccgtgtcattgggggaggtgttggagggatgcttattgcagcaagccccgtgcaggtgattgtggggagttttatatg

SEQ ID NO: 6337 - DNA, 599 bp, Gossypium hirsutum
  Clone ID: LIB3828-004-Q1-N6-A6
gccaaattctccataaaagagtcacattggttcaacaaaaatacaaaattcttccttcaattttgtttcactcaacagcctaatccaacactaaaaaacacataatatttggtgaatttgtacccatatatatatatccctattgcttaatggcccctttattgacatactgcgttttttagcttcagtataaagaataacccctgccactgggagtgagtatccaagcatcccggtaattgatactggatttttgaatatcaagatcgatataaccacggccaccgcgcctttcgcgtttcccaacacctggagagtcaagggactggtatgcttggtgaccaagaaattggctaagttgacaaaataagcaagtgctgaattgaagaggagatatattaagaacttccaatcatctcttgcaagtgcaatggtgatgccaactacacctttttccatgtaaagagctggtgggaaaagggccaccacagctataggtgccatgtacattaataggttcatggcgttgagcttttccccttcggaagacagcaaaaggccttgaagcactgatttaagagctcttgctgctgtggcac

SEQ ID NO: 6338 - DNA, 568 bp, Gossypium hirsutum
  Clone ID: LIB3828-004-Q1-N6-B1
ggaaaacacgtgcaaatttgatccatcaccttctcagaatgaagcatccattaccaccagaaaacaaccaatttccgaacccttacaaagttcttttaattatatcttattacttataaaaaaacctatggttttacaatctcttgagacttttctttctagcatccattttcttcttgtctgcagggattttcgacagaccttccttcttaggagcagttcccgagattcctacgacggcggttccactaactccagtttcagttgccggaactataggctgctgctgcggctgcgactgatggtctggattgttgcctccttttgtcgatgacggagcgagtggggatggcaatgataacccggcaccacttgctgcatttttctgctcgatattcagaaccgaggtgttatgctgctccacgttcaatgctgtagttgactcgcaaatagctcctgatttcaacttcggttttggtttcgcatggattccagtataaagcctggcatgccgggcatactcgtcataattttcaagcagcatcttgccagcctgttcatttagtgc

SEQ ID NO: 6339 - DNA, 570 bp, Gossypium hirsutum
  Clone ID: LIB3828-004-Q1-N6-B2
aaaaacataatgtttatttggaatcataggtgactgaaaatctagtttaaaatggtggtaaccatgtgatagcaatggggcttcttactttgtgcactccgtccttccacaccagccctccaaactcaggcattgtttgtggggattttcttgtgaaactgatcttgtaagacagtttctggtttcttctagtgaaatttagagttttgggctcaactttaatggtgacgcctttaaatggtgaaactacaacatggtaatgtgaagcaggaggaccaacatttgtgactgttctatggagagtcaaagttgaaatggctgtatcttctgggaagacaactgagattgctgggtagttcaaatctcctggagtggcaagggtgttgtgatggcaagacatattggaatgcttgctaaaagcttttagctgcattgcagtcaatttctgtgtgcagaggaatacaaagtaatcctgggctgaaatgtcatagatcaaacctgggtctagagctttcaaagggttgatatgaccagctccatgatcatagggagtggaagctgctgcagtgg

SEQ ID NO: 6340 - DNA, 318 bp, Gossypium hirsutum
  Clone ID: LIB3828-004-Q1-N6-B3
tttttttattgcaaatcgaaattgttttgagctatttattcttcataattactctttttgtccaagaggattttatagcaaacccttctaaaatgatttatttaaataatatttttgtttatttttaatatccaattaatcaaaaataaatgaaaaacattgtaattttacttaaaaaaaaaaaaaaaaaaaaaaaaaaaaaaaaaaaaaaaaaaaaaaaaaaaaaaaaaaaaaaaaaaaaaaaaaaaaaaaaaaaaaaaaaaaaaaaaaaaaaaaaaaaaaaaaaaaaaaaaaaaaaaaaaaaaaaaagaagggagg

SEQ ID NO: 6341 - DNA, 583 bp, Gossypium hirsutum
  Clone ID: LIB3828-004-Q1-N6-B4
aaggtaaacatgtaatttttattcatataatatcattacataagataaaacatagataaaatagtttaggtttatttatgaggccttaacagggccagacatcacaatcattcacataaaatccagaaacctcattttcataggagagcttagaaaccaccacgaagacgcaagacaaggtggagagtggattccttctgaatattgtaatcagccaaagtccttccatcttccaactgtttcccagcgaaaatcaacctttgctgatctggtggaatcccttctttgtcctgaatcttcgccttaacattgtcgatcgtatcggaactctccacctccaaagttatggttttcccagtcaacgtcttgacgaaaatctgcatcccaccacgaagcctcaataccaaatggagggtcgactccttctggatgttgtaatcggccaaggtgcgaccgtcctcgagttgtttcccggcaaagatgagcctttgctggtctggtgggatgccttccttgtcttggatcttggccttgacgttgtcaatggtgtcagagctttcgacttccaaattatggtcttgcc

SEQ ID NO: 6342 - DNA, 550 bp, Gossypium hirsutum
  unsure (1)..(550): unsure at all n locations; Clone ID: LIB3828-004-Q1-N6-B5
atgaattatctattcattcaaaggtggtggacgaaattattcattcagaaccaggcactgttgcatacatgtacaaagtttgggttgagattttggatatttttctatttataaaagcaaaaaaaaaaaaagtatatatatgagctgagagagttggtaatacaaaagaattgaaacctaacctagttcagaataatattgtacacatattctgtctcagctccttgttatgatctaaaaaagacaattgaatttctaaaaagtttgcacatcttaccttcctatttcttaatgttacaaaatgggtaagaatcctgtatgttggaaaataaaatgctgttcaaagactaatcagtattcttcatcatgtgctaaatatatagatcagcatggccccagtacctgagatcagtaacaccaatcaaaccgtaattgtcaaaccagtcattccaatcctgaatcattgcttagcctgctaaagaaactttggtttttggattccgggagacgctagctttacggtgttgagggttttctcgnacgcgtgggc

SEQ ID NO: 6343 - DNA, 554 bp, Gossypium hirsutum
  unsure (1)..(554): unsure at all n locations; Clone ID: LIB3828-004-Q1-N6-B6
aacataaacccagataatacattagnattttaaaatacaagatattgcccaacaatgttttctcacaagacaattcccctactatttggccattaaaaaaaaataaagcagtctcgatgtgctcttacaaagcttcaattttcattatttctagaattgcgttatcaggtgcctgattcctccctggatatgcaatcgacaagaaagaaaaaaccacttcggggtacaatcgaatttatgcctactcattgaaacaaacatctacgataaaattgtggtgtccctcaattggaacagcatagctctaaaatattcagtcgcgagttgctcctactagtgcaatgtgctcgattaggtcaagtactcggttactgtaaccccattcattgtcataccatgaaacaagcttcatgaaagatttacttaaccctattccggctttcgcatcaaaaatacttgacctcgaatcaccaacaaaatcattagagacaacatcttcttctgtgtatccaagaatgcctttaagtggcccctctgcagcatactttatgact

SEQ ID NO: 6344 - DNA, 578 bp, Gossypium hirsutum
  unsure (1)..(578): unsure at all n locations; Clone ID: LIB3828-004-Q1-N6-C1
aaaataaattcaagtttttacattaccatacatttataaatggaatgcttgcttttgtcctacttacaaaaattatagtttccattaactcgaatgcctaatgcatttcgcatacaaccagcatgtgtctacaataagctctaacaaaccaaattctactgcgtgccaaacaagaaacaacaaataatcagtgccgtagaaaaactgtgcgacgaagtaaggcaaatgtcatgagtcatcgtagtgatgatccgtctcgtcaaagatctcctcctgtaaaagctcttcaatgacatcttccattgttataatgccaacagcctcctcttcttcagggagctgtgggagtggattgccatttagatgtaagatgtcagaatcagtaccctttgaccatttccggctccgggaaccacttttaaaagaatcattcgaagtgggaaagctcttccacttcttcagtgatcgtttacgtcttacagcgttttcttgaggatatttctcaccatcaatgtcaaccttcacttccggcaaagggctcctanatgagttgctagaaggcggctggtctgtcttgt

SEQ ID NO: 6345 - DNA, 561 bp, Gossypium hirsutum
  Clone ID: LIB3828-004-Q1-N6-C2
aagctattataattatcattaattttaataaaagtaagtgcgtgcctaagccattataataatcatagttgttttaataaaagcaaacaagtgtccgaaacaaaacaacccaccacacttataatcatccaccggctgtcctattgtcatccatcgaaaagacagaagaaagagagatcatatagcattattctactaataaaaaggaataggaatagattggggaaaacccagtaggcagctagctgctgatcagtcggtggtggtggtttcaattaggtttgtgaatgacaaaggacatgcactgaccttggtgcttgttgtcaaatgccaggcaacggatataagcattggggtatgcctttttgcactcgtgaatttctttcaggacttgagaagagtcgttgcacccaaacatcggcagcttccatagagtccaatacctcccatcatagtaccctggaatgctgctattctccctgtggacagcccccacctcatcaaattcaagacaaggaatccacccttttttcatcatgtaatcaatttcctttgcaatcg

SEQ ID NO: 6346 - DNA, 519 bp, Gossypium hirsutum
  Clone ID: LIB3828-004-Q1-N6-C3
ggggaaaaaaaaaaattttttttttcaatttccaaaaccggggaaaaaaaacaaaaattttccaaaaattcccaaaaaaaaaaaaagaaaaaaaaaaaaaagccggggggaaacaaaagaaagggaaaaaccaaagattttagggggggaaaaaaaaaaaaaaaaaaaaaaagggggtggaattgggggaaaaaaaaaaaaaaattcccaaggggggggcttttttggaaagaaaaaaaaaaaaaaacccaatcccttggaaagggcaaaaagggagggggggcaagtacattggataaaaaaaggaccctgggggagaaaaaaaaggccaaggttttaacaaaacccacgggggaaaaaaaaaagggaaaaatttgtttgttttcaaaaaccaaaaaaaaaatttccaaaaaattttttttttttaaaaaaatggggagaaaaaaattctttaaaataaacaacaaggaaaaaaaacgtggggaaaaaacaacgaaaaaaaaaaccagagggggaaaa

SEQ ID NO: 6347 - DNA, 566 bp, Gossypium hirsutum
  Clone ID: LIB3828-004-Q1-N6-C4
ataacaaatgtttaatgaacatagacaagagataataatacaccaataaatttacacaaactttacaaagcaaaggtatgaagaatgacaacaacactttctttcacattgcacacatgtccatcccccattcacagtcctcaaatattcttttctttcaatcaatacaaataaaataaatcccaagacccttaattttccaaaccaaaaaccaaaaagaaaccttgtaacttgttcttctgcccatcagcattggccaagtcataatccccaaaggattttattcagaataaggtttggccttggacctatacaccaacttcttcttctttgtggtttggttatcaattgttaatacaattttcccaggctcacccgttttgaagctgttggagatcaccgtttcatcggccggacccacttttctcgtcttcgatacaatcacggtgtatccatcttcagctgtgggcacaaattcagctccatagttcacgtcccaccccacaactcgtacctcccacaccacagtactcttctgccatttcaacacccaaaccaaatgttat

SEQ ID NO: 6348 - DNA, 577 bp, Gossypium hirsutum
  Clone ID: LIB3828-004-Q1-N6-C5
gcaaagtaacttattattgccataaatttaatataagttgatacatgaactgaataggcgttaagcttcccgcccacaccatcaaaggcttctagtctttaacaataaacacacaaattcataggattctaaaaaaggaaaaaagaagaagataaaactgcaagccaagtggagcacgaccaattacttaaaaggcatgtttgtttaactttaagcagcaacactatggagcacaacagtctcaacagtgaggccaggtccaaacccaaagagcactccccactccaatccttctcctgtggtctgaagcccatcttcccttgatttcttcctcatctcatccaaaataaatagaacacaagcacttgacatgttaccatactctgaaagaacgtgccttgtggctcgtagcttctctggcttcagtgctaatttggcttctacttgatctaatattgctggaccaccaggatgagcaatccaaaaaagggagttccaatcggatatgcccaatggttgaaatgcttctaccaggctcttttctatattcttcgaaaaaagccccggaacatcctta

SEQ ID NO: 6349 - DNA, 561 bp, Gossypium hirsutum
  unsure (1)..(561): unsure at all n locations; Clone ID: LIB3828-004-Q1-N6-C6
aattcanagctatcagatattatagcaagcaagtcctcaaagaggaaataataattgtaagttgctgcctatgcttggatcacaacacatcatgctagtttcaacgttaaaccggaaaattgacattgctcaatttcaatgttgaatacttcttgttttgagactcattgccatcagagaaaatcacactacattgcagctgtaattgatcatcagtttcacgagtgaagtttgtcccttgcctactgcagccgcaaaagatcttccacctcgccttcacctaagcttctgcttggtggaacttttcttagccgcttccttaaccttctcaatatacccttcaataggtggagtcaaagacgccatcaatcgatttgccggaaatggggtcaaatctggtatcatagccgcctccttaagtttctccggcaacgcatcaattgcctcctttttcattctcaacaaattagtctcagcagcctgccttgccctatgcttcctcatcaaaacccgactatactccttggacaatctccggccatcctccaccgtcagctcata

SEQ ID NO: 6350 - DNA, 567 bp, Gossypium hirsutum
  Clone ID: LIB3828-004-Q1-N6-D1
gtaattaaacaacaccatcttcattaataaaatagagcaaagtttagccactctcattttaatggagtgacaatttggtacaaaaaaacaaaacacttaaaccactagtaacaactaacaacataaaatatatagttagtattacagtgcaaccttatgcttaaatgacttgaatttcaaataggaaatttatagggataataatgtaaaaaaaaagggtcttcttttgagtaatttaagggcatttggggcctccttccttggttttccagttgttgtagcaagggcaaacttgtttgttcccataataccctggaggaacacaaaggcatgtcctgcaacatttctgacagaagaacatgcatggtttatggtactgtgtctggctacacctccttgtgcactgagatggacattggtaaggcttgagacttccaggtccataacgtttgttatcataatggtgaccaccatgtccatgtgatgccataaccaaagtttgaaccatggagatggcaatgagagccaagaagaaagtagcaacaagtttagccatggagttttctt

SEQ ID NO: 6351 - DNA, 559 bp, Gossypium hirsutum
  Clone ID: LIB3828-004-Q1-N6-D2
gtaaaaccgactttgagatttcagataagtcgtctgatgaatccaattacttgatagagattgttgtcttataatccacgattggaaatatacaaaagaacagacatatacacagaatctaattgaccttccacttcatacaatacacttccatatgatagccagtcggtttcctaatcaactactcagagaaggcccaaagtacatgcaaattggtggattgatcctcaagatagaaagtatggctgatggtattgtccaaataccgtcaccacaaattaaacctgaagcaactgcacccgcgtaatcctctgcttccttctggttaattcgttcccatataaacaagattactgttccaacgaacatgtcgaccgcaaagtaagctccaatgtaaaatggaactgccatagccattggaataggaatgaactgtgaaatttccttgggagtcacatccctcaagaggtttacaagaacagcaccaatgaagaatccgaaacataaagccaaacaatgcttgtggaagttccgagaagccctcaataccaagaatggc

SEQ ID NO: 6352 - DNA, 594 bp, Gossypium hirsutum
  Clone ID: LIB3828-004-Q1-N6-D3
gctaatcttacgttctcatgctcattaactttcagtcgtgttgtttcgcatataaagcattctacaaataaacattcccttcccaacttcaaaatccgtacggtttgttacccatcatatcttctcaaatctttggtgtatcagctcggaaaactaactagatttttcttgatcggtaccatgaaacttcctccccgcttcaactgcttccctaaaagcatttacgagctctttattttcggggtcaagctgcacaccctcgtaaaaggcattagctgcttcatcatatttctgcaacaaacgcaatgcagcaccttctctatagcaagcttttggccagtctggtcttaatgctctgcaagcccttgcatctgttaaagcatgctcagcttgtccgagacgaatccagcaaaggcttctatttgaatgcagtgcagcatccgttggatctaaatcaattgcttgtgtatatgcatctacagccatatgaaaatcttttcctttgaaagcctcgtctcctcttgatttggcttctgcagctttcttcttcgcttcgggtgtcacctcagggagatcatttgccggcaatgcagt

SEQ ID NO: 6353 - DNA, 419 bp, Gossypium hirsutum
  Clone ID: LIB3828-004-Q1-N6-D4
ccacaacaccaattgttgtattcttttttattaaactacctgcaaagatgggggaactttacaaagcatgaaatcagcccattaccttcactattatactcacctgaaagagcaaagcaatggtagaatgcaaggaatgaagaaactaatgactaccgttaaagaaacaaacaaaagcaaaaacaaaaactgatgactacaggcaaatattacatatgaagcacatcagccccatactagaccttgttcgacttccaatgcactccaaaggaatttcaccaacatctcacaagataaaataaaaaggcaaaaaagaagtttgtgtcacatacagtaaagcaaggctgcccgaaatacccagaatgcttatttcttaacttgcctgaccagaagagacagctgccgtcatagcatcttca

SEQ ID NO: 6354 - DNA, 579 bp, Gossypium hirsutum
  Clone ID: LIB3828-004-Q1-N6-D5
aacaggcaaaaagaatgaatcttcattattggtgaaatcgctttagtagcaagcagagaatatgttccattccagatgcataggacaaagagtccaaaataggagaaacaaaatacacaccaccatttacttcttcttccctgctttgcctacttttcttctgacaaccttatcagcgtatttcacaccctttcctttaaatggttctggaggtctccatttcctaatggtaacagcaaattgaccgacgtcacttttgtcatatccacttacaacgatcctcgtgttctcttaacacctttacttgaatgtcatcagggattgccatcctgactggatgggaaaacccaagacttaacaccaagtcttttccttctaacggtgcacgatatccaacaccacattagttgaagtctcttctcaaaaccctttgatactcccaccaccatattgtcagtaagagtcctgaaaaggccatgcattaggttggctctcctagtctccactgactttctgatcctataggctccggattcctccctatcaacctttacttctcgtggatatgtcaatgccatt

SEQ ID NO: 6355 - DNA, 401 bp, Gossypium hirsutum
  Clone ID: LIB3828-004-Q1-N6-D6
atctcggatttgtgcacaacaatattacatacaagcaaacgttatccgtaccaactgtactcctgtagaccggggcactagtatggagaacacaatctcaggacaggtgccctggacagcgacaacattctggaagcagaaaacggaacccttctattaatgtcgaaaacacgacatgtattgactccggactctacaacgccagggcatctgtagcaagaaactcggggtatagtgcttctaggaggatacaagcccctttaaggcaatggtccaccattgtgcgaaacgctgtccaggaccggaaccccagggcgttcccctacctcttatcacagcaccgacgtgggcatggaatggtccatgggcaaccagacccatgaataggtctcacattcccg

SEQ ID NO: 6356 - DNA, 61 bp, Gossypium hirsutum
  Clone ID: LIB3828-004-Q1-N6-E1
tcgcgtttttttttttttttttttttttttttttttttttttttttttttttttttttttt

SEQ ID NO: 6357 - DNA, 541 bp, Gossypium hirsutum
  Clone ID: LIB3828-004-Q1-N6-E2
gaaagggggctcatgccctttatagcaaaactagttaaaatggtaacataaacaattatagacagattcttatacatcaaacgttttccaccaaacttacgaagattgttagccatagatcaatcccaaggtacaggtgacaaagccgagagtaacttcccaatcactttatgttctaatattttactccacgcctcgttgtaatattcctcattgctcacacaatccacaatcatctcatttttgtccacaatagaccatgacactctactggtgtcccctcctgatttttctttccttttggttgaatcttcaacctctatgccttccttatccgctgccaccggatcttcaaccttgatatattgatccttcgcttctaacgttatttttttaaattttcttaaaaattcatcggcctcctcttcaagttcgcgtgaataatcgaccttctcatcaagttggcgtggtgatggtgcaggaggaggaggaatttcatgacccatgagtattataataacaatgacaagattgaggaaaa

SEQ ID NO: 6358 - DNA, 433 bp, Gossypium hirsutum
  Clone ID: LIB3828-004-Q1-N6-E3
aaaaaaaaaaaaaccggggaaaaaaacccattttttttcccaaaaaaaacaaggggaaaaaaaaaaaaaaccaaaaaaaaattttaggtttttttttttggggggaaaaaaatttttaaaaaaaagggaaaaaaaacccccgggggaaaaacccccttggggggcccccgaaaaatttaaaaaaaaaaccaagggggggaaaaaaacatttttttaaaaaggggaaaaaacgggggggggaaaaaaacctaaaaaacccccttaaagggggggggggggggtattaaaaaaaaagggggggggaaaaaaaaaaaaaggggggggggggggaaaggttttttaaaacacccaaggggggggaaaacctttccaaaaaaaaaaatagggtttttgtaaaaaaaaaccacaaaatttttaaaaaaaaatttttttt

SEQ ID NO: 6359 - DNA, 581 bp, Gossypium hirsutum
  Clone ID: LIB3828-004-Q1-N6-E4
aatgcaatatatttttatatatataagtagatctttacatgctttggaggattaagatgaaagaattccaaaaatgacatccaaatatcagaggttcaacgtaccaaacagaagttgaaggcatttgaacatcgaagttgacgattcataatagcgtccaaagacaaacttaaaatattaaaacaaagatctaatagcagtaacccatgaaagttcgaaaaccacatagctaataataatcccagataagcttccagacacattatttaaaaccaaaaaaaggccaccaacaacggcaaacaatccttacctagaaaccaccgcgaaggcgaaggacaagatgcagagtagactccttttggatattataatcagccaatgtcctgccatcttcaagttgcttgccagcaaatatgagcctttgctggtctggtgggatcccttccttgtcttgaatctttgccttaagattgtcaatggtgtctgaactttcaacctctagagtgatagtctttccagtaagagtcttaacaaagatctgcatcccaccacgcagccgcaacaccaaatgaagggtagac

SEQ ID NO: 6360 - DNA, 392 bp, Gossypium hirsutum
  Clone ID: LIB3828-004-Q1-N6-E5
aggccgactactcgtcaaatctattgcagtccatatagagtcttgaacaaagcttcgaagagtcgaagttcacacaatagaataagcaaaaacacacgataaaagcaaacaaatcattgggtagcaaaatgcaagccctccactcaaacattacttatttagtactcatcttcatcttcctcatcaccctcgcctgactcagcaccgacttcttcataatccttctcaagtgcagcaaggtcctcacgagcttccgagaattctccttcttccataccctcacccacgtaccagtgaacaaaggcacgcttggcatacatgagatcaaacttgtggtcaatgcgggagaacacctcagcaacgctggttgagttggaaatcatgcaaacggc

SEQ ID NO: 6361 - DNA, 555 bp, Gossypium hirsutum
  Clone ID: LIB3828-004-Q1-N6-E6
agagcaatcgaatgatattgaaacttaaataggaagagattaatacccagactttctgtctagagcaatcaaatagcgtatgtacataacatagttaattcctctgattaagaagaaaaaggagcaaacttaaaatctgctattagagttagagagtttcccatagtctgctgatacctacaaacagtggctccacaactttgacaattttagagaaagcacgcgataattagtcgattcctgccagatttcgctaccaaatacaatcaaaattctgcatgagcacctttgcatatcatgcagaagtgtatcttaaacacttcaccaattatctggccctggtaagcttcaaagaaacccagcagaacatgatattcacaatgtgaagacaccatcttccaactaagcaaaacgcagtatcttgaacaaactcaagttcctactaacttgattgctgaagtgataacttttcctatacaatggatatgtacatcggaaactgcaatcacgatgtgaactggggtatggaataacaccctacacctggatattatt

SEQ ID NO: 6362 - DNA, 577 bp, Gossypium hirsutum
  Clone ID: LIB3828-004-Q1-N6-F1
aaaatgaaaaagactgtttttatgtaatatgaataaatatattaattacaattgcactgaatctgttggtatggtttaagcggtggcacttagggtttttgggacagggctggaacatggagtcgggtttaatttgccactagttttaggcttgacattcaaacattgggatgttgcgggttcaggtccggtgtgcttaatatcaatgtctgcaagttccacattttgacatggcgaagaaccgctgcaaataaacttgacagcttctggaagcgcagatgtgccacggatgttcttgaagctaatgttgcttagtttaactttcgattcttcatttatcttgcatttactccatgggcaatatttttgatcaattaggataggggaagagacattattcacgataatatcctcaaaatgtacatctgatactatcccaggagattcgcctggccaagttttgattcgagctccattcgaagtattagtgatggtgcagtttgtgactttaactccctcaactggctcttcatttgggtactttccaagactaccgatacttataccatgtcctggt

SEQ ID NO: 6363 - DNA, 504 bp, Gossypium hirsutum
  Clone ID: LIB3828-004-Q1-N6-F2
ataaaatcattaggggcactgcaaattcaacaatgccctgattcatttgcaactaacttctgctgtttaaacagggtacggattcaaaatttacattttacctggtcgctaggagagtgaatataaagagtattaatttcatattcttcaacttcggggcaaggggttcatcattgaacgtttgatgtacaacttgatcttcccattcaagcaaactgttatttgtcatcagttctgaaagagtttagtcttcttagtctctcatcaagctctttcattacttctggttcttgctttttcctttgctttgatattgggtttggcgccataaaaccgatcttatcaaacgcaactgtcaataactcatcaggatcaaaaaggggatgggtagttctttgtaatatattaataatggcgccaacctgatgcgttaaaagcaactcgtcttccttcatcataaatattgccaaagcagcatgaaaaagaacctttgccccctcgtaa

SEQ ID NO: 6364 - DNA, 509 bp, Gossypium hirsutum
  Clone ID: LIB3828-004-Q1-N6-F3
aaaattcaaacaatagctttattaacatagatcgataatagccaaatgataaaacatccaaattaaaaagaaaagaaagcaaaacccattattctatcatcctaaacatatccaaatgccactctaaatgatacaaatcttttctgtcttttgtgcttacttcatcaatatatggtccaataccatgtgaatgaaaataaggaaaacataactattaacataaggtttaaatccaagacatctcgtcaaacattgttctttaggtaaacttgaagctctgattcatggcgcttgattaagttcactttaagcccatgcttcatgtacattgttaaggcaagctttggtacaaccacatgaccttttaccacctccacccgataccgatacaagatcgaggctgccacgaacttcatttgataataagcgaaatctttccctaaacacagccgtggaccgccgttgaaggcggtgaatttgtaagccgattcgctcatgtaccgcccgtc

SEQ ID NO: 6365 - DNA, 568 bp, Gossypium hirsutum
  Clone ID: LIB3828-004-Q1-N6-F4
gaagcaactttttcataatctaatattatggtccttcaagttcaattcttgaagatatcaagtgatacacataatttgaaatttaaagtagattctcatacaacaatataaagcagaaggtaagaacactaggctttaaaagtctaaagaggaaaaagagtgcagagaggtcataactacataactagtacaattaaatagccatatagcaaagccataacccagccaataatagcacggagcttccgtaaagccgggctgatccaaaaggagtggtgggcgccgcagcagccactgcaactctgggcctttcgggctcggggttcccaaaaggcatcacctccacgtgtagctttagaccgttcttgcagctctcttccttgccgcttacgaaataacggatcccttccccatccagtgggatgccatctatgccgtccgtgtacattcttatggggttgctcacatcgcacgactcatattcttccgggctattcacctcagcaatgctctcctgtgctgcggcgtaggcaaaccaaattttgtctccaacctctgaactcctacc

SEQ ID NO: 6366 - DNA, 545 bp, Gossypium hirsutum
  Clone ID: LIB3828-004-Q1-N6-F5
cagttcccaattctttgtatcggtttcaaatagttctaactatttccggttatatgtccccaattcaaccagtcaagttatacaatctagcattaaacaaaagttatataaagctcccccgagggaactcataatcacaatcacaatcacaaacacaaaaaatgaatctaaacctatagtgagctttggtttttgttgtacatggaaaaacaaaaaacaaaaaaaaaagaagagcctggccaatgtactagaaatatccctcaagaatcaaaacctgcattcaatgatgactatgcagcattgaccggctcagcgacagtctctctctgagtcttacacctattgcattgagctcgagagcatagttgtgattgttgcactttgtgcacatccaatctccactacgccattgctttgctccttttccaagaagggttggtgctgcagctagttgaggaaatggaattggtaactgccaatttgaagctgcaccgggaggatatgcccccagattttgggtcagtattagcttctatcatttgctc

SEQ ID NO: 6367 - DNA, 546 bp, Gossypium hirsutum
  Clone ID: LIB3828-004-Q1-N6-F6
atctcaaatcatcagttccattattgttgaagtaaacaattaggaaaatagtgcacaatgcccccactataattagaaagcttcaactaaatatatatatggcgaaattccaagaaacttttagcagtattttcaaggttttttttttaaatataaagcaaactgaagggatagtgggaccaatcaacttctccatacaaaaacaaccagagaagtaaaatactaactcgaagattagggattttactgttgtttctcatcctcaggtttggaggcttctttgatttcatcggttccatcctcctgcatatccgaggtccacaaagtaaggttatcacgaagaagttgcattatcagagtgctgtctttgtatgaatcctctccgagagtatcaagctccgagatggcttcatcaaaagcttgttttgcaagactgcaagcgcggtcaggagaattcaagatctcatagtagaagacagaaaagttcagagccaatcccaaacgaataggatgagttggagcgagctcggaaactgcaatgtcctg

SEQ ID NO: 6368 - DNA, 532 bp, Gossypium hirsutum
  Clone ID: LIB3828-004-Q1-N6-G1
aaaaaaaaaaaaaatggttttttgttttatgataaaaaataaaaataaaaatagtagggaagaaggggggaggggggaagaggggggggtaagggggggggggggggggggggagggggggggaggggggaatgggggacgggggggaggggggaaaagggaaaaagggggggggggggggggaggagggcccacggggggggggggggggggggggagggggggagaggggacggggggcggcgggggggccaggggggggcagggggggggggaggagaggaagggggagaaaaggggagaactggtggcggggggaaaatggtagcgggtcacaagaacacacaacaaacgagccgggaagcgaaaaggggaaagcccgggggggcgaaggagggaggaaacaaacaggaaagggggagggcccagtggccgcattgaaaaagggaaaaaacacgtgcaaaaaggagtaaagaaaacgccaacaaggggggagaagaggctgggcgacagggggcaagaaaggtttaac

SEQ ID NO: 6369 - DNA, 575 bp, Gossypium hirsutum
  Clone ID: LIB3828-004-Q1-N6-G2
accaaaatctcttgtaaattcatataatttatcaacctattgaaaataaaagaaggaaccattgaagtcacacctaaggggaattcaagcaaaattccaagtgtaatcactgtaatgagcttaaattgaaagaaatttcattttggttttttaaagaaaaacaaagaacctaagcattttctaggtgatgatgacagcttgaaggcaatggaaagagtaaagcccttcaagcccttttcggcttctttgaaccaccttctttcttatcctctgcagcctttttcctgtcctttctctcccttttcttcaaggcagtcatgtgggccttaagaatggtggcatatgaagcttggaaacgctggtgatcctttgctcccaccgaagtagaaattgtcttttttccattagttgcacgaacaaggcatcgatattcaatgggttgttcagcagtcttcattttgttcctttgagccttcgattttaaagatgatcgtttaagagtaacccaaacagagcctgtctcagtgcttcgctcaaactgctcgtaagttcattaagaaaggggtctgattgta

SEQ ID NO: 6370 - DNA, 498 bp, Gossypium hirsutum
  Clone ID: LIB3828-004-Q1-N6-G3
gatcgaaaaatataaatttagcataaatgtatggataatattacattaaaactacaagagtccattgtaaaacccacacttcaaaaaaaaaaaagaaaaaaatgtttgacaaaagaaaaaaagtttaaatagaaatgatcgaaaaagttaattttagcataaatgcaattaagcaatgcttacaaatggtagtaatatgcataaagagagggtgaatgttggaaaaaaaagtaaaacgcaagaatagctttgcgtattcaaattgcccgggcttttataatgtcaaagctcatttcactagggtctgttgcctgcaactcaacttgaatgccatccaattcttttttgaatctatcttttgagcttgcatacaccatcttacttctcacccttgatgtatccggtgaccatgcaatgaaaaaaattttgcttttctgacagttctcatcagtggtgaagtcgaaatcaaagacggcatagcgacattcatcggcaggt

SEQ ID NO: 6371 - DNA, 574 bp, Gossypium hirsutum
  Clone ID: LIB3828-004-Q1-N6-G4
ccaaaataaaattcatcaaatttccacttcagaacataatcaaatcaaagtaaatagtttttcatatactaattttcactgccgtcacacattgtttcctatcggtaaatgcaaattaaaacatccagaacgggagagcaagtacgtgataaaatctcaggccgaaggaactgcagcatccttgacggattcacgccaggcatattctcttgctccatctttatcgacaatcttgatgacaaagtttggtggtgccacaaccagtctagatctgatctccattatgcatttatcaactaaatcaatggcttcttccactgtcatgccacttttgtagtgcctgtccatcatagcgagagaaaagtaggatccataaccaaatgctcccttatcaaccttatgaagtgtagcaatgtagtcgatatagaacagagatgggcctgtctctttgtcatagccagcaagaaggatgttcacaaagtatggattcttccttaaggcagtggcaagctcaccgcgagtgaaattagcggcggcggcagtcgtcaaaggaataccgtttcggaactgatac

SEQ ID NO: 6372 - DNA, 530 bp, Gossypium hirsutum
  Clone ID: LIB3828-004-Q1-N6-G5
atataacaataaaaatcatatatattagcatgcacatgcattaattacatatggctacaaaacaagattcaaggaactttaggatattgcaaatcgcaatattgttgagagctatttattcttcataattactctttttgtccaagaggattatatagcgaacccttctgcaacatcataacttccttattgggcataattaataagacgacaaccaactcttccttggtatttcatgttaatatggtatcatatatttactcagggggactgggtaaactgcccataacctcttatatacctttgctctttacagatacagcctggcaacatcctgatgcgcacctgggctgaccacactcagcacaagtcccaccacaaccctgacggacaacactctccactatcacatccatgactgtcctggcattattgggatttttgggacttgagggatctgtgggacttgcgggatctgtgggattaacggaatctgtgggatgtgcgacatctgtgggatttgtgggatt

SEQ ID NO: 6373 - DNA, 392 bp, Gossypium hirsutum
  Clone ID: LIB3828-004-Q1-N6-G6
attatcttattaatgcgctcatttttttattatgcgacttaaggccggagaaagccctatgtctgccatgcgaatataagggcgaggaggtcacataacagggaaaataaatttactctacaaatccgaacaaattattttccctttaaaagaaacatgaaatttgaaagctccattcaaataaagaagaaaggagggacattactcaccgaatccttttaaatactggtcgagctcctttaacagcaagattgggcacatcttggtgactggtaatcacccaaaatcatggcttgttcggcagagaagcgaaagaaaccctaaagcaattgattgtaaaggctgaaatttcttttgatctaactggaggctgcgtttgaagaatgaaatct

SEQ ID NO: 6374 - DNA, 568 bp, Gossypium hirsutum
  Clone ID: LIB3828-004-Q1-N6-H1
gttgaagtgtatttttaaaaataattaactttatgaaaaatttctttataacatagaatataaaaaaaaacaaatttatttgcgaaataaaataattataagagttacaacgtcatcaaaaaaaatatacctctgctattgattaagcggtcggggtagattttgctgggataggggcagaacatgcagctggattttgtttgccactaactttaggcttcacattcgaacattgtgatactgcaggtccagtcggtccactatgcgtaatttcaatgtctgcaagttctacattttcacaaggcaaagtagcactacaaataatcttgacagcttctggacgcgcagaagtgccgtgaatgtttttgaaactaatgttgcttagtttaactttcgattcttcatttattttgcatttgttccatgggcaatatttctgatcaattataataggagaactgacattggtcacggtaatatcctcaaagtgaatgttcgaacaagtgccaggttcagcacctggccaagttttgattctaacaccattggaagtattagtcatggtgca

SEQ ID NO: 6375 - DNA, 531 bp, Gossypium hirsutum
  unsure (1)..(531): unsure at all n locations; Clone ID: LIB3828-004-Q1-N6-H2
tttttttgttttttttttttttttttttttttttttttttttttttttttttttttttttttttttttttttttttaatttttttttattttttttttttttttttttttttttttaaaaaaaaaaaaaaaaaaaaatataaaagtaaaatgggtttgaaaaaaaaaaaaataaaagaaaaaaaaaaaaaaaaaaaaaaaaaataaaaaaaaaaaaaaaaaaaaaaaaaagatttgggggggattaaaaagggttttaaaaaaaaaaaaaaaaaaaaattttgggggnaaaaaaaaaaaaaataaaagggggaggaaaaaaaaaaaagaaaaaaaaaaaaaaaatttttttgaaaaaaaaaaaaaaaaaaggggttggaaattaaaaaaaaaaaaaaaaaatttttaaaaattaaggaggggagggggtaaaaaaagaaaaaaaaaaaaggggtttttaaaaataaaaaagttttataaaggggtttgaaaaaaaaaaagaaggaaaaatggaggaaaaaaaggtnaatgt

SEQ ID NO: 6376 - DNA, 479 bp, Gossypium hirsutum
  Clone ID: LIB3828-004-Q1-N6-H3
aagaaaacctttcataacactaatataatggcaacatctaatacatgtcaatggtgaaaatgcaatgtttaaagaatttcttttctctaaaattaaattatgcttatgtaaacattattcagcaacacaaatagaatgctaaattctgtttcaatcgacaatgtcacatgatatcatgcgatgccgagcgaatcggcaaactgaaaagaccatacgaagtcatatagaacaccattcagacctttccatctcattttcggagtttctcaagttctgcttcagcttctgatatctgtacctttaacattgatattcttcgctcaagatcttcaaccgttcctcttttacacaagggttgatatggtgaaagaaaatgacgtgaaaatgatttcagagcttcaaccccagtaacctcttgtgggagcagtggcagcttcgtgatgttaaagtcatcgtataacatgtaaaactggtcaatg

SEQ ID NO: 6377 - DNA, 569 bp, Gossypium hirsutum
  Clone ID: LIB3828-004-Q1-N6-H4
agaaacaaatttaagagagctgaatagtaagtctgaaaggtatcaattaaactagaatgataaaaagagagtatctcacacattctaaaccaaaaaaaaaaaaagcggcggcagtaaataaattcacttagaagtcaactcaacaatgaacggcactattgcatggaactaagcaaaaatataacgaaccatctaggggtttgtagccctagtgtaaatctgctggcttgaatgggcagacaccaacctaatcaatcctcttgccatcagttccctaatagccttccttgcaagggatccatttatcctcatacgatcagataggatagagggagtgatgagcttgtatttaggagcttcagagagaagcttgtcataggtagcctgatcaaacagcaccatgttattcaccttctccttttgctttcccttgctccacttctgcaaatacccaaaaagaaaaagcccattttttgatcaagtcataagaagcagaaaatgaaccccaataaatacataaaatgaaacatataataataaaaaatgaccttcttcttctgcttgccacc

SEQ ID NO: 6378 - DNA, 555 bp, Gossypium hirsutum
  Clone ID: LIB3828-004-Q1-N6-H5
atgtaatatgaataaatatattaattacaattgcactgaatctgttggtatggtttaagcggtggcacttagggtttttgggacagggctggaacatggagtcgggtttaatttgccactagttttaggcttgacattcaaacattgggatgttgcgggttcaggtccggtgtgcttaatatcaatgtctgcaagttccacattttgacatggcgaagaaccgctgcaaataaacttgacagcttctggaagcgcagatgtgccacggatgttcttgaagctaatgttgcttagtttaactttcgattcttcatttatcttgcatttactccatgggcaatatttttgatcaattaggataggggaagagacattattcacgataatatcctcaaaatgtacatctgatactatcccaggagattcgcctggccaagttttgattcgagctccattcgaagtattagtgatggtgcagtttgtgactttaactccctcaactggctcttcatttgggtactttccaagataccgatacttataccatgtcctggt

SEQ ID NO: 6379 - DNA, 579 bp, Gossypium hirsutum
  Clone ID: LIB3828-004-Q1-N6-H6
gaatctaattatccacattttgtattatataagatcttcaaataacaacgtgtgaaacaaaacgtgaacaatgattcgtattacatatagtggctttgacaattcaatgcttgttgtgaaagatctaaggtaaaattcgaacccacattgatcgacggcaaggtactccattgtagttcacaaagagcatgtaataaccaggtggtgcaatgttgctattaatgggagtttgaagaacaatgttgtttgtatttagggcaacatatttgttaaattccacaattcccaattgaatcaatctctgattcatagcaaccccgtgggtcacaaatggcggcgagtaaatcgtcacttgaagcttttgttggtcaatttcgacgtttccacggatctgcgttgtaaatttctgaccgtatttcacctggttattggacttttcaacaatgatctcttgttggaacatacccaagttcgggtccaagtaatgtggtgagaacttctcaacccgaacttcggtggggaacaaagcatcatcaaggtaacctaggtttgtgttgcttccagcgatgaggatttttg

SEQ ID NO: 6380 - DNA, 560 bp, Gossypium hirsutum
  Clone ID: LIB3828-005-Q1-N6-A1
ttttttttttttttttttttttttttttttttttttttttttttttttttttttttttttttttttttttttttttttttttttttttttttttttttttttttttttccccaaaactttttttaaaaaaaaaaaaaaaagccattggggggaaaaaaaaggaaaaaccccctgggggggggaaaaatggaaaagggggtttccgtttaaaaaggatcaaaggccgtttaagggcccccaaaaaaaggggaattttttaaaaaaaggaaataacttggaccccaaaattggcccaaacaagaaaaggcaattcttttaaaaacgggtttaaacgaattaaaatttaaaaagggcattttttttttttaatttcaaaaaaaaaaggggggggggaaaaaaaagggactttttttaaaacaacaaaaaataggggggaaaaaagggaaaaaaaaaaaattcctgcccagggttaaaaaaaaggggggaaagggcccccccaaaaaaaaacggaaaaaaaaaatttgggtttttaaataaaaggggggccttcccaaggggcc

SEQ ID NO: 6381 - DNA, 573 bp, Gossypium hirsutum
  Clone ID: LIB3828-005-Q1-N6-A2
gcacaaaactcttctagctaattaataccaattcacaaagagcaaaacaactacatacaaattttaaaaagtcatgcatatgtttacacaataaaagtaggcatcatcatttttcaacttagtctgccaattctatattcaatacttcaggataacaatatagcagaaattaaatttgcatccaggcctgccactgtaaaagaatataagaagattgaggtaaaaatcacatggttttaatcagcatccagttcctttcgcttcaactctaatgccattcgctcattctcaagcttcatcctctcgttttccattctcatcttttcaagctcacgatccctcttcttactaaatctctgccacttgaaacgctgtttctccaattctagcatctcaacttgaatttgtagtttctgttcttctagctgaagtgagcgagactcaatccactgcttttgtaaccaagctgctcttgggttttcaggtggtgcttgatttatatcagcttgtgcgggtggtggataagaaaaagacttttgttgcagtcctgggagtttgaagaattatggaaac

SEQ ID NO: 6382 - DNA, 365 bp, Gossypium hirsutum
  Clone ID: LIB3828-005-Q1-N6-A3
caaagtccttttcatctttccctcgcggtacttgttcgctatcggtctctcgcccgtatttagccttggacggaatttaccgcccgattagggctgcattcccaaacaacccgactcgtagacagcgcctcttggtgcgacagggtccgggcacgacggggctctcaccctctccggcgcccctttccaggggacttgggcccggtccgtcgctgaggacgcttctccagactacaattcggacgccgatggcgaccgattctcaagctgggcttttcccggttcgctcgccgttactaggggaatcctggtaagtttcttttcctccgcttattgatatgcttaaactcagcgggtaatcccgc

SEQ ID NO: 6383 - DNA, 503 bp, Gossypium hirsutum
  Clone ID: LIB3828-005-Q1-N6-A4
aaaaaataaataaaatacagcaagtcctttactaacagcaggtccaaatacagcatctgggtcgcgaaccaaaacaacatcgaaaatcggaaattgggtctttaaccaaaaacaaattgaaaagtggaaaactgggatttatataaaccccagagggcaattcaaagatcaaagctttataaactccacggcggacaggacaagatgcaaaggaacctagattgccgcactaaaacacgactcaccagtggacctactttgaaacattgaagggaggtttacaagcaatgcttctaaaaaccgggggggcacataaattgcagataaacttcctttcctggccaacgaacttaatgaaaggataaatgtctcctttgcaaagggaacatcaaacagggccactttccccaaaatccacggccagattggaagggcaccttatctcacaaagactgcacctcccagggtctctaacaaagtaaacggggggagcaagctccaaa

SEQ ID NO: 6384 - DNA, 577 bp, Gossypium hirsutum
  Clone ID: LIB3828-005-Q1-N6-A5
ggtccaaagcttttatttcattacatattgtacacaactcagcttttctcaccctctctctccccatataccataattggatacagatttataagcttatttaaattaactgctgaaaggtggaggccttggcatgccttgcacgatgccgcaagtcaatacaccttccggcaagttgtactcatccttgagggatcggttaggggaaataacactagcataaagctgttgcccaaggtaatgcctgtcccatatctccgacctcaggttccacatcccgcagttgtcgaatgtcaataggattgctgaccaggagttggggaatacctgtatggtgtgtctgctcacagcgtcaagaagattgtagttcatcctcttctcagggctccatttcccaatgtccatgcccacggcaaagaatgagtagccagacaagtggtaagactgaatggcggtctcgggattctcgaagatgatttccacaaagtttctgtgtgtcatgttgaggacaataggtgccaaagttaccttagtgttgtcacttggtggctcatcgggaatggtatcatacttgaaa

SEQ ID NO: 6385 - DNA, 580 bp, Gossypium hirsutum
  Clone ID: LIB3828-005-Q1-N6-A6
gatagaaccattactttgcttaaagaaaattcaacagaagtcaaaaatcacagaaattacagacatgatttaatgttcgaggtggaagacgtattcagttagtcgctgcaatttgcccgggtctaacttctgctccttcacgatagcctgcttcgtcacggttatcattcgagaagtaggatcgaccgtccaaccttgtccgagtacataattcgaggcatcttcctcactcattccaagaaattgagctgcatcttggatgcttattgtcgaataagcagattgcagcagttcaaacatcctcttagtgtaaagctctgagaaagcggcaacaagaacttgtgtttgttgagtccaatcaaaaccacgaatagcctcgtagacaccggcatagtcccttgtccacagcttttgacctattttccaggccgcaaccacctccggttggctctctttgattgcaggaggtattgatttccaaagaaaccttgcactattaatatcatcgatgtagatgtgacccagaagatgaattgcgaaagccattcgtctcgaaaaggaacgccctcgctgctacctg

SEQ ID NO: 6386 - DNA, 547 bp, Gossypium hirsutum
  Clone ID: LIB3828-005-Q1-N6-B1
caatgaggcctaagcactaaaaataagaattgcagtaaccattctctacattcagttaaatccgtttgaaatgcacaaagggcaatccatcgggtaaagttgagaaacgaaaagcagattccatggagacccatctaacttccgacaaattctcaattacataaaatatcccaatcccaatcccaaactagcagggatgccattgaaacaacaaagcgaagagatacatcaaagtgataaatcaatagaaaaaccagaatcactgcattctgccaacaggttcaagggcttcaacagtaacaacgctatttcctctgatcaccaccatgcctatgtcagttttctcattgccattcacctctactgtgttgtcaaccactagattcataaactgatcaaacccacgaagagtaccaacaaccatccgatttgcattcagcttgatctggagtttcttgtccatgtactttttgagatctggaggctggcctgatctgctcatagtgacggcaggttggtctactgcggagcgggagagcgagaaaga

SEQ ID NO: 6387 - DNA, 558 bp, Gossypium hirsutum
  Clone ID: LIB3828-005-Q1-N6-B2
accatgaaaaaaggtcaaaaattcaattatcctcattaaatacatatctgtatctgatattttagacatcatgattttattggaaaatgctaatgattcaattagataaggaatataaccattagctgttgtattcatgaaatggtagatgatctagtaatcttcctgtggttcttcatcatcttcgggaccttctgctccgacttcttcataatctttctcgagagcggagagatcttcgcgtgcttcagagaattcaccttcctccattccttcacctatgtaccaatgaacgaaagctctctttgcatacatgagatcaaacttatgatcaattcgggcgaaaacctctgccaccgctgtgttattgctgatcatacacaccgcacgtcttacctcagcgagatcacccccgggtaccaccgttggtggctgatagttgatgccacacttgaaaccagtagggcaccagtctacaaactgaaccgcccgcctagttttaatgttgcgaacagcagcatttacgtcctttggtacgacatctccacggtacatcaa

SEQ ID NO: 6388 - DNA, 546 bp, Gossypium hirsutum
  Clone ID: LIB3828-005-Q1-N6-B3
ggtagaatagtttgcaaagtaacttattattgccataaatttaatataagttgatacatgaactgaataggcgttaagcttcccgcccacaccatcaaaggcttctagtctttaacaataaacacacaaattcataggattctaaaaaaggaaaaaagaagaagataaaactgcaagccaagtggagcacgaccaattacttaaaaggcatgtttgtttaactttaagcagcaacactatggagcacaacagtctcaacagtgaggccaggtccaaacccaaagagcactccccactccaatccttctcctgtggtctgaagcccatcttcccttgatttcttcctcatctcatccaaaataaatagaacacaagcacttgacatgttaccatactctgaaagaacgtgccttgtggctcgtagcttctctggcttcagtgctaatttggcttctacttgatctaatattgctggaccaccaggatgagcaatccaaaaaagggagttccaatcggatatgcccaatggttgaaatgcttctacca

SEQ ID NO: 6389 - DNA, 525 bp, Gossypium hirsutum
  Clone ID: LIB3828-005-Q1-N6-B4
ttttttttttttttttttttttttttttttttttttttttttttttttttttttttttttttttttttttttttttttttttttttttttttttttttttcccaaaaaaaaatcgggggcaaccccaaaaggggaaaccacccaaaaaattggggggaaccaaagggggaaaaaaaacccgggggggggaatttctgggggctttaaaaaaggattcaaaagaagggggggagggggtcctggtttaagggggccccccccaaaggggccccaaagggggggggataacaactaaaaaaacaggggcggaagggggggtttggagggaaaaaaaggcttcgggaaaaaacgcgggggggggaacagaaaaagtaaaaaggttggggggaatggccaaaacccttagggaaaaaaaacaggtcccaaaatggaaaaaaaattaaatttcggggggccccctggataaaaagggggccaaaaaaacaacggaaggggggatttaaaaaatttaaaggggccccttgt

SEQ ID NO: 6390 - DNA, 448 bp, Gossypium hirsutum
  Clone ID: LIB3828-005-Q1-N6-B5
ccccggggagaaaaaccaaaaaaaccgggggggaaaaaaaataaaaaaaaagggttaggggtttaattttttttgggggaaaaaagccaaccccccaaaaatttttgggtcaaattttttggggggccattgggggcaaaaaggaaaaattaaaaggggaaaaaggaaacggggggggtataaaaggggcaaaaatccattgggcaaaaaaaacaaaggggggaagcttaacaaaaaaaaaaggggggttaagcccccaacgggaattttttaaaaaaatttcaaaaaccccaaaaaagggggggtttcaagggtttggaagggggatccccccaaaaaaaaaaggggaagggccccccctttaaaaggggggggactttgttttttccaaaaaaaaaaaaccagggggggggggggaacccaggcggtaaaaaaaaccagggttttt

SEQ ID NO: 6391 - DNA, 579 bp, Gossypium hirsutum
  unsure (1)..(579): unsure at all n locations; Clone ID: LIB3828-005-Q1-N6-B6
tttttttttttttttttttttttttttttttttttttttttttttttttttttttttttttttttttttttttttttttttttattaaaaaaatgtggggggggggggggggggggggggggggggggggggggaaagggggaaggggggctttaaaaaaaaagggagagggggggaagggaaaaaaaaaatagagaggaaaaagaagaaatgggaaaaggaaattataaagggggggggggggggggggaaaaaaaaaaaaaaaaaggaaaagaaaaaaaaggaaaaaaaagaggaaaaaaaaaaaaggggggggggggggaaaaaaaaaaaaaaaaaaaaggggggggggggggggggaaaaaaaaaagagaaaaaggggaaggaggggttaaaggaaaaaaaggggggtaaaagagggaagaaaaaaaaaaaaaaaaaattaaatagtaatgaatnggaaataagaaaaaaaaaaataatggagaggggggaaaaaaaaaaattaaaaaaaaaaaaagaatgggaaaaaaaaaataaaaatatttaaaagaaaaaaaaaaaaaagaggagaagaag

SEQ ID NO: 6392 - DNA, 499 bp, Gossypium hirsutum
  Clone ID: LIB3828-005-Q1-N6-C2
aaaacaacagtactaacattttctttattaaggaaggcaaaacagataaagcctactcctgctgctaagggttcatggacagaaagggataagggaattaggggccccagagcagggaaaaaggctagttttatcatcataagcgtaactataagcctgggggccctggttcttgaaaaccatcgagtaattggggggttcacatttcgggggggaattggtttcaccagagcaacagtccttaggctgattgaaagctaggcatgcccttttgcaggctatggcattcccacaagatgctttaacaatcagctctggggggcaaattgcattcacatttgccgaacagctagttatggggcagtttggacccgagccgccttggggggttactgaaatcggcaagttaaagccatctactaggctgatatcataaaaatcttggcctccatttggggctagagagaactttacaagggttgcaggagggacagcacct

SEQ ID NO: 6393 - DNA, 550 bp, Gossypium hirsutum
  Clone ID: LIB3828-005-Q1-N6-C3
atagaagatagaaaaataaaatcagaatagtaacttggaaaaaatgcatcaaggcatcttatttatcacccgaaactacctagataaggttactttggatgggcggtgtgacgcatccgacaccttctaaagcaaaaaaaaaaaaaaactaaaaagtttaattatttctagaaagaaaaaaaggaaagaacatcatttggcttctttgatgagattttcagcttgagccttgtcaggaagggatgggatggctcctttttgagttgtagaaattgctccacatgcatttgcaaacaccagtgcctccttcagcttattttcatcgttgaagagatttggatctttggctacagcttgtagaaatgcaccgacaaaagcgtcgccggctccggtggtgtcgacggttttcactttgtagccgttcacctttcctttgaatttattactgaagtatctgcaaccttctggtccatcagtgacaataagcaacttgaagttgtcattccataaagacataacaacatcatcctttttagggtctcctttggtc

SEQ ID NO: 6394 - DNA, 559 bp, Gossypium hirsutum
  Clone ID: LIB3828-005-Q1-N6-C4
agaaggaagaaaaaatggattttcattaaaagcattgtacaagaaatattttttttcctaccatttatgcatttcataaataatgcacatccaaacaacctaaggggactaactcgaaaatggaggacatcacatttctgtatcatatttaaccactaatgaaacagacgagggagttaaacacggaacctgtccttatgttgttgctttttaccacctcaggtaaatcatatgccctgaaatcgggtttttctagcaaggacttaccaggtgcatatcgaagatattcatcggttgaaagaaccgaaaaagggaagaataaagacaagagggagggggagggggttaccaagaacaggatgaacttggctttatcagagcactatggaaaacatggcagttccggctaattttaaatgctcaaatgcggagtggaccagttacaggagtactaccagaattggcatctttatgattaaaagagaggtttgcaaattgagaatcgagatctctactgctagagcgtcgatgggtagatgatagctgctgttggtgttgc

SEQ ID NO: 6395 - DNA, 584 bp, Gossypium hirsutum
  unsure (1)..(584): unsure at all n locations; Clone ID: LIB3828-005-Q1-N6-C5
tttttttttttttttttttttttttttttttttttttttttttttttttttttttttttttttttttttttttttttttttttttttttttttttttttttttttttttttttttttttttttttttgggggagaaaaaaaaaaaagaaaaagggggggggtttaaaaaaaaaaaaatttttgaaaaattttttaagggaaaaaaaaaaggggggggttttttgccccagaaaaaacctttaaaaaaaaaaaaatttcaaaaaaaaaagggggggggaaaaaaacccccccaaaagacccccggggaaaaaaaaaggggaaaaaaaaaggggctctggggggaaaccccaaaaaaaaaaattggaaaaaagggggacaaaggccccaaaaaaagggggggaaggaatgtgaaaaaagtggggggttatttaaaaagaaaaaaaaaggggggggggaaaaaaaattttagggccaaaaacaacgcccggggatttttgaggccccgnaaaaaagaaaaccccccaggggggggggggggccaaccccccaaagataaaaaaaaaaaaagggagggaggggggggg

SEQ ID NO: 6396 - DNA, 566 bp, Gossypium hirsutum
  Clone ID: LIB3828-005-Q1-N6-C6
gcaaatcaatattgtttactttccattatctatttcagcaagtatataatatttttcttaatatatgacagcattaccttttcaattatgaaaaattaaaacacagcaataagctgtaactcacgctcagagtcctcagccaagaatatctttgatggttaacttccggcatcttcatcacaatagctactcaactcccacactgaagtcgcagcgataactagaaatcatccatgcttcttcatcacaatagctactcaactctcacactgaagtcgcaacgataactagaaatcatccacgcttctaaaactttggcttttactgacttctttgagcgtgaccgattatttattcagtctgaactcacataaattctaaagtgttgcgagcggtgatccagcatcattgaagtaagatgaaagatcagcatctgagtcattatacatgttcaagaaaggcaaatccagcagttcctgtgctgactttctctcgtttgggtctttctttaaacatgcagaaataaacgagcaaaactcaggagaaaatcgatctgaaggtgcaca

SEQ ID NO: 6397 - DNA, 579 bp, Gossypium hirsutum
  Clone ID: LIB3828-005-Q1-N6-D1
ttttttttttttttttttttttttttttttttttttttttttttttttttttttttttttttttttttttttttttttatgtttttttattttttaataaaaaagtgaatattttatataaaggaaaaaattaaagtaaaaaaaataattaaaaggaaaaaggggaaaagaaaagggaaaaaaaaaaagaaaaaggaaaaaaaaaaaaaaaaaaaaaaaaggaggaatgaaaaaaaaaaaaagggaaaacgaacttgaagggggaaaaaaaaagaaaaaaaaggaaaaaaaggaaaaagaagggaggttgggaaaaaaaaaaaaaaaaaaaaggggaaaaaaggggaaaagggggagggaaagggttaaaaaaaaaaaaaaaaaaaaaaaagaaaaaggggaagggaaaaacaaaaaaaaaaggtttaaaaggggggaaaggtatcaaaaaaaaaaaaaaaaaatattttaattttggggggggacggaaaaaaaaaaaattcataaaaaatttgaggagggaaaaacgaaaaaaaaaaaaaaattggaaaaaaaaaaaaaaaataaaaaaggaagtag

SEQ ID NO: 6398 - DNA, 562 bp, Gossypium hirsutum
  Clone ID: LIB3828-005-Q1-N6-D2
tttttttttttttttttttttttttttttttttttttttttttttttttttttttttttttttttttttttttttttttttttttttttttttttttttttttttttttttttggggcacgcggggggcaacccggaaatccgggacggggcccgggggggaaacaaattttcccaaaaggggggcgaaaaaaaacgggggaaaaaaaagggaaaagcgggtcccggggaaaaaaggtaaccccctaaaaattccaaaaaaaaaaaaaccgggaaaaaaaaagggaaaaaccgggggggccaaaggggggaacaaaccaaaataaatgggggggggcaaacggccccttttcaaagggaaaaaccgggcggcccacctgaaaaaaaaaaacccccaacccccggggaaagggggtttggaaatggggccccaggggggtttttttttcacccagggaaacgggaaaaagttaatggcccttaaccgccgggccctaaaaaaaaaaaaaaagcggcccaccctggtttcgcccaaaaagggaaaaaaaccggttgaagggggg

SEQ ID NO: 6399 - DNA, 569 bp, Gossypium hirsutum
  Clone ID: LIB3828-005-Q1-N6-D3
aggatacaaattaaacaacacttccttttaaatacttaattcttttttcacacataaaattattaaaatgaaccaagataggaacaccagcactacttttattctctgtgattagcaatgacgatgaagaaacataaaagctgaaggcaggcatttagtttgactagaagcaaatagaagagctttgatcagtcgaaaaaaatgctgcatgcatcctcatattgctaaagtgggtgaaatcttgaaatccagattccacagatcaaacttcccattcacgaaatcgtaatgtgcacctttcagggccactgttttcttcaccactgcttctctcacaaatggatacgtcaataggttccccagtgatacattcactgcctccttctcgcagttggtgcattgctccgagaaacttagctcattctgttctgatttcactttggtctttgctggtgtacagatgctaacccattgttctatgaaatcactagcagtggtcccgtcgtctgggatggacataagccctttgatacctccacagcaactgtgtccaataactactatattct

SEQ ID NO: 6400 - DNA, 579 bp, Gossypium hirsutum
  Clone ID: LIB3828-005-Q1-N6-D4
tttttttttttttttttttttttttttttttttttttttttttttttttttttttttttttttttttttttttttttttttttttttttttttttttttttttttttttttttttttatattttaaaatgtttattttttaatttttttattttttttttaaaaaaaaaaaaaagaaaagggaaaagggaaaaaggggggggagaaaaaagaggggggtgtggggaagaggaaaaaggaaaaaaaaaaaaggggggaaggaggaatattataaaaaaaaaaaaaacaaaaaaaggggggtttaaaaaaggggggggggaaaaatccaagggaaaaaaaaaaaaggggtttcccccaaagaaaaagattatttttttgagggaaaaaaaaaaaggggaaaaaaaaaaaattaccacttttaaaaaaaaaaaaggggggaaaaaagtggaacccccaaggggaaaagggaaaactcgggggggggaaaaaaaacatccaaagggggcgaatagggggtgtgaagggaaaaattccccctataaaaaaaataaaaaaaagggttaaatggggggaacggggg

SEQ ID NO: 6401 - DNA, 559 bp, Gossypium hirsutum
  Clone ID: LIB3828-005-Q1-N6-D5
aacttgaacaaaatgttttaaataataattgttaacaataataaaagccctaactgattatatatattatggtttcttgtttgtcagcggtaagtgtttaaagaacccttcacctacaacgtaggtgttatacaaataaacatcaaatggaagaaagtataaacgaccaaaaagtacattacacaaactccatggattaatgctctcaacaatattttttaatcactccatcaatccaagcacatgattctttttatataacatcagcgacattcatcggcttttcgaccatctgggtactatagcactgctagatatctcgaacaatcttgatgtcatcacttttcacaaaatttatagcaacacccttttttccaaaacgacctgatcgaccgatcctatggatgtaaagctctcgattatttgggaggtcataatttatcaccagtgaaacctgttgaacatcgagccccctagcccatacatctgttgtgataagaacacgggttgcaccatcccaaaactctgccataattgcctctatttccttgtgaggcat

SEQ ID NO: 6402 - DNA, 518 bp, Gossypium hirsutum
  Clone ID: LIB3828-005-Q1-N6-D6
cttaataaagcaattttcatttaattctatcaaaaacaccccgtagttattctgtttcttccaatatctaattcaactcaatctgagattgcacctgaaatactttaaaaagaaaaaaaaaatgtatcgcgatacaaattgtactgatacagagaaaggtcctcagctaggccatctgtttgaatacacagacaacagctctgctttgccgtgaaattagaagactcggggtgaattcattgcataaatctgagaatcatctacaaagtgaggctttcagggttctcaacaatctttgaaaaggtctgaaggaaggcagccaaatcagcaccatagataattcgggggtcagcagtaacattcacctgaaaaggaagaatctcatggtaactcagttaagttgttctcttgaaatagttagccaggatgaaaatttagtttgtctcccgtccaaaataacgactcctttatattaattgccaaacatgaagagcatgcattattcaccaataaatgga

SEQ ID NO: 6403 - DNA, 552 bp, Gossypium hirsutum
  Clone ID: LIB3828-005-Q1-N6-E1
acgagaaaaaaagcaaccaaaactgtttccgataaaatgcattataaagtagaaaaaccacaatgaaccaaacacttcaaaagatttcaagtaaaaacatacttgaacatagtagtctatgggcaattacactaagcattaaacaaaacaaatgttctttcaacaagacgagtgaataagataactattaagactcagccaacttgttgaggatcgtcagatcttaaacggcagcatggaggaatgctcttcctggctcccgattggctagaggtccatgacatccaaggagcttagcattaacaccatcagggacaatgcgattctctgacttatatttcaaataatcagttcggttgaacttcgtgaaaccccacttcctgctgacaataatcttttggcgaccagggaacttgaacttagcacgtcggagggcctcttgagcatgatgactgttgctgtccttgcaacgaactgaaaggaggacctgaccaatggctactctagcacatgttccctgaggcttgccaaaagccctcgcataccagtttg

SEQ ID NO: 6404 - DNA, 564 bp, Gossypium hirsutum
  Clone ID: LIB3828-005-Q1-N6-E2
ggagttaaatttattattatttctattttattttatcatgaataattagaactattcctattacaacctaatagtaaattaataatttatatgaagatgtaaatatttaaattatgtgtatatacttacatttactgcaaagcaaacccaaactttttcctaacccaaaataaatccgacctgaacccttacccaccgattgtcaccaaccctacaacaatctctcgatgcaagttgtcaatgtcgactttggaacggcaccgatcactgcatctttcttctcccctctcttgaagatcataacagtcggaatgcttcgaattccatatcgagttgcgatgttgggactctcgtcggtgttaactttgtaacatttgagcttcccagcatattgcttcgacagctcgtcgattatggggtggatcatacggcaaggtccgcaccacggagcccaaaattcaaccagaacaggcaattcacattcaagaactagtgactgccatgtttcatccttaattgctggcacatcaacagctgtgttctgagcctcacaaacaacacgtc

SEQ ID NO: 6405 - DNA, 182 bp, Gossypium hirsutum
  unsure (1)..(182): unsure at all n locations; Clone ID: LIB3828-005-Q1-N6-E3
gctgacctctaacgccgctcgcgtaatcggnacggagcctttttttttgctactcgcgtcatcgcgtcatgcgatcgaagagcacacaaattcattcctggacgagttttaaaaaacaaccccaaattcaaattattaaggctacaaatgagacttattcaaccaaggggtctccaaatcaa

SEQ ID NO: 6406 - DNA, 547 bp, Gossypium hirsutum
  Clone ID: LIB3828-005-Q1-N6-E4
ctgtatgaaaactagagattgggatacattgcacctatagaaaagcttcatttaatcagaagctcagcgtgcacaagcaactaaactataaatttctggtttggatttttgtttctattttcaagtaatcaagggataattctcaaccttacagaatatttgtctacatggttacatcttccataatttctggacatgctcaaaacctactccattgcatggccttttttatctgcatccatttgtgagctcggtggggagactgggcgtgtcgtccgctttaaatatgtcactaatgaattcttgaaaccgagacgaatatgctttcgggtttacagctgcaatcatctttcggtcgaactgcaacgacttgtacgcgtgctcgattcgcttgatcacactgtaattttggaaaaaatccactattccaaaatacaaaagtacatcataacactcccgagacttgggactttcttctgatgatatatttgcagttccgtttttcggtacgtgaacaccacgtgcagacatttcttccccaaagcta

SEQ ID NO: 6407 - DNA, 531 bp, Gossypium hirsutum
  Clone ID: LIB3828-005-Q1-N6-E5
gaccgcaaatgactctaatttttcaaaaaaaactcgtacaataatagctatgaacattaatgttctcaaaacccttgaatattaaataataaaataaaataaaaaagcaccacaatccagtctccagctccaaacatccttttaagcaacatggttcaaagatggattataaggaaggaattaagcaccaattgtccgcccaccgccatctccataggacccatcatcttaatggtggtgatacggtgaaaggctaaaataataatacgtcaatatcaagtacaccatcctacaatgatccctaactctccccacataaaccagactttggacttcacttaacatcgcacacaaaaaaagccaactaaatgcaaaatgtagatcaccatcaaaagcaattacaaaacttagaagcacttcctgtggacaatggatggaccggattcatcatactcacccttggaaatccacatctgctggaaggtgctgagtgatgccaagatagatcctccaatccagcccacgcgtccg

SEQ ID NO: 6408 - DNA, 320 bp, Gossypium hirsutum
  unsure (1)..(320): unsure at all n locations; Clone ID: LIB3828-005-Q1-N6-E6
aacatagnaaaaatcttttatacatgagcattagatgatatcttaattgttctactaactagacaaggaaataaaaatctatacaataaaaataaaggtctaaaacgcaaacatagaaactaaataatagcagatccgaacaaactaaacccttcttaatcagaaaaaacaagctctcaaggcttccagccttgatgataatcattgtctctcctactgtttctgaaagcacaacagccaacagagtagacaacaatgaggaagatgaggaatacaatgttgacaaccgccactttcttccatgaactcttgaggttgtc

SEQ ID NO: 6409 - DNA, 289 bp, Gossypium hirsutum
  Clone ID: LIB3828-005-Q1-N6-F1
gagttaattattgtgatgataactaccgattattaaaaaaccccttaaattacaaggagcatctgttattgagactacaaggagcatctgagttcagaattaagacaagcaaaatgagtggcttgatggagcttgtaattcttgtcccatgttgtttcttcctcgtagctttaataaagttcctttatgattacctgtgggtacctctccgtatacagcatctatggccttgaagcatgatatatttcctagagtgcagccacatgtttacacctctgccaggtgcgcc

SEQ ID NO: 6410 - DNA, 584 bp, Gossypium hirsutum
  Clone ID: LIB3828-005-Q1-N6-F2
aaaaataaaaagatatttacataataaattataagaaagtacaaattaacataaaaaatttaaaattgtcgcgatcctggggacgtgcccggcgctggcgtgtaacgatccggttgcctccatcggcgatgccgtgcatcttgctgaggcgtttgataatggctcggtccagagtcctgtgtcacttccggtgtagtaaaaaacgtggaataattatattcaccataatcgggacttaattagtattgcgtgaccggaggtgccgatggaaaaatatcctcagtggtgggcgtatgtgcttcgggttggaagtctgggtggtatgaggatgacgatccggatcgtgtcggatgttgacggccattgacacgaaaaaaaactatctgattctgacacgaaaaaaaaaaaaaaaaattctttgtactgtgtactgggtgccggccattgacaggccagcacccaaattttttttttatttttttcgtatttttttatctgattctgacacgaaaaaaaaaataatttttttttgtactgtgtactgggtgccggccattgacaggccagcaccaaaaatttttttt

SEQ ID NO: 6411 - DNA, 581 bp, Gossypium hirsutum
  unsure (1)..(581): unsure at all n locations; Clone ID: LIB3828-005-Q1-N6-F3
gcaccttccataataatgaatatattattaatatanaataaaacataggaaaaaattgtttaacttaatcaataatcgacagcatgattactaataatgatattaaaagaatactaatggcgatggttttagaagtttacactccagggaccatgtcaggataacaaggagtgccagtttgcgaaatccaattgtcagttgcagtttcaagaaagacgccaggagtccatttcttggcttcatttatatctattgtcttgatagatggccatttgaccctgccttcggttttggcaccgggtcccctgttttggaactctacaaagtaaccggtgtctagtcctacagtgccttgcatggggcagtaaccctctggtgtaatgatgtcatcaatattgctttgcattatgatggtcctcgccaaagctttccaaggacgacctaggtacgtcttactcttgtccttcaccgggaggtagtcaggggcacccgagatggtacaattttgaagcacaatggctgagtgagtgtatgggaatttccttccgtgggctgtaatcatgtngttctggttttcacct

SEQ ID NO: 6412 - DNA, 356 bp, Gossypium hirsutum
  Clone ID: LIB3828-005-Q1-N6-F4
cttgaaaatattactttaatatatgataaaagatacttataacacttgatgaaaggattggataagcatggttaactaatggtaagcagttgcttaaataggaaaaacttaatttgaagtttccaaaaagtccaggatggaagggaaaccaacatattgtttatacttaaatattttctggcccaaaccttttaggacaaccataagcaggggttccaacattaaatatctcacatattacttttcgctgccaccaaacgggtaatccaaggaagacccaccgccagccgctgcgtgaaccttaattggcctgccctccgtaagaaaattaccaaaactttgaggattaatttgag

SEQ ID NO: 6413 - DNA, 457 bp, Gossypium hirsutum
  Clone ID: LIB3828-005-Q1-N6-F5
cccaattctttgtatcggtttcaaatagttctaactatttccggttatatgtccccaaatcaaccagtcaagttatacaatctagcattaaacaaaagttatataaagctcccccgagggaactcataatcacaatcacaatcacaaacacaaaaaatgaatctaaacctatagtgagctttggtttttgttgtacatggaaaaacaaaaaacaaaaaaaaaagaagagcctggccaatgtactagaaatatccctcaagaatcaaaacctgcattcaatgatgactatgcagcattgaccggctcagcgacagtctctctctgagtcttacacctattgcattgagctcgagatgcatagttgtgattgttgcactttgggcacatccaatctccactacaccattgctttgatcctttaccaaaaagggtaggtgctgcaaatacaggaggaaat

SEQ ID NO: 6414 - DNA, 566 bp, Gossypium hirsutum
  Clone ID: LIB3828-005-Q1-N6-F6
gagaaagatgaaaacttgataaatttaatgttcctcaatatttatacatatcagtgctgaatttgtagacatttcactaacatcaactcccacagtttaaaaactatgcttgcatatgccaaggatgcaagcatctattataagtggctgaataaacactgtaatatagaattttaaggactacaaacaggattcactatccatataccattttattatgtacaaaaacacagataccctatttaaaattcttgtatagaactggcatagtaaatccttgacacttggagaataacagcagacgagtggtccagatttctccaggcaatattgctttaaataccatcatagtaacccccgaatgttatttgagctctggtgattggtactcctctcaccactgaaattgcttcattgagtttggttgtgtgatgaaccacttgcttcatcctctacaatagcaacaaattaagttacttaagctacaagtattatctaaaaatggggcctaaatttgatgtgatgtaatttgcaagaaatggtgttgcttttgaatttggactctt

SEQ ID NO: 6415 - DNA, 528 bp, Gossypium hirsutum
  Clone ID: LIB3828-005-Q1-N6-G1
aagaacgacactaaggaatcaattatctaaattcttaaaagagattacactgcacacaatgtgaaaaacagtgatacatggagagggtcatcatcatcattcataataataatcttctcatacacacaaacgaacaaatggagaaaatagaaaaagagtgaagtggagacaaagctatttgggttgatttttttttagttggtggggttgctgcggaaggatcccaaagctttgatagctgctgctctaaggatgtactgatgatatatagctgctgcaagtgctccaacaaatggaccaacccagaaaatccagtggtcatcccaggctttgtcgttgttgtagattacagcagcaccgaaactccttgcagggttaataccagtaccggtgatggggatggtagccaagtgaaccatgaacactgcgaaccctattggaaggggagccaatacagggacgtgggagtcacgagcacttctcttggggtcggtggctgagaaaacgtgtagacaagtacgaaagttc

SEQ ID NO: 6416 - DNA, 580 bp, Gossypium hirsutum
  Clone ID: LIB3828-005-Q1-N6-G2
ctagcactgggtctatcactgctattgatctctttgcaactaataatacaacttaaaaacagttttaccagtttcaggctttaggcagaacttaattttgtttgacatgactgttttacacaaacctacctacaaaattgacattaacacaatattataatataaatgcactaatttagtctcacagcgtatagtggctgttgaaattttatcaaaatcgtatcataagttgattaccagcttctagatgtaagactcactcgctttccctcaacagaaaacttgctactaccttcaagctttcgctttaagtaggcaatagcatctttctttgtagaaaagctggaaaaaaccgaagttgactgttcatcaataagaattttcagctgtttcagctttaaggaatctccaggtacctgacaaagaagccgtttacacagctttttcaaccttagttttggctcatcagctttctctgtttctaatgcattttcacgcattcgttttgctggaggaccaacatcatcaagatcctcaccaccactatcgctgaatgatgtctttttccccctgaagtgaa

SEQ ID NO: 6417 - DNA, 490 bp, Gossypium hirsutum
  Clone ID: LIB3828-005-Q1-N6-G3
atcatccaacacaacaaacgccaaaattaccattacagatacaggggggtttttaagaatggggttaatttgacaaggggataaaattatgattttgggggaaagaaagaacaaaaaagggcctaaactaaggggctaaaggggcataaatcatagatccggcttcccgaaaaggaatccatttatgaatctatggtaagagctttacttggggaaaaacatgggaaaactttatataaacaaggactccttccgatacccacgcacaatgacagggacacttgggggagggatcatgccataatctgggacaatcactgagatggaatctgaagggggggcatcatattttaaaaaaaaaaggtcaagggtttccttttggttatcagtcaagttatccaaataattcacatccacttttcctgggacctttgatatggcatttggatcacctaactcattaaagcagatggaatcaagtggccccctt

SEQ ID NO: 6418 - DNA, 455 bp, Gossypium hirsutum
  Clone ID: LIB3828-005-Q1-N6-G5
aaaaaaaaaaaaaaacccccccccctataaaaaaaaaaaaaaaaaccccggggggggttgggttaaaaaaagggggcttgaaaaccaagggggaaaaaaaaaaaaacccccaaaaaaaaggggggaaaaaaagggggaaacccccaacccccagggggaaacccgggggccaaaaaagaaattaagggcgggggggggggtttaaggggcccccaggggggggagggggaaaaatcccgggggggggcacaaggggacaaaaaatttttgggcccccccccccgcccgggggaaaggggaaaaacccattttttttttggggaaaagggccccccaccaaaaaaggggggaaatcttagagaaaaacaacgaaaaaaattttcccccggggcgacgaggggaaaaaaaccacaaaagaggagttttttaaaaaaaaggagcccccgaagaggggg

SEQ ID NO: 6419 - DNA, 523 bp, Gossypium hirsutum
  Clone ID: LIB3828-005-Q1-N6-G6
aacccatattagcttcgtttttttcattcatagaaacacaatcgaaacttcaaaatgatccctacttgtattattttatctgctaactatgcagagcatttaaccgaagaaaaaacagtcgaaaaagtcgatacgaaaagtcaaaaaccatgaaaatctatagctatgatcaagaggacttacaaattatcccttttgagtctctcaatcttcttatatcatcaacacaaagttttctaaactagccatacaacttgcaaaacttaatctttcaacaactactaacacgggaacttaaaagaaggatcgctggtatcagaagcaagcggcggtttctctggtcaagttttcatgcaacagctccctcgtggagaagcatttgatcaaagtgccacaccccatgtcctttgccaactcttctcagctgagccacgtattccgatattttcttgatggattcgacctgctcagctaagaactcgccttcgatgaaatcggtcaactgcgaatcatggtttcgctc

SEQ ID NO: 6420 - DNA, 573 bp, Gossypium hirsutum
  Clone ID: LIB3828-005-Q1-N6-H1
atataacaaagaaaacatatatattagcatgcacatgcattaattacatatggctacaaaacaagattcaaggaactttaggatattgcaaatcgaatattgttttgagctatttattcttcataattactctttttgtccaagaggattttatagcaaacccttctgcaacatcattacttcttattttgtataattaataagacgacaaccaactcttcctcgttatttcatcttaatatggtatcatctctctactttggtggactgggttcactgtccataacctcttctatccctttgctctttacagtttcagcctggcaacatcctgatgcgcacctgggctgaccacactcagcacaagtcccaccacaaccctgacggcaacactctccactctcacatcccgactgtcctggcattagtgggatttttgggacttgtgggatctgtgggacttgtgggatctgtgggattagtggaatttgtgggatttgtgggatctgtgggatttgtgggatttctggaattcttgggatttctggaatttgaggaaatggtagaacgaaa

SEQ ID NO: 6421 - DNA, 565 bp, Gossypium hirsutum
  Clone ID: LIB3828-005-Q1-N6-H2
ggaagaaactgctaattcaactaacacatgttattcatgtctgcaactttataacataaagttgataaaattacataatatatcccgccaaaatctagtgaggaagaagataaataaataataaaaaaacaaacaaaaattattaaagttcaattaaactgtagggaaataatggtgcagctttgtgttgaatagaataatatatataataaatgtgatgtgatagaaaattgtctaagccgctttcccatttggaacagatcctgcagtaggagggttgagctcatcccaggctttaatccaagtaaccattgcatcagccagtttgtcaaagtagggatcaactttgctaagcttttctttcacctgcttagccagttcaacatagcacttttgaacagtggtgcagtcttttggaagcacagcttgttggaagaatgggatgatctcttcttgccagaatatacccttgtattccttcctcagattcacaaaggggttgctggctttgctgtgatagatgtatggtagacccgttttcacccccaatcccaaatggtcacat

SEQ ID NO: 6422 - DNA, 599 bp, Gossypium hirsutum
  Clone ID: LIB3828-005-Q1-N6-H3
aatcaaatcataaacttaacattaacaatcttacaataaaataacattacattaggcggagttaaatgttaacccacatgcctacttatttgaacaagtatatcacacaatgccaagctctttgcaatacaaacatcatagataaatagtcctattccaacatcaaaatacactaattaaaagcaaggacacattaatttgcagcaccataatataaatttaaagtagagcaaactcagccattaggcaacatcaacaactgattgtgcttcttaaaaaaaatcaacatttgaagcctggagggatttccttctgacatgcactaaggagtaagctaagggtaatagggatgttgaggttggccccaagcacattggctttaatggcggtgcaaaggcaaagggcagcttctaaatcagccaagccttggagcaaagcacagcatttgctcgaaggaggtgttcccaccactatgtttaccagtccaagtaggtcagcacaaacacctagcttcaatgtgtccttagggcaagaagcaggctttgctggtggtggagggcatgcaacaggtggtggaatgggctttggtggcttgcatg

SEQ ID NO: 6423 - DNA, 578 bp, Gossypium hirsutum
  Clone ID: LIB3828-005-Q1-N6-H4
accacatataaataccagcccaagcagtaggccatttattgcttccaataacaaactatttatcaactggaggggtaaagaagcagtgtgtccttaggcgactttaataaaagcctcctcaactccaactatatagggtacatctatattcccaattttcgtcatgtttaaatgaaaaaatcaacataacttcttacctatccacgctcaagtccattcaacatacattcttttgtattcgattcggtgcatcgcatcaatcatcctcatcatcgagtaatgcgaatgaaaatggatagaacttgtaaccatctccctcgtagaatttgttctggaattcaacccagtgaagtcgcaaagcatgtaggaaagcactgagggtctccataattagcaacacgccgacagttgcgaaaataaagacgattatgccgacaatgaggatgattatattgttatacccccaagcaagaagaagaaccttctcgtagaacacaactgacaactctgagtgagcaagactgagggcccataaacgaaggtatgaagctgtatttgaaactgcaccaagcacaaac

SEQ ID NO: 6424 - DNA, 498 bp, Gossypium hirsutum
  Clone ID: LIB3828-005-Q1-N6-H5
ggcccaactcatgcgagactccagtaatttggcagtacttcattaacttacatcaggatatataggaatatagtgtaccatgctacaaaattttcccaccattaaattagaggatgctaataaagatgaaaaagaggggtcagaaaatatttcgtttctagacattatatattgatgcaaaaaactgacctagggcaaaaactcgttcatgaacacacacaacctatgcaactaccaagttgggggaacgtttcgactccaaccatgactcggggggaacttttgtcgtcaaaaaccagccagctttatctgaggcttcatggaatggagcatctagttccttcaaatgcgactcgatgacagttgccaatcctttctccgagtatttgtgtttcccgtgtccggtattgattccgagcaatgggggaagctcctccccagactcctgtacctttgtcaaatcattgatccaaacatgtagtgcagttaaagctgccc

SEQ ID NO: 6425 - DNA, 598 bp, Gossypium hirsutum
  Clone ID: LIB3828-005-Q1-N6-H6
gaatataaacaaatggtccaaaacattttatttcattaaatccatttggaactcaagcttttctcaccctctctctctccccatattatgtatttataccagaattggatacagatttataagcttatttaaattaactgctgaaaggtggaggccttggcatgccttgcacgatgccgcaagtcaatacaccttccggtaagttgtactcatccttgagggatcggttaggggaaataacactagcataaagctgttgcccaaggtaatgcctgtcccatatctccgacctcaggttccacatcccgcagttgtcgaatgtcaataggattgctgaccaggagttggggaatacctgtatggtctgtctgctcacggcgtcaagaagattgtagttcatcctcttctcggggctccatttcccaacgtccatgcccacagcaaagaatgagtagccagacaagtggtaggattgaatggcggtctcgtgattctcgaagagatttccacaaagtttctgtgtgtcatgttgaggacaataggtgccaaagttaccttagtgttgtcacttggaggctcatcggggatggtatcatac

SEQ ID NO: 6426 - DNA, 519 bp, Gossypium hirsutum
  Clone ID: LIB3828-006-Q1-N6-A1
aaaagaacaagaatgttttaactatagcagtaatattatgatagtaatcctagtagtacaagaccaagccactttaatctccaaaatataacaacaaagaggattgagataagaatcccacgataatttttaagttcccactggaagcttggatagcctcgttcaaaaaactcatcacctcttcctcccaccacgttccctcaatgaaagagcaagcgtttctcctgctccaacattgtaatatgcaagggtcatattgtccttcagaaacccagcttttccactcaatttctgcttatttgcaggaagctgaatttcccctgcaattttctccttcaaactgccaactgtttcagataaggcctgcacagtgatctcaagaagttgtcctttgagattcccttcatcaaggttgggaacagacacagtaatgcaagcaggacccggatgttgagcaagaaactgatcttctggaacaagcttggcatcatcaagtttctgtctttttggctctggctc

SEQ ID NO: 6427 - DNA, 583 bp, Gossypium hirsutum
  Clone ID: LIB3828-006-Q1-N6-A2
caaacaaaagatcaaaattttctcaacaataaataaagataacatccttgtactctgcagttgaattcaagtcaaaacaaaaaccaagttctcaataaagcagaactacaactatgtctcaagagataaccctatcattcattcctcttcggcgatccttcccttctcactaacatagataccatcaaggaactttctaatatccttgttcttcacatggcatttctgatttatcaaagctgctgatcgtgacacaagttcaatatcattaccatccaaaacaatctcatccttcaccttctcagatcgaactatggaaaccccttccaacatatccaccttgcgcaccttcttctcgccaaggaaattacggatctcgatggacttgttggcgttagtgatggaggcgttgatgggaaagtgagcatagacgaacctcattttgtaacggtatcccttggtgacgccggtgatgaggttctcgacgtggctgagagcggtgcggatggcggcgctagtcttcctggagccgaaccaagcctcaatcctgagcttacgcttgccggtctcctcgtccttaatg

SEQ ID NO: 6428 - DNA, 395 bp, Gossypium hirsutum
  Clone ID: LIB3828-006-Q1-N6-A3
attgccaagcaggatatctaacatttttattgggggtgaaaatattaattcggaaggagccaaatttgaattgcaaaaaatcttgcacagagagttttttttcaacattcacttctacttatattgtggggggggggagcctcaaacaaacggagagaaacccgagttctttgtacccgggtcccctcctgggcataaatcaaagaaatcaatacgaaaacacaccggcaaacatgggaatagacgaagaacatgacataggtattaaagctttaggaacggatgcaggggtacgcttgattgatgcagatttgataagatgatggtaagttacttttttcttggagagctgggataaatgatgtttggagttcaaaatgccttaaagtgctgga

SEQ ID NO: 6429 - DNA, 512 bp, Gossypium hirsutum
  Clone ID: LIB3828-006-Q1-N6-A4
tgtttgtttgaatccacgtgaagggcggataatcttgagaagaaaaactcaagggtcacatttttcgggctcatctacagtatacacaacacggcgcctaaactcttccctttcttcagaggtcattaaaaggagtcctcaaaaagaaaacaatgtccccccctctctccccatagtctacattttttagttgtaggcttatttactaaccacaaccaaaataatttgttgacagaaaaaccgggggtcgaattgaagaataccctaagggagagggagagcgagctcgcttcaaatttagcaggcaattacagtttcttatgccgttattaatgaaccaatgaatcaatgatgaaacaggtcatgaactccattgatcgggtatggttagaaaaaagaagacatcgccttttggaacctttacttgtactgtttaggagaaaatattgttggggatgcattcttcgggccacctagtatcccctgagccttaacccatgtctccaagtggt

SEQ ID NO: 6430 - DNA, 553 bp, Gossypium hirsutum
  Clone ID: LIB3828-006-Q1-N6-A5
actgtacatttttaaatttattttatataataaaatatttccaaattccatattttgggtaagctcttgagccggatcgagtgacccagcccatggaagcaaagttgctccctgaattgatattttgaaataaccatacattgggtactgctggctaaaaaacagaatactaaacaaattaagaagttacaaatacacgggcaccaaaggagaattaacagactattttgttcctcacacatacactaatgtacagtatatcccccacatgaatccataacaacggttgggttggccaaatcattcataatgcttaccgacagggaaaaaaatttcacacgatatgcttcaacattcacatccagttgaccttggttggctgctgctggccacgtcaatggtgtcaggcaaatatatttcttcctcttcaccgctcttcagcgcgttctttgctatgcattggaaagcttcttccacattaactccctccttagcagaggtctcaaaatatgggatgtttccttttgaggcacaccatgctcgagcctttttt

SEQ ID NO: 6431 - DNA, 589 bp, Gossypium hirsutum
  Clone ID: LIB3828-006-Q1-N6-A6
ggacaaaacgattttatttcatttctagttacatacatcacataaaattaattcaatcagccatagaatattacataaaattaattgtggaatttattttcttcggaaaaagaacagatattatctagtagtggccatgcttttttcttggtataattaaaagctatgcgtttagctctaaaagccaaaattagccattggcccaagacactgaaatgcaagaaacgtacctgcaactgcagccgacagccaatggcaagaaaagttgggtcactacggcctgcagagactgagccgaaggtccatcaaaagcaattgcaatgtacacgcaatgaacataacaaatctaaacacaaataccaacctattagattgttttgtcttgatattcattcaacatttatttgagcagttgatgcctccatcagcccattccggatctgctcaccaatatccctaacgtgaccaggtccatggggaataaacacggtagtgttctttgaggagttgccgaggtccttgatcgtgtcgaaatttgtgtgatcataataagatccatcacctccttggctgaggtgccttccacctt

SEQ ID NO: 6432 - DNA, 592 bp, Gossypium hirsutum
  Clone ID: LIB3828-006-Q1-N6-B1
ccctccccaccctcttttttttttttttttttttttttttttttttttttgggaacaaatccatcactaatcacacacatattttcaacttcttttttgagacacataatatttttttaatccatcttggtcagtcaaatcacacacacatatacatattttaactaaatttattgcaacaatggccaataacttactttggagacctaaaattccctttttgggaaaaaaataggagcaactagagaccatatttagagacctgctgttgcccacccagttataatccgaacccaaaccgatggccatcctacgtcgactaacttcccgctttccccaaccgaggttgaccagccggttaaaagcattgctgagtacatacttgcaagaaaaaagattatgtggaagaaggcatatgaataggagaccggcttggtcttctctttttcttcatgttcatctgccttggccattggaagcaaaggctttcctgcacctgcacgaggtgagcttggtggggagagtaaagttgttgaagacccagcacgaacagcagagtagacaactgacaggacagtggtaagcagaccta

SEQ ID NO: 6433 - DNA, 125 bp, Gossypium hirsutum
  Clone ID: LIB3828-006-Q1-N6-B2
ataaattaatcctgtattattgatttcaactcaacttttccatggtgctttttggttttcttccctttcttcttccctttcccacggtgcttcttctaattctagctgtttccggtgatcctccc

SEQ ID NO: 6434 - DNA, 571 bp, Gossypium hirsutum
  Clone ID: LIB3828-006-Q1-N6-B3
gacaaagcaaacaagacaatgcacaatattggcaatttaaggtatatgttcagcataacaataactagtttacttttaacttctgttgttttcaagtcaccatattttgtttattcaaccttagacacacaacagaaaaaggtttgataagttctaagtttaacataccaaacatgaaacgacgtagattagcagtacttaataacaaaacggcaatgctgaaagataacacgcgcttaattgtcacacacttctagttcttaacatttggagcagctgcaccgaggaagcttaccatagtcattcagatgtcagctttgctttcctccctctctcttcctactatttcacggagcatttcagtgagagtggcagcggtattcaactcgccggcttcccttgctttcagtatgcggaacataagagcaagtttaacctgagttctggcactttgctggattatgagcctagtttccctcttcaattcctcgcactcggattcgatgattccgaatttttctttaacttgcctttgcccttccttggatattctgtggttcccgggacgcct

SEQ ID NO: 6435 - DNA, 389 bp, Gossypium hirsutum
  Clone ID: LIB3828-006-Q1-N6-B4
ataggcaactgaaagagccttaacttttaacatgtttaccattacataccatttgggtacaaactgcatatcaaacatgaaatatccatttgctcgagaagaaggggaaaaattacaacaaggaatccagggttaattttagatgccaacccatgaatgaaagggggttagttctttatgacccaaggaccaatactggttttaacaaaacctgggaggcttggcttgtttttagcttttaggggttaaaatctaccatatgaacctttggaccccgggctcatggtcccaggggaatggcccaaacaaaaacattgtcattgtaaaggcattcaggactgtttataaaatccctatgaaaagccagctttggctggcgttaaaactgc

SEQ ID NO: 6436 - DNA, 562 bp, Gossypium hirsutum
  Clone ID: LIB3828-006-Q1-N6-B5
acccttacaatttacacaaataatattatattgcatataatttgattgttcattcgtaaaacgaatggtagttaataaacaaatttagaataaaaaaaaacagaaatatgaatcaacatgcacaaaaatcaagttagtagggaaattgtcccccactgctaaaaaggaaaatgagaatcatccatccttttaaggttattgtaaaaaaccaatacttaatcctattgtttgtttgtttgtttttttgcttaaaaacattttcggtgcacaattgaagggccagactcgtcgtattcagctttggcaatccacatctgcagtcatggaaagaagtagggttctttattaaaaaatgttcgtaaaaacgtaatcgaggataaatgcatgaaaaacatacttgttggaaagtgctgagggatgccaatatggaacccccaatccatacactatacttcctttcaggtggagcaaccaccttaatcttcatgctactaggagctaaggcagtgatctctttgctcattctatcagctataccggcgaacatggtggtaccaccact

SEQ ID NO: 6437 - DNA, 583 bp, Gossypium hirsutum
  Clone ID: LIB3828-006-Q1-N6-B6
aaaatgaaaaagactgtttttatgtaatatgaataaatatattaattacaattgcactgaatctgttggtatggtttaagcggtggcacttagggtttttgggacagggctggaacatggagtcgggtttaatttgccactagttttaggcttgacattcaaacattgggatgttgcgggttcaggtccggtgtgcttaatatcaatgtctgcaagttccacattttgacatggcgaagaaccgctgcaaataaacttgacagcttctggaagcgcagatgtgccacggatgttcttgaagctaatgttgcttagtttaactttcgattcttcatttatcttgcatttactccatgggcaatatttttgatcaattaggataggggaagagacattattcacgataatatcctcaaaatgtacatctgatactatcccaggagattcgcctggccaagttttgattcgagctccattcgaagtattagtgatggtgcagtttgtgactttaactccctcaactggctcttcatttgggtactttccaagataccgatacttataccatgtcctggtccacaag

SEQ ID NO: 6438 - DNA, 587 bp, Gossypium hirsutum
  Clone ID: LIB3828-006-Q1-N6-C1
attcaaaacatgcagggaattcattcttatctgtcataacttcattactgactccaatggaaaatcaaaatcaataaaaagattaacttccaagagttccacatgtaaattacgatcaaaatccattctggaactaatgtgcaacaacataacagggcaaaacaatcttcaatctaaaccaaaaattgtttaaaaaagaaactccaagcatattggaggagcagcaacagtgagcaacagatacgaagcgaagaatcacagccttcttccacgtctgcctccctttctacgggtactgtcagtgggaatgggggtaacatcctctatgcgtccaattttcatgccagaacgagcaagggctctaagtgctgactgtgcaccaggacctggtgtcttggtcttattccctccagtagctctaagctttatatgaagggcagtaatacccaactccttgcagcgatgagaaacatcttgggctgcaagcatggctgcataaggggaagactcatccctatcagctttcaccttcatgccaccagtaatgcgaaccattgtttcccttccagacaaatcagtcacatgaa

SEQ ID NO: 6439 - DNA, 528 bp, Gossypium hirsutum
  Clone ID: LIB3828-006-Q1-N6-C2
agcaaaatgtaggcactgcagttgaaacgatgaatgacagaggagtgttgttacttggcctatttctttctaatgaaaaaagctaacaaaaacacacacatagacacaaccgacaccatcattacaagctagatttgcaatatgtctggtcataaaacctcaacttccaagttgcattaacaccttattcaatatgaatgggggactagccacaactaataaaaaaaccctcctcaagcaccaatgttctcaatctcagcacttttatccattcttttcacaatgccagctatgacctttccaggccccaattcataactctttttcatccctttggttagcaaagttttcactgtggtttcccactgaacaggaaaagtcgcttgacgtgctagtattttctttatagtctcaggatctgcatgaggctgagcatcgacatttgatatgacaggtattcttggagttctaatctgggttgctgccaatgcagcctccaatcttgagactgctgggtccatgaaacta

SEQ ID NO: 6440 - DNA, 522 bp, Gossypium hirsutum
  Clone ID: LIB3828-006-Q1-N6-C3
gacaaaaaggaaaaagattataggcattatcattacaatgagaaatatccaaaattatggtcatcatcattgcataattatcataacttcaaacctttttctttcttccatccagaaaatgaaaatgtattttaggggataagcacacaatacttcgtaggtgaatgcagtatgcatgacagtacttcagtatatagcagaaacatattcataactatgtaatatactataaagacggaatgctatgaacaactaccgccttaagctctccacaatgtagtccgcgtataaattcatggaatgctggattgcctcataagcagttgaggcgggcaggaagtcattgacagcaacttccttgttctcattcttcttatagccctcaaagaagcggcgaatctcagccaaacggtgaggtggaagttccttgatgtcattgtagtgacgatactcaggatcatcagcacatacagcaataatcttgtcatctttctcaccctgatcaatcataggcatcagacc

SEQ ID NO: 6441 - DNA, 583 bp, Gossypium hirsutum
  Clone ID: LIB3828-006-Q1-N6-C4
atctcgaaagggaaatactaatatattgataatattgaaattaagcatcaccatttcatcatacttcaaccaaacacataaacatcaacttattattaggtaacaaggcgaaacgatgaaaacccgaaatcaatccatcaaaaacctggtagattaatcaaatatctaatgatgaccatgggaggttgccttgacatcttcaccaataccacccgactgaacaatgtcaatcaccttagagtgcttcttactctcatctacaattttaggcacactgatcctcaaaaccccatcttccatatgagctttgatacgatccatatccacattcgcaggcaacctgaactgtctccaaaacttcccattcgtcctttcagctctatgccatttctctccttcaatttcttgttcttctttcctttctccactgatccttaacactctgttctcttcaacctcgatcttcaaatcctcctttttcatccctgggatgtccagggtaatggcatggtaccgtggggtttctttccagtcggctcgagctaaagcgacgggttctgatcctttggggacggtcactggg

SEQ ID NO: 6442 - DNA, 576 bp, Gossypium hirsutum
  Clone ID: LIB3828-006-Q1-N6-C5
aagtagagaaaccataatcacaacatatgcattaaagtagagaaacaactgcaatgaaacttgaaacattcaagtacttgggtaataaaactgaaacaacccttcttcacacaaaaatatgctccgtacaattcgtttattctctcataacatctcttctaaattaaaattgctaaagcttggatacacaaagcacaatcactcactcacttaagccttagacatgtgtcggatcaagtcgataacacgggaactgtaaccccattcgttgtcataccaagtcacaagcttaacaaagttgtcattcaaagcaattccagccttggcatcaaaaatgcttgacctgttgtctccgatgaagtcagttgagactaaatcttcgtccacataaccaagaattcccttcaagttgccttcagattccgccttgatagcagccttaatttcatcatatgtagccttcttctcaagtctcacagtgaggtcaaccacagagacatcaacagtgggaacacggaaagccattccagtcagcttgccattcagtgctggcaaaactttgccgacggccttggc

SEQ ID NO: 6443 - DNA, 431 bp, Gossypium hirsutum
  Clone ID: LIB3828-006-Q1-N6-C6
gaaggtaaaatgggatgacattggtttatattttacagtgcagtgagtcaaatagaatcgaaacgaggtgaacaaatgagttcctagttcagtacaaatgaaagacatagttctatacattcagtgtccttaccgagttcgacaacaccttcaaggagagagattcatcaaagcaatgagatcatatagagataaactggaaatgtggatcagatacatgcaacagattgtttcagttcgtattaaccacaacaaccaccactctgtgcaacggctccatctcttgcacctgatggaccttgggcacgcccatagccgatcttgatgccagatgactcattggatgcatcgaagactccttcctgaatgttctgaaggatctttgcggcagtctttacgaaggcctcctcaacattttgagctgttctcgc

SEQ ID NO: 6444 - DNA, 563 bp, Gossypium hirsutum
  Clone ID: LIB3828-006-Q1-N6-D1
aacatcaacaacatcatgttcattgataacagagaatataaaggattagcattcaataatttaaaaccagctaaagttctcagcaaatgaagcaaggtttgttaaaacaacataatggagcagggtaccaccaccttcttattctatgccacacgagagatactttgaaacggagacgagccactttagacatttggaggtggccaaatcttgtcgagcaattcctcaactcgctttgcttgattaacgtatccatccagtcctgcagccagaagctccaccgatgcaggtcccatggctgatgcaaggcttagttgatcccactttgtgagctcttcggcggtgaaatcatatctggcagcagactgtggggacaacctcctatcgtaagaatacttctcgtcaggagaagtaattgattctttgagtgactgcaataccttcaatggtgcaatgatatagtcaacccccagcaaactaaatatatcccgcttgttccgaacagctgcagccataagctttgatttatgtccatatttatgaatgtagttataagcttttgt

SEQ ID NO: 6445 - DNA, 584 bp, Gossypium hirsutum
  unsure (1)..(584): unsure at all n locations; Clone ID: LIB3828-006-Q1-N6-D2
gaaccaagaaatataaatttgggtaaaaaaatggaaaactgaaaaagaaaatacaattagactatagctttcatacaaatttctatgacttacaaacagtttcttccctaaaagtgtgttattgatggaacatacaccaaaaccttagagacagctcaagcaagatccaatatacttatttttatcaccgttgaaacaatctcatgctaatgtcttcaacgtatttggcaccccattggcagcatcaacacttctttacaagatgctccgcatgcagtaataagagccccccaaaaaattggaatattacaaacctatactttgacattctcaaaaaaatcaactaaaccaactcggcatatgcaggttccaacagccagttccagtacactgcattcttttctaggctgcacccgcaccttggattaggaacatacatataaccaagattactatggccaatgtaatctggtgaccatcaaatatcagactctatgtgttagagcttgagaacgaggccttgcccttatcattgtttcatcactgngtctgatccattctgaaagtctccatggcttctgcca

SEQ ID NO: 6446 - DNA, 412 bp, Gossypium hirsutum
  Clone ID: LIB3828-006-Q1-N6-D3
gccaaaacatgaaatccccaaaccattttttatcgtttgggtgcaaaatacagtttcatccacattttattatatattactattttggagaccaacagcctaaaattttaagcatcataatggagggaatgaaacaacaactgcatcccatgttggggcttgagggtaaaacttggtacaggagcgtgaacgtaggtaggggaaacggggacagggtagcgttgcaaaatcatggaaagggcagttttcgcttcagggattgcaaagctcatgccaacccaagatcgagatcccaatccaaaaggcataaatgcagctgcattggacttaataacttttgcaatcccttaaacaaacctttttggtttgaaaagaataacatcattcccccataagtaaagatcatggggaa

SEQ ID NO: 6447 - DNA, 580 bp, Gossypium hirsutum
  Clone ID: LIB3828-006-Q1-N6-D4
aacttcaaacctttttctttcttccatccagaaaatgaaatgtattttaggggataagcacacaattacttcgtaggtgaatgcagtatgcataacagtacttcagtatatagcagaaacatattcataactatgtaatatactataaagacggaatgctatgaacaactaccgccttaagctctccacaatgtagtccgcgtacaaattcatggaatgctggattgcctcataagcagttgaggcgggcaggaagtcattgacagcaacttccttgttctcattcttcttatagtcctcaaagaagcggcgaatctcagccaaacggtgaggtgggagttccttgatgtcattgtagtgacgatactcaggatcatcagcacatacggcaataatcttgtcatctttctcaccctgatcaatcataggcatcagacctatagctttagcccgaagaaagcaccctggaagaactggttcctgcataataatcaggacatccaagggatcattgtcttcacaaagagtacgagggatgaaaccatagttgtgaggatacacaactgatgaataaagcaca

SEQ ID NO: 6448 - DNA, 447 bp, Gossypium hirsutum
  Clone ID: LIB3828-006-Q1-N6-D5
cgcataaaaaaaatttattgacaatcattcagaaaaaaaccaaatgtactatgcttgggtatcaaatattgtacgtaaaaaagggaggacaaatgcatataaaaatagcatttttagcaaggacggccgattgtgcagcttagtggtccggcatactttgtgagctcggggaccatttgaccaggtttgaaaggcatcattttgtcggcgccaaattgcttgctggcacttggattacctgatggtgtaaaaaaagcaccgttctcgaagtggtcaccttgtgatacccaattccaattcttccactgtcccggctttaagaggcccctacaggtcacctctttagccccaaagcctggcgctgaatacctatttccctggctgataattgtagggttgctggtgccgccaatggcatacaggaaccagtgattgtagtcattgttg

SEQ ID NO: 6449 - DNA, 497 bp, Gossypium hirsutum
  Clone ID: LIB3828-006-Q1-N6-D6
aaaatgaaaaagactgtttttatgtaatatgaataaatatattaattacaattgcactgaatctgttggtatggtttaagcggtggcacttagggtttttgggacagggctggaacatggagtcgggtttaatttgccactagttttaggcttgacattcaaacattgggatgttgcgggttcaggtccggtgtgcttaatatcaatgtctgcaagttccacattttgacatggcgaagaaccgctgcaaataaacttgacagcttctggaagcgcagatgtgccacggatgttcttgaagctaatgttgcttagtttaactttcgattcttcatttatcttgcatttactccatgggcaatatttttgatcaattaggataggggaagagacattattcacgataatatcctgaaaatgtacatctgatactatcccaggagattcgcctggccaagttttgattcgagctccatattaagtattagtgatggtgc

SEQ ID NO: 6450 - DNA, 569 bp, Gossypium hirsutum
  Clone ID: LIB3828-006-Q1-N6-E1
gggaaacagaattcttttataatatcgaatgataagatttgtcccacgggccatagctacggatcttattgcatcctctactgcgcttacaataacaatagacaacatggctgagtaccaagaagcggttttacaatgtctgggtgcctttgccatcatccaaagtacaaaccagacatttttccagcaagaattcagcgtttacccaagcatggtatttgtcttatacacaagttaaggaaaataaatagcttatactttcaccaagtctggagcctttgtccaaggcaccaataccactgaaaaacatgaccctcatatatcttaagccttgctttcaagcatctccattgagtatggctgtatctaattaacaccaccaaattggaaaaagttaaatcctaatataatatgtttatttgaaattgtaaataactaagtactgtaatcctaatccaatcttatatgcaaacattattttaactgaaaaacatgtaaaaattgttgttacctcggtgctcaccacaaatagatttttttatttttttaaaaaaagaaaaagatactga

SEQ ID NO: 6451 - DNA, 574 bp, Gossypium hirsutum
  unsure (1)..(574): unsure at all n locations; Clone ID: LIB3828-006-Q1-N6-E2
gtaatcagtaaaatgatatgatgggaaagagttttattagcangaaaaacatcatcaaaaacagatggtaacagtgtatgaagatatctcctcttttcgtttgcttttaccactctgccgtactgtcacttgaagtgaacaagttcatcacatttgctactgtgaaaacaaaagcacaaaaaagcaaaagaaccattgtaggatgcgtgtatttcatttccacccatcggaccactcggcttcatccgtaaaaggaacgagatttccaatttccttggcatcttcaccccacatttcagcaatgctgctttcgtcatcgacccgacaatcctctggaattgaagcgtcatcttcatactcttgcctttcaggcagagcacaaccctggtaagagttatgatcagcacaacgccatataagcttgctccagtaagggtccttggcaattatgtgaggatttccaacaataacaagtaaagctatggcgcgagtaaccgccacattaaaccttctaggattgctcaaaaacccgagacagtgggttctgtcgaactcattgtgtttgattgttgat

SEQ ID NO: 6452 - DNA, 480 bp, Gossypium hirsutum
  Clone ID: LIB3828-006-Q1-N6-E3
aaacaaatatcttaaattttatttaaaataagaaaacataaacttaacattcagttctagacacagtatctatccaaatgaaagctgtagcattatagatgtcgaatattaggaacataaaatctaagtagcacacactagtggataaaatgcttcaagaaactgacaaaccaaaaggggtttgcttaggtccttggcttgagggggccttcattggcaagcttgaagagacgagcctgagctgctgcagcgctgtttgaaccaagtgctgcaacaaaagtctccctgacttgcttagtcgagaatgggaacctattattcaccatggagttgagaaatgaggctgttccttcccggtaaagcgccccaagtccatcagtacgtgtgtttgaaagtgcttggggcaagctcatgcttgttccaagtccaggagcgttggtcacgccaaatgcgttgcctacagtgccccggacgcgtggg

SEQ ID NO: 6453 - DNA, 119 bp, Gossypium hirsutum
  Clone ID: LIB3828-006-Q1-N6-E4
ggaaaaccaaaaacaacatttgtcttacgcttctttcaaaatataaaaaggaataattatcccaaaattgccaaaagggtgaaaaacctaacgaaattgaaaagaaaaaagcgggcccc

SEQ ID NO: 6454 - DNA, 545 bp, Gossypium hirsutum
  Clone ID: LIB3828-006-Q1-N6-E5
gtgaagggataaatcataaatgcgtgattacgaattgtacaatggcacaagggcactgagttcaactaagaacaaagtgaaaacaccaaccacaggcaactaaattcttctacaacggaaataaacaccaaccgcatcttaacaaatgacatccaacaaattccctgttaaagtcagtgtgtagagtttacaagcataatagctgcatttggttcggttctatctctgatgaatccgaggccactcgcttcctcagcaataacttgcaattctttcaaaaagtggggtcttcaagtctggcatttgataaatcatttatgcagggataagcagctttcttatcaagttgattctgcgcccatatcagcatctttagcaagctgggaagctttgggtctttttcatgactttggctagtaagtacggcagcattcacctcggtcgctgtcttaaggcgctgtgatatgtccaaaagctctccaactgggcagtttgaagtatcttcaaataccaggagtgaaatggtcctctccaactcttctaaa

SEQ ID NO: 6455 - DNA, 589 bp, Gossypium hirsutum
  Clone ID: LIB3828-006-Q1-N6-E6
aaaattattaaaatgatgcgatattttatataaataactaataaatttatatttaaataagatagccctttcctcaacaaacattgtctcaaactcttaaataataataatgtcacaaaagtaaataaaaagtaccttcaaagacattgaattttgtggcacacatgattataaagggggtagggtgcaatatgaatcaaattttaataaggtaatggtaaaagagtagtggcaggcaggcttagaagagttgagaaaggccccaacagaatcaaatgagggcaatgccctgaacaatcaatgcatctgcaaggacttgattagcagcctgagatggatgaacactgtcccaaaatacatattggctggcattggaacaagttcctggtgcctttggattgcacaaaaatgcggttgtctctactgttccagttccacaacacccttttgttgcttcaacaaaaccatagttagagggagatttaacaatgtcgtaaagtgccttgaatatgtcgaaaaccacaatcttaagaccaggatgctgcttctggagattggctgctgcggcgttgagctttttattgaattg

SEQ ID NO: 6456 - DNA, 586 bp, Gossypium hirsutum
  Clone ID: LIB3828-006-Q1-N6-F1
gatctaaaaaatcacgtttccattctacataatctcccctcaagtctcacatacagaaactacagatggaaagaaataagaacatagataaaacaacatgatttagaataaactagaacaatactacagatatttcttgcttagacacacaccaaatcaaaatttgaacattgggttttttatatggtaatgggagctcaactaaatgtgcaggaacgaaatccctcccagttgtaactggacctcctaagctttgtcattcccagagagccatttacctagccagcctgaaccagaatcaaattagatcagcaacatttgatggcagctcctcaattacaacattataaaacctctggatgtcatatagcatcctctcatcatctgtggttacaaagttgatggcaacaccttttctcccaaatcttccactacgaccaattcgatgaaggtagttctctggttgtgttgggagatcataattgatcacaagtgagacttgctgaacgtcaataccacgagctaagagatcagtggtgataagcacgcgagaggatccagatcggaattcccgcatgataatgtc

SEQ ID NO: 6457 - DNA, 516 bp, Gossypium hirsutum
  Clone ID: LIB3828-006-Q1-N6-F2
ttttttttttttttttttttttttttttttttttttttttttttttttttttttttttttttatttttttttttattttattgtttaaaaaattaaaatttaagttttttttaaattaaaaattaaaaaaaaaaaaaaaaaaaaaaaaaaaaaaaaaaaaaaaaaaaaaaaaaaattgggaaaaggaaaaaattgaaaaaaaaaaaaaaagaaaaaaaaattaaaaggttaaaaaaaaaaaaaaagtgtggggggtaaaaaaaaaaaaaactgaaaaaaggagaggaaaaaaaaaaagaaaaaaagttgaaacaaaagaaaaaaaaaaaaaaaaatgagggaaaaaaaaaaaaaaaaggaaccaaagcaaaaagggaaacaagttacaataaaaaaaaaattaataaaaggaagggaaaaaaaagaacaaggggggcctaaaaaaaaaaagaaagccgcataaaaaagaaaaaaaaaaaaaaagccttaaaaaaaaaaaaaaaaggggagggcgct

SEQ ID NO: 6458 - DNA, 578 bp, Gossypium hirsutum
  Clone ID: LIB3828-006-Q1-N6-F3
ccattctcttttgtttctccctctgttttcctcctttctctgtttcttttaacatagtttttctatattttccgtttgttaaaactagtctctatacttttattttgatattgggtatttcttgtacgttctgtttaatcttccttttgattaatttttaatatattttcaactgagggtaacaattttgtattgctcttcaatgaaaatccaaaacaaagatttttttaatctttttttgcttattgtaaacaattgtgaattgggtttttgatattttacacttattgttaatgctatacaaaggatccaaaaatggattattatggtgattttatagaattgtttggacctgatatttcaattaagattttcataatattggttaacccttctgatcccattagagttaacttgatttttagtttttggcaccaatttggtaaccaaattaatgtctttggtagaatttagcttggtgttctattatatattgaagaagagttgggattgattgatggaataagatcgattttattcatcttgcaatgatcaaaaataatctttgggtttacata

SEQ ID NO: 6459 - DNA, 297 bp, Gossypium hirsutum
  Clone ID: LIB3828-006-Q1-N6-F4
ccaaaaaaaaaagcacaaactgcattatgtccaaatacaaacaataaaatactaaagaaaaagaaacgcgaaaggctacaccataagcagttgatggaagccgaaaatcccaaatccaaatccgataagcttgcaggcacgacaatagagagaaaataagacacaacaaggacaagtagagagatgcgacagttccagcccaaggcatgcggtgaaattaaggcagatgagcattcgaccctttgtccgtagccatcgcaccttccacctgaacccacgcgtccgcccacgcgtccg

SEQ ID NO: 6460 - DNA, 564 bp, Gossypium hirsutum
  Clone ID: LIB3828-006-Q1-N6-F5
aaagatataatatataatatatagtttaactctgagagcaacctatgacccgatagagtcacatgatgaatccaggataaggataatgttatttaggtaaatgcttatacattaaacatagatatcaagtagattaattagataaatcgccaaatatcttctaggactttgattgagttgggaccttcagaggctgaaatccatgcttgagacatgcttcccaaactttgtcaatgttagacatggtgtaaccacattcgtgctcttcccatccttccagagcatgcagtatcccagctatgcgccatacgctcatcactctccttggcaaccagttctcgcaagaatccacattctcaagggccgtcggagtctgcatcgctggtgttgtgtgatagaagcagtccttgcgcaatttttttggtggaagttgcgaaaagggaataaatagtgttcctttatttgcctttctttgctcttcttcggtcaagtcatctccaactaaccataccttgcaagagctataactcttagaggtaaccaatttaccctcagatttggtgc

SEQ ID NO: 6461 - DNA, 576 bp, Gossypium hirsutum
  Clone ID: LIB3828-006-Q1-N6-G1
ccttaaatgcgtatttcatttggaaatttattacaaatatacataccacttaaaaccagcattagcagctctccatacaaagtagaaactgcaaacaaggaactaaataagaaggcataaatttttgtctttgtagttacagatggctatcaaattcacaaatgtgaatgaaagtttcaatgttaccctatcaacttccgaagaggaaaatggcattaaaaaaaaaaaaggattagcacagtactttattaacattgttaccaattttgatgatcttctactcaacttcccggttgatcccctgcaccagtttcttcaatcgttctccatatatatatatatataattttgttctctatgaatgctttcacagttcaaactcatcttctagcttcaactgttctgcagcagcctcttcctcctcatcatcaataacaaaatacgggttatgtggctctggtttgaatttatacccagtaaacacataaaatgcgagagtggccacttccccggcccccatactggtccaaagatatttatatgatgtaatcgtcaccaaagcatagaccacaactc

SEQ ID NO: 6462 - DNA, 582 bp, Gossypium hirsutum
  Clone ID: LIB3828-006-Q1-N6-G2
caggtagaaaagcaactaacatgcacagaaatctttgcttcagctcttatgcaacaagaaccacataggaatttgtgtaaatgaaaatggagccaatagagtgagaaactcttgagctctattgtaaaccttgttggactgataagcaacttattacctaacattggaatcatctacacagcttcattggatatagtcttcgtagtagttgtcacttattacagagacaaatctctcgagccaaggaagctgacggaggtccttcatggcatccacatatgaatccgtacagcggggtggtgattgatatggatgatgctcactaagactgaaacccccagcaaggaacctttggattagtgccagctgtgatctttcttggtctgagtatgcatccatgagcatagggagtgaattgaaagtctcccaagcccattgttccgattcttggacagaatgggtggccaagccttcagagttgtcttcatcccaaaggcgcattgacaggtctgctggctgtccctgtactcggcaccacaagaataacagaactcgtgcccacaccacatgtcatgtgataac

SEQ ID NO: 6463 - DNA, 342 bp, Gossypium hirsutum
  Clone ID: LIB3828-006-Q1-N6-G4
gtattcacagagatgtctcactcggagttgtatatgcgcacgccatacacaaggcaaataataatggcgataagaccagcccaaacgaaaacaatggtgggtgtttttcttcgtcgacccattaaccctttaaggaaaggatataaatgagctaaaacccaaaaagcaaataaagctcctccgatgaacatattccattgcccagtcccgaaaagtgttctcgcctaagcaattataacagcaatgatattgaccatggcgataacaataggtggaatcattaatgaagcccatttcactatgtataaatctgcatatatatcatcttcatactgacctgct

SEQ ID NO: 6464 - DNA, 370 bp, Gossypium hirsutum
  Clone ID: LIB3828-006-Q1-N6-G5
aaaaaccccccaaaaacccaaagggaatcactcttccatacaggacaaaaaaggggttaattggaaccacaaattcagctggggaacataaaactgaaagtctgaaacatgaagggatcaaagtacaaaacttcaactaattaagggaaccttaaagaggaaaaaataaccctaaaaaaatgaccaaaatataaacaaacttttggacccgatccccgctattcaaaaatagggaaaggaaaaaatttctggaaaaagaagcttttttaaaacacatgaaaaccccaccgggggggctgcagaaaaactttcccatccacttttttcgactcccaaagagaaaattcccgccaaaagtcccacaaaaaca

SEQ ID NO: 6465 - DNA, 439 bp, Gossypium hirsutum
  Clone ID: LIB3828-006-Q1-N6-G6
cttaaaatcataatacattctgccatagcagaaaagcccacattacacataattaagaaccaaatcctcatgaagatttgctgatacatactaaagtaatagaatttatttagttaaaaagacaaaggcctctctgcttctctttgttgttcattttccccccctcttatttacaattgcaagggttgcaagtgcagttgtctccacacttgcatccattctcaaccccaactcccatctcagatccctcaaagtgcattttctgagttgtcacaccaagaacaatagtctcagttgtagtcttctctattatgtcagggaacatcttgcatcctccacagccattgccacacttgcaaccagagctgcagccacagtttcctccgcagcaagacattttcagttttgtttttagaaaatagaaactggaaagattttt

SEQ ID NO: 6466 - DNA, 569 bp, Gossypium hirsutum
  Clone ID: LIB3828-006-Q1-N6-H1
ggaatgaggataaagtctcaaaattttgagcactgctttcattttagatgaaaatgtcctgtaaggatatgaaacaatagttgttttctgccccacctccaccataacggtggctcgaacacccgtctccgtttaacttgtttttctgcaataaataaacaagtaattaatgtaaaataataggaaaccatcctcgcactatgtgataagtttgaacccgagacaatgggaaaaaacacgaaagaagccctcttccatgcatgcctttagttctaattataaggacggctggactacgagagaagttcaagaacagttccttacgtttcttctccacagaatacattgcccgttgcaactgcagtttttcgaagcttgaacttagatttggccagtacttcatctgaatcttcaggacttccaacaccgtaagcaggccagctttagaaggaacgatgttctctggttcacactcgcaactttcacccaaaagtaccttaatcactgcagtagcagaagatgatatcgaacggaggttgtagccgccctcaagtacaactagcaacttt

SEQ ID NO: 6467 - DNA, 372 bp, Gossypium hirsutum
  Clone ID: LIB3828-006-Q1-N6-H2
atataacaaagaaaaacatatatattagcatgcacatgcattaattacatatggctacaaaacaagattcaaggaactttaggatattgcaaatcgaatattgttttgagctatttattcttcataattactctttttgtccaagaggattttatagcaaacccttctgcaacatcattacttcttattttggataattaataagacgacaaccaactcttcctcgttatttcatcttaatatgggatcatctctctactttgggggactgggttcactgtccataacctcttctatccctttgctctttacagtttcagcctggcaacatcctgatgcgcacctgggctgaccacactcagcacaagtccc

SEQ ID NO: 6468 - DNA, 587 bp, Gossypium hirsutum
  unsure (1)..(587): unsure at all n locations; Clone ID: LIB3828-006-Q1-N6-H3
actatccaaaactcatttatatattttaaattgattaaagaactaagaaggaaaagcatatctactagagatccaaaaatgcaaagatctccgaaacaaccggaccaaattaaacctctcactgccatctctgccacattattagcaactatttttaacccaaaggcacccatcaagcaggtctttcgggattcccaacaatgagaggcacattcctgccacgcttgcgaggctcatcccgcatatagcacccatcacgaaacgccgttaactggaaagggggaatatcagtggccaaccactgatcaacatagaacacggtctgggcgcatggttgttgaggtccggtggatgtgacctcgatgtagtcgcagtaccagccatggtgcaactccgagccatcggaggtcaagttgaggcggcagggagagccgatgcagctacctcgcccactgaagacatcaaggttgccacgctcgaagtagtcgtgggcgtatggcattaaaccccatgaacggagttctggaatccaaactgaccgcccgaacgaatcgnccagaactacactgatcctcgagtccgtccct

SEQ ID NO: 6469 - DNA, 552 bp, Gossypium hirsutum
  Clone ID: LIB3828-006-Q1-N6-H4
aaaaggtaacctgatttctacacagctattttaatatatattatatatacgtatacagttatccacctttttttgtttcctttaatggactcatttcactctgaatgctctgtgatagctaacaccctcctaacaagcactctagatggacttcttctatttactcacaaaaaccaagcattcatttcaccctttttatatttttccccgaattctggagaagactgtttgttggggggaggcaaatttccacattttgtttccttcttcatcagacatataaagcaccaggccacttcccttataccaaccttttccctttccataagaaactcgattgattattctgctgtgcttttcattcatgtttcacaagctgcggcaaattcagcatttttccaaactcatcatcataacttacaattgcatgccacaggaaaaccatatgaaggatagacttgagtaacagggtgtaatgtacatgttaactggagtcttcatctggctttgacctcaaattaggagccacttttcttaatatctcggcttctc

SEQ ID NO: 6470 - DNA, 516 bp, Gossypium hirsutum
  Clone ID: LIB3828-006-Q1-N6-H5
ataaaaaagagcatttatttattttatatatgcaacatgaagggacatttggataattatttccttagtcccaacgaaaatataacctaattattacatccgaaataaaaaaaaagttaataacttaattttcttgttaaacaaggaacatttggataaacatttccttcatcccaactttgaacaacactcaaacaatgagatttggggtgcccatcatatatttttccatttattccgtaatccaagtgtatgtttttcatgcggatatttttgcatggagctgactcactgcatgaaagatccaccgcaatttcaccatttgttgtccctcttaaatcattatacacaatattgctaatctccacggctgtactataattcttgcaatgttgatgaggaggacaactatattgatcaataataataggcctaattacattactaaacgatatacgttcaaatcttatatgtcttgcgtatccatgtcctctctgccatgtctttattctaact

SEQ ID NO: 6471 - DNA, 546 bp, Gossypium hirsutum
  Clone ID: LIB3828-006-Q1-N6-H6
ccaaggatagggtaaaattctcaatgtgttaaaatatcaaaactgtctctaacatggaacttgattgttggtggtatcacataacataaactcacatgcaaaataggtaacaaataaagagtccactgctgaacaaagaaacctgcaaatggttcaaacattgtatcgaccttttgctgatctttcccttcgagagtcgtcatggaagctatatgtaattttatcattgatgtcaatgatctccttccacttccttccaatacccatctgagcagcctcattcgttgcagtcttggtccacaatgcaagtttgtcctgcctttggcgaacactggcaactacaccacaaatctcatctgcctcatcaaattgctccccgatcaatgccatcaaactttcaagccacatgttctcaagattagcctttctgttgctagtgacagaccattttcctccattagcacactcaggatcttcccatttgggctcaattccagccttaaacaagtggaaatcagcatttccaggcaacttgctaggcttgaa

SEQ ID NO: 6472 - DNA, 463 bp, Gossypium hirsutum
  Clone ID: LIB3828-007-Q1-N6-A1
gaaagaactacgtaaattttctttttatcctagtttcagacttgaaaatgcatgtttcagttcaatcgtgaatgtctacagagggtaaaacaaactcaaagagtttttttccccgaggtttcaggcaatatatccccgaggtttcaggcaatctacaactcatctttgcctgcactttcttttgtctccgactctatctcggtttcttctacatcatcatcgtcttcaattgttgcatcaggactgatattaaggctagatttcactgagctgtaaatgcgtgaagcaaagtccttgggatcgggtagattgaaaccactctccattacagctgtctggtaaataagcagagccgtttgcttcacaccctcatcctcagagtccttggcaactttttcacgaagctccttgatgattgggtgtcttgggttaatctctaggatcctcttgccacgcatgtaag

SEQ ID NO: 6473 - DNA, 459 bp, Gossypium hirsutum
  Clone ID: LIB3828-007-Q1-N6-A10
cgaagacattattcattgtgtatcatcatgttttttgttttgtaataataataacaaacacttaataataaacaaacaacgcgcgcgctcacatatatatatatccctctaggtcttaacacgggctgattggcctcgaatatcaaagggggtgcagccaaattggcaactggtgttttcgaaaaagcacttatagccgcatcctatcgagggagatgtcacacagcctgcaaggcagccgagataaccgcatttcatggagcaggacatggtactcttgccgcaatagccccccagttttgaggccaacgcatttgggggattcacttgggctgatgccgccttcgccaatattcctatgcagatactcaacaacagcaatcgtgccattaccggagacatggtgttggatcccagaccacgacccatattttagtatgctgctacggtcactaatgg

SEQ ID NO: 6474 - DNA, 489 bp, Gossypium hirsutum
  Clone ID: LIB3828-007-Q1-N6-A11
gttcaataagagttgaatatattattattattattattattattattacaaaaataggaaaaggttgttcggattaattaataatcgacaacattatttcaaataataatgataataaaagaagattaatggcgatggttttggaagtttaaactccaggggtcatgtcaggatcaaagggaacgccaatttgtgccagccattcgtcggaattcaaaaagacacgaggagtccatttcatggcttcatccatatcgattttcttgatagctttccatgtgaccctgccctcggtgttggcaccgggtcccctattttggaactcggcaaagtaaccagtgtccaggcctacggtgccttccatgggggagtaaccctctggtgtaatgatgtcatcaatttgacattgcattatgacagttgtagcaaactgtttccagggacgaccaaggtacgtcttgttcttgtccttcactgggaggtagtcag

SEQ ID NO: 6475 - DNA, 488 bp, Gossypium hirsutum
  Clone ID: LIB3828-007-Q1-N6-A2
acccgttccaaaaaccttcgaaaggtagttcttatcaaacttaataaattttcagtagcattagacataactaaaatggttgcaacaaaaacacaaaatcccaaaagaaaacatatcaaacttaaaattaagaacccatcatatccatggaaaacccaccacttaaaacctccttccgggtcctccaccacgtccgaacccgacttgaggaacctgaacagcaaccggatcaaccttaacaatcccgggaagatcggccattccaagaagtgaaagcatatcaatggtttccttatcaacttctattgaatcaacagcaatagccgatacatcggggacgaaatccatacgacgctcacgctcttcttcctgaagcttcagagaaatgccacgaaccggacccttctggatccgtttcatcaaatgggttgagaacccagcaatcttgttccggagcctcttggatgggataatagctacttcttcta

SEQ ID NO: 6476 - DNA, 485 bp, Gossypium hirsutum
  Clone ID: LIB3828-007-Q1-N6-A3
gcaaacacaactctaaatttattccattaatagcatgaaaagatcctaggcttattacatgcataatttcacaaacctcacacatataaagaacgataggaaggatataggaaaagagggtgggcataccctgggaaccgatcttcaaaatagatgattttgcataagcacatcaatattcttcaccttcctcttcatcatctccaccttcagcaccaacttcttcataatccttctcaagagcagccagatcctcacgggcttctgagaattcaccttcttccatgccctcgccaacataccaatgcacaaaagctctctttgagtacatgagatcaaacttgtggtcaatgcgtgcaaacacctcagccactgctgtattattgcttatcatgcaaacagctcgctgcaccttagcaagatctcctccaggtacaacagttgggggctgatagttaataccgcatttgaaaccagttgggcac

SEQ ID NO: 6477 - DNA, 483 bp, Gossypium hirsutum
  Clone ID: LIB3828-007-Q1-N6-A4
agataatatgtcgaggtctttcatcattcaaacacgcaccataaaagttcaacaagcaatgcactttacaaactaaaaagatcatgctttgaaacagggactcgttcggactcatgactgatagaatcttaaagttcctcacaaacgctaggactaggaaggttttataacttaatgtagactaacaggtttatttgctacaaacaccgacaaatggttgtgcctacaatgggaatttctagttcttgcttatagcagtagccttacgcactggatacgacttttttcagtagaacaaaaacaggcttacatgatgatctcctacccactccagcatcatgtcatctctttcagaaataataatcttcggtgtgtgggaaaagatcatgtatgatggtagctagttccggttcctgcatttttccatggccctcggagcgagtccaatggcatcagagcttttcatgatcctcaaccttttgc

SEQ ID NO: 6478 - DNA, 402 bp, Gossypium hirsutum
  Clone ID: LIB3828-007-Q1-N6-A5
ggaaaaaaaaaacccccttttttttaaaaaatccccagccaaacaacccttttaaggagggaaaaatttttccccaactttttaaaacaaaaacgaaaaaaaagaatttccccgggggggaaacccttgggggaaaattagggggccccttaccccccaaaaaaagaaaaaggggggggggggaacccccacccccaaaaagtttcccggggttgggaccgggttttaaaaaaacttgcctttttttgggaaaaaaaaaaaaaaatttgggggaaaagggactttttttttttttttacaaccccgggttggggggaagaaaaaaattttttggtatccccaaaaaaggcctgggggggtcccaaagggggggaaggaaaaaggggtacggggtcaaccttt

SEQ ID NO: 6479 - DNA, 470 bp, Gossypium hirsutum
  Clone ID: LIB3828-007-Q1-N6-A6
gaaaagatgaatcagccattcattcattggtaaagatcaaggacaaaaatgtcagacgttcatcttaaaatttattgaaatgctgatcctagttatagattttaaaagcaaaataagtgaccaatgcattatatcggagaaatcagctcgtcttccaccctaagttcatctgccaaaggcctcaaggatgcagaaagccatcctaggaaaaccatgagatcttgtacaatcttcttctgttactgcaaagatgataatgcagaggaaacatttcgcgagattcgatcgtgtattggctctcccatcggctgcatctcaaatcttgattttgttatagtctcgtataaaaagatgtatcgccaagcaagctcgcagacaagttcttcaggggcatcaggaagcaccttatcttcatagggattgcagttctctctaaaccataaccttaagaactccttatcaatatttta

SEQ ID NO: 6480 - DNA, 483 bp, Gossypium hirsutum
  Clone ID: LIB3828-007-Q1-N6-A7
cacaccaaagtcaaaacacattcactcaaatcatatgagtttcattacattagaaaatcaggatagaaaaccacaaaaataacttattctataccgcctgcacacccgacaacattatagaaggttaatcctcctttactatttctctttttttttcttcctctctatcttttatcatatttaggcaagttgcctatgtataattacactctaatgaccttatgaagtaggttctgtactagaatacaaatcaaggacaaaaaacttgattaaaaggatggaagagacacccgaaaccgctcggatgagatgacaaacagaagaatggcacacactaacaagcacacactggctttaatgtgagtactaaggtagtactctctagtaggaaaaaataaataaaggaaattaatgaaactcagaccatcttattggatgtgtctgagaagctagaatgcaccaaaaacattctaagccaaggaa

SEQ ID NO: 6481 - DNA, 474 bp, Gossypium hirsutum
  Clone ID: LIB3828-007-Q1-N6-A8
aaacaaatggtccaaaacattttatttcattaaatccatttggaactcaagcttttctcaccctctctctctccccatattatgtatttataccagaattggatacagatttataagcttatttaaattaactgctgaaaggtggaggccttggcatgccttgcacgatgccgcaagtcaatacaccttccggtaagttgtactcatccttgagggatcggttaggggaaataacactagcataaagctgttgcccaaggtaatgcctgtcccatatctccgacctcaggttccacatcccgcagttgtcgaatgtcaataggattgctgaccaggagttggggaatacctgtatggtctgtctgctcacggcgtcaagaagattgtagttcatcctcttctcggggctccatttcccaacgtccatgcccacagcaaagaatgagtagccagacaagtggtaggattgaatgg

SEQ ID NO: 6482 - DNA, 427 bp, Gossypium hirsutum
  Clone ID: LIB3828-007-Q1-N6-A9
agggaaacaagtttttttcgaactaggggaaatagagactggcgtcaaaccttttggggggggcaatgaattattcataaaaaaagggaaagaaaagggatttcaggggggaaaaaaacccatttgccgcccaaaaactggtgggggttttgacttaaatcttcctaactcagcccccctaagttaaggggaaatacattatccatcacaaaagccaagccaagccatttcgatttcaattggtgatcagaacccgcagaaaacaaggggtttttttattttcccgttttcgcccgctttattcccgtactgttgaaaggggacatacctgggctcatgcttgggctcatacttgggctcatgcttgggctcttttcccttaagggaccatttagcaaagctaactccctaagctgctgtttcttat

SEQ ID NO: 6483 - DNA, 496 bp, Gossypium hirsutum
  Clone ID: LIB3828-007-Q1-N6-B1
gggaaaaatataagtctgatttattcgtgccatgcatacaatcatgacttaaacacaaagatcatgaaaagagaagggttacatagtagccaaagaaaattgattttaaaggatcaccgacagattctcatttttctctctaatttcacagcttttaacaccaaaaaataatccgataaaaagtaaaaaaagagagaaatcccatgtgccgataatacacaaactcgccggaaaattcatttccggggaaacacctccccagaagtatccaaaaataatctaaaccccggttgcggtggtggtagcggtagaaatgaagaatattacatcgaaactagatcattccaaaaaaaaaaaaaccctcctcttcaaacaaacaacttgagtaattttttatcagttcctctgctgccttgcccttgttgatctgcaaaaacactttcgaagcacgtcgtcgtcacagattcctccgagttcatagacggagtccctggtc

SEQ ID NO: 6484 - DNA, 491 bp, Gossypium hirsutum
  Clone ID: LIB3828-007-Q1-N6-B10
gttaaatctgtatacgtttattatcgtcggatttaacgaatgacccccacccccctgaagatgtaaattttcactgctttggtttcaccaaagtcaatcgtacctgcctgcacagtatacaagccttacaattgccactggctattttgccaaaaaccaaatataatcagcaaacaccattttcactacaaaattacaaatagcaataaactcttgaaccatttggctgccactttcatgatctgaaaacatattagcttctaagagtaatgagagaatgagggaaacaaaaaaaaaggtgttccccagagaagcttttctttttatgattacagagctccgtaaaggccccacggctgcatctgcaacgaattatcagcttcagttatggggaaaaaagcctctttcctggttatccgatcatttagtggctgcaagtttcagaactcgtcagctctggtagctttttttagacgatcagaaaatccacc

SEQ ID NO: 6485 - DNA, 486 bp, Gossypium hirsutum
  Clone ID: LIB3828-007-Q1-N6-B11
acacaaaataaccccaacatttttatagtaagatagcgcgcaagcatcacaaatataataagttcctgtgttacagagttcgcagtaactagatttgcaaattcccatgtaacaaccaggtagaaatagaacatgaaccattaaaacgtttttccagtttatttgatccaagcaaaccacacctattgtctttgttttacctatagactatatagtagcaggctcattatcagcgacttagtgatggtgtggcttctccaagtcctcaatactagtggggcggaaccacgccttttcctccaggaccgagtttgcaccactcgaatggatgccctgctccccacccgcagatgcgttaagttgctccgtagcagggccaaatacccctgtccgcgggtcaggagcccagtacttgtccgattgaggctgaatcacatcatcaggaaccacagccgcatggacctgatcatccaggttcttgtcgta

SEQ ID NO: 6486 - DNA, 127 bp, Gossypium hirsutum
  Clone ID: LIB3828-007-Q1-N6-B12
aagtaaaagacaaaaaggccactgaaaatgcatatattcgatgcacacaagatgtgggtatgtgggtctcctaagatctgccggcaatttaggtctggggtaggagcaagggtgtatgggtaaaaca

SEQ ID NO: 6487 - DNA, 472 bp, Gossypium hirsutum
  Clone ID: LIB3828-007-Q1-N6-B2
ccataataatgggtgtgactaacaattcattaaaccaaatattttaaacctgaaaatccactaaaggaagatctgcaacacaactgtaatgataaaccagaaatgagttcaacagaaagcttttggagagaacttaaaaatttgctggatagttgagagtctaggctgatccagagaggaaagctcttccaggttgacgattagccaaaggaccatgacatccaagaagctttgcattgacaccgtctggcatgatcctgttctcagacttccacttcagataatcagcacggttgtacttggtaaatccccacttcctgctaacaataatcttttgacgaccaggaaacttgaactttgcacgacggagggcctcctgtgcatgatggctgttgctatccttgcaacgaacagagagcagaacctgaccaatgtcaactctggcacatgttccttgaggttttccaaaagc

SEQ ID NO: 6488 - DNA, 483 bp, Gossypium hirsutum
  Clone ID: LIB3828-007-Q1-N6-B3
ctattccattcatcctctattccattcagcgaaccaaacatgctgttacatttatagttcatttgtaaaaggttcagtcccaaacacttctatgttcatctaaatgcgtacaaaaggagaaatttgaactgttaaaattctaaatgttgaaatatagtaaagaaattatatatctcaaaatcacaatagatgcctgtgctggaaaacacagtttgcacttggggatatgcatatattctttctctttgtcttcaacatggagaatcctgtcctgcattagcagtccaaagtagagccttggaatgggtgtggaaaattacattacttgtccccaccacctccaaacatccccatcatgtctttggtagaacccatttgcttcatcaagttctgcaacccacccatacccccaatttgctttaacatctgcggaggaaggaccttgctcatgtgctgtgcattcatgttccgagacaacgcact

SEQ ID NO: 6489 - DNA, 277 bp, Gossypium hirsutum
  unsure (1)..(277): unsure at all n locations; Clone ID: LIB3828-007-Q1-N6-B4
gtaattctggaattcgcacatattcatttaatatttaagaaatacaaattaaatagatcgagcactcctccatgcaccgtcttagctcaattaaaaaaaataaaatgtgaagcttaatccaagctgtgtcgaagcacgcatttgtttaggcacatttgagttggacggccaaagtcttcctgagatgggtacatgcgtcattttggttactgaaaggaatgctatctagtgggatttggcagctgggncttccccaagcaatacnnttctcaacgac

SEQ ID NO: 6490 - DNA, 439 bp, Gossypium hirsutum
  unsure (1)..(439): unsure at all n locations; Clone ID: LIB3828-007-Q1-N6-B5
tttttttcgaaaaatatataaactacaattgattaaattaaagtacaaagatcaaattcacaacttaagtagagtacaaagattaatagtagaattagcaccccnnaaaaagagtatgagatatttgggggttttaaggaactttagggggaaccaccaggtgggccaaagttaaaaaggggggccacgaatttttggggggggggggggggggccccttttttatattttttaaaaaaaaatttttttttttggggggggcnnnnnccccnttttttcccaccaacctcttttttttttcccccctttttttttttaagggaaggggggnnngggggggggggggggggggggataaaaaaaaatttttttggggggggggggggaaaaaaaaaaaaaccacccccccccccttttttttttttttttttttcctttt

SEQ ID NO: 6491 - DNA, 485 bp, Gossypium hirsutum
  Clone ID: LIB3828-007-Q1-N6-B6
ctactaagaataccaggttctactaaacaaataggccttgactgttagttcaagatgcaatgatatgtatcataaccacctatagcatgactacatgacaaatgctggaaataaggtttgtttggaacgacgaatgttctactctaagcaaacaaacaagctgaaatctccctccctactaaaatttcctcagccagagagaaaaaaagcaggaaatagtagaatatcttaagacctatgactagatttatttcctcttcttagaaggtggctgaggaacctcatcatcctcatcttcttcgtcctcctcttcttcatcctcaccatcatcgtcgtcatcatcatcttcgtccccatcatcatcatcgtcatcgtcatcttcttcgtcactcccaccatctccattggcttcagggtcatcctcaggatctccttcttcaccttcttcacctgaaaaatcctcatcacctccatcatcatcttga

SEQ ID NO: 6492 - DNA, 140 bp, Gossypium hirsutum
  Clone ID: LIB3828-007-Q1-N6-B7
gttataaaatgcatgtgtttgaacgttccctaacctacattcatcaaaattcatggtcccaaaaaatcggaaatcaccacagacagaacaagagattagaagtaaaaatgccatacgcaacataggataagggaaacata

SEQ ID NO: 6493 - DNA, 488 bp, Gossypium hirsutum
  Clone ID: LIB3828-007-Q1-N6-B8
gcgataaacattagcaccttcaatgtaaatgaatgtatgttatcggattaaccaaaactgtaacaaaaaggaccaaaaacgaaaagaatacacatatgtcatacgtaacttactttacagtaatccaacaacacaacttagatgcaatctgttttccaagcctctcaaatgatgacctaatagcatacaccagaaaagcagctttgcaaggtaatcacgtgaagtgccacaagtttcatcagcagcatcttgaagatttcccgtgtttactatccctgaatctctcatacaggcatccttgaagaacctttgcaatatattctgaacaagctgatggatcatttcctccacttgtaccgatgatggttgggataattctgtcaccatgtcagcatccaaggatcgtaaatactctaacaaaccattcatgttttccctgccacactccattcgcacattttccttcttttgagcactcagttcctcct

SEQ ID NO: 6494 - DNA, 454 bp, Gossypium hirsutum
  Clone ID: LIB3828-007-Q1-N6-B9
cggcttcaaaagccaaagccaaagaatgtaatcaagggaggcacacttcgcatattgtaatagagaaaaaggctatcaaaatcaagaggtgatttccgatttaaatcgctgggcacttttttattctatattttttttttctttctctttggctttattatttagttcttgttgttttttttatttttatttgaagacacgaataaaaaaggcgaagggcttaccttttcgaacgcgccatcgaagtccctagttcctttgtcgagatcggagttatagaggggattttgggggtaaaatcggcggtccttgaggtagggatccaagtggggttaactagcgaacagatcaccctccgtcgatcaccgtttggggtggtcaaatggcggctagggtcttttgaggcttggtgctaaagaggggtaaaaatcggccaaatgagcccacgcgtccg

SEQ ID NO: 6495 - DNA, 483 bp, Gossypium hirsutum
  Clone ID: LIB3828-007-Q1-N6-C1
aaaatctgaaagcattgcgatgcattagaagagaaaaaagaaggcaaacaacttaattgagcaacataataatataattagatgctaaagacaaaattcctggtgactggttacatcaactctaccatcaaatgttcttttatcaaagtttcagacttaacttctttcgattcccttcaaaaaaccatattacctaaggcttcacccattttataactcatccttgagaccggaagactctgcatctgcaccatccttacctgcttttgtctcgggctctgtctcagtttcttccacatcatcttcctcttcaattgttgcatccggactgatatttaggctagatttaactgagctgtagatgcgcgaggcgaaatccttggggtcggataaaatgaagccactctccattagagctgtctggtaaataagctgagccgtttgcttcacgccctcatcctcggggtccttaacaactctctc

SEQ ID NO: 6496 - DNA, 484 bp, Gossypium hirsutum
  Clone ID: LIB3828-007-Q1-N6-C10
aaagaaaaagaaaatcatctaattcatcaaatggtcaaattccaataagttcatggaactcccccatctttcaaaaacatttcaaatcccccccccccttttctcaactccatctataaaaataattgcaaattaaaaattaaggaaaagaataaaccccaggataacgaaatttaaaaaaatagcaaaaaaaaaaaagacacaaatttaggggcaaacattaattacttcccccaatcaaatgcgcactttatcattcttttacttacgctttctgcacactttaacactcccatccccacacacactctcctttcacttttccgattcactttgtcttttcctttcgttgttgatatcacgcacgctcaaggagtggtggagcgcggtgtggtccttgattctgtgggaggagtttgtccgtctgatcctttcgaaggatcatcagatgattgtcgtaatccgtcgtctgtttccactctat

SEQ ID NO: 6497 - DNA, 481 bp, Gossypium hirsutum
  Clone ID: LIB3828-007-Q1-N6-C11
aaaaatgtaaatagaatacttcatatatatagacgattcaatgcttccagtcaaatatttatggcaaaatttgtatccatatcgatcgaaggcaaggcaccccattgtagtttacgaagagcatgtagtaaccaggttgcgcaatgttgccattcatgggagcttgaagaacaatgttgtttgtatttggggttacatctttattaaattccaaaattcccaattgaatcaatctctgattcatgcagatcccgtgggtcacaaacggcggcgagtaaatcgtcacttgaagcttttgttggtcgattacaccgcttccacggatctgcactgtgaatttctggccatactttaatttgttatcggacttttcggcaatgatctcttgtcggaacatggccaagttagggtccaagtaatgtggtgagaatttctcgacccgaacttcggtgggaaacaatgcatcatcgaggtaacctgg

SEQ ID NO: 6498 - DNA, 486 bp, Gossypium hirsutum
  Clone ID: LIB3828-007-Q1-N6-C12
atgcagaaaatattgttttaaactgaagcaaacaaaaaaccatgaacactcagcgagaactaaggccccccaagcttatttgagtctgatttcacaacctaaattccatgagaagaaacggtctgatttcacaacctaaattccatgagaagaaacggaaaacccccaaaatcatcaatacagaaaatttctctgatacacagaccacaagactaaattcttagtatttgtagtccttaacatgaaggctctctgcagcaccctcactaatctttgcgtcacccttgtatgtacccaaggtggcctccgagttagccttgcacctaacaaggaaagcatcttgtgctttcttcacgttttcctcctttccagcccaggccttgagagtgctctgctgaagggcacgtccaaatgagaatgagagtgaccatggtttcttggtctggagcttgttcatggcattaaggttaagggtagcctcctcct

SEQ ID NO: 6499 - DNA, 489 bp, Gossypium hirsutum
  unsure (1)..(489): unsure at all n locations; Clone ID: LIB3828-007-Q1-N6-C2
gataaatgaaacagacaaatatatagaaaaaaacaaagtatagttccgcaagatcagacacaaaacttgactaagacgccttggcaaaccaaagcatctcaaactttaaaaatcctacataaaacaggcaaaaacttcaaaccacatataaccaaagataaaacactcaatctgcttcacggctaaaacctttggcctcttcacttcttcttagcagcagacttggtgaccttggcaccggttgggtccttcttctcgacactcttgataacacccacagccacggtctgacgcatgtccctcacagcaaaacgacccaggggtgggtactcagagaaggtctccacaaccatgggcttggtaggaatcatcttaatcataccagcatcaccattcttcaagaacttgggttccttctcaagctccttaccagatcgcctgtcaatcttggtcaaaagctcagcaaacttaacagncatgtgtgatgtg

SEQ ID NO: 6500 - DNA, 373 bp, Gossypium hirsutum
  Clone ID: LIB3828-007-Q1-N6-C3
aaaaaaaaatccaattccccccaaaaaggggggggggaaaaaaaaaaaaaattttttttacccctaaggggccggggggggaaaaaaaaattcctgggggggcccaaaaaaaaaaggggttgggggggcccagcaaatttgggccttttgaaagtttttgtttttttctgggcccccaaaaaaggggggggaaaccccctgggggggccaaaaattgggcgggcccaaccccctaaaaattaaatccccccaaaacggggctcaaccccaaaaaaaaaacccttcccccaaccctttattcctttttaaaaaaacgggcccatggggcccaaaaccccaaaatttttgaaaaggggaaaccctttacccccct

SEQ ID NO: 6501 - DNA, 460 bp, Gossypium hirsutum
  Clone ID: LIB3828-007-Q1-N6-C4
gagtgcaaagtatcactttggaattcaaacatatatcataaacgtacaaacaagtaaagtgaagaaagccatcttcaacaatgaacaaaaagaaagaaagcaccccaagtagtatttttacatttattaatccaccatttctttttttgattcttcaatacttcatggtttcatccattttttgctgtggcttactgtaaaaagtaggcaaagaaagaaacaagtgtggctccaaccaaggactcaataacaggcattgttgagattgcgatgctggaatctgggcctgggccagatgctgaagctgaagctgcagctgcagctggagctgaagctggagatggagctggagaagcgccagcagccaggaccgcgctcatagaggcggcggcgacaatgacggcgcatgagatcttcttcatgtccatggtattgaagaataaaggttagtgagagtaaa

SEQ ID NO: 6502 - DNA, 489 bp, Gossypium hirsutum
  Clone ID: LIB3828-007-Q1-N6-C5
tttttttttttttttttttttttttttttttttttttttattttttaataattttttttttttttaaaatttttaaaaattcttttggttccaaataaagcaaaaaaaacaaaacaaccaaaaaaacaaaaaaaaaaaacccaaaaagggaaaaaaaaaaaaaaaaaaaaaaaaaggggagggggcggaaaaccaaccgaggggaaaggccgcccgagaccacccccgacccccggggccgcccggggaaaccggaaccggacccgggagccggcaaacgcgccccaaaaccgggaggggaaaaaggtgggggaaaaagggggaaaaaaggagggcgggggaaaatggggaaaaattaaaaaccccaaaaaaaccacaacccgaaaaaaaaaagccaaaaaaccggggggccaagggagggaaaaaaacaaagggaaacaaaaggggggaccggcccacaatcaaagggggaaaccgaagggcccagtt

SEQ ID NO: 6503 - DNA, 485 bp, Gossypium hirsutum
  Clone ID: LIB3828-007-Q1-N6-C6
accagtaacaggattaaagttgaccgcttttactttattaaaacacaattatgtgatggtctgattcccacaagtacagaagttctacaggtagaaaagggtttatgaaactttacagtgaatcagaaattcatttccctcttaccacgtcgacgaaatcatcatcagtgagccagtcatttgactcctcaacttcagaatctttatctcgacaacttgtttggcctgctttctgcaaagcaccacgagtttctagtctcttgttcagctgaacccagtcattggatccactggatgaaagagctttgtcatgctgtgttgacttacgcactgatgctctattagaagtatcggtatcatcgtcttccagatcactgaatgaaacatcttcttcatgttccaggtttttcttgatgctcagggaacttccactggaaaattctgcttcttctaaccattgctcagtgttgtcctcgctggaggta

SEQ ID NO: 6504 - DNA, 443 bp, Gossypium hirsutum
  Clone ID: LIB3828-007-Q1-N6-C7
gtcgatgggttattcgatttggttacgaaaattattgacggaactgaacttgtcaggacatacctcataaacctttcgattttcacttcgatcccagattttagagtattggtcaaaattttcctatcgtccctgtaatacccaaattttgctcggcccgagcccaactattaaaacccagatatgaaaaataattaaaataaaaataaaatgtccagataatgtccatagttacaagcccaattcactccttaacccaaatactaaacctatcagacccaccaagcccaacaacccgaattacatcaaaccgagcccaaaatactctaacccagtttacagggcccgattccaagtgaaaccctagccttcagcaactttctgcccttgcgccgcagccaaaccaaatcgccgtgcgtgctgcgcctccgtgccaagtccgc

SEQ ID NO: 6505 - DNA, 484 bp, Gossypium hirsutum
  Clone ID: LIB3828-007-Q1-N6-C8
actaataaaataaataaaatttatttcatcgataaggataaaagaacaagatgagaatcatcttgatcacatcaaaaggaaaacttggtttgtattatcttgacaatggaagccgcaacgacggatacatcatgcaccactttgttcatatcagtcagcggtgatttagtagagaactctatttcacaagaattggcctctatggctgcatcattggcgcctttcgctgcaaacttgtagtcacccgtcttgagagcttcgttgatctcaggtacatctccccttataatgacgttatagcgttcagcgcaagatgttaaggccttttgcatttcagggtcaagggcaagtccatcctgtagtagctcgtcgattagatcaagtgtctcggtcgctttagttttgagtgaatccaccatgatctgagctagcttcttcacgctggcgtcgcggctttcggggtttgatttgagggaccaaatgc

SEQ ID NO: 6506 - DNA, 477 bp, Gossypium hirsutum
  Clone ID: LIB3828-007-Q1-N6-C9
ccatggcaagctgtcacagaaaaaatatgtaaacttgaaaggtcgatttacatacatacatgcatacaggattttattactcaaaacattcaggaaaccgtgggaagtctcgggacatgccaactggggtcttgcactcgtagggaatttttatggaggtagcagtgcttcattcaatcaaaactatggcgacaccattttcgtgtccgcgtaacaattgcttcctgtgcaatattcatcgtctccagaggtctctgttcttcaaacctgcatttcaggcctgattcaaccagtaacagatagataagcaaatgcattagaaagcttggcaggtgaagcaaccactcaatgaactcatctggcgggttcttctgaaagatatagccatatgcgaggtctttgtaacctggtgggcctggttggccagcatcaaacttctcatatcttgggctctcttctgagctgatcttagtttat

SEQ ID NO: 6507 - DNA, 490 bp, Gossypium hirsutum
  Clone ID: LIB3828-007-Q1-N6-D1
gaatcctaagcctaaaaaacccaacgagtcgcacactaagcatagcaattatatcaaatgatcaatcaaatttttatttaaccttatagaatttagaactgctcatttttttatttttatgttcaatcaaaaaatcaaagaatttgtcattttttgttctatcgcagaatagaacgtaaagacaagtagagtcttattcttattattcttcgtctataaatatccaaattttgattcctaataccccatagatagttcgaactctataagagcaatactcaattttcgctccaatggtttgtagaggaaccctaccttctcggatccattcgacacgtgcgatttcttttccgtcgatacgccctgcaatttgtatttgaattccttttgtatccgcttgctcagttaattcaatagcctttttcattgcctttcgaaatgaaactcgattctttaattgtccggctataaattcggcaagaatattagg

SEQ ID NO: 6508 - DNA, 491 bp, Gossypium hirsutum
  Clone ID: LIB3828-007-Q1-N6-D10
agaaaaaatgaaagaatttattattgaatgacatatagtagctgaatgatgattacatcaagaaaattaatttattggaaaagtcagcattagtcactacaaaggtcgttttatgtgcatttgaagcagatctggttccaggtttatataagctttaaattaggtgtaagctggtggtggccttggcatgctttccacaacaccgcaaactagtgcactctcaggcatgttgtattcgtccctgagtgatttgttaggggaaacaacactaacataaagctgttgcccaaggtaacgcctgtcccatacctctgacctgatgttccacattccacagttgtcgaatgacaataggatagctgcccaggacttggggaaaacctgtatggtgtgtctgctcacggcatcaagaagattgtagttcttcctcttctcagggctccattgcccagtctcgacagccacagcaaagaaggcatagccacacaagt

SEQ ID NO: 6509 - DNA, 422 bp, Gossypium hirsutum
  Clone ID: LIB3828-007-Q1-N6-D11
acaaagaacaatatttacttgcatttctcagcaaaacaaaaggaataaagtagttcgtcaatgtgaaagagctctctttacaaatcttgaagtattttgatgacgaatttctgtttctttagagaaatgaaatcatgactttaataacagaagctctcgagtgtcttttttttactcagttaagaaaaacaactgtacatgaatgtgtaagctgaccatatattccgagctgctgttggcattgcttctggcaaacaatgggacaccttgctctaaatttacagcccaacggaatgtgcttcgattttgtaacaagccacgagcaatccaacggaggatcggcatctcttagcaccatgcgaccttttcgagtgaatataagatattgtgtctagttaaaagctgatctttgtgcatttgac

SEQ ID NO: 6510 - DNA, 477 bp, Gossypium hirsutum
  Clone ID: LIB3828-007-Q1-N6-D12
gaaacaaatgaacggtttattccaacatgatgcgagcaccattttcttccataaatatacagtttctaggactgggatttaataaacatgacaaaggacatagatcctttttatgttggaaagaaaaattcgagttaaccaacaaaacgtggttttacagttccatcaaaatgggtcaagtggagatttctcacaactaccgtagaagaaatgaaaatcggaaaccgacggctgggaaaactgtacaatttggcgcaaattcatctctctatctttctaagttgtcactgcttgaatccatgagaatcgttagcctccttgctgtcttcataaactcgctgaagggctcatctccagtgtttttaactgaaccggcagcatcgcggtagagcacactgctcagcatctctgaactttctatgccaaacatgttggccagcttcccaaacagctcttcatatgatcccagaactgaaa

SEQ ID NO: 6511 - DNA, 449 bp, Gossypium hirsutum
  Clone ID: LIB3828-007-Q1-N6-D2
aatacaaactgcctcatgcagttttttatttgaagaactttgtaacttccttttggaagttattccatatcaacgtccttatggacgttttattttttcttacaaattaatttatctacaaatatttaaatccgctaaattcaataaatctaaaaaatagattttcaaatctaaatctattttatccacctttactctaaatccgctgcaaatgataattaaaatattatctaaaacctcaatatccgaatccaagtccatactaccataacttgctttggctgcttccatcatcgctaattgaaagcaaaggacccatggcagaggggtagcatcctaactccgcttggggagtcttttacttcattagtagtacccatcataatgatcctcttaagcagttactgaagagctcatctcattgagaacgttgtagtacgtaaagaaat

SEQ ID NO: 6512 - DNA, 468 bp, Gossypium hirsutum
  Clone ID: LIB3828-007-Q1-N6-D3
ccaacatctcaaaacattaaaacttaattgtaatgttaccttaatcaaaactgaaaacagcaacctataaataaaacctgacatgcaaaaaggtaccagaaatataaaaaggtaaaattaagaacatattccatcacttaaagcacttggcatccaagagaggctctccctcaaatggctcgcagtcttcaatcatctgattcacccgttccttctgggctgcatctgaaaggtcgaccttcttccactcgtagagttccatgtcatagcactcgtcaatcacaaattgaggaatctcttgcccacggaaaagccatagtcctttcaccttgaatggagggttagcaccgatcaccaacatcttcccaaatgcatacttgcgggccaaatccattctctgcaggaatcctccaaccttgttcattgtgacaaatgaaactgtattctcctcattgtacttgtagtcac

SEQ ID NO: 6513 - DNA, 467 bp, Gossypium hirsutum
  Clone ID: LIB3828-007-Q1-N6-D4
gttaaattcataaaattgttgaattactcaaaaaaaagtaaataataataaataattattttgaacaatgttccaaaatctaaaatgaaaatataaaaaaggtgtaaaacccccatcaaaatcactggccttatactgatgacaaaaaccagctgatcactccttgttcttaggcttcttcacaatcattacagaacaatgagcatggggagcacagtaatcacttacgcttcccaaaacagcccttttcacaatgccataaccatggcttcctagtaccagaatagttgcatggtgcttgtcaacagcttcacataacacatcccttggatcaccttccattacttccacattcacttcattcactgattttttcttgcataattccttgactttctctgggatccttccggctgccttctttaaatcgatctccatcatgggtataatctccgcagttgctggac

SEQ ID NO: 6514 - DNA, 158 bp, Gossypium hirsutum
  Clone ID: LIB3828-007-Q1-N6-D5
aaaataaatgaattacgcctgacgcacaacattaagacgaacaaaaaccaaattttaacagtagaataagacagaagttgtaacgaaagatgaaacatactctttaaactatgaagaagttgaaataataaaaaagaattcaaaccgtaaatcaaatt

SEQ ID NO: 6515 - DNA, 484 bp, Gossypium hirsutum
  Clone ID: LIB3828-007-Q1-N6-D6
gaaaaagaactgtttttatgtaatatgaataaatatattaattacaattgcactgaatctgttggtatggtttaagcggtggcacttagggtttttgggacagggctggaacatggagtcgggtttaatttgccactagttttaggcttgacattcaaacattgaggatgttgcagggttcaggtccaggtgtgcttaatatcaatgtctgcaagttccacattttgacatggcgaagaaccgctgcaaataaacttgacagcttctggaagcgcagatgtgccacggatgttcttgaagctaatgttgcttagtttaactttcgattcttcatttatcttgcatttactccatgggcaatatttttgatcaattaggataggggaagagacattattcacgataatatcctcaaaatgtacatctgatactatcccaggagattcgcctggccaagttttgattcgagctccattcgaagtat

SEQ ID NO: 6516 - DNA, 489 bp, Gossypium hirsutum
  Clone ID: LIB3828-007-Q1-N6-D7
aaaaaaaattattaattttaacataaattaatacagcacacacgcatagagagtattgcaaactccttaacttgatgagaataaaggggcaggtgtgtaaatcactcatttgtccatccatatcacacatcggatgcacttccctcccataagtaattcaaaggctctgttgatgtcttggaactttacctcgtgagtcacaaattcgtctacctgcaactcgttgtctgtgtaacgttttaacagaagtggaaggtcagacttggctttgacccctccaaacaaggctccagtgagggttttccctgaatgaagaacttcaaatgagcttaagctcaactgagaccctggcttctgcactcctaaaactatagtctttccccaaactttcgacagcttgcataggcttcttgtaccaaggatgctaatccaacacattcaaagcaataatccgcacctcctccagtcatctctttcgctacctggctt

SEQ ID NO: 6517 - DNA, 307 bp, Gossypium hirsutum
  Clone ID: LIB3828-007-Q1-N6-D9
attaaaaaaatataaccttttttttttcaattgcaaagtatcacatggaattcaacttttttttatgaacggccaaatgaaggggggaacaaaaaaaagaagaaaagccggtaaaaatgggttgacccccgagtaatattttacatttattaatcccccattttttattcttcaacacttaatgctttcgtatattcttgcgggcttactgaaaatagggggcaaagaaagaaacaaggggggctccaaccaagggcccaaaaacaggcattgttgaaattgccaccctggagtccggacccgtggg

SEQ ID NO: 6518 - DNA, 466 bp, Gossypium hirsutum
  Clone ID: LIB3828-007-Q1-N6-E1
ccatataagttgatattccaacagaagctgatattagattgactcgtaaaatcaactaagttgatattacattaactattttctcaaactctacccaacatcaatcaaacatgaaccataagattaaaaagccgggctagctccaaacattaggctgcaccagctttctgtttctttggcatgcggtagccgccaacaacacatgcatggtcacgctcaaatggttcgagagtgacttgttcgaaaggcttgaactgctcctgttgcaatttcttaacttcactctggaatacagcctcagcagggaccgttgagtcaatgcagtttgccttgattgaaataacaaaatgacctccagccttcaggaaatacgatgcattcaaagccagaattcttgcctgatcaggctgcgcaacatcagaaaatatcacatccaccatgccaactaacatcctgtatttagcag

SEQ ID NO: 6519 - DNA, 477 bp, Gossypium hirsutum
  Clone ID: LIB3828-007-Q1-N6-E10
gtcatacacaaaacttgattcattcaattgtttaagcacaaaacagcatcaacaacctcacacaaacacaataacaaagacttgctatcaagggacctaaaacatcacaatggtcatcatttgaaggggcttttttgcacccaattaggcaatgaacatttagagtcaaagctaagatccttcaaggtttgctttgactttataccctttagtgttggggatctctgctcataagcgttaggcttgcttgtaacagaagatataagacacaacttgttcttatatggtgaatagctttcggattgagtatcacaagttcctggccttagctttggtgaactcattgatcttacctttgctttagtagattgtgttgcagccatgtaagttggaactacaggagatgtaataaaagaactatcttctcctaaagaactctgctttccatgaaatgatcgtcgtcgttgaacccgtacc

SEQ ID NO: 6520 - DNA, 491 bp, Gossypium hirsutum
  Clone ID: LIB3828-007-Q1-N6-E11
attaacaaagcaaagttgagccagtcagttcatattattattactaacaatgtatacttaggtcaatacataacaagcttgatataacaattcaggtattagatttatgtactgcacatgggtccctactaggctcgaaattgacaaaaaccgaacaagggcctacttcgtagcggataacattacctgcgcctgtgtagcctatgctctcatatggaataacagggccgaatgttgcctattacctccacaggaaccacacttttgagcattagggctagctgctgtctagtctagcttattgattgtgagtccagcaggaatagccgtgctatcagactctgtaagccttggctaagcgtttgtggctattgaaaagaaaacctccttcacattcaaatcggaatgccgcactagtggggaagaacttgatgccatactgatcatagagggcttgacccttggtaggcggcacagcccttgcagatcta

SEQ ID NO: 6521 - DNA, 402 bp, Gossypium hirsutum
  Clone ID: LIB3828-007-Q1-N6-E12
ccaacaaaaaaccgaaaaaaaaaaattcccaaaaaaataaaaaccaaacccccaaaaaggggccccgggggcggacccgggggcccccccgggaatcccggcccgggcccgggggggggcccaggttcccctaagggggggggaaaaaaagccgggggaaaccaggggaaaagctggtcccgggggaaaaaggggacccgccaaaaatcccacacaaaaaaagggccggaagcaaaaagggaaaagccgggggggccaaaagggggggccaacccaaataaatgggggggcccccacggccccctttccagggggaaaaccgggcggcccagcggttttaaaaaaacgcccaacccccggggaaagggggtttgctttttgggccccaggggggtttttttt

SEQ ID NO: 6522 - DNA, 486 bp, Gossypium hirsutum
  Clone ID: LIB3828-007-Q1-N6-E2
acgatcattatgtccttttcttagaactttaagtgttcaaatttgacaaggaaatttctttgtcataaaccagaaaagcagtggttgaattaaaaataagagcccttttctggttttacttcactataaaatggattaaaagaaaagagttgctaccaatgagaggaaatcaagaggctaaaaagttgctatggcatcgacactgtcaattttggctactttcactattatccgcatcacattcaacgacttcgtccccaaggaaataagagactatttgtggagtttcatccgccgtttctcatcggaattcaccttggttatcgaagaatcacatgatggatcaaggaaccatattttccaggctaccatggaataccttggcagccatgtactgtctgcttcagctgccgaaggttccccgaagcggctcaccgtaggcaagagcgagaaagtaaggaagttcacgttcggcctggataggca

SEQ ID NO: 6523 - DNA, 453 bp, Gossypium hirsutum
  Clone ID: LIB3828-007-Q1-N6-E3
ggcccaaaatatcctcatttatttccacactttctaatggggcaagaacattacaaaacatctaccactataaatggttcatctctacaaaagttcacttcaatactcggtactcaatcatcatattattaagaggaactaaaaggaacccatggtcttccaaaaattgaagctaggcaaaccaacagtaaacttattcccatatctaaattcaaaagactttaaaaacttactcaactgaaaactcaaacaacatggggggctggtacttgctaccaggttgaacaacgactgatgggaagttcggttggtttatcgcatttggaaatccctgcgtttccaagcataaccctgcatgcttattataaacagcacctcctttcccgacaactccattcacgtgattaccagtgtaaaattgcatcccaggtgcatcggtccatacgctaagga

SEQ ID NO: 6524 - DNA, 478 bp, Gossypium hirsutum
  Clone ID: LIB3828-007-Q1-N6-E4
ccccagagcaaacgtgatttcacaatttatatagttaaatgaatggaacaccccacctaaactggaaaaatagattttttttttaaaaccaaaccctcctttgtaacaggtcactgggaattattacttgaaaacttgatggtatgtagggcctatcctattcagtaaagccgatgctgcttgcagcatgaaatacaacagtaacacaaaaaaaaaactttttaagaatttcggattgggctaatggaagaaatcataagtagttcaggtttaattctggttggcgaacttgatccccttctcaatagatgatttaagttctggtttgaggctctccaacccttctttctcgtactcagagagagggcctaaccccaaaacttcctccacaccgttctttccaagcctcaccttggaagcaaagaaagggagttcagtaacagttgactgcacaaatgagcactccactacgtcggga

SEQ ID NO: 6525 - DNA, 466 bp, Gossypium hirsutum
  Clone ID: LIB3828-007-Q1-N6-E5
gaggggaaggcctcgatttcccccccggccattaatttactgatgttcttttggccacaaaaaaaaaaacttaagaagcaattaattgccgaacattcatgggaacacagtactcggaagggccatcgaaaacggtttccgcaacaatgcgagacattgcctcagttggatggtataaatcccaaaaaacatgatctgccctgttgggacagtagcttgaaaatggcaaacaagggatttttgctctcagttccccaaggccacaacaggctgctcgtacctttttaaacccgtgagccgatggatctcggatgactttttgcatgataccatacaaatcgaggaaggcgtagtttaggcctggaagttctgatttcagcccctttaatacttctttaagcccttcattgtacttaactacccacatgtttacttcttcattgcattcatgggtgctgtgcttggc

SEQ ID NO: 6526 - DNA, 488 bp, Gossypium hirsutum
  Clone ID: LIB3828-007-Q1-N6-E6
aaaaaaaaatcatatcatgtaaccaaataatgaatacattaacatatatatgtaatattaataataaattttttttctatacatccgataataaaaaaataccatcaatttaagcactaatccgactttttttagaacacccaacgcccgctatattattccattgaagtagctccttcaattacatttggctcagacacaataaaaaataataaaccggagttgttggaccgccatgaagagataagagttaagcgcagggcggtgacagctgctcgccgatgtagttaactttgacgttggtgcagttagaactgaagggagtgtcttcattataatcgggatcaccggtatactctaagtgaatgtccttgagggtaatgcctttgcatggaaatgattggctgcaagctaggactacagcaattttgcttattgttgttcctctgatgtttgagaattcaacgtcggagatgagcacttttgag

SEQ ID NO: 6527 - DNA, 460 bp, Gossypium hirsutum
  unsure (1)..(460): unsure at all n locations; Clone ID: LIB3828-007-Q1-N6-E7
ggcaaataaagaacaacaacgatttcatttattttgatagctgcagtacaagagggaaacaaaccaccacatgtgtagctcatttgctgccactacttaattacgggcataactgagaaacacacctaagagagatgtatacacagacagaacaatgtgctgggtattgtatagcctgtcttcatcaagcttcaacggtatacttatagatagtatccatctcaactttgaaggcatgacaacttgtatgcggcctagtaactgcaaattgtcagctttccgccaggccccagatatgaaagaataaccaatgcatgaaatctctgttcaagtttcaaacatttcatcatcaaaaggggggggggngtggagtaacgacatcccccgggacggcaaagcttatcaagctctgaggattgtggcaagttcagctcccgagtttgtgatgtttacttggttt

SEQ ID NO: 6528 - DNA, 481 bp, Gossypium hirsutum
  Clone ID: LIB3828-007-Q1-N6-E8
atgatgatgaaaaagagtatcttatttaatggtagttaatcataaaaactacataaagcaagttcttgaaaaccaccaaacccagtgacgataaaaacagcaccataaaagagtctaaatgacagacattaaatattctagacattagacaacatcccagcttaacacatagttctctttttcttctctaagagagctgtccgcagtcagcgacaacaacgggcttggaagttcttccactgctagacccaactttctcaatggctttcaccacatccatgccttcaacaacttgtccaaacacaacgtgctttccgtcgagccactcagtcttagccgtgcaaatgaagaactgagatccgttagttcccggtccagcgttagccattgagagaataccgggaccagtgtgcttcttgatgaagttctcgtcagcgaactttgatccgtagatggattcacctccggtaccgtttccggc

SEQ ID NO: 6529 - DNA, 356 bp, Gossypium hirsutum
  Clone ID: LIB3828-007-Q1-N6-E9
ggggggggcaaaaaaaaccaagggggggttttttaaaaaaaaagggggaaaaaaaaaaaaacccccagggggggaggaaaaaaaaccccggggggggaaaaaaaaaaaaaggggtcccaaaaataaaaaggggggaaaaaagggccaaaaaaaaaaaacggggcctttttggggtttttcccccccaaaatgaaaaaattttttaaaagggaaaaaagggaagggccccccccccccccgaaaaaaaaaccccgaaaaaaaaaaaaaaatttttgggccccccgggggaaaaaaaaaaatttttggaaaaaaccctccgggaaaaaaaggggggaaaattaaaaaaagggggccgg

SEQ ID NO: 6530 - DNA, 460 bp, Gossypium hirsutum
  Clone ID: LIB3828-007-Q1-N6-F1
cattgataaagaatcagattttctttattctttttaaaaattcccatggcagatattgcagcaatcggtatccaaaagctggggtttatgaagtttgtaattggtgtttgaatcaagaggagcattcaaaggaaaagtctcagaattcattgaattcttcagcttcatctaaaggcaaaaacgaagatgataataataacaagataaagggtgataatcaccatggagctggctttaaaggcaaccgaagaaataccaacagtttaaagcaacaacaattgatgaaaattcccatcaagaaacccaagttagaagagaaaatgaagcgaaaaaggatcataaagaatgcttatttagaagaaaagcttagaagaacaaagttagaagagatatcgaagaatggggtcattacaagacattttttcagaaacaaggtaagaagatataagcttttggatga

SEQ ID NO: 6531 - DNA, 315 bp, Gossypium hirsutum
  Clone ID: LIB3828-007-Q1-N6-F10
aaaactaataaaggtattatattaaagaataatattttcaatgtgtcttcatacacttcactaaatttatcaaaaaaaaaaatttgcaaaatagagtgtctctactgtaatcacaatcacagcttatacatgcatatctctcttcattatgctattgatactaacattcatggaaatagataaaatacccaaaaaactgcgggtgttgctatagcaatgggagcttgaaacaattgtaaaaaagagtgaacaaatagagaatgatccatactcccatggaaaaaactgcaataatttggccccaggacaccacaa

SEQ ID NO: 6532 - DNA, 469 bp, Gossypium hirsutum
  Clone ID: LIB3828-007-Q1-N6-F11
gggagcaagaaatccagcattaacgattaactagcaagtcatcagaagctgagacaaaacagtgtttcagctgaatattcaaagttgaaccagcttagatttttaagaacaataaagggataattaaatgcaatatctaaaaagccagcttttgatcatcacttcactatgcagatcttaataaccgaagcagccccgatacggggcagtgcaacgatggcatcaccaggcttgcacaaccccttctccgtagctgacttcattgctgcttctaagatgacctcgggggattcggcatcagttgccttggctgacccttctgccaggatgggaaccaagcccctatatatcagactgtgtctggctggaccttcgtcactgcaggtccaatcaaatgaatcggttgtcaagactgggacaaccacggataggataggaacagctggtctgtacttggcgaccaatttgg

SEQ ID NO: 6533 - DNA, 468 bp, Gossypium hirsutum
  Clone ID: LIB3828-007-Q1-N6-F12
cacaagataattatttattcttagaattgaacaaaacttgtacgctgatgctttcgtaactacactggcactattttacaaaaaaaaaaaaaaaaaacataatttttgatagggggataggaaaaacacttactatagcatcatcaacaaaccaaaaaataaaataaataaataaataacttttaatacctacatagctatgttactgggactctggtttatcttcacatatgagtatgctcaattttctgtattttcttcttgtattaggaggatctctaaaaggtcatatcttcatacctataaagagtcagagtaacatagatgtgattgttcttaaagttcttgaagcttcattagaggcaccagtgggtgaaccaggcacaaaaggaacaaacccttttcctccaaaaactggtctcatgaatctatcatcaaattttctccataagtaatgaactgtccaag

SEQ ID NO: 6534 - DNA, 145 bp, Gossypium hirsutum
  Clone ID: LIB3828-007-Q1-N6-F2
tttttttttttttttttttttttttttttataaatatgttttgcattaaaaaatgtttttaatgatgaaagagtaatagtacagtagtcatatacggtaggcatgttcccgaggtttaagcgacgagtttgaggatttcgaggcc

SEQ ID NO: 6535 - DNA, 483 bp, Gossypium hirsutum
  Clone ID: LIB3828-007-Q1-N6-F3
cccgaagaaacataaaatcaaacaacataaaatattatgagtttatgattacatatgttgctagtttcctttgcttcttcctcctcctgtttttcttctttctccttagttctcacatacatatatatatatataaactttcccttacatttccctatgatcaaacaatgggtgcctcagttttcacttcttttacaatgggttcttctttcttagtttcttcacttttcttttcagccaaaacaataacctcatctccttcttcttcttcttcctttttcttttgcttttcagcttcaaccattgtttttgcctcaacaatgacatctgctttctttggggcctcctttggagcctcaacaatggcttcttccactttctttggcgcctcaacaatggcggcttcttctttaatctttggttcttcaacagttattgcctccaccttagtttcattgctcttttcttcattatcaagcaatg

SEQ ID NO: 6536 - DNA, 486 bp, Gossypium hirsutum
  Clone ID: LIB3828-007-Q1-N6-F4
tttttttagtttttttttttttttttttttttttttttttttttttttttttttttttttttttttttttttttttttttttttttttttttaatttaatttttaaaaattaaaaaaaaaaaaaaaaaaaaaaaaaaaaaaaaaaaaaaaaaaaaaaaaaaaaaaaaaaaaaaccttttaaaaaaaaaaaaaaaaaaaaaaaaaaaaaaaaaaaaaaaaaaaaaaaaaaaaaaaaaaaaaaaaaaaaaaaaatttttcccaccccccaaaaaaaaaaaaaaaaaacaaaaaaaaaaaaaaaaacccccctttaaaaaaaaaaaacccccccccggaaaaaaaaaaaaaaaaagcgccccaaaaaaaaaggggggggggaaaaaaaaaaaaaaaaaacccccggggggaaggcccccccaaaaaaaaaaaaaaaaaaaaccggggggggggggaaaaccccccccaaaaaaaaaaaacccggggggg

SEQ ID NO: 6537 - DNA, 240 bp, Gossypium hirsutum
  unsure (1)..(240): unsure at all n locations; Clone ID: LIB3828-007-Q1-N6-F5
ataggtcaaaatttttatttatcttcaaacagaacaaaggaaaaaaagaaataacaaagggtaatactaaaaataacaaaatttnncaggggnaagctttgtgctaaagagaccattagatcccgggatttgtatgggacaattgacaggaaagggaggttgcaaatatggaatatggctcggcactgccaatggcggctgtccacnncggcgatgaaagggttgaggtacancaaaact

SEQ ID NO: 6538 - DNA, 485 bp, Gossypium hirsutum
  Clone ID: LIB3828-007-Q1-N6-F6
aaaatatatattttatttctcaaaaacacatttttttacagcaatactagacactcaaatcttaaactaaacttttcaaaagttctttatagatgaattttatctatgaattgaagttacaactagttagtttagttacaataaaggagttctcttttaggaaaacacaaactaaaaaatctcggcattattcataatagtttggatgagatatgcaactacatactattagagttcatcacgataacttacttctggaggtgaaatatgtttggtcggattttgcaagaggtatgttgtcgccaacgatgcatgtaaagctgcaccgtatggaaaaacatcttcatttactctgaagtagggtgaatgtcccgagtgaactgctccttccgtctccttcatcccaagaaagaaaaaaagtccagggatcgactcagaaaagaatgcaaaatcctctcctcccatctgcggctgcatttctataa

SEQ ID NO: 6539 - DNA, 255 bp, Gossypium hirsutum
  Clone ID: LIB3828-007-Q1-N6-F7
cttattattaagaacacaacatattaaacttgatttaatctattttttaggtgtcaatttgaccttgattctctcaacctctctaggatgaatctggaatgccttgctcaatacatcatttggaattgttggtgaggctgcaaatagggtagtagcaatggactgtgttcctgaaaactggctatcgaacgcagtaatagcagatgcacgtgtcttcccaagttcttttggaaatgcatcaatcctttagggaac

SEQ ID NO: 6540 - DNA, 489 bp, Gossypium hirsutum
  Clone ID: LIB3828-007-Q1-N6-F8
agccgaactactcgtcaaatctattgcagtccatatagagtcttgaacaaagcttcgaagagtcgaagttcacacaatagaataagcaaaaacacacgataaaagcaaacaaatcattgggtagcaaaatgcaagccctccactcaaacattacttatttagtactcatcttcatcttcctcatcaccctcgcctgactcagcaccgacttcttcataatccttctcaagtgcagcaaggtcctcacgagcttccgagaattctccttcttccataccctcacccacgtaccagtgaacaaaggcacgcttggcatacatgagatcaaacttgtggtcaatgcgggagaacacctcagcaacgctggttgagttggaaatcatgcaaacggctctctggaccttagcaagatcaccaccaggaacgacagtgggtggctggtagttgataccacacttgaatccagttgggcaccagtcaacgaactga

SEQ ID NO: 6541 - DNA, 467 bp, Gossypium hirsutum
  Clone ID: LIB3828-007-Q1-N6-F9
ttttttttttttttttttagttttttttttttttttttttttttttttttttttttttttttttttttttttttttttttgatttttttttttttaatttatattttttaaaaatatatttttttttttaataaaaaaaaaaaaaaaaaaaaaaaaaaaagaaaaaaaaaaaaaagtaaaaaattaaaaaaaaaaaaaaaaaaaaaaaaaaaaaaaaaatgtgaagaaaaaaaggagaaaaaaaaaaaaaaaagggaataaaaggaaaaaaaaaaaaaaggggattcagccacaaataaaaaaaaaaaacaagggggaaaaaaaaaagtgtaaaaaaagaggcgtggaaagaaaaaggaaaaaaaaagggaaaagggggagggccctaacaaaaaaacaggggggaaaaaaaggaggggaaactaaaaaaaaaaaaaaaacaagcaaaaaaaaaaggggcctggcgg

SEQ ID NO: 6542 - DNA, 490 bp, Gossypium hirsutum
  Clone ID: LIB3828-007-Q1-N6-G1
aaagcaaaagggaacatctttttattaacttccacttaatatcaatttacatttactacacaaatatacccagaagggccaataaaaaaaccatacccttctcaccattcttttcatttatgcattaacgtttgtcaaaaaatatcccaaaaagaaaacacagcatgatagggttaatacaagcttatatcacattctcatatagtgtgttatataacattcacaattaaaaaaacaaagaaacccctaaaaataggcttcttcatggatcttcatatatatatatatattttcaactatttatatggtagatatgttggtttcaagcagctgcaacagtgcttgttctaaaaggataatcttcagctttggttggagatttggatgatttcctttggtctttcttcttcctcaatgctttcattgatgaagaaaagctcaaattgttttctttagcttcatccatgtctatttgttcttgcctacactc

SEQ ID NO: 6543 - DNA, 465 bp, Gossypium hirsutum
  Clone ID: LIB3828-007-Q1-N6-G10
agacaaagggggagacttatttattttagaagaagaaaaagaaatggttcttgaatcttcttcgcaaaacagaatcatactagctttcatgattcaccatacaaatccaaacccaattggccatgtttagtattaataaatggcctctggaatacttacattattacgaagccaaagggggggcgggttcaacttttttgtttaccactatgctggtcaactccctcagagcggttaccttttgatagtaaatcaggctgaggctgcggagttcggctcaattaacttgcttgctggggctttctcttggctttctacataagcagagggaaaccatccagccttgcccttgcactctccctccgaccatccactaggacccaccttaattttcgtattacattacaaccacatatgattatcatcacctaaaatattaacgttaaacatttaaccaggctagcc

SEQ ID NO: 6544 - DNA, 157 bp, Gossypium hirsutum
  Clone ID: LIB3828-007-Q1-N6-G11
acataacatgggtcacttgagttcaataagatcaaagatatgcttataaaattccacaaattaactgaaaaaaaagaaagaaagaaggaactgcctttcacaagctaagcctggtagttggaaagaaaataagagataaatacatcaaaccccccat

SEQ ID NO: 6545 - DNA, 490 bp, Gossypium hirsutum
  Clone ID: LIB3828-007-Q1-N6-G12
gattcatggcttggaaatcttggatcccaatttccattcttttaaaataaaatctaataccaaatccaccatcttcccttttaattaaacaaagcttctgcatatagatatattttacagaggaaatatctccttcgagattgattttctttttaacttgagaacacatttaaaactgttccatcctacacataatgtaagagaaaatgaaaattgaaacttgagggggatttttacgaagattccaggatgagattagtggtctcagcaacagatagggaatggttgtgctcgccttcataggtaactactagcatcgatggatcatctaaggctctttcaacatgtttacgggctggacatcctcttacactgctgcacttatagtaaccccttgggtgtggggatcccttgatcggtttttgaccgtactttctccatgagtaatcatctggcggaatatcggccatcttcaggcttattgctggaa

SEQ ID NO: 6546 - DNA, 476 bp, Gossypium hirsutum
  Clone ID: LIB3828-007-Q1-N6-G2
tttttttttttttttttttttttttttttttttttttttttttttttttgttttttttttatttttgttttttttatttgtgaatattaaaaattaaaatttggacaaaaatttcattctaatattggtcttaaaaccaaaaaaacccgagaaaaaaaaaaaaaaagggggaaaaaaaaaagaggggtttccaaaaggggaaaaaaaaaaaaaaaaaggggggcaaaaaatgaaaagggggggggggacaagaaaccaaaaaaagccaaagaaaaaaaagcacaattggaaaaaagggggggccccgcacttttggggcggcccaaaaaaaaaaagggggggcccctttaggggggggggggaaaaaaaggcgtaaaaacggggataggaggcccaaaaaaaaaagggcggggggggcacccgggaaatagcagacgggccccgaggggaaaaccaatttccttaaggggggaacg

SEQ ID NO: 6547 - DNA, 432 bp, Gossypium hirsutum
  Clone ID: LIB3828-007-Q1-N6-G3
agggaaaaaacatatgaacaattatcatttcgtttgtatacaagaaactagaaagtcggatcttacataacttgacaacagaatatacataaactaaaccaaactactcgaagaagagagcagtttcaacgcgaggaatccctatttgtctatgcacatgataattcctcccaacaagtagcaaaaattggggagatatacaaatacaatgtctctctccctgtccatggactgccagaaacatttatgttcgttgccataaatgttaactaaccgtacccgagaactgatacaggtaattttggcaacaattctccaatcaacggagatgatcatttcaaactgggattcaatcaggatcttgaacctagcttctcccaccattttcttcgagttttgtctgactcatatccacgcttatgtagtcttgcc

SEQ ID NO: 6548 - DNA, 386 bp, Gossypium hirsutum
  Clone ID: LIB3828-007-Q1-N6-G4
aaaaaacccaaaagcccaacacccccggggcccttttgggggtcccccaaaaaaagggctcccggggggggggaaggggggtaaaaagggggcccaaaaaaacccaaaaaattcccccctaaaccccaaaccaaaatttttttttttttggggtgggggtggggggggggaataaacaaaggccaaaaacctgggccccccaaaaaaaccccccccccttctgagggggtttttttggccgcccttttttttttgcaaacccccccccccccaagaaaaaaaaaataaaagggggggggacccttcccccccaaaaaaaaagggggggggggggacccccccccaagaaaaatttcccgggcttggggtccaaccgggggggacaa

SEQ ID NO: 6549 - DNA, 446 bp, Gossypium hirsutum
  Clone ID: LIB3828-007-Q1-N6-G5
attcaaagctccattttattcatttttttcaatattcatcacatgtttctttcaaaaataataaaataataaaatattcgttgacatgttgatttttcatacatgtagcttactgcagcatgtaagaaaacaaagaaacaatggaagccccaaccaatgatccaagaacaggcaaggtagcggcagccacgctggaatccggtcctgatgctggagcggaaccaggagaggagctaggactagaaccaccggctgaaggggcaggagatggtgcaccggcagccatgacgacgctcattgaggcggcagcaacaatgatggcggtggagaccttcttcatgtccatggcgtataaagtgattattaaacgcaccggaaatgagagggacccgcgtttaattaccggtgaatggggatccgcccccacgcgtccgcccacgcgtccg

SEQ ID NO: 6550 - DNA, 305 bp, Gossypium hirsutum
  Clone ID: LIB3828-007-Q1-N6-G6
aaaacatcacaagcttcatatcacaattcaagtaaaatatatatatgtattttacatgtctctctctcagccaaaaattgacaaaaacatgaaaagggcctacttcctagcaaatattttttaccttctcaaatgtaacctatcacctttttaagtagaacagcatcaaatgtaacctattacctttctaagtagaacagcatcctctcttagtgtttcctgatgtatcagtgacattaatggtagttccttggccgggaattgcggtactagcagctgcttcctgggctgccaatgcctttttg

SEQ ID NO: 6551 - DNA, 520 bp, Gossypium hirsutum
  unsure (1)..(520): unsure at all n locations; Clone ID: LIB3828-007-Q1-N6-G7
aaaaaaaaaanctactttgatagttgaaagcctcgaactcatattttgcagggatcaactaaagtcgatgagaaccatactaaagtcctaaattcgaaagcatcttgaaattgatgtaactccaaaccgccaaaaccctcaaatnccttaacaataattgtaacaaantttaancacattcctaaaggcatcacctatcggcaactcgcaacgcttatctggcaaagattagatcttatttctaaacctaaaatanncacctttgctgctctgctcacnncttcgtctggttcaancgtaaatacanctcctttgcctctctaaatatcgctttataaactggtgtaccatcaaatgaataatactctcccaatattggttttattgccttagttgcttccattgcgtggtaatgcggcatcgtcgaaaacaaatgatgagcgacatgagtatcagttatgttatggaaaaccttgtttaatatcccataatctcggtcgaccgtcgcgagggctccacg

SEQ ID NO: 6552 - DNA, 487 bp, Gossypium hirsutum
  Clone ID: LIB3828-007-Q1-N6-G8
aacaagaatagagtatttatcacataaaacaaaaatcaaataatagaattcaccatagggttcatcttcccgaggtatatagaaagctagttcataattgtgaataaaaaacatcttaatgaaaaaataaacacgggaaataaaaaaactcataaaaacttcaaaagaaattaaaaggaggtcttcaatcttaatagaaatctacttcagagttggctccaatggtgttcttcgagttgttttcttcaatattctctggtagctcccttttctctttttctatttggtatttatagactttagaattcctagaaagcctagaagctatgtttttccgcaggtttgggatgcaaattgcgaaatcaacacggtttggcaaatggttgtgtgccagcccgtgtggctcacacggccgagtgtccagcctgtgtgggaaggcctagcccatatggttcctgaagtctactctttttgtctgattttcgct

SEQ ID NO: 6553 - DNA, 432 bp, Gossypium hirsutum
  Clone ID: LIB3828-007-Q1-N6-G9
aggaaaaaggaagataacatttcaatccattttatgtttgaaaataatatttttgaaagctgaaaattctttttttttaaaataaaaagcaatttaaatgggatgcaatttaaaagaactttttatgaagcagggccatgacattgggaaatcatttttctagttccctagttcaatcggctcctcctatgcccccgaaagtcaccggtgtcgacatccgaaaccctcaatacatcgtttttttttttaaaaaaccaagcccaaagtgaaaccccagaatttatttcgacgggggggtccatttgactctccgagtttattacaacagcaatgcttgaaaacaagtcccgatcattgacaactggtgggggcgcttgctcctgatttcttcccaccgggttgcctcggaatattgcctcgaccatccttttt

SEQ ID NO: 6554 - DNA, 469 bp, Gossypium hirsutum
  Clone ID: LIB3828-007-Q1-N6-H1
tttatgtagatcgcgttgtttttctcttccgttgtgaatcattctgctcttctgttatatgattccgtgtgtatcttgaagatggatcgtgctcgatcctgatttgaacatgttaacatttaatagattcaaattttaaattcatccatacatgcacgagccgcatgaccaacatgaagacacggcaacctgtcttaggcgagaagaaaaatgcactggggcggtggttacaaacgcgatccactgcaccattactcaggcgcggcagtaccagaggagcctgctggagaacaacctcagtcaacaaacattgcattcggccgcactcggctttctctttggcgaggcatttgagtgaagcttgtttgcaagattgcattgcttcctgatctcacccttgctaccagtgagaggattgttctcagagaggaacagaatggcccttgagaactccttgaagaaatagcct

SEQ ID NO: 6555 - DNA, 432 bp, Gossypium hirsutum
  Clone ID: LIB3828-007-Q1-N6-H10
ggatgaaaaagctttcatcggaatttttcattgctttaaacaagagcataagaattgagaataaaatttgtcaaacaacaataaccattttaaactcaatcccacaccatcgcaatgcataccagaaactaaatcataagaaggaaattaaatccatatgactttgcttaccaactcttaaaaatgtcaaaattttaaccagaaataaagtttcacaacacttcaaaaagtactatctatgcctccgtcactgggaactcaaacacgacatcctttccagcaagcttccggtaaactgcagaaaacgtctcaagcttgtactctgggttattacgttccttggggtccaaatacaccttcattatctttgattcatcaattctatatctagtgcgcttcccaacaatctcagcaggtaagacaacatcttct

SEQ ID NO: 6556 - DNA, 483 bp, Gossypium hirsutum
  Clone ID: LIB3828-007-Q1-N6-H12
aaatctaattatccacattttatataagatcttcaaataacaacttgtgaaacaaaacgtgaacaatgattcgtattacatatagtggctctgacaattcaatgcttgttgtgaaagatctaaggtaaaattcgaacccacattgatcgacggcaaggtactccattgtagttcacaaagagcatgtaataaccaggtggtgcaatgttgctattaacgggagcttgaagaacaatgttgtttgtatttatggcaacatttttgttaaattccacaattcccaattgaatcaatctttgattcatagcaaccccgtgcgtcacaaatggcggtgagtaaatcgtcacttgaagcttttgttggtcaatttcgacatttccacggatttgcactgtaaatttctgaccgtatttcacctggttattggaattttcaacaatgatctcttgttggaacatacccaagttcgggtccaagtaatgt

SEQ ID NO: 6557 - DNA, 480 bp, Gossypium hirsutum
  Clone ID: LIB3828-007-Q1-N6-H2
ccacaacattttgtccaatttaagattcaaggatcaaaatccattcaggaactacaagtgtgcaacataagaacagagcaaagcatacttgaatctaatcagaaaattgtttcaaaagcaaagagaattcctaatgtcaaaccgccagcagcagcggctgagtagcagatatgaagcaaagaatcacagccttcttccgcgtctgccaccctttctacgagtactatcggtgggaatgggggtgacatcctctatgcgtccaattttcatgccagaacgagcgagggctctaagtgctgactgggcaccaggaccaggtgtcttggttttgttccctccagtagctcgaagctttatatgaagggctgtaatacccaactccttgcagcgttgagaaacatcttgtgctgcaagcatggcggcataaggggaagactcatccctatcagctttcaccttcataccacccgtaatgcgaac

SEQ ID NO: 6558 - DNA, 471 bp, Gossypium hirsutum
  Clone ID: LIB3828-007-Q1-N6-H3
gaacaaaaactgtgttctggtaatttagtaactttatattatatgttctcgacctgaactatgctagctacctcatacaacaaaatgtatgtatagcctcaacatcttatacattttccacacactacatgaaacagaaaatttgtaaaaagcctgtatctcataacaactgcaaaacaaagctgtacagtgtacatgcatgcatatatacatacatacatatatgcagcaagagcttccaagtactgatgattattctctagacctggactcctatccgttgagcaacctctttaaaggagtaaacatcagaaccccaaagccaagcatcacaaccggcatctctggcaccccatacatcattcctacggtcatcccctacatgaactgcttcctctggttttatgcccaacagctcacaagcttttacaaatattgttggatttggcttctctgcttctacttcagctg

SEQ ID NO: 6559 - DNA, 454 bp, Gossypium hirsutum
  Clone ID: LIB3828-007-Q1-N6-H4
aattaaaaaattaatatttaaggccaaccacaaaaatcacaacactaggcaatccccgaccgtaagatctgaatacatcatgaggctcaaagcctccaactcaacaaaacctaaccggcggatcaaaaccaactatccacgtttcattagcctaaaccaaaaccccgcggattgccggcgtgccatatccatctataaaatcccgcaatcaactatcactttcgcttcgcacaattcaaaaaaaaaaaaccatttcaaccaaaaaaaaatagaaagagttttccacactccttttcgccgatcaaataaaaaagttcatcaaatttgaatcaatttttgtattctttaaagaaaattaacgtcttttaagctgtaatggggtcgacgtcaaccacagcgggaggtaggaaagggggaaataggaaaaaagcggtttctaagtcggcaaaggcag

SEQ ID NO: 6560 - DNA, 479 bp, Gossypium hirsutum
  Clone ID: LIB3828-007-Q1-N6-H5
gtcaatcaattgatttataattcccatcaaacaaagattaaacagtacctcaaatccttactacatatatacttccacaaaaatggctttttttcttattcaaaaggtaaacaatgttcccactcaaagcaaaatctctgagccataatataaaacaatctgcatattgtgttatttcagttcataatcctagtttctcttcataaacaataatataagaaactattataaacccttcattcttcaacaaatttcttgagatttttcaaccataaaagatactctctgttatccttatcggccatgtactcacgcaagtaatttgttgtacttggcttgattcctctaacctccaagtatttgtaaaaacccttttgcaaattctcatccaaatcattgaaatcagggccttcataagcaagttcatcatcctcagggttgggatttctaaaactcaaactgtcgattccaatcccatc

SEQ ID NO: 6561 - DNA, 477 bp, Gossypium hirsutum
  Clone ID: LIB3828-007-Q1-N6-H6
gtcaatgataaaaattgcatttttaccactaactctcaattccaattagcacactatgtccagtccaaattctaaatcatattcccgaaaaaccttaataaatttactacttgcacaactttgataattccacgaaaaaacagatttaaaaacatataaaaataataaaataaaagtaaagtaaataatgtaaaaatcaaaggtttactgtttaagagggtcccgattatcatgatgctcctccctcttgattgggtcacctaagccaaaaactccattggcctgtgatgaaatggcctcaaccaactaggttattgattcccgtaaaagaacccgagagttgcctgctgccttgaatttgctccccttcccttgaacaaccttattaatatttttagaaaattgagagcctgtcaatctcttcctcaagcctttacccatagtttttgtcttccctttccttgaaattactccggt

SEQ ID NO: 6562 - DNA, 477 bp, Gossypium hirsutum
  Clone ID: LIB3828-007-Q1-N6-H7
catcacaatcaaattgaatctaataatcatatataatcagacatgccactgctaatctatttcattagaaacccatgcttaacatttctacctctataactacgtaccataaacgcaatttatggtattttaaatctctaccaaatgaccaaaacaatcttttcttaaaaaaaattatagagtaacgcacccaaaacattaaaaaaaataatgaatcaagagtcaggggtgggagaagcggcgagaaaaagaggaccggtgccggccccgccgtgagaatgttcaacgacaatgttatcggaaagctcgttgccgagcatttcccaaacaccactatggagataattcctgaagatcctatagggctcatatagtccaccttccattataatcacacttcttctgttggctattctcccaagcttctttacaatcgccactgtgcctgcccctgccagacgagctccccgttccgtt

SEQ ID NO: 6563 - DNA, 483 bp, Gossypium hirsutum
  Clone ID: LIB3828-007-Q1-N6-H8
actcaagaatcccaaactaaaaaaatattaatagtgccaataacaacttaagcgagggaaaaaaaaggggggcgggggcacaaacatatttttggtaaaaggctagcggcaggatccttgaccaccactttacagccctgtgattagtggttgcggttgctgtgagttgatcctcctctttctgaggcgctcggcgataatgaaggcgagctcaagagattgcgaggcattcaaacgagggtcacagtgggtatggtagcgtgaacccaagtcatcgaatgtaacagtccgggatcccccgatgcattccgtcacattctgtccagtcatctctagatgaactcctccaggatgacttccctcttgctcgtgcacgtcaaagaaagctctcacttcagcccttatggaatcgaaggggcgagttttgagaccacaaggagccttgatggtgtttccatgcatagggtcactgacccaagtgac

SEQ ID NO: 6564 - DNA, 483 bp, Gossypium hirsutum
  Clone ID: LIB3828-007-Q1-N6-H9
attattcatttattacgtacgtaggtttgagcatagaaaacaagcataaaatgtaggcagtagccataagaagagtccaaatgcatttaattgatactaatacagaagtaaaatgaagtttatttatgcaaggatttgctcaagaggcttggtttccagttcgggcttgttggtcgtgtccatctgctgctccttggccagtttctttagcatggcaagctcaagatccttgctcatcttcctcctgtacatttaagcaaatgtgatgggctcctcaagtataggtttctctccttctcttatcttcagtggatacactgttgcatcgggtgctgggttttggaatgtggctattgacaatctgctgcagtcggagttcaccactgcttggtgatcggcgttcttgaacctcccattgctcaggtaatggccatgatctccaaggttgaccacaaatgccccttcaactggttgaacagtgat

SEQ ID NO: 6565 - DNA, 396 bp, Gossypium hirsutum
  Clone ID: LIB3828-008-Q1-N6-A1
aaaaaaaaaaaaaaaaaaaaaaaaaaaaaaaaaacccccaccccaaaggggaccaggaaaaaggccaggaacaggaaacagggccccaagggggcaaagtccttccctaagggggggggaaaaaaaggggggggaaaaccgggccccccggggccccggaaccggggccaggcccccaaacggggaaccccgggggggggggggttttaaaatcaaaaaaaacggggggttttcccaaaaaaaaaaaaaaaaaaaaaaaacagcaacgaaagccacaaaaaaagaggaaagaaaaaaaaaaagagaaaggaaaacaatccacttttccacacaaaaaaaaaaaaaaaaaggggggggggcgcgcgcgagggggagcgcgcgcgcgcgcgcgcgcgc

SEQ ID NO: 6566 - DNA, 484 bp, Gossypium hirsutum
  Clone ID: LIB3828-008-Q1-N6-A10
aaagggaaactaagaagaatattacaatccaaaatcacaagattcgtgaatttacaaagggtactcaacaccatatgagtcacagttacaggacaatagacatcgaatggggagctgcacgtggtaatctaactcaaatgaactagtccactccttaaaatacataaagacttaagctgtgaaagatttgaaacttagtaccttgacatgagatgctacactatgttacttggacttgagcatgtcggataagaagttttcccaagtatttgaaggatcattggtcatatcaccaccacgtcccaaaaagtatactcttaagaaagattaaaatcagagcaacaatcgatgcacattactcagatgaactactacctctttaaaatacataagatttccgcagtgagcataaaaacaatttatttaggctccactgcttacatgatacattgtatctcaacagctcctccaatctgatttaaaa

SEQ ID NO: 6567 - DNA, 478 bp, Gossypium hirsutum
  Clone ID: LIB3828-008-Q1-N6-A11
aacagaatacatgttaaggtaccaagaaaaaattctttcaggtaccaacattagaaaagtgttcaagttcaggggctagattatgacttaaatattaaaaagccaatgacttcactgaataaaacacttaaaagaagcgggttaaaagaagtaaaacaaaaggttttgaacagacagtcaaatgccggagacaaagcaccattacctgagctgcaggaaaataagattgtcaacaacaatgcttatatgacaagcacatcaaaattttttccgagttaattagaaaagggatgatgtaagctcagatacatccgatactatctggctataatcggctttcatcttttcttgttcctcgatggcgagttcacctttggtgggcttggttagcaccaaaacacagcatgttggtctcttagtagctcctgctgttgcaagatcttcttttgaagaaacatagacatatggaatttcagcc

SEQ ID NO: 6568 - DNA, 480 bp, Gossypium hirsutum
  unsure (1)..(480): unsure at all n locations; Clone ID: LIB3828-008-Q1-N6-A12
ttttttttttttttttttttttttttttttttttttttttttttttttttttttttttttttttttttttttttttttttttttttttttttttttttttttttttttttttttttttaaaaaaaaattttttttaaaaaaaaaaaaaaaaaaaaaaaaaaaggggggggggccccgggggggggggggggcccccggggtttcgggggggggcccggggggggcaccacttttcctttttggggggctttttaaagggggggggaaaggggggcaaaaggggccccggggggaaagtgttttccccctaaattcccccaaaaaattgggcggggggggtaaaagggaaaaccggggggggccttggggggggggcccccccaataattgggggggggccccccgcccctttttcnggggggaacccttgggcccccgttttttttttttctgcgccccccccgggggagggaggctaat

SEQ ID NO: 6569 - DNA, 484 bp, Gossypium hirsutum
  Clone ID: LIB3828-008-Q1-N6-A2
gagaaggttccaaatttattataaaaactaaacttaattttacaactgaaatggatgatggatttttccccaatcgggcaaaccttgaagttgtaaagggactcaattgtctttccctttacccataatttccgtggccatgaataaattacacaacaccaactttttccgcccacaccaaaggccccccttctccttttgtcaatatacttttatttacatgacagctttaagacacatatctttaaataactatgaattaacagaatttcaaaataatattatatacaaccaatgaaattagaaagatatattccaataataataaaaaatgaagcagcagtttagttttcaagccaagagccagaaatccttgtggcgtttagtggtgatcaaataacctccaagctttttgcttttccttctgactgcaacagccatgcaggtagcattttggatacagtattccactactccacctgtc

SEQ ID NO: 6570 - DNA, 480 bp, Gossypium hirsutum
  Clone ID: LIB3828-008-Q1-N6-A3
aaggaacaatgatgattaatgttcattattaataataatattattattatgggttcagcttctctccattaaaggaagtttcactttccaccaatggattatggagaattttccatttacagcagaagagataaattaaaaggtcccaattacgatctaatcattcccgcacgccccttctttttggtgtttgtcaccttttgcccccatcccacgtgaaccccccccccctcttcttcttcttctccatattcccttcttttcttttctgcattattgacttccatcacaggctgaagatcatggtattgggtactagtttttaacttcttacataattcccatcttacaaaaatcttggagcttcattttagttccattgttcaggagaataccaatgaagacttggagcttgttcatctgaaaagaaattacaagcttcatctgcagtgaagaaattatgttcttccatcttcacgt

SEQ ID NO: 6571 - DNA, 330 bp, Gossypium hirsutum
  Clone ID: LIB3828-008-Q1-N6-A4
ccggggttataaaccccaaaaaaaaccccaacaaaggggaaaaaaaaaaacccccgccggggggtaaaccccccccccaaaaaaaaaaaaaatttaccccccaaaaggggccccttaaaaaaggcccccaaaaaacccccaaaaaaaaaaacccccccgccccaaaaaaagggcccctttaaaaagggggggcaaaaggggggcaaacggtggggaaaaaaaaaaaaaaaaacccccccccggggaactggagggtgcccccccaaaacccgcccccggggggaaaaaaaaccccggaagggggggaaatttttaaaaaaaggggggggg

SEQ ID NO: 6572 - DNA, 432 bp, Gossypium hirsutum
  Clone ID: LIB3828-008-Q1-N6-A5
attcaaagctccattttattcaatttttttttcagtattcatcacatgtttctttcaaaaagaataaaataaaacattcgttcacatgttcatttttcatatatgtagcttattgtagcatgtaagaaaacaaagaaacaatggaggccccaaccaatgatccaagaacaggcaaggtagcggcagccatgctggaatccggtcctgatgctggagcggaaccaggagaggagctaggactagaaccaccggctgaaggggcaggagatggtgcatcggcggccatgacggcgctcattgaggcggcagcaacaatgatggcggtggagaccttcttcatgtccatggcgtataaaaggattattaaacgcaccggaaatgaatgagacctgcgtttaattacggggatccgccggtgattgttattatttg

SEQ ID NO: 6573 - DNA, 441 bp, Gossypium hirsutum; identical to SEQ ID NO: 6095
  Clone ID: LIB3828-008-Q1-N6-A6

SEQ ID NO: 6574 - DNA, 415 bp, Gossypium hirsutum
  Clone ID: LIB3828-008-Q1-N6-A7
aattatattaattattttaggaaattaaaaaaaaaaaaaaaaaaaaatttttaagctaaaaaaaaaaaaaaaaaaaaaaaaaaaaaaatgaaaggggggggaaaaaaaaaaccccaaaaaaaccgggacccgggggcaccaaaaaaaaaaaaaaagggggggcaaaaaaacccctggggggggggcccccccaaaaaaaggggggggaaaaaaaaaaaggggacccaagggaaaaagaaaaaaaaaaaacccaaattaaaaaaacggttcctggggcccaaccccataaaaaaaaaaaccccgggggggacccgggggccaccccgaaaaatccagaccggccccggggggggaaaaaagtttcaaaaaagggggggcaaaaaaagggggggaaaaaaaaggaaaaaaggggccc

SEQ ID NO: 6575 - DNA, 488 bp, Gossypium hirsutum
  Clone ID: LIB3828-008-Q1-N6-A8
attgtagaactttcccacgggaaacattataccctatccgttgaaccatgttgtaacattgttattgtaatcgatgatgaagagagaattgtgaactaagttcccgaccactttgatgggattttattgtttcttttttttttagtttcattcaaatggtacaggttcaccctgaacgaaaaagaggccggaaggggcaccaccgttcggccaaagtgctaacttgactggaatcgctgcaccttcttcgggggttgaatgaccggcattgttatttatatctgttttgacaaaaccagggcaaacacagttgatgcagaaatttggatgcttcttggccaaaatccttgtataggcattcatagctacttttgagattgtataggcagagagaaaggttggccaacccttgctttctaatgaaccctccttgaaattctttagaaactcggtgattaactcgtcgattttctctcctgtatcagcat

SEQ ID NO: 6576 - DNA, 427 bp, Gossypium hirsutum
  Clone ID: LIB3828-008-Q1-N6-A9
gaaaacaaggaagatgacttgcttcaaatcctcttttttttttccttcttacatcaacagcatttgcaagattgtacattttttcagacttacacaggcaagccgagataaggcaacttgtaacaaagatgaagatttagacttttttcaccggctaccaactcttgttatgggtgggtcgagtagggtccagacaacacaatccaatacaatacaatacaattgcccccagcacccagaggcctttgtataatcaatgggtcttgggtaatctaaagagatcaagaaaataattggggctcaatgttaaaaatgttaggggaggccctaaaaaatcttcaaaaaaggctattgttttttattcaacttggctcggacttgcctgatctttgcgtccacacgtgcggggaacccgatcttagttttt

SEQ ID NO: 6577 - DNA, 487 bp, Gossypium hirsutum
  Clone ID: LIB3828-008-Q1-N6-B1
gttgtctaaacgacttggttttgcttatttattagttgcctgaacccgttttataggacaagagatgattcaggtttcacgtggtatatagatgtttaaagtttacaatgaaccgagacagcgaacagatgaaaccaggtttaagtttgacatcggtgaaatgcacgaacatgaagacccccttctatatggagattgatcatcgtcctgtatgtcactgttctgttctcatcactcaatttgaatacaaagtagctgagaagaacagctgagaagatcttcatctgcctataagcaaactctttacccagacaaatccgaggtcctgcctggaaagctgtaaacttgaaagggttttctagctggaacatgccattcttgtcaagccatctctcaggtctgaactcctccgcattgtcaccccaaatgaacctcattctacccattgcataaggctgataagcaatcatatcccctttccttgcac

SEQ ID NO: 6578 - DNA, 495 bp, Gossypium hirsutum
  unsure (1)..(495): unsure at all n locations; Clone ID: LIB3828-008-Q1-N6-B10
aagaacaatttttgtcgcatttcattggatntacaatactttggtttcagtagtttcctcgatcaactcaaatttctgctagactaagttcccccctaattgaagacaaaaattgaatcatatttccatatttattagaaaccgactaatcgaaaaggaaacctttcaaaccatgtctgcccaaatccccattgttgacagacttgctatagcacaataaccagttcataagaagacatataatccagcggagtcctcatctaacttatccactgaagagacagattgaagcatccatttcggttctcagcattttccagtgaagtcctgctgctactaactttgcatatcaaatctgccatatagtgagccaactagaacaaaagcctccattcgtagatgccgcgcatgatgcatattgtttgacatataaataagagtagttctgcactacataaaaacttactagacataccttactaactagacattcca

SEQ ID NO: 6579 - DNA, 487 bp, Gossypium hirsutum
  Clone ID: LIB3828-008-Q1-N6-B11
gcgaaaattaatggcttactcattcactggaatgctaaaagattctaattcatataacacgatagaataattcatcaaacaatgcgctgccacgaaagattggaagtgtaattatcagagaaaatgccagtttttcaaccatgaaagcaagctgtttcatgatatccattgccgtttgccactaacttgtggcggaagcagctttaaggttggtaagttgaaaaagatggaactggaggccctagttcgttaccgcgacaatatatgcattccaagcatcttcttgttggaaagtttttacctcttcatacttcacatctcgcccgctgccgaatccctctgtgcttctgttttcactagtgtctggcatcttccgaagccagaaatggacagattgaaatccagcatcttctaagcagtctctaatctccggcaatgaccacagcctccaactgtaagaaaatgcatggcgaagtttcttctgctg

SEQ ID NO: 6580 - DNA, 483 bp, Gossypium hirsutum
  Clone ID: LIB3828-008-Q1-N6-B2
ctacagaaagctacggaatttatacattccctcaaaagttacaattacagtatgaagaatctcatggagttttattcctactcttattaacctcaagcataagaaagtggctgtggacgattattgccctcggtgtcgccaatataaggaagatagtaatcatatattttgacagtgtcctgggtttttagtcgggggactagtgaacagtgtcaacttttctgttgtgggctttggttaatctttcaagttgacagaggccctaaacatgttaatcgaagaacaaaggttgcaatcttttttgatgtagcctttgaccaacaatctttcaaatctgcttcgggtctgatagtacgagatgtgaggagcgagatcttggcatcaaagacggtcgttcactccgatatagcaactccgtttacggcgaatgcacatacaagattacaacccagagattaggaatttacatgggcttaaacaatc

SEQ ID NO: 6581 - DNA, 458 bp, Gossypium hirsutum
  Clone ID: LIB3828-008-Q1-N6-B3
aatattagccatgtaataatatattatcgagaaatctgaaaattttaaaaattaaaaattaacatgaacgaagtttaagactaacgttaacctcactagtaattcgactctttttatatttcatcaggaaaaagctcttctttaagtgaaggagcaatccactgtatctgaatgtatgtaatatcccatagatcatcttcttccttacgtaccaaaatcccagtttcctgcatcttcgttatcatcttcctcaacaactccggaaccacttcgtgcaatttcgtttccccatattctcccaaatcagctttcatgcacgtatccatccttctcaatacccctaaccaaaacgtcctaaaccctggattctccattatctgattcaagtattgtaaatacacatccgtcagcagctccattgacagctttaaagtcccctccatgcttcttgtttccct

SEQ ID NO: 6582 - DNA, 483 bp, Gossypium hirsutum
  Clone ID: LIB3828-008-Q1-N6-B4
aaacgtgttatttcacatctatatattggtttaattcaaaataagtttccaggaaatctataatagtaaaaacaggagcaaaaattcgaataaatgccgagtgaaatcactggtcaaaactagttttaggagagaattccatcataagaacttttactagttactggtgctgcggcacgcaaatggtgctcaagtcctaatcaaggcctagcgatttgctgctgaaagatacccaaaacataaaacgctaagatgttcccagtccttgaaaacgtcgatgaaacttgaacccaccgcagcactagacgaggtgaaatacattgatctaagaagatgcaaatgttgataggatgttcttcttgatcgtgaattcatcagcttttgctgggcttagtgacttgtcaagcatgcgctgcagccgctcaatttccttgttggggtagtcagcacctttctctaaacagcttttagcagctttcaagt

SEQ ID NO: 6583 - DNA, 476 bp, Gossypium hirsutum
  Clone ID: LIB3828-008-Q1-N6-B5
gcctacggaaaaatattactactaatgttaatgacatcaaaagccaaatcacttggtaaagttacagcaccagatgaaactatatatgcgaagaagcagtattacatgcactaaatagcaaatgacatactgagattggcataaaatacctacataatctacaaaaagaaaaaacaaattgcatttaaagacaacatgaatcatttttatacatgtacagggaaggaaaagtagtgtgattgcctgagctaactttggatgtaaggaattagctgaagaaaatgtgccaattcaccttaacttgagtttgcaaagctatggctcttcagattcttgttttctccatattgatctattagtatgggcgccactttcatatccactactgtcacctgattcatttacaggtttatctgtcactctatccttcacgccatctcgtagtgaccgcatgttttcccttccagctctgccgt

SEQ ID NO: 6584 - DNA, 479 bp, Gossypium hirsutum
  Clone ID: LIB3828-008-Q1-N6-B6
caacagcaaatatattttttatatatttatatattgataatagtccaagagcaaactaaagcaatctttgcaaacaaaatgattttcctaacagattctatctagaattaaacctgcaagttatagcatcaaacaggaggttgtacaaaaataaagttaatgccccacgacactacaacatcactaataacctttccttaaaactaccagttgcttacatccgtcacatctttgctcctttagagatgaaaatgtctccaaacgccaccttttgttgcactttcaagaaaccttgagaagcaaggacacatgtccgatagaagagctgagctgctcctttcttgttcaatccggccgctaagttctgtaaagattctacttgaggagctcctggagtttcaaaatgtgttttcatatgcttcttgatgttctcagtcatcatgtcaggaggatcatccgcaggagtttccattgtaagt

SEQ ID NO: 6585 - DNA, 492 bp, Gossypium hirsutum
  Clone ID: LIB3828-008-Q1-N6-B7
aataataataacaataaaattaaattccataataatggtgtgaataacaattcattaaaccaaatattttaaacctgaaatccactaagggaagatctgcaacacaactataatgataaaccagaaacgagttcaacagaaagcttctggagagaacttaaaattttgctggatattgagagtctaggttgatccagagaggaaagctcttccaggttgacgattagtcaaaggaccatgacatccaagaagctttgcattgacaccgtctggcatgatcctgttctcagacttccacttcagataatcagcacggttgtacttggtaaatccccacttcctgctaacaataatcttttgacgaccaggaaacttgaactttgcacgacggagggcctcctgtgcatgatggctgttgctgtccttgcaacgaacagagagcagaacctgaccaatgtcaactctggcacatgttccttgaggtttcccaaa

SEQ ID NO: 6586 - DNA, 481 bp, Gossypium hirsutum
  Clone ID: LIB3828-008-Q1-N6-B8
agcaaagaaaatcatatatattagcatgtacatgcattaattacatatggctacaaaacaagattcaaggaactttaggatattgtaaatcaaatattgttttgagctatttattcttcataattactctttttatccaacaggattttatagcaagcccttctgcaacatcattacttcttattttgtataattaatacgacgacaaccaactcttcctcattatttcatcttaatatggtatcatctccctactttggtggactgggttcactgtccataacctcttctatccctttgctctttacagtttcagcctggcaacatcctgatgcgcacctgggctgaccacactcagcacaagtcccaccgcaaccctgacggcaacactccccactctcacatcccgactgtcctggcattagtgggatttgtgggacttgtgggatctgtgggattagtggaatttgtgggatttgtg

SEQ ID NO: 6587 - DNA, 389 bp, Gossypium hirsutum
  Clone ID: LIB3828-008-Q1-N6-B9
aaaataaatggggtccatttcttgcaaggggatttaagccaagacgtgcagcacatttttcacacgtttcttccaagtccttggcctaacttatttgtaaagaatcaaatcacacatgaaattttttggtcagacatggaatagggaggttttaaattagccgcttaaaaggaaatctctccattggtcacattgatcttgaatactacaggaattcctctctaacaaagttggggctttaaaagctgcccaagtatgtgttttaagggggtatgagtctttgaccacactttggcaactattgctgctcctccactattcgggtcacgatgcccacagaaaccgttcttcctaatgtcctaaaaaacacccttccaaggactttgcat

SEQ ID NO: 6588 - DNA, 487 bp, Gossypium hirsutum
  Clone ID: LIB3828-008-Q1-N6-C1
gccgaaaaattgcattccaagtcattgatgaaaggagctcaatgtcgcaaaacataaagatgaaacaaatataagataacatccttataatctaaagtctgaaaaccaaaacagcattataacactatgaaacaagagataccataccaatcattcttcttcagcgatcctgcccttctcgctaacatagataccatcaaggaactttctaatatccttgttcttcacatggcatttctggtttatcaaagctgccgagcgtgacacaagttcgatatcgttaccatccaacacgatctcgtctttaaccttctctgatcgaacaatggataccccttccaacatatccacctttcgcaccttcttctcgccaaggaaattacggatctcgatggacttgttgccgttagtgatggaggcgttgatcggaaaatgagcataaacaaacctcatcttgtaacggtaacccttggtgacgccggtgatg

SEQ ID NO: 6589 - DNA, 485 bp, Gossypium hirsutum
  Clone ID: LIB3828-008-Q1-N6-C10
acacaaatgaattctctaaagcattagtatataccccaattggttatttacattggaattcggaactcccaaaattataaggaaagcattgagaacttacatgaatgaatgccattatcaccctattatcaccctatgtccctaatatttatctttcgatttttttctcctctgtttctatttctactactgagtcaagaagtgattttgttacacttcgaattacatgcaaaaaatggaataaaacaaaattgaacaaaagaaccttgttaacatgtgtgtgtttgacttgatgagtcatgactgccaaaatagctcaaaatcatcactatacaatgagcgatcttgaatctccagattcgcaacatgccaatttataagttgtgattggaaaagtttacataaaaccaatccagaaggaaaaatccaccattcactttcgtccatgttaatattccacggctgaaggcttggggttcttatac

SEQ ID NO: 6590 - DNA, 480 bp, Gossypium hirsutum
  Clone ID: LIB3828-008-Q1-N6-C11
aagaaacatatataatacaaaaataaacctttcctgcaataaaacagttaaaaaggagtccagtgctgaaacctaagttccttacattcatcataatcaacaactaggctttcaactgtttataaaccatatataaatatatatatatatacttgcatggcttataagatatatatatatgcttaaccagagataaagttggtagaacattagaggctgctgcttgcatgtcagcttgaatagatggaggtggaagagagaagcttatacaagttgaagaggagtttggtcttggttggagtaatcattattactgggttccagcaggtttactggcagaaagttgcgattgtaggaggaggctgcttgcatcagctggtttgattgttgttgcgctctttcattttcagctatctgcatccatacagccatgcatctattttaatcatgatcaacacccaacatctccatctatagttg

SEQ ID NO: 6591 - DNA, 485 bp, Gossypium hirsutum
  Clone ID: LIB3828-008-Q1-N6-C2
gctaaagaaatatgttatttaatgtaactcgaagaaaaaaacaaaaaaattcacttatttactcctgccatgggaatatgttgggagtataaagaccaaataaatatgttgtaaatcatagaatattaaactgttgggatatggattgcaggtggtgtcagacgaagcaagagcaatgtacaatggaggaatggcaggtttgacatactggagccccaatgttaacatattccgagacccacggtggggccgaggccaagagactcctggtgaagaccctgttttagcaggcaaatacgccgccaactacgtccgtggcctccagagtacgacggggatccgccttaaggtcgctgcctgctgcaaacattacaccgcatatgatcttgataattggaatggtgtggaccgataccatttcaatgccagggtaagaatcccaagttgccaacttgttttctacctatttgtaaagcaattaatag

SEQ ID NO: 6592 - DNA, 273 bp, Gossypium hirsutum
  Clone ID: LIB3828-008-Q1-N6-C3
cccccccaaaggggggggaaagggaaggaaacggggaaaaacttctccccccccccccccccgggggggggaaaaaaaattttttttttttttcgcccccccctttaaataacccccccccccccccccgggggggggggtttttttttttttttttttaaaaaaggggttgggggggggggcccccccacccccgggggggggggggggggggggttttttttttttaaaaaggcccccccacacccggggccctttttttttttttttttt

SEQ ID NO: 6593 - DNA, 489 bp, Gossypium hirsutum
  Clone ID: LIB3828-008-Q1-N6-C4
gcctatgtcatatgatatattcattcatttcatttggaattgaggtgtgcaaacaaaggaaagcatgaaactaagcttgctcttcacaacaatttcctatccactcataaatctatacaatatatagataatgacggtgcatattattaaccaaattccttacacaaatccaactattttatgctattatgcccatgacatctgatgtctttggctggaaccaatgacacagcaagatcaaccccctgctatttctttccatttggaataaaaagatggcatatccaccaagccaactaaccccttttgtaaactagagttggatattctgggctccacatgctgttctccacatattctaaaacttcctcctcgttctgacatattttttggagctctctagcgtcaatgtcacgatatccttctgccagatcctcttctacagcttccttcaccacagctgctgctacctcctttgttatatctctt

SEQ ID NO: 6594 - DNA, 464 bp, Gossypium hirsutum
  Clone ID: LIB3828-008-Q1-N6-C5
attaagttcttcttaattaccgaaaaaaaagacccctgttacattttgtttgtctccttatatagccgattttaatacatctttctatttctattattttgcattgtttttgcctttgctttgcgtgctgtccttgcaggtaattgatggaaatagctggtggcgttggtggcagaaactagagcggcggtagacgttaggagcccccagggacgtgcggcgccttagctagggtttcagaaaagctgaaaccctatgctgacctttgttgggccttgctgtaatgggcttgtttgggtaggtttgatccttgggtctctgcttgttgggcccgggcataaattaggctgtacacacagctttagaagtaccttttcgttgtatccatctgaattctgaataacttctggtgccatccagaatggtgttcctacaaaagtctttctctgcgatatcgtccttgt

SEQ ID NO: 6595 - DNA, 360 bp, Gossypium hirsutum
  Clone ID: LIB3828-008-Q1-N6-C7
gaaaaaatattttcttttttcctttccttatttttatagatttaacatatttaattccatactacggcttatacaactatatatatatataaaaacggagataaaaaatcccattaaaatgggggcattataaaaaataaatgctgaaacgggttatcagcaaaggccatgataggctgattcaagtaagccagagggaaaggaatcaggaagattttatcagctccagcaggctgagggaagtcaatgctggttttataatcggcgccgtggtcatggccatgaacataattcaggaagcggatgatttcattcaaggactgtaacctatgagggagttcattgagttgagctctaagc

SEQ ID NO: 6596 - DNA, 474 bp, Gossypium hirsutum
  Clone ID: LIB3828-008-Q1-N6-C8
aaaaaaaaatcatatcatgtaaccaaataatgaatacattaacatatagatatgtagtattaataataaatatttttttctatacatccgataataaaaaaataccatcaagcactaatccgattttttttagaacatccaacgcccgctatattatgcattgaagtagccccttcaattacatttggctcagacacaaataaagttgatacaccgcaataaaaaataataaaccggagtttgttggaccgccatgaagagataagagttaagcgcagggcggtggcatctgctcgccgatgtagttaactttgacgttggtgcagttagaactgaagggagtgtcttcattatgatcgggaggaccggaatactctaagtgaatgtccttgagggtaatgccttggcatggaaatgttgggctgcaagctaggactatagcaattttgcttattgttgttcctctgatgtttg

SEQ ID NO: 6597 - DNA, 471 bp, Gossypium hirsutum
  Clone ID: LIB3828-008-Q1-N6-D1
ataaagtagagtcatttaaagctttcaagtatcaagcaaacaatttctgttttacagtccaaaaccaaagccaaattctagttcaccaaaaggcttttccaggagctccacactattttgatgacaacaggctgaccaaatttataaaaaaatgcgttacatcaacatgattcctcaaggaagcatgaatttgagtctcatctgatactaccaagatagttacgaagcaagtagaaattgagtctcatctaagactgcatagattttcatcatattacataaattaagaagtaaactgaatttcctcaaatgcactgcatcaaatctatatgctaagctgtagaagtcagcatgatgtagttatggtcccattgacatattctgctcatgtctcccttcagaaaagcttcaacatataaacatataggcatcaaaatgacaatgtagaacgttaattctattgataagctt

SEQ ID NO: 6598 - DNA, 487 bp, Gossypium hirsutum
  Clone ID: LIB3828-008-Q1-N6-D10
caaaacaagaaaaatagaatcatattgagcactatatgaatcccaaggtcaacaatatgtattaaacccatttgtacttttgacagttcctgcaaatttcatttgttccgaaccctaactgccaacacaaacagactgctttagccgccatagcctgtccaagaaactggaaattgcttttgtctaacagcggtttggattcggctgagttagcagttgaaaccccggttgagttgttgttctttccggatgaactaatcccaattgatagctccaaatctaactcttgactattacctgcatacttgtcctcctgttgttgttgttgttgttgttcttcatcagtagtcattccactgctgctagagtttccttcttcaatggattctgctttggccttaacttgaaattcattgaaattgaaatcccgagatgggtttggagcaaagttggattttgaagctttaggtacgttcctgaaatccaa

SEQ ID NO: 6599 - DNA, 485 bp, Gossypium hirsutum
  Clone ID: LIB3828-008-Q1-N6-D11
agtcaaaataaatgctgattacaaataattcaaaataaatgaagagtagaaataacattgtctaaataacattatatgaaattgagtttgcaccatcttcctcaaacaagtagaacaatgtaaaccaattttaaccattgaaacaaaattgcacctttgacactagacttgtttttaatcaaaaaaaaaaaaacagttttgctttgcaactcagactcctaaataaattctgttgatttttttttctggccaacaaattcctttcaaccctctctatgaacaaaatagagcttgcccataacatgtagaacggcaacaaaagcaatgaaaccaatactcatgacaagcacaacattcggcgagatcttcagacctggtgcatcatccgtgtaaaattgaagcatggtcccagcagcccctcctgaggctgcaccacttgtggttctccgcctacgcatgcttgcggctgctgctgcacttcctct

SEQ ID NO: 6600 - DNA, 467 bp, Gossypium hirsutum
  Clone ID: LIB3828-008-Q1-N6-D2
aaataaacactcgccaaagtcttgttattattattattattcaagactgttcacacattctatgccgcggctattcgcaagcaaaatacattttaatcatatatatgtataaataaataaataaaaagcgttgatccacgggccatgcatgtggcgtgttaaaccttagaagtaaaagagtcccagtccggcaacagcggtaacagcaccaacgaagctggaggctttgagagaaacggcactagatggtgatggagcgagagcaccgccgtctggtgtaggaggggaactgctagtgctaatggaggaggagggagatgaggcgggagatgttgaaggtgatgaaaaaaaagaggtcttgggcacatccgccgcataagccccaacaacggcaatgagaacaagggcgacgacgagcataacttggcgagccatctttatttgctgggttaaaatttaaaaataaa

SEQ ID NO: 6601 - DNA, 486 bp, Gossypium hirsutum
  Clone ID: LIB3828-008-Q1-N6-D4
agcgcattatcgttttattttcattatgatggtgattctaagaaactccacatcaaatttagagcatgaatagtaaagtgactgtttattgtttatgttggaacagaggtcttatcagctcaaatcatggcaagtaatcattagtggcctacgaaacagaattatatatcacatctcgccatccattcacattgccccttcttgtacctttggcggtcccattttgctatgggttgggctccatttaattctcatgccggtaagattacgggttccgcaaattcaggaacaagcctctgctgaaagtagtcagcaagatatgctatagtctggaccgacgaatgcatttgattggattgaaatgggaattccgccacagagaagaagtataagggtgtcggctcgaggaatctgatgacttcatatcccaaccttcgacatccttggggacacagacatcaaaaagtatttgaccaagaaccccat

SEQ ID NO: 6602 - DNA, 470 bp, Gossypium hirsutum
  Clone ID: LIB3828-008-Q1-N6-D5
aagacttaaaaggatgccaatttataaaatctgaaaaaatggggttctaaaaatttgaccagataagaaaccaaaaaaaaaaaaaaaaagttctaaagagcctggtagcctggaacaatgtcaacaactcggtcttaaaaaaattttgatttgttgctaaagctaaatctacaattccaagactcaagcaccattgaaaactagcattgtcctttttcaggatctgcaaagagttggatggagagacagatattcttaccacctattatttgggggcttaactctataaatacgaacaatccagttcgatgtcgtaaatgcctcttccaagtgctcgagtttaacatctttatttccaatttcgacgcctcgtgcacgatcatagccgggcggttttccatattccgtcagcatctctccaaaccgatagtagcatagcttgtacatgaggcaattcaacattttaggag

SEQ ID NO: 6603 - DNA, 485 bp, Gossypium hirsutum
  Clone ID: LIB3828-008-Q1-N6-D7
gtaggacatgaggtgatagaaattcataatcaaaatagatgacaaacgccacacggttttgccttcatttgtagagcatgaagttattcgaatattatcacaatagcacaacagtcaaacaccataatcattggggaagcgtcaaagcgcttcacttgagcagccccttagacttcaaatattccacggtttggtcgtagatttcctcgatcccatacttaaagctgaatccttcgctaataagcttctctgaggaaatgatcaacttgggtttggaggggaaatctccaaaatcggtagggactttgaagtcagggtatcttttgttgaggaactttgctagttctggcacactggtattgacagcactgcatatatatcgacccgatgcagattctttttcagccagaaaaacatgggctcggcattcgtcttccacatgtgtgatagagatcgaacctgacagcatctgcattcctttcaaa

SEQ ID NO: 6604 - DNA, 384 bp, Gossypium hirsutum
  Clone ID: LIB3828-008-Q1-N6-D8
aaaaaaaaaaattaggggttaaaaggggggcaaaaaaataaaaaaaaacgttaaacaagttaaaaaaaaaaaaaaataatttaaccccccttttttaaaaaattaagccggggccccaatggggggttgaaaagccaaaaaatttttttcttaaaaaggtgttttaaaattttaaataaaaaaaataaaaagggaggttaaattttttaaaaaaaaaaaaaaatttcaaagccaatttaatgaaaaaaacgtttaatttttaaacggggaaaaaaaaatccatgaaaaaaaaaaaaaaacccttttaaaaaaaaactccccgttcaaacctttattagcgggttaaaccccattgggcccccctagaattttttcttacccaaa

SEQ ID NO: 6605 - DNA, 52 bp, Gossypium hirsutum
  unsure (1)..(52): unsure at all n locations; Clone ID: LIB3828-008-Q1-N6-D9
agagaagtccttttntttttttttatttttttaattattttgtatatatttt

SEQ ID NO: 6606 - DNA, 472 bp, Gossypium hirsutum
  Clone ID: LIB3828-008-Q1-N6-E1
aaatgggaaaagtgcagtatttccaccctatattaaacaggtgaaagggattattattttgagtctgaagaaaagaaaaagatattattttttgagcactagtttaactataacaaaaatcaaagcttttggctcaatgctcctcacctccataaaacgcatttattctaaaaaattatgcctctaacccacacctgatgtgggactaaattttcctgaactactactgattaacttgaaaaaacatgccctcatcagttgtttccatagacccatttctcagcgttgcttgtatagttaaccaactcttgtggcttgaaccacaagttgatttcatgcttggcagtctcaggaccatcactcccatgaattatattccttccgacaaccacggctagatcacctctgatggttccaggctctgatttttgaggatctgttgctccaatgagtttccggccgtatttgatca

SEQ ID NO: 6607 - DNA, 497 bp, Gossypium hirsutum
  Clone ID: LIB3828-008-Q1-N6-E10
acataagaactgcatgtattttcatcaaatgttctataaaatgaagtagaattttaaacttccacattaaaccactaaaccaaaccagtatctaatgttttgaggtatccaaaaattaaattttgggccaaaaatccatcatttgggagttcaaatgtcagctgcaaggaagttccctgacagagataccttctcgcccagcttgaatggtggaagacctttgtatgggcatgtactgcagcgaaaagcatcacctagtccacaattgccacaagctgattgaggattgttcaactgatcagcactcagttctagcttctgtactttctcctcctgttcagcccttccacaagtgcagttcttgcaggctttccttgtgcttcccacttcgcagtcaccaacagtaggtaattggggtttcttcaaatcctcttcagttaagagggaatcttcatcaatgagatctgagtcatcgtccatctgaattttcaatggaa

SEQ ID NO: 6608 - DNA, 486 bp, Gossypium hirsutum
  Clone ID: LIB3828-008-Q1-N6-E11
atataacaaagaaaatcatatatattagcatgcacatgcattaattacatatggctacaaaacaagattcaaggaactttaggatattgcaaatcgaatattgttttgagctatttattcttcataattactctttttgtccaagaggattttatagcaaacccttctgcaacatcattacttcttattttgtataattaataagacgacaaccaactcttcctcgttatttcatcttaatatggtatcatctctctactttggtggactgggttcactgtccataacctcttctatccctttgctctttacagtttcagcctggcaacatcctgatgcgcacctgggctgaccacactcagcacaagtcccaccacaaccctgacggcaacactctccactctcacatcccgactgtcctggcattagtgggatttttgggacttgtgggatctgtgggacttgtgggatctgtgggattagtgg

SEQ ID NO: 6609 - DNA, 490 bp, Gossypium hirsutum
  Clone ID: LIB3828-008-Q1-N6-E12
acagtgtaactttaaaattttaatctcttatttgtgcaattttcacagtttctacaacttctaaattttttttgaaggttttccattttccccgtatgtacatcaatgggggtggggagtgagctaaaaatgattaaaaaaagaatttaggaatcaaaaccgcagaacatcagcagtgagcagccgcgtggagatgtccgattcccccaatgtacaatatacaaaagccatctctcctcagcagtcaatgaaaaagatatatatatagagagagagagaccatgaactcctctgtgatccagtcatcaaaattgggattcaacggcttattggctgtcatctcttgtgccagcattcctttctttggcacggaaatcttccaagccccggtattcttccccgagtaacctatccaattcaggatgtttttttaagggctctccctggtctcggaagtgatggaaagcccagtatttttcaaggccataaa

SEQ ID NO: 6610 - DNA, 457 bp, Gossypium hirsutum
  Clone ID: LIB3828-008-Q1-N6-E2
accacaacaattatggcgcggttttcatagaagattatggcaaaaacattaacatcaattatttggtacaatgcaaatttagtcatctcataacttataccaagttgaaattgcatggaaaattcaaaatatatgattggttgagcttcacaaattcaacaagaacatacatccaaaaaagccatggcaaacccaagcttcacattatttgagactgcggtggcatgttaacattagcaggcatcaagatcacggcatggaggaggtttgggatcggttagcaaagtggtatttccaccttctggtccgctcttgattcgttttggattttgagtgccaggcggtagcttctctccccttcttagcatctcaactatctcaataactctttttggggtaatatcttcatagtaattatatgtgtatccttcagatccattggagtaatcagcaactg

SEQ ID NO: 6611 - DNA, 449 bp, Gossypium hirsutum
  Clone ID: LIB3828-008-Q1-N6-E3
ggcaaaaaatgagttctagggtcctccatttaaggaaagttaatataaatattcctgccttatatagtagctttcatctgacgtaatactaaaatgttcttctctaaaactgaaacagcagcaatgaaccatgcccacccccacaacattagctgcccaaaccataggaaacaacatgttttatagcttcatctaagatgaaaatattttgggcaatacatagacatttcttctgcaaagatccttaaactagttgaaaaactatctggtcttgctgctgctgagggttgtaataattggcggcgggttgtaaggcatcaacttggaagtagttccgagagtcatatggctgaaaatgtatggcctcgaagttattacttgaacctccgggcatcaaattcatgctctgctgcttcctctcgttttcagctatctgcaacatacagtaa

SEQ ID NO: 6612 - DNA, 341 bp, Gossypium hirsutum
  Clone ID: LIB3828-008-Q1-N6-E5
gaaaagataataatatttgcattcttgttattattataacattttattaacaatgggttcaaaccacatgaaaggtttgatccaaaaaataaaaaaaaaaataaagtagtgatggtgatagtgatagtgcttttcccatcaatctctatattataggatgagaaccatgctttgatatcccatattaaaccaagcttgtggctacaggtgcagctcaaaccttgacttcgggtgtttccgctgatgagcttgctggtgttggtgctggttccgatgctggtgaggatgatggtgaagaagcgaacatgcccccaataccgctgatcttgtccttggcccag

SEQ ID NO: 6613 - DNA, 477 bp, Gossypium hirsutum
  Clone ID: LIB3828-008-Q1-N6-E6
actactggaaaaggataatttattcaaaccacaaacttcatactaataccaaaatatcaaactacaataacaactgataattgcaagcaggaaatagtttcttgcacacatatgcctaactgcatttatttatttacttatttaacataaagatgagcaggcagcaggatttaattcttcttcttcttggcaaggaaaaggccccatctctgctcccctgatgagcttcttatcagctttgccttccatccaccaactatttcatcatagtcttccttagagaagtcagagatgaatgcatccttctctttctccacttggttcaattcacgccgcagaacttgtaagaactgatcggttcgatcctctgcaagaatcacatcaaaaccagcatcctcaagcatctgtccatatgattttacatcatgaagatcatagcctctctgcttgatatactcagcaaactccctggatgga

SEQ ID NO: 6614 - DNA, 442 bp, Gossypium hirsutum
  Clone ID: LIB3828-008-Q1-N6-E7
agaaaagaagtaataatattaactttgcccactaacaggaacaataaattggctgccatttgaaggcagctcccccaataactaaaaaacacaagaaccaatctaaagcctaccttggggccatttttatgggacttttttccccaccagcccctttttacgggctttttcaccttaaaaggcttttattttttactatcaaaccatgtttacatggccatataacaaaaaagggattttcacaaacaggtaattctcatttagaataaaggggcaaaagagggtgcctgagacttacgggccggtgaaacaggctcaaatcgagggggggtggccaacgaaaggactttcctttggggcccatggcgagtaggaaaaactgagtcttggatcaattttgaagttttatggtctggctggatgcatgaaaagggggagccct

SEQ ID NO: 6615 - DNA, 462 bp, Gossypium hirsutum
  Clone ID: LIB3828-008-Q1-N6-E8
gaaattcaaatatattcattctataacacagaaaatttcgctagttgtaactcaggtataaatgtaaatcactgaaacaacctttacctcaatatatttgaattctatgctacctgtaaaataacaagcgtttgcaagggaaaaaaaatagaatgtcaattttaaaccatctaatttcttttttctcgctcggtaaataataatacaacaaggccatgatccgatggaattttcgcaacaatgccgaaaccccagtcctccaaaaacagctcaaaaatagacattataactcatggtaggagagctttcaattgtatcctgaaaagatcacccagtgctccacgaacacccaactggtcacagcagacaagttttgtaagcaaaggataaaattctctgaggtgtttcctgaaaatcttattgttcatgaagcacatgcctctaagcaccttaatgatgatt

SEQ ID NO: 6616 - DNA, 486 bp, Gossypium hirsutum
  Clone ID: LIB3828-008-Q1-N6-E9
aaatcaaaaatcaccttctgtcttaagttgaaccagagatggctaattggcaacaacaatgcaatattacaaacttttaagtgctaataaaaataaaaatacctgctcaatgtctcgaaataatttctctttgcaaacaaaaggaaaataaatgctcaacaaggtagctaccaactagcctagataataccaattttgtttgcaacgtccaaggcatcgtattcgggtgtcaacctaacatatgctttctttgttccatcaggcctgatcaaggtgttaactttcttggcctgaatatcatacatcttcttgacagcatctttaatcttcttcttatcagcacgaatgtcaacaatgaaaaccaaagtgttgttgtcttcaatcttcttcattgcagactcagtcgtgaggggaaacttgagaatctgataatgatcaagcttgttccttggtggagcactaatgcgtgggtactttggggtccta

SEQ ID NO: 6617 - DNA, 191 bp, Gossypium hirsutum
  Clone ID: LIB3828-008-Q1-N6-F1
caaaattcaaatagataaagatggcaatttataaagcagaaagaaacaacaattcgtccatgacatatcatggggttatccagctcatcaaagccaatattatggtcttcgatcacaattccatgaagtctaaattcaaatgaatccaggaaatataaataaataaaataaaataaaatcggacgcgtggg

SEQ ID NO: 6618 - DNA, 487 bp, Gossypium hirsutum
  Clone ID: LIB3828-008-Q1-N6-F10
gatcatccagtttatagccataaaaacactgccaactgaaccaaatccgaaacagaaacacaagtcatatccatatctataagtccgtttaccgatgtgatgcacagtttcaacttctctactaatgatttttcatttttgagatatgatccatttctcaacgatggcagttcctaatccacataattcagcaatacttcgtttattgctaacatataccaggggaagtcagttgccggtcatttcatcattgagaagaaactaccaaatagttccgatgtcaggttaccttcccacggttcctggaggttcccaccctgcgctgctcagttcttatgaagtagatcatagaaaaccttcggctttctatactccgagatgcacaaggcctgcattgcatatgctacatgcattaatgtaggctccgaccaaggtttccccataaattgaaggccaatcggcaaacctgctttgtcataaccgacag

SEQ ID NO: 6619 - DNA, 485 bp, Gossypium hirsutum
  Clone ID: LIB3828-008-Q1-N6-F11
caatccaatacaccagttcaatttcaacaacacttgaaaaatgttcaaacagtaactggacatataagcaactgatctgcaattaccagatcatatttgatgttacattttccggtatagcaaaaacaagattcaatgagattaaagaacataagcatccagttacacctaaagtagttaaaagacattaaccaaacttgtcctgttttagaaccactgtcctgaaaaagcattatcatcatcatgtaaagtacacatataaaatgtaagaaacaaaaaccgacggcattaaacttaataatcttgctactcaaaatgctagaacgaaaaataatgtggtggcagtgctgcaggatctagctccaaacatcctcttaggctgccctttctctcatgagttagctggaaatacggaatctgatgagagaaccgaatctgatccacccgagggatttcgattgtaacatttgatcctccttttactc

SEQ ID NO: 6620 - DNA, 433 bp, Gossypium hirsutum
  Clone ID: LIB3828-008-Q1-N6-F2
aaaaaaaaaatgattcaatttttattataggctaatgccgagcttttaaaaaaaggggaagggaaaatacatattatagttctgaccaaggggcaatggctccagcttcttgggtaagcccaaaaaagcctatctcttgaaaaacttgggtcccctggggaagagcaaccttttttttaaacccaaaattgggggcaaaccgaagttcaccgctgaccccgtcaaggggggggagaaccaccctggatatcctccacatttcggagggatcattgcaatccgggttgggactcctcaccaaggggacgtcgcagtctgattcctcataatcgccttccactacaatgggaaaggctccacgttcggcaatcactattttttggctctggaagggaaggggattgtctgtaccattcctgcattccagtttcac

SEQ ID NO: 6621 - DNA, 485 bp, Gossypium hirsutum
  Clone ID: LIB3828-008-Q1-N6-F5
aaaaatgaaaactagaaacattcattgatccatttttcaatcacccttaaaacatccccctccccctcccaaatcatatcccacaaccccaaccccaaccccaacaaaaacaccagtaacaacataaatcagtaaatcaccccacaatatttccattgaccctaaatctaactgctctctcgataaccccgagataggcagtaagaaaagggaagaaacacattcatccaacaaacaactcccccacctttcagaacctctccaccttatcagctttaacaacgggatttgccttagcaatggcatcacgtccaatacccttgaaatcaaatgaacactcgtgtttttctgggtaccgatgctccccacagaatgtattctcgcacctgcacttaaacccagttaacccaacctttttcctacaaataaaacacctgttcgccgcctttggttccggttgttgattaacggcaacaacagccggt

SEQ ID NO: 6622 - DNA, 248 bp, Gossypium hirsutum
  Clone ID: LIB3828-008-Q1-N6-F7
aatacaggataaagcccatttttctacctcataataggaatcaaaccttcaatctataaaacgtattctaacacaagcaagatgaatggatcttgttggtcataaatattaggttttggcacttggaggttcagctatctcagactaggggttaattttcttgagcctgcattgggagagacttgtctttattaggggggtaattgttggatgctagattgattaacgaaacggggaattatagcaac

SEQ ID NO: 6623 - DNA, 469 bp, Gossypium hirsutum
  Clone ID: LIB3828-008-Q1-N6-F8
gcaaatcgaatattgttttgagctatttattcttcataattactctttttgtccaagaggattttatagcaaacccttctgcaacatcattacttcttattttgtataattaataagacgacaaccaactcttcctcgttatttcatcttaatatggtatcatctctctactttggtggactgggttcactgtccataacctcttctatccctttgctctttacagtttcagcctggcaacatcctgatgcgcacctgggctgaccacactcagcacaagtcccaccacaaccctgacggcaacactctccactctcacatcccgactgtcctggcattagtgggatttttgggacttgtgggatctgtgggacttgtgggatctgtgggattagtggaatttgtgggatttgtgggatctgtgggatttgtgggatttctggaattcttgggatttctggaatttgag

SEQ ID NO: 6624 - DNA, 459 bp, Gossypium hirsutum
  Clone ID: LIB3828-008-Q1-N6-G1
aattcaagtaaagacctgatgaagcaatgtataataaccatttaagaaaacatatggcaaacgcaaccattctaagcaagcaccaaagataaggcaccgataaaatgtataaatataccagaaacagaacagcaattatcattaagaactttctccaaaatcactaacaaaacctcccaaaaaggcacaaaacaaaatattaaacctaaggataacttcaataataattaaaaaaaaactagtaaaaagttccaacaagaagagtggtgcttagtcaacttcttccatcttgctgccttcagcatcagcatcctctaatgggggcatatcagcatcagcttcaccttcacctgcatcctcgtcaatgctcaagccgagtttcagcatcctgtggattctgttgccaaaggtgttaggctcatcaaggctgaagccagaggtgaggagagcagtctcgaa

SEQ ID NO: 6625 - DNA, 446 bp, Gossypium hirsutum
  Clone ID: LIB3828-008-Q1-N6-G10
aaaaacagcgcccgtttaggcgttggattcaagtgaaaacaaagtcaaatttgcgggccaaactaaaaagattaaaggaaatcaaattgaaactttttgaaacaaagagggacctgttgaataaatagaccaatcgatccataatgcggggatcctgcccggatcgggtcaccatgcggatcgggtcctcaaaacgatgccgtttcaaagccattgcattgactccaaacaacagcgttttattcccgtgcttaaaggccaaaataacctaaaaaatccttttcattttcttaaaaaaacctaaatagaatcagatgaactctgcgccgttttgtactgagggcatacaaacggttttcgaacctagcccataatccgatgaccacggaaatggccaggatctcgtcacaagggacgtttctcctttcttttactgccttttttcc

SEQ ID NO: 6626 - DNA, 484 bp, Gossypium hirsutum
  Clone ID: LIB3828-008-Q1-N6-G11
atataaaactattgcagacaattttgttgcaattcaattgttttttgtctgcgattctttcttatcataataattccgacaaactccctgaccatgtttttccttgggtgcattgatgattgttagcaagctcggccacggatacatataagtgttccagaatcttttgtaagtaagtccaccttataagcaggcttagcagaaaccttagtgtcgcctttgaatttcgagctggcttttggatcaccggattgagagaaaaaagccccattcagcagcaggtccccttctgatctccaattccacgtcttccatacttctggtggtgcatagtccctcttggtcacctccttagatgccacgtgaggtcgagcaatatatcggttgccttggctgatgacggtagggtggctactacctccaatggcatacatgagccaatgagtatagtcattgttgaccacatggataaacccccatcgac

SEQ ID NO: 6627 - DNA, 488 bp, Gossypium hirsutum
  Clone ID: LIB3828-008-Q1-N6-G12
caggataagtgcagtcaagtttgattaaatccttgatgtaatgctaaattagtaaacccaagtagttctttaagaaaagaaaagaaaagaaattacaagtagacttatcatttaacatcagccaccaacgattaaccactgctgtcaaaagaaaacgacaaaaaccatttccatacaacacacacaaacagcagtattacatcaaaagagccgatggcagttttaagcttccactggggcgcatttgttggagggggagcagatgagccaaacatatccgtatggatccttaaccttacctacgcgaccgccgcagcacgcgccgcctccttcggttacctcaccctctacaaccgctccggcgctaacggccttggaaatggcggcttccacgtcatcagtttccaggcagagttgatttccgatcccttcgattttctgtggagcggagtcgtcgttatatacgacgaaggaacagccggcgagct

SEQ ID NO: 6628 - DNA, 476 bp, Gossypium hirsutum
  Clone ID: LIB3828-008-Q1-N6-G2
gcctaccaatctattttcattcactctcacatgaatatagcatggggtacaaataaagaaagcatagaaaaccaaccttttcttttctttttcttttttagttacaatttggtcacaattaagattcatgtgaacttaggtttaagcatagatgaagcattactttgaaggtgcacgggaccgagcttttgaatccgatgaagaagccctttcttatggtcttggcaagttaggttcggtaccgaattcagggttccgtcttgattaaatgatgactcgaattgttccaacacttttactatctgccagaattctggccttttttctgcgtgtaatgaccaacattgctcgattaatgctcgcatggcaggcggacagtctcccgggactaccggtctcaaattcttgttcacaactgcaaatgcagcttggataggattcatatcctcgtacgggatcgtaccggctaccatttc

SEQ ID NO: 6629 - DNA, 486 bp, Gossypium hirsutum
  Clone ID: LIB3828-008-Q1-N6-G3
gaaataaactaagttaaactgaaattatatatcgtaatccgacaaacaaatcgaaaactcagtctaaatatcttacaaagctaagcttaaagcaaagtaagattagacacatgaaacctcagtgtgacatttttatcatacactaaccttgcttgaagagtttcatggcattcaaagccttcatcctcatcccctaggactactcgatgagctgcattttctgccccaaccatgtggttcaagcaattcgaagcaagtctaagtcttctttgtattctcagttttaaaaaaagaaaaagggtatttatactgataatccgaaagttaatcgatgttatatggaaatattacatcctaattctttggcagcagtgtcgaggaactgtatagtcattcctcttgcaagctgactataaacttcccatgttaagcacttttcgatatcattttgccagttgatggcacctatattgaagaactggtaag

SEQ ID NO: 6630 - DNA, 493 bp, Gossypium hirsutum
  Clone ID: LIB3828-008-Q1-N6-G4
ccaaagctcaatccatatgggcagaccttccattattgtatataaatttattggaaatttatgaaaattggtaggtaaaatgcaaaagggagatgcatccccagtaccaccatcatcaatcaagtttcaagccaacagtaatacaacagtagttccatgcatgagttttcatacagttgaatgttgaggaattttcatggcgatacaaagattaaagatatatgaccttctcttcatttctctctcttctacttcctactcctatctctctccacaatcacaaaaacccacttttctatcgttgcgtttgtccaagtcaattctttgtattgatgatatataatgaagttccctccagaaatattattgctcagtgcagttagttttcataatctccgacttgaattcatatcttctccacatacaaacaatctgaagtagagcggtataacttggcactataaacttaatttcctgaagcagttcttcgttc

SEQ ID NO: 6631 - DNA, 485 bp, Gossypium hirsutum
  Clone ID: LIB3828-008-Q1-N6-G5
attgtaaatcaaatattgttttgagctatttattcttcataattactctttttatccaacaggattttatagcaagcccttctgcaacatcattacttcttattttgtataattaatacgacgacaaccaactcttcctcattatttcatcttaatatggtatcatctccctactttggtggactgggttcactgtccataacctcttctatccctttgctctttacagtttcagcctggcaacatcctgatgcgcacctgggctgaccacactcagcacaagtcccaccgcaaccctgacggcaacactccccactctcacatcccgactgtcctggcattagtgggatttgtgggacttgtgggatctgtgggattagtggaatttgtgggatttgtgggatctgtgggatctgtggaattcttgggatttctggaatttgaggaaatggtagaacgaaaccaccaggattacaattaccgga

SEQ ID NO: 6632 - DNA, 370 bp, Gossypium hirsutum
  Clone ID: LIB3828-008-Q1-N6-G6
aattaaaagggggaaagggtaattaattagggaaggggaaaaaaaaagaaaaatggaaaaagaaaaaaaaagaaagaggggaaaaggaaaaaggggaacgccaggcaaagggtaaaggaaggcgccaagcgaaaggggaagggcgggaccgggggcgagttttaaaaactgaacaggaaaaagggtacggaaacaaaaaacaggaccaaaaccaaaaccttggacggggaaaaaaataaaaacatttaaaaaaaaaaaacaaaacccgagagcgataaaaaaaaaaaaaagcccgggcccggcagggaaaccagaaaccggtacggggagggggactagattcaggattagggataggaatagaaatggg

SEQ ID NO: 6633 - DNA, 495 bp, Gossypium hirsutum
  Clone ID: LIB3828-008-Q1-N6-G7
ctaaaatcagtggtgagttatgtcaccttagaattaaattaaacgtacaaaaacccccttcgtaggggtatatttgttttaagagacaatgggaatagatattggattccttttaagtacgaaaagctaccgaaattctgttttggctgtggaaagctagggcatgatctccaggaatgcacagtaatacaaccttcacagaagaagacgctgcaagaattcttcgaatccctctggcacgtactcctcatgaggatttccttatttggggaggagaatcatcgggtgaattcacggtccgaagtgcctataaactattatagaattcggatgaaaatcttagagcttatgctttacaaaccaactacaggaaattctacaaaaaactttggagcctgaatttaccaacaaagataaagattacaatatggagactatcatggaactttttgcctacaaaagtgaatttacaacacaggaaattatcagcaaaca

SEQ ID NO: 6634 - DNA, 463 bp, Gossypium hirsutum
  Clone ID: LIB3828-008-Q1-N6-G9
cttatattataaaggcaacaggattcatgtactgttctttccacacaaaatacaaaatgaatacattgaatcattgataacatgtgatttgaaggaaatttcactttttatgcactggaaatcaattgagctaatgagatgaggcagcattataggaacattgttggattcgaccgtgtttgaacttataacctaaagacaattcattacataaatagcataaaaataattaaactttgaagacgctgtgccatatcatgtataaatggctttgacctttaattttctcatgccactacaaaagcacttgatgaaccagtgaaatgccgaattgatcccataagcccttttgaagcaccgaaatgtcttattctgtatactcccggtgaggaagatgatgggattatccattcgattgttgccttactccgggggcttagctttgaaggtcttgaccatttaa

SEQ ID NO: 6635 - DNA, 423 bp, Gossypium hirsutum
  Clone ID: LIB3828-008-Q1-N6-H1
ggccctgggtttcccgggaatccggccggccctgtggcttcccaggcccccgggggggaccgggaaaaacggggcggggcccggaggggcaaccactttccccgaaggaagggggaataagggcggggggaaaaaaaggaaaaaggcgggacgggggaaaaaaaaaacccggggaaaaaaacgaaaaaaaaaacgacccgaaagcaaaaagggaaaacccgggggggccaaagggggaaaccaccccacacaaaggggggaaggaaaacggcccccttcgaagggggaaaacctggcggcccagccgcaaaaaagaatcccccaccccccgggaaaagggggacagctaatgggcccccagggggggttccttttcaaccggggaaaaggggaacacgggggggcccccaaccgggggaaaaa

SEQ ID NO: 6636 - DNA, 489 bp, Gossypium hirsutum
  Clone ID: LIB3828-008-Q1-N6-H10
atatagcaaagaaaatcatatatattagcatgtacatgcattaattacatatggctacaaaacaagattcaaggaactttaggatattgtaaatcaaatattgttttgagctatttattcttcataattactctttttatccaacaggattttatagcaagcccttctgcaacatcattacttcttattttgtataattaatacgacgacaaccaactcttcctcattatttcatcttaatatggtatcatctccctactttggtggactgggttcactgtccataacctcttctatccctttgctctttacagtttcagcctggcaacatcctgatgcgcacctgggctgaccacactcagcacaagtcccaccgcaaccctgacggcaacactccccactctcacatcccgactgtcctggcattagtgggatttgtgggacttgtgggatctgtgggattagtggaatttgtgggatttgtgcgga

SEQ ID NO: 6637 - DNA, 482 bp, Gossypium hirsutum
  Clone ID: LIB3828-008-Q1-N6-H11
gtatgattgcatatccttgaaagtaaattacaaatattggatgtagttcctccagtaaaaaaaaaaaagaaagaaagaaagaaaaagaaaaaaagttcaaacgtgaacccctccctgtttcacaaattttgaaacaaataaatcttctcccttatagttatcctaaaaactgacatcagcacaaggggtgccaaaagaaagaaaaatatcaggctttaaccaaaaaggaagcatacaagggccaaaagggagcaaacaacaacttcaaaacatatctgcatgttttcatatcagttcaagtgtcaaacttacccaaagaatttttccaaggatggagaactgagcactttacccgtagtccattcagttttgacaggggatacgtggagctgatatttgatgaacctagctaactgggaaactatttcaggatttgtgtcgatatgccaatcaggttctagctgccgaacaaaagatgtcct

SEQ ID NO: 6638 - DNA, 483 bp, Gossypium hirsutum
  Clone ID: LIB3828-008-Q1-N6-H2
gaagagaatagggtgggatcgcataaaagaaaatttactgacaatcattcagaaaagataccaaatgtactatgcttgggtatcaaatattgtacgtaaaaaagggaggacaaatgcatataaaaatagcatttttagcaaggacggccgattgtgcagcttagtggtccggcatactttgtgagctcggggaccatttgaccaggtttgaaaggcatcattttgtcggcgccaaattgcttgctggcacttggattacctgatggtgtaaaaaaggcaccgttctcgaagtggtcaccttgtgatacccaattccaattcttccactgtcccggctttaagaggcccctacaggtcacctctttagccccaaagcctggcgctgaatacctatttccctggctgataattgtagggttgctggtgccgccaatggcatacaggaaccagtgattgtagtcattgttgacgacatgaataaaa

SEQ ID NO: 6639 - DNA, 132 bp, Gossypium hirsutum
  unsure (1)..(132): unsure at all n locations; Clone ID: LIB3828-008-Q1-N6-H3
aaaaaaaaaatttttttttttttttttttttttnnnnccccccnnccccccccggcaaaaaaacaatttttttttttttcaatgggagggagatttttttttcccccccccccccccactttgggggggggg

SEQ ID NO: 6640 - DNA, 475 bp, Gossypium hirsutum
  Clone ID: LIB3828-008-Q1-N6-H4
gatccagaaacacaaacttatattctaaatgcagtcttctgatatggttatacataacccacatgtgatttccaaaaaaaaaaaaaagaaccaaggaaatctaactagaaagagcattagacattacttgggattgcaataattctgatcttggagttgccgatggaatgtagagcgcacatacaattcatgaacatttgaagccgggacaaacagacagtacaatgatgaggatcaaagcgaccaagattccgagaactataagctttaccttcatgttctgtaaccacatctttctcctcatctgggttccctgctgccggaaatcttgtgcctgagagcgaagattttctgttctatccaccagaagctcaattctctcaccacggtccagaaccttctcaatgttttccatcataactcctttaacttctgaaacttgagctttcactttggcaatcttactgatctcctc

SEQ ID NO: 6641 - DNA, 487 bp, Gossypium hirsutum
  Clone ID: LIB3828-008-Q1-N6-H5
gaaaaaaattaaatgaaattaatcaaaaaccaacttaagttacgaggatatcgatttgaccgattatctatctttttgctcaattgtttaggtaccccgtaagttgttctgtcttcaaagagcataatgactagataatccaatgtgttacataaggtaaattttgtataattgtttggttttcacaaaattccatttcctctatgcaaaaacctaatatcggatcagatgagacgattgaagaacaccatgtgttgatggcatattgaaaaagtgactaaagccctaacgttcttctctctttaactttcgttgtcaactcttcctctgatggaatttttccaccagtccttgtggttgcgagcaaccatgccgtaagctcatcctcgagaaagtcgtggttggagatgtattggctatcgaccgagcatttcatcccccctacattaacaacaatggacctgttggaactttgttgtgcaccctg

SEQ ID NO: 6642 - DNA, 489 bp, Gossypium hirsutum
  Clone ID: LIB3828-008-Q1-N6-H7
ataaggagttaatgaaatattccttcaatcattaaatggaagaaatttttttctttattacattgatacggacaacacgaaccagctgaatgaagcctgtcttttatattgccactctgttattacagaaacaactaataaagaaaaaaaattggatatcgttaatttgcaatgttcagccctgcatttctcatacagtgtagttttggttgatggtctcaatgtcaagtcctttgagtttcacaactgagtcaacatgccctttcagcgtatgaagctccctcaaccttgcaacttcagcacgcttcttggcttgttcggcaatctccgacaactctcggtagctgctcttctcattcaagatttcttcagctccgggagcctgcaatccatgaagggttcgttgtgccgtggcccattgtgcctccctctcttcccttccataatccttctttgttgtgaaagcagtcttattctgaaggagattat

SEQ ID NO: 6643 - DNA, 487 bp, Gossypium hirsutum
  Clone ID: LIB3828-008-Q1-N6-H8
agataatatgtcgaggtctttcatcattcaaacacgcaccataaaagttcaacaagcaatgcactttacaaactaaaaagatcatgctttgaaacagggactcgttcggactcatgactgatagaatcttaaagttactcacaaacgctaggactaggaaggttttataacttaatgtagactaacaggtttattcgctacaaacaccgacaatggttgtgcctacaatgggaatttctagttcttgcttatagcggtagccttacgcactggatacgacttttttcagtagaacaaaaacaggcttacatgatgatctcctacccactccagcatcatgtcatctctttcagaaataataatcttcggtgtgtgggaaaagatcatgtatgatggtagctagttccggttcctgcatttttccatggccctcggagcgagtccaatggcatcagagcttttcatgatcctcaaccttttgcaggtg

SEQ ID NO: 6644 - DNA, 490 bp, Gossypium hirsutum
  Clone ID: LIB3828-009-Q1-N6-A1
accttgaaaataatttcatgtttttttcttattattttaataggaattcgatggattttaccagatcgtagcatgttgaaggttttagcagaaatttatatagcaaagaaaatcatatatattagcatgtacatgcattaattacatatggctacaaaacaagattcaaggaactttaggatattgtaaatcaaatattgttttgagctatttattcttcataattactctttttatccaacaggattttatagcaagcccttctgcaacatcattacttcttattttgtataattaatacgacgacaaccaactcttcctcattatttcatcttaatatggtatcatctccctactttggtggactgggttcactgtccataacctcttctatccctttgctctttacagtttcagcctggcaacatcctgatgcgcacctgggctgaccacactcagcacaagtcccaccgcaaccctgacggcaaca

SEQ ID NO: 6645 - DNA, 491 bp, Gossypium hirsutum
  Clone ID: LIB3828-009-Q1-N6-A10
gagttaaatgaagatgccattaaagctcatcaaacccaaactcaactcgtaaattacatcaaatcaaagcggttgaaatacggagacctgcactcgacttgttcaactaacgaaatatttaacaaatctcttcattcatcaaattcaagctcaaagtctgctaaagaacaagaagagaacttcattttatgtcattacaaaacactatttgctacttaaaaacccaattcaatagtcggaactgacccaccggatgccatgatctgttgctctaacctgaacaaagtttcaaacttgttcttcacaaggtaacactcttgcttcacttgttgcagacatgttaggcacccttcaatgttctgcacatcacagtagttgcggaaagcaatgcaagcatttttaaccctttgtgcaccaatgctggaactgctacctttcaattgatgaacgtggctatcaagttttttaaaatccacatttggctgatctaa

SEQ ID NO: 6646 - DNA, 119 bp, Gossypium hirsutum
  Clone ID: LIB3828-009-Q1-N6-A11
ataatgtagaaaagaaaatcaaatataatagccaatgcatacattaattacatatcggatacaaaacaagattcaagagactagaggatattgataattaaatatttgataagagctat

SEQ ID NO: 6647 - DNA, 446 bp, Gossypium hirsutum
  Clone ID: LIB3828-009-Q1-N6-A12
atataacaaaaaaaatcattttttttagcatgcccatgcattaattacatttggctacaaaacaagattcaaggaactttaggattttgcaaatcgaatattgttttgagctatttattcttcataattaccctttttggccaaaaggattttatagcaaacccttctgcaacatcattactttttattttggttaattaataagacgacaaccaactcttcctcggtatttcatcttaatatgggatcatctctctactttgggggactgggttcactggccataacctcttctatccctttgctctttacagtttcagcctggcaacatcctgatgcgcacctgggctgaccacactcagcacaagtcccaccacaaccctgacgggaacactttccacttttacattccgactgtcctggcattagtgggatttttgggactt

SEQ ID NO: 6648 - DNA, 152 bp, Gossypium hirsutum
  Clone ID: LIB3828-009-Q1-N6-A2
caacaacatataaaccaaataaaaatgcaaagatcaaaatccattcaggtaacttacaagagtgcaacataaataacagagcataattatatcttaaatctaatcagaaaaattgctttcaaaagcaaaaaaaaatatcctaaatgtcaaac

SEQ ID NO: 6649 - DNA, 390 bp, Gossypium hirsutum
  unsure (1)..(390): unsure at all n locations; Clone ID: LIB3828-009-Q1-N6-A3
caaaacgatataagtggcattggtaaagaaaggacacatcaaaagcanttaccatgagcaccttgnattcgggngnnnnaanaccccccccanananttttttttttnnnnncccccccccccccccaaaaaaaaaaaatttttttttttcccccccccccctcttttttttttttttaaaannnnnnaaaataattttttttnnnnnnnnnnnnnnnnaannnnnnnccccccccccccccccccccccccnnnnnnaaaaaaaaaaaaaaaaagagggggggggtttttttttttttttttttttnnnnnnnnnnnggggggggggggggnttcnntntncnccccccccccgccgggggggggggggggggggcccccccccccccc

SEQ ID NO: 6650 - DNA, 490 bp, Gossypium hirsutum
  Clone ID: LIB3828-009-Q1-N6-A4
ggaagaggattttggtatgccattttaataataatagtaataatgtattcaatcatgggggccaatttgacatttttggcaggtcgcacattttaggcaacaaaacagcgagtgagagagagaaagataataacaaatgactggactaccaaaaataaacaactaactacaaacattagtttccctcgcagggcagcaatggcgtctccatcatcgagatatcatcatcatcaagtgaatgccctattttctgccaaaacccaagttgccctctactactcccagcttttgttccaacactatctctaaaaccaaacaccctaaaagtctaccttttcagggcagtccgatgctctatgcccagatctcccacagttgaaacatgaacctccgaagtttctgtcacgggcgggtgacctagttgatctgctgccactaccaattagccagtcatccctactgcttttcgaagcccgggaccagctactta

SEQ ID NO: 6651 - DNA, 158 bp, Gossypium hirsutum
  Clone ID: LIB3828-009-Q1-N6-A5
agataatcatttgatttatagttcccattaaacaaagatcacagcagtcaccttcaatgcgttactacatatatactttccacaaaatgctggattttttatcttatgtgaaaagagtgagacactgtgtccacactcctaagcagtactctgctgag

SEQ ID NO: 6652 - DNA, 488 bp, Gossypium hirsutum
  Clone ID: LIB3828-009-Q1-N6-A6
gtagctaactttagatattaatcatgttttaataataaatttatattttaatctaatacaaatcatgtagcttcaattactcgaattgaatccatgcatttatgtcaacataaatacctctctcgagtatttaacccacccccacaaaagtcatcatattttcccaccaaatgattccgctttcacattgacccaggaataccctattaataataatttcccaggccttcaaaaatggacctctatagcagcgatggccaaattgatgcgaatcgtcttgtgaatcgacttaacgatatccctcaccggcgactcgatgttagccgcttccaactcgtcctcgcagggagacacagacgcggaatcggcggagagttcttcgatgatgtggttggcgttgtgctcggtgatggcttccatggctttctgatccgagtcgatgatgtcctcgaagttcttgacgcaagtccagaggatctcgccgtatt

SEQ ID NO: 6653 - DNA, 493 bp, Gossypium hirsutum
  Clone ID: LIB3828-009-Q1-N6-A7
agaatcaatctctctttcatatatcagaagattatatatgtaaccatataacttacagaacatatacatttctcgttaccacaaaccactttcaaatatagtaaaaaacaaattaaattacaaaaagagaaaggaacacaagtcatttctgctgacaagaaaacacgctaattcctttcaggacattcatattgaactagggaaattcaagcccattttccctgtttatgagttagtgaatgaccacacgttcatgattgaaccgagatgttagcgttactctgctgctccgtgagtttagccggcgaggatttcgtcgcatcttttacctgctttgctctatctttcaacttgccacctctctccccactcacctgacccttgtttttctcctcgtttacagtagtggaccgttccctaaggttaccaaagctgtggcggtgagcccggcagcaactttttgccttttcatcctcggttgagtggactacgt

SEQ ID NO: 6654 - DNA, 86 bp, Gossypium hirsutum
  unsure (1)..(86): unsure at all n locations; Clone ID: LIB3828-009-Q1-N6-A8
ggggggggggggnnggggggggggggggngggttggttttttnncgagtatatgagtnaggtgacctataggatgactatgatgtc

SEQ ID NO: 6655 - DNA, 492 bp, Gossypium hirsutum
  Clone ID: LIB3828-009-Q1-N6-A9
aaatataaatatcactccgttgatagcataaaaaggcattagacaaatcttacaacatgaaaaacagaacaatagcttgtaaggctattcatgttcttatggagcatcataagtaaaagacaagcatttctaacaacaaaaaaatgacaagcaaacatgactaaatttattccataggcataatttgagaaacctcacacgaataagaaagaacaggataccctcacagggtgaacccatcatcttcaaaataaatgatattgcgatagtagcatcaatattcttcaccttcctcttcatcatctccaccttcagcaccaacttcttcataatccttctcaagagcagccagatcctcacgggcttccgagaattcaccttcttccatgccctctccaacataccaatgcacaaaagctctcttcgagtacatcagatcaaacttgtggtcaatgcgtgcaaacacctctgccactgctgggttattgctta

SEQ ID NO: 6656 - DNA, 488 bp, Gossypium hirsutum
  Clone ID: LIB3828-009-Q1-N6-B1
acaataatattgctcatagtattgcatcgtaatggagaaggaagggattatgcatgaatcatcataacttttaaatcattgaaattcatgcatcatacacagtcaacaccatccttacatacatatattacatccatccctacatccaccaagcccatgaccaacatcaagagaaggcaacctggcttatgctaaaagaaaaatgcaatggatcgatcgttacaaaccagtaccattgcaccattactcacctgcacattaacaaactcgtctcttggaaaagaaactgagtaaacaaacattttattcggccacactcggctttctctttggcgaggcattttagtgaagcttgtttgcaagattgcattgcttcctgatctcacccttgctaccagtgagaggattgttctcagagaggagagtaatggcccttgagaactccttgaagaaatagtcttggctcttggccattttcttcacataag

SEQ ID NO: 6657 - DNA, 496 bp, Gossypium hirsutum
  Clone ID: LIB3828-009-Q1-N6-B10
aacttagaaaattcaagattatttgaatccatcaaaacccacctagcttgaactaatctaaatctaaaaagtccaagcctgaaagaatcgaatccgaaaggatttgagccgaacaaaatatgaattcgaaaaaactcaatatgatacccccggtttagcacccgtctatgattgagcaatgcaactgacttgcacattaaataaaaatgtgattttctatgtaatggcaccaaaaagaaggtacctcaagcttaacagagaatgtgatcggttctaacaaattatactgcaaaattctctcagcaaagccaaaccttccactttgaacactaccctattaataactcgtatctctagttactttgagagccaatagataataaggaacaacgtacaaccagcaattacggctgataaaataagtgtgtctcttgaacgcctccatctgatggaaccaagcaagccacggataacggggaacttgtcacttagaact

SEQ ID NO: 6658 - DNA, 408 bp, Gossypium hirsutum
  Clone ID: LIB3828-009-Q1-N6-B11
gggttaaaaaaaaacccttggcttcttctttttttatttcttattataaaaaaccccccaaattaaaccgggttaaacctattttttagggggcaattggcccctggttcccccaacccccctagggggaatcgggaaggcccggcccaaaacatcattgggaattgcggggggggccgcaaaaagggggggagcaagggaccgggtccccgaaaacgggctttcgaacccgggaatagcaaaggcccgggtcttcccaagggtctttgggaaaggccccaaccctttagggaacccaaaaatttcccccttcttgaacccccttgatatcaacccatgggggggggggaaaaaccccacccctaattctccttccaacccaaaggcaatctctgaggcccggggggg

SEQ ID NO: 6659 - DNA, 481 bp, Gossypium hirsutum
  unsure (1)..(481): unsure at all n locations; Clone ID: LIB3828-009-Q1-N6-B12
gaattccgaatttcattctgtgtctataatcactacaaacatctctaatcgcaataatncgtgagtgaaatggtatttgaaattcatgtccttatggtatttttatggataaaaaaaatcaggcgtttgtggatagttttgaagataaatattactacaagcagcttgagggctgaacaaaaccagaagcggttccatcagcattactacaggatgcttcagctgctttgtttctgtaagtgagcttcacgtcctccagctttatattactgcaaggatattctgagctacaatcaaacttcactgctacttctgtcgctgatgttccatggatgtcttggtatgtcacatcgctaatttttactcccgaaacctgaccagggcagttcttttcatctgggcagtactgttgatcaatgacgatggggttttggacatcggtcatgactgcatgctgaaaaagtatgttcctagcaaaacc

SEQ ID NO: 6660 - DNA, 372 bp, Gossypium hirsutum
  Clone ID: LIB3828-009-Q1-N6-B2
tttaagtgaacacttgattttattactaagctttatgcttattgcactgttgcttttgctcatagattgctagctgagttcatgaagccaacttgctcccttagtttacatcacccctggaaatatttttaattaagcagtgtaccttctgcaacgtgttgcgtaagtgcaaccacgagtgtaagggttgaccggtttcccagtggaacattcgtagtaagatcgtccttggtgggagcacgggacattgtttctcttaagtgcttcatatgaaatgtatcttcttgcagcaagtagtcgaatatttgtctcggaatccatgaatatttcatctttattgttacagtgctcccagtggaacccacgcgtccg

SEQ ID NO: 6661 - DNA, 474 bp, Gossypium hirsutum
  Clone ID: LIB3828-009-Q1-N6-B3
gaattcaattgattatgattgccatgcagtggtgaaaatttgaaccctgaaaaaaaattaccccgtccacaagaccctccctacgtctcattacacttaaaatttgcttgcgtttaaagatttcccttgaaggtttaatgagtattccagtactagctttatgcttctatttcttcttctgctgcttaggctttaggttgggattcatcttcttttggttgtgattcggattctgattcaacttcagaccttacttcaggtgaaggggcagctgaacttttctttgaagtagatgtctctgtaaaatgagcataggtgcctttctctttgaagagttgtgaaaagtgatgcttacagtaaaggaatccttccaatgcaacatttgttgatggtgtgagcacacaacctccatgtgaacacctaaagcatgatttatgggagttatctgcttcaatagccaccttctctaagggg

SEQ ID NO: 6662 - DNA, 486 bp, Gossypium hirsutum
  Clone ID: LIB3828-009-Q1-N6-B5
agtacaaaatttttgtaataaaaggaggtttatacagtgcatatgctatttaacaagtgaataacacagccttaagtttatatccccctatagcgaaacaaaggagaaatcaagtagcataagttcataatcctagtaaagagagaacagcagccacgaaagatcgttaatatcagcacttagctatatccgacttgttgctgttgctgtggctgttgataatttccatacccaggataccctccatagtacatgttggggtcttgtggggcagcgccatagccgtaaccatatccttggctgtatccataatatccagcgttccactggtttggatctgcttgggcctgcttgtttgatgtgctacgaccccatgaaagccgaatactttgtccacccaactgagtcccgttcagtattcggagtgcttcttcagcacaactcctatcagcaaattgaacaaatccacaacgcttgttttgtgga

SEQ ID NO: 6663 - DNA, 458 bp, Gossypium hirsutum
  Clone ID: LIB3828-009-Q1-N6-B6
tttttttttttttttttttttttttttttttttttttttttttttttttttttttaaattttaaaaaaaaaaaagaaaaaaaaaaaaggaaaaaaaaaaaaagaaaaaaaaaaaggaaaaaaggggggaaagaaagggggggggagggggggggggggggggggggggggggggaaggggagaaggggggaaagggaaaaaaaaaggggaaaaaaaaaaaacccccttagggggggaaaggaaaaaaaaaaaaggggggggggggaaaaaaaaaaaaacaacaaaaaaaaaaacccggaaaaaaagggaggaggggggaaaaaaaaccccaaaaaaaaacccccaaaaaaattttaggaaaaaaaaaaaaagggggggggggggggggaaaaaaaaaaagcacaacctgcgggggggggcccccccccaaaaaaaggggaaaggggagcccctccccc

SEQ ID NO: 6664 - DNA, 482 bp, Gossypium hirsutum
  Clone ID: LIB3828-009-Q1-N6-B7
aggtagaatagggaaggatgaattgtatgaccagtaatcaaaataaatgatgcagatagcaacttatatcttatccaccataaaatattcaaatgccaaagaaaaaaaacacaagtaccagcttcataaccggggctagtcttcttgatctgcaaacttcaagccatttgggatgctcatgaaccagggttgcttgctgccatctccatgagttacagcagtttttataagaggattacggaatcgttatttttcaaatgtaacattgctgtcttagaatcctaataattttttgtatgaccagattatccataaagcactctggttctctgattttttttatttgcaactggtacactctcccgcctctagattctcctaaaaagaacatttctttcttgtcagagagggtatataaaaaatgccattctcaagatagcagctgcttgaagaaatccttgcggttgtatttttcatacggg

SEQ ID NO: 6665 - DNA, 477 bp, Gossypium hirsutum
  Clone ID: LIB3828-009-Q1-N6-B8
atcaaacatgccttttacaaggcattttacgatttcataaacgaggaaataacccccccccccaacaaaaaaaaaaaacataataaaatgtgggtcatttagtattgaattattcaagctttggagcctcgcagtgcccaattggcttcgctaccaactcggggcatcctacttgttctcgactgagcatcggccatgaaattggcaccacacatcaccccttcactgtcaattcttggcattgccttcattttgctcctcggatgctcaaaactcgtcaatccttgctcactgtggaacatacacccaggtggaaatggtgcaaatgatttagcacagctttcttttataagcttcaagttatctgaaacaactactgatccatcagctgctacaccccaatagagtttaaccctttcatctgcacccagtgcagcaaatacacttccagctttgctatcatacaccacaaatcca

SEQ ID NO: 6666 - DNA, 478 bp, Gossypium hirsutum
  Clone ID: LIB3828-009-Q1-N6-B9
aaataagaaattgcataaattttaatattaaatgttaagcataaatctttgcatttttaaccaatttcatacatgatgtcctattcatacaattatcatgtaataaggtgatcatgtcggaatgttaccagcattgaaagccaagtcggaagtgactggatcctaagattcagacacagcatccactgccgaagttgtgttaccattgccgccaatgataacactattcatactgctagtgaagtcgtatacatggcccattttagctcgtttggtcgccaagtaccgcttgttgtcctttgtaataggtgatagtagtggaacccgacctgcaattgctaatccgtaacccttaagtccactgtatttagcaggattgttcgtcataagcttcattgttcgcacaccagatccctaagtatctgtgcaccaatgccgtattctctagaatcaacaggcaacccaagctcaacatttg

SEQ ID NO: 6667 - DNA, 483 bp, Gossypium hirsutum
  Clone ID: LIB3828-009-Q1-N6-C1
aaattcatattttgggtttatgtattactatcatacctatgaacaacctatagtggtactccagcatattacaaataataaaaacgcaacgcaagtacaaaactgaaggtaaacaaagtgcatcattgaaaccctcattatcaacaccttacatgccaatcatctgcatcctgaaagtaaacaaagtgtcatccattgacaccctcgttattttccatatatattatttctagattcggcgcttcagcaaggaatgcttatataaatcctaatcgcttaaagcttagaccttcccatatcatcaaatacaatcatcactttccctatggcttttctatctctcagtgcagagaatgcaaggttggcctctgatatgctgtaagtatgagaaatgtgaatggtaatcaatcccttttccatccaggagatactctcctggatggaatcctcgagcacagctggtcgatgtattgagtagctacc

SEQ ID NO: 6668 - DNA, 469 bp, Gossypium hirsutum
  Clone ID: LIB3828-009-Q1-N6-C10
ttttttttttttttttttttttttttttttttttttttttttttttttctttttttttttttttttttttttttttttttttttttttttttttttttttttttttttttttttttttttttttttttttttttaaaaaaaaagggggttttaattaatttttttttggaaaaaaggggaaaaaaaaaagttttccccccccgcccaagaaaaaaaaaaaaaaaggtttttttttaaaaaaccccaaaaagggggggccgcccaaaaaaaaaaaaaaatggggtaaaaaaaaaaattaaaaagccttttcccccgggtgggttttggttttgaaaaccccccccggggggcccccccgaaaaacccggccgggccccgggggggaaaccaattttccctaaaggggggggttaaaaaggggggggaaaaaagggaaaaaggggcccccggggaaaaaaatgttcccccc

SEQ ID NO: 6669 - DNA, 456 bp, Gossypium hirsutum
  Clone ID: LIB3828-009-Q1-N6-C11
ccagccacattggcgtgattcataagcaaacagcagttggatttatatacactgttccagggttttatttaaatcactccactaaatacacaacaaattcccttcttgacttgagactctttacaaaacccaaaaacaaagaaaaaacccccaagccattttctaaacattaacctacgctcctttttccttatttttattcaacttactctcacatacttacaagacaccaagttcttttttcattacatacaaacaaccctttatccatatttttacactaacaaagggttctttgcttttttctcttcagtcacttacaatttcaaaattcccttctttgtttgggtagctcctcttgttttatctatgaactcttttgtggatagaaatgggttctaagccagtgcaaaacaatcaaacccctccactctcactggtggtttgttaccaaaa

SEQ ID NO: 6670 - DNA, 419 bp, Gossypium hirsutum
  Clone ID: LIB3828-009-Q1-N6-C12
agattacatgcccagcgccttttctgaaaaaccaaggcacacctgataatgccagaaagagtttttgcgtacccaagcactgcaggatccaaagttccgaccatgttaggtctctagcaaccttaagacgctctacatcctcaataagctatgggctgcattatgagaatcaacctgtcacttgccgaacatttggcacatacagcgacgctcccactagcagaaacaccgaattaatccaccaatatggcatcgccacaaaaggattccccaccaaagccatactagcttgcaataacactaatcataccgctcatcatacccttcgaccttcttatcatcaaaattcgtaccaaccatgtcctcaccaagcccacaaatcactgactcaaagacttccgggtcactataatgagaga

SEQ ID NO: 6671 - DNA, 460 bp, Gossypium hirsutum
  Clone ID: LIB3828-009-Q1-N6-C2
gagccaacatttttcatattaaattcctaattactgggaacggggaccatcataagcactttgtccttccaaaattattcaaacttgggacgctagatcattctttaaggcagcagaatcaccttccacattagccgccaccagatccatatttcttcccaaggaaaaggacttgcagcttgtcatagccagcaagcacaccagcccctgcaactgcacgaagaatgtttgcaccagcacccttgaacagcgatttggcaccttcattcttgatgatttgagaaaatgctgccatcgagctcttgtatttcactgcttctccagaagtcatcatcattcttctacgtaccgtatcaattggataagatgccagtccagcacctattgtgataccccaacccagcaagaaacttgccaagaaactatcctgcaatccaccaaccaaaacaacaggcttcaa

SEQ ID NO: 6672 - DNA, 477 bp, Gossypium hirsutum
  Clone ID: LIB3828-009-Q1-N6-C3
ggtaaaaaaaccaacttctcattaaaaagaattgaaagaattggtccacacacgatgaaacatttctctttctctgatgctttatcgttttatccgacaagagaataaacatatgttgatagaacaaagctcatgtcgaaaaccatttagaagcatttcctgtggacaattgatggacccgattcatcgtactctgccttggagatccacatttgttggaatgtgctaagggaagccaagatcgagccgccaatccagacactatacttcctctcaggtggagcaacaaccttaatcttcatgctgctaggagctaaagccgagatctccttggtcattctatcagcgataccggggaacatagttgtaccaccactgagtacaatgttaccgtacaagtctttcctaatatcgacgtcgcatttcattatcgagttgtaagttgtctcgtggatgcctgcagcttccataccgatc

SEQ ID NO: 6673 - DNA, 489 bp, Gossypium hirsutum
  Clone ID: LIB3828-009-Q1-N6-C4
ggatgaaattaaaaagaagcagtagctagtacaaccttctgctcacaatgagtttttataattaagaaatttagattggtttatcacaaatatagaaatcaaacaatatatgtaaacatcaagcattacaaacaaacaaacaaacaaccaagctagctagctagctgcggtatcaagagattgaaaaccttctcctcctaggcttggtaacgtccactccaaggttatcatcgatatgggaagtgtccttggagccatgtcggaagggatttagcttgcctagagtcttggacatggaagagaagaaggtaggctttctggtcccaatgctctttgaactagttccagtttgattgttcttctgcatgtccgatatgtacatcttcatcttcaaaagctccgttcgcaatgcctcattctcctttaccagcgacacgtctgcctgcaactgattcctggtggtcacggcgtctggctggttacggtcat

SEQ ID NO: 6674 - DNA, 227 bp, Gossypium hirsutum
  Clone ID: LIB3828-009-Q1-N6-C5
ccataaaaattatagatatatttaatagtaatataattcaatgtacaccaatatgttgttgatcttattctctcaactctcaagcacacacataacaagcggaaatgaggcaatcttttaagtataatgaaatcttaatagattgctcatctaacaaggtttagtgcaatagcatctgcgaaagaagccatggcaatgcccaccatcgaaacctgcccacgcgtccg

SEQ ID NO: 6675 - DNA, 487 bp, Gossypium hirsutum
  Clone ID: LIB3828-009-Q1-N6-C6
gtgttaaaaaacaagtattgaataattataaattgcttcgaaaccacaatgagtactagaaataatattatccaaatacataattagtagtacagcacatagtaacaacattgtccaagtgcataatattacaccacataaaagtatcaatatcttgatacaacatgcggtgtcttgattctttctctatttatgaagtttatttatgaagtttacttgtacaagagatgtctgaaaatgcgtagaactagaagaaaaaaacaaaaatcagaaacaacgttgttacttcctgtcataatgaatcttttatcagttgaactggctctttgatgaaacattttcctttgttttctgaatcttcaaaaccaccataggcacgattcatagtcctcctgttcctaggtaacctagacctcttgtattccgcaggtctcaagtgaggaatctgcacattgagtaataccatgtacatcaggaagatagaata

SEQ ID NO: 6676 - DNA, 492 bp, Gossypium hirsutum
  Clone ID: LIB3828-009-Q1-N6-C7
aacttaaaacacacaatacaatatattaaaaacatgtccctgtttgcgggggctgcatcatgactcgactcccacgttaccaaaggaagttcaagttggacatgagcctaatctgtaaactatactgcataagcagttcttagttgacatgagcttgaattctaaatgttacatgaatgcagtttcttcccagtaaggaacctgtttcctggcttgggagctgaatattatttaacatggaattcaattatgtagaacacagacaacaataaagacagcattaaacactacactcggcaaacctaatccgatattatggagatgcatcctttgctttccccccccccccacgggtactgctccttataggcagtcagcaaattatttcctgaaaaacaaattagcgaccttcaggtcattcctcgcttgcgtttagcgttgtcccaaagcttcagtaagaatgtaacaccctctttcagggttgcctttctt

SEQ ID NO: 6677 - DNA, 487 bp, Gossypium hirsutum
  Clone ID: LIB3828-009-Q1-N6-C8
attagaaaagtggggactttcaaagtttgaaacataatttccatacaaacaattaaggcaacaaatgtgttttaaggagggattggtccagtacatagttggagagacagatcacacatactgtttcattgattcatacatattaaattgaagatcaaagccacatagaataaagccctcctattatatgcatattagcacactaacccatagcatacttctgggtccagctccgagcagttgtctcgtacttagccctgtcggtcttgtacatgtgggcaatctctggcaccaagggatcatcgggatttgggtccgtcaaaagtgagcagattgagagcaataccttggatatggtgagggcagggctccactgctccttcaaaatatcgaggcaaatgctgccattgctgttaatattagggtgaaagacctttgtcctgaatgcaaccttgggtggcttaaatggatagtccggagggaaatg

SEQ ID NO: 6678 - DNA, 487 bp, Gossypium hirsutum
  Clone ID: LIB3828-009-Q1-N6-C9
gacaagtgatggttcaatttgttcaattgacaatcataacagaaaatggatagctatttaacatcataattgataaatcaaaacacattgaagttaaagggaaaaaaaaagtgccaagttccattctttaatctattgcatctaggacattagagcatcatttaagtataacatatattcaaaagaaatataatatataatttaatatcgtagcaatgggattaaaatctcaaaacaaaaagtctataaatctaagaactggtaaacttggtaaccgccttggtaccttcagagacggcgtgttttgccaattcgccaggtaaaactaatctcactgccgtttggatctccctcgatgtaatcgttggcttcttattgtacctggccaatctagaagcttcctgagccaatttctcaaatatatcattgatgaaactgttcataatccccatggctttgcttgagataccgatatcaggatgaactt

SEQ ID NO: 6679 - DNA, 482 bp, Gossypium hirsutum
  Clone ID: LIB3828-009-Q1-N6-D1
cagaaaatcaacaacctatctttactttgaactggttttacattttttaccagtcaacaaaaaaaaatcatccacaaactatgctttagtatcaatgcccaaagtagaaatatgacacagctctcataagctaaaataacatgatcaatgagctactaccaagaaaatctttggttatccattacttcaaaattgggagtctataataagaaaacctggtgctttagcactacttaagatatgtagatgaaacccagagtagcacataggttatcaatgatgtcagcacttcaaaactccttgggcccttaagaataggaataggtggaatcactgataccatcaagaaggttcccagcaaccaggagaatataaaagctccagccccataaagtagagttcggattttgctcttcaacctatcatgtatgaaatagaaggtagctatcagtgatatagctacttgcagggttgggccttct

SEQ ID NO: 6680 - DNA, 476 bp, Gossypium hirsutum
  Clone ID: LIB3828-009-Q1-N6-D10
aaatgcaaacacaatatttttcacttcttctaaaaccaaatcctacagtgcaggaacgcaaatatttacaggcaacacagcatcatttcttttcaaggttttgggctttcgttggatctttataaatttaaatcatacacatatatagtttatggccattgaaaacctcaggtcccctttatgctgcttctgcaaacccaactctaagcttaccaaaatcgaacacagtgtggtagcgacccatgaaggcatctcccaaaatccagagaggtccacgaggaggagggacatccaaagcagtaaagccactgatgcattgagcttcagcaccttcacccaccttcagaatgtactcttctggtgtaagatcaaaagctttgccaccaatagtgaaggaaatggttggcatggaagaaagacttccacagtcgacagtagattctcccattgggtttggcacccgatcacaaagctga

SEQ ID NO: 6681 - DNA, 433 bp, Gossypium hirsutum
  Clone ID: LIB3828-009-Q1-N6-D11
ttttttttttttttttttttttttttttttttttttttttttttttttttttttatttattttaatttttaaatttttaaaaaaaaaaaaaaatttaaaaaataaaaagaaaaaaaaaaaaaaaaaaaaaaaaaaaaaaaaaaaaaaaaaaaaaaaaaaaaaaaaaaaaaaaaaaaaaaaaaaaaaaaacactgaaaaaaagaaaaaaaaaaaaataaaaaaatataaaaaaaaaaaaaaaaaaaaaaaaaaaaaaaaagaaaaaaaaaaggaaaacaataaagaaaggagggaggaaagaaaggaaaaaaaaaaaaaaaaaaaaaaaaaaaaaaaaaaaaaagaaagtaaaaaaaaaaaagaaaaaaaaaaaggggggggtttccgcctaaaaaaaaaaaaaaaaggaaaaattttacaaaaaaggggcccc

SEQ ID NO: 6682 - DNA, 473 bp, Gossypium hirsutum
  Clone ID: LIB3828-009-Q1-N6-D2
aaccaacataagcactaatatccattgaaaaggccggacttttcaatcatttaaagccgtggaggttccaaagaatccttacccaaaaaaaaagattaatggcaagatgtaaatagggcccaaaatttcggtcacctctccataaataaacaaccgcagcttatttttaaaaaaaacttctgcctcattacgtatactcggatgctcttatgctcaagtttaggcagaatttagggcatcaagcctatgcctagctttcccaatgatggataactggataccctcacccttaggaagggacacccatggctttggaccttttccgatggcgaacactttgccaagaccagttgcaaactcttgcccagcaccatgttggacatggattgcctaaaagctgcccttatgctaccccctattcttaaccacttcaactccccctttgcttctgccttcagagaccatgacaacat

SEQ ID NO: 6683 - DNA, 459 bp, Gossypium hirsutum
  Clone ID: LIB3828-009-Q1-N6-D4
aaacaaaaacaaaaataaattaagataaaaaccaataaaagtccatcatcaatgtccttttacaaaatttcaggctcaaataaagaacctatactagccaaatacaattctaacccaaagtcataaacccatatcctaaacctagcccaaatacagaacccaaaaggggaatctcaacagccgagagcactaaaagcttctggaacgtgccaaaatagtaccaaggggtccggctcccatgaacgatttccccgcacggcctttttcacgcacacctttcctcactcctccgtacgggtgttcagtgcgagcaggccatggatttcttctcctttcttctctgaaatcgaagttgaggagggatttcgggctgaaatttctccgggctcgacgagcaccatccggggaagatgaataggtgattaggaagggggaatctaacggtgccatccatcaatt

SEQ ID NO: 6684 - DNA, 480 bp, Gossypium hirsutum
  Clone ID: LIB3828-009-Q1-N6-D5
gggcaaaatcaactccttcgcttatatacgcacaaaagaactgttcagattacagaacaaaatagtacttggaacacaaaaaatgccatccattgctgttgaagttgtaaaacagaaagtgccaaagtgaagagtgcaaacagcaaacgaggcatgcaaaccactggaactggaagtatattaggagcagagacctaacagactgtctttaagctaaagcagaatgctagatttagtgatataacaaagatgatagtagttttgatatttcaagccgttcttccattactgttgtatcacaaaatatgatgaaacaaaatcaaagctccttttgcagttgcatcaagcgccacaatgatcatcttcaagagatttcgacatagaaaatgctgctaacttataccatactatcttatctcaacaccatcgatgtatttaactcgcaaaacctggaagaacatctatcacttcttatttcct

SEQ ID NO: 6685 - DNA, 309 bp, Gossypium hirsutum
  Clone ID: LIB3828-009-Q1-N6-D7
aaaaaaaaaaaaaaaattaaaaaaaaaaaaaaaagggtttaaaaaaaagaaaaaaattaaaaattaaaaaatttttaaaaaaaaaaaaaaatttaaaaaaaaaaaaaaaaaaaaaattaaaaaaaaattcaaaaaatttaaaaaataaaaaggtaaaaaaatttttaaacctcgggggttaaaaaaaattaaagggggttccaaaatttaaaaaaattcaaaagttaaaaaaatttaaaaaattttttaaaaaaaaaaatttaaaaaaaacaaaaagtccccccggggcaaaattgaaggggcccaaaa

SEQ ID NO: 6686 - DNA, 491 bp, Gossypium hirsutum
  Clone ID: LIB3828-009-Q1-N6-E1
atagtaaaaagaacagaaaaagtttgtctgagattcaaagaattggaacaaaaattaaatcactggctttctcaaagttcattgtttcactccaacatgaaaacacacagaaggataacaaagccattagaacaaagcaaagttccaagctgcatcaagaaacaatgaaacagtacttctctctttcatcctatccccataccaataacatttagaagcatttcctgtggacgatcgctggacctgattcatcatactcggcctttgcaatccacatttgttggaaggtgctgagggaagccaagatcgagcctccgatccagacactgtactttcgctcaggtggagcgacaaccttgatcttcatgctgctcggagcgagtgccgaaagctccttgctcattctgtcggcaatacccgggaacatggttgtaccaccactaaggacaatgttaccatacaagtccttcctgatatccacatcgcacttc

SEQ ID NO: 6687 - DNA, 492 bp, Gossypium hirsutum
  Clone ID: LIB3828-009-Q1-N6-E10
gtgaaagttaaaaataagttgatattttatttagtggaatcaaattacaaggggttgatttatacataattttatgaaatccatcattaggggttttttattcattctccatactcttgcttttcacatttcccagctctctcttcatatcttggaacaatcagtagcgggggtgatgggaggaaagaaattcttgataccacatttctggccaagaagaggcactcgattagggtcaaatggcccaagtagtggcaatattgctttcaagcacaggcatagttctatcctatcttctttggcctttagttcgttaataagacgtttagcaccaacacaacattccggtgccggatcggctccgccttttatgaagccctcgcaggggcttaagtaaaagataaccacatcgcacaatggtgatgctgctgcagtttctgtaatatcccgactaaaattaaggaacaccagcatggctataaagttgattga

SEQ ID NO: 6688 - DNA, 485 bp, Gossypium hirsutum
  Clone ID: LIB3828-009-Q1-N6-E11
aaaataaatctaattatccacattttatataagatcttcaaataacaacttgtgaaacaaaacgtgaacaatgattcgtattacatatagtggctctgacaattcaatgcttgttgtgaaagatctaaggtaaaattcgaacccacattgatcgacggcaaggtactccattgtagttcacaaagagcatgtaataaccaggtggtgcaatgttgctattaacgggagcttgaagaacaatgttgtttgtatttatggcaacatttttgttaaattccacaattcccaattgaatcaatctttgattcatagcaaccccgtgcgtcacaaatggcggtgagtaaatcgtcacttgaagcttttgttggtcaatttcgacatttccacggatttgcactgtaaatttctgaccgtatttcacctggttattggaattttcaacaatgatctcttgttggaacatacccaagttcgggtccaagtaa

SEQ ID NO: 6689 - DNA, 487 bp, Gossypium hirsutum
  Clone ID: LIB3828-009-Q1-N6-E12
attcaacgtagtctcttcaaactcactatataaactaatgtttcaaagtgtcaagtgatactatattggttgcaccattgcattttttctggagtacaaaaaacagcaacgtaggtcaagtaaataattttcagcatgagagtaagggcaaatgagatcctaagctgatggattccctaaatcgcacaaagttaatattccaccacaacacacacaaagaccagagttcaagaaagcaataaatacatgagagaatgaacaattccctctatcattcttccagtcagttcagtttgtctctccatcaacatgtcattgagtcaaccaaaacagaaaacattaaaaccagttctgaaatttgctgtcgggaagcaatactattcaacaacgaaatccatctttcatcagttgccaaatttaagcatcaaatcctccacagattatgctcgcgatggagcagccagatctccggcgccgtttcttcctc

SEQ ID NO: 6690 - DNA, 458 bp, Gossypium hirsutum
  Clone ID: LIB3828-009-Q1-N6-E2
gacagcaatttcaagttaattttcattattaagattgcttacaaaaatctcagctcagagttgccccatatgaacatgacatgataatcacttccagcagtagggatttgtctcaccttgtaccctttctgaatttgtttttttcaaagaatagctaccacatttatcatcttaatacttaaccagtctcatatggggcaacaatatgactaggtttcttggctaattctttcaacgacatgtttccaagacctcagaaccgtttatcacgttcacagctgaatctacagtcttggctaattcaacggctgcacccacgtaggaatgtggcgttaacttcaaaagatgagtcttagcttcttcgggtaattccaagccttcaataaattcccttatactttctttggtaactgctctccccctagttagctccttcagcttctcgtaaggctctggaa

SEQ ID NO: 6691 - DNA, 480 bp, Gossypium hirsutum
  Clone ID: LIB3828-009-Q1-N6-E3
gaaaacaaaaaaaataatatgccgttaaaacgtattcattcacccaaaaataacatccgaacaaagggggatataattctcccttttttaacttctaccatggagaaaaattcctgtatatcttcatctcacctacctatgctctcatccttctcaccctttgctttgctttgcttgtttcagcaatcaaaatgtcattaccagttttttaaagttcatcatgagaatcatcatcttcttcagttgatccaccacctggggctccaccagatctttggtacacagctgtgatgattgggttgcatactgcctctacctccttgagcttctcctcgtagtcttccttctcggcactctggttgtcatcaagccactcaagtgcctctttcactgcggtttcaactttctccttctcatcagattcaagcttgccagcgagcttatccttatcattaatctggtttttcatgttgtagatat

SEQ ID NO: 6692 - DNA, 429 bp, Gossypium hirsutum
  Clone ID: LIB3828-009-Q1-N6-E4
ggattcaaacaaaactaactttatcgatttacagaagcaaatcatgaacgaagagcaacaaagttttggtttacataagggaggggggaaccatcatcagccaaatagcattaaacaagggcagggacaatctaaatgggctatcatccccacatccttaggggctgggcttttccttccgaccggaggcccttccataactaattctggaggcaaaaattttttcagggaaaacagaaacgggacttgaaggaacactttgaaattcggtagcggggtcccccaaaaaaactatgggggaccggcttattattctcatctaggggcccaaaaaagcattcctctatttcatcaaaggacggaacttcattttcgtctccgctggagctattgaaaagggcattatcgaattctgaggggggccctttc

SEQ ID NO: 6693 - DNA, 477 bp, Gossypium hirsutum
  Clone ID: LIB3828-009-Q1-N6-E5
tttttttttttttttttttttttttttttttttttttttttttttttttttttttttttttttttttttttttttttttttttttttttttttttaaaaaaaaaaaaatcgggcaaaggaaaaaagccccaaaaaaaaaaaaaaaaaaaccaaaccccaagggggaggggggggaccaaccaaaaggaaaaaaaattattaaaaaaaaaagaaaaggggcccccgggtttttttggggggaaaatcccccccccctttattaaaaaaggggggggggggaagggcaattgtccccaaactgggatccattccaaaccccaacccccaattaaaaaccccaaaaggggcttttgggggggggcacaccaaaaaaaaaaggccgaggggggggcttccttattgggggggggaaaatttgggatcccccaaagccatgggcacactggaaaccagagggggagccacaggttcccccgg

SEQ ID NO: 6694 - DNA, 485 bp, Gossypium hirsutum
  Clone ID: LIB3828-009-Q1-N6-E6
atgaagttgagtggatggatgaaattaaaaagaagcagcagctagtacaactttcccttttccctggactattctgctcacaatgagtttttataattaagaaatttagattgttttatcacaaatatagaaatcaaacaatatatgtaaacatcaagcatcacaaacaaacaaacaagctagctgcggtatcaagagattgaaaaccttctcctcctaggcttggtaacgtccactccaaggttatcatcgatatgggaagtgtccttggagccatgtcggaagggatttagcttgcctagagtcttggacatggaagagaagaaggtaggctttctggtcccaacgctctttgaactagttccagtttgattgttcttctgcatgtccgatatgtacatcttcatcttcaaaagctccgttcgcaatgcctcattctcctttaccagcgacacgtctgcctgcaactgattcctggtggtcac

SEQ ID NO: 6695 - DNA, 401 bp, Gossypium hirsutum
  Clone ID: LIB3828-009-Q1-N6-E7
gcaaagaaaacattgtttcagaattccccatgaatgaaccaaagagaagcagcgtttttaagcatcaaaccaaaattaccgaacattgaagcataagccaagtacttctatgaactccatatgataacaaacctaaactgacaaaattatccatcatgaaaaatcatctctcaaggaagaccagcaggtccagcaccaccataaccaccacctccacgaccaaaagcaggccgtgttccagggcccctgaatgaaggctgataatcagctggagctcctcctttatcaccaaaatcaccgcctcctcgaggaccaccgcgatagccatctctgtcaccaaatctcctctcaccgtcaccaaagcgtggtgggccgcgtggacggtcaccgggagggcccat

SEQ ID NO: 6696 - DNA, 483 bp, Gossypium hirsutum
  Clone ID: LIB3828-009-Q1-N6-E8
agtaaaaatatctagtcatcataaaaaagaaaaagagcatgcctttgttctgacagttaaaatcatattaagaaagcatcagtgaaagttcttttgcctgaagcattcaattcctttttcctctaacaggaaactcctaaaactagaactcttttttaaataaagggtaggaaaaaatttaggcgtttttatctccaaaccgatttgtcagcgagacattgcagtgcttagagctcatcatgtgcatcttccttgtcctcatcgtctgatttggtatcggaatcagactcgtgcccttcagtatcatcggcatcatcttcatcctcagcatcggaatcaactgggtcatcctttgattcctcctcctctctctttttctccgcctcctcaaatgatgccttttcagcatccttctgcttgccccatgtttcttcagctagtttcttggcatacactacatcatcagcaactaagatgttatca

SEQ ID NO: 6697 - DNA, 462 bp, Gossypium hirsutum
  Clone ID: LIB3828-009-Q1-N6-E9
gaaccaaaattgcaattttgtcattaagccaagacaagaacttgttggcaatgatcaacatggatgagcaaacaatggaacagacaccattgggggaccagaacatgaatgtttcaattcagctaaacaagatccacttcaccggctaaactgaactccccataattgttagccagacaaataagccttttggtaagcagtatctgattctcacaggtccataactggccatctcagttcttcatggttttgggcaactattaactccattttcagttcataaatgtctattaccattgagaaagtcgacatcattaactcatttctgcaaccagccagacagaaggatgttccccattggtttcttcaccccatcaaagctggttgccgtctgaagtcagcaatgatacatgttctactcgagtatggttgaaccactttgcaacctatgggaaatcccta

SEQ ID NO: 6698 - DNA, 464 bp, Gossypium hirsutum
  Clone ID: LIB3828-009-Q1-N6-F1
actgttggaaaaagaattgaccaccttccactatattttaaaagtaattggtgcataaagatggaagactacagataaaaaataatctaaacttccagaagccacattagtttttcaagttttatgatattttaggttctaagaggcagcacccgtatctgcagcaggagcagctgcagctacttcagttttctcttttgcagcttccttcagtttcttccaattctcgtcactgtcaaggatttctcccgtctttatgaggtaccgcacttttttcccgtcatctaacactttatgacccacccggctcgtcacttctttctctttcgaatacagcatcacatttgagctgtgaattggggcttcaatcttaattatctgtcctggttgatcctctcctctgctcttcatatgcttcgtcttcaggtttatatctttcactacaatggtgctgttatgcttga

SEQ ID NO: 6699 - DNA, 487 bp, Gossypium hirsutum
  Clone ID: LIB3828-009-Q1-N6-F10
gaattcatacattttcatttacccttatggcagcacattgaatggaaaattcactcttatcaccatctcaactaaaaacagagagaattctaaacactatcgccatggactgccattcttggtacatcgtttctcgacaaaatgggccattccctgaaatattccatctaggaataaagagaaccggccatctggctcaaaaaaaagaacctggaaagctggaccggttccggcaagtaaacaaacaagacattatcttgagcgccttttgcactctttgaagaattaggaaacacttcctgtgcacaataaaagggccggattcatcgatctccgccttaacaatacacatatgctggaaaggactgacagatgctaacatggaacctacaatccagacactgaatttcctttcacgaggagccaccaccttaattttcatgctgcttggggctaaggcagagattaccttgctcattctatcaga

SEQ ID NO: 6700 - DNA, 483 bp, Gossypium hirsutum
  Clone ID: LIB3828-009-Q1-N6-F11
aggcagagttaatgaaatcatactaaaacgcgtcactcaaacttttctcttgccagcattcaattccttttttatctaaataaaaactaataagactacatcttaaaaagatactaaaggaaaatttaagcacttgtgtttaaagctctcaaccaaattgccagcgaaatactgtattcctcttgccttatagctcatcatgttgtactgcatcttcctcagcactatctttgcttgaatccgactcacttccttcaccatcatcagtatcatcatcgtcgtcctcagcatcggaatcaactggctcatccttcgattcctcttcctctttcttcttctcttcctcctcaaatgctgccttctcagcatccttctgcttgccccatgtttcttcagctagtttcttggcatactctacatcatcagcgactaagatgttatcaaacattgttcccgatttcacctgccacaactcaataccaa

SEQ ID NO: 6701 - DNA, 308 bp, Gossypium hirsutum
  Clone ID: LIB3828-009-Q1-N6-F2
aaaagaaaagaaaactcttaatttatataaataaaaagggccttcctacaatttattagcatttcgtttaccaaggacaaagaaagaagcgatttcagcccttgaacaaaaaaaccaaaaaccaaaatcttccctgggcttgccccacataacatttgaaaccaatctcatctcacatcatatgcctgcatgtttatttagttcttcttcaaaaggggggctctgagttctgcggggcaaatctcattcacagggttttcgggtctataaaatcccgtaacagggtccggaacccagttagccttgtc

SEQ ID NO: 6702 - DNA, 309 bp, Gossypium hirsutum
  Clone ID: LIB3828-009-Q1-N6-F4
aaaaaagcaacatcaaatattttaatgtatagttataaacctctcacatgacttaaactgtgccctagagttagttcttttaacctatatttcaaaaaaacacaaatttaataaccaactgccctttattttttcttcagttgatattacactcatttaggaactataatccatctaccaacatgatcatcgttatcatatggtattattggtctgatgttgatcggtttcgtcgggattttcagtttcatctgggggggttacagtttcagagtttaccttactttcatttgaaaatttgttgttatc

SEQ ID NO: 6703 - DNA, 362 bp, Gossypium hirsutum
  Clone ID: LIB3828-009-Q1-N6-F5
aaaaaaaaaaaaaaaaaaaaaaaaaaaaaaaaaaaggggggaattttaggggggggccaaaaaaaaaaaaaaaaaaaaaaaaaaaaaaaaggggggggcccccccggggggggaaccaccaaaaaaaagcggaaggggcccgggggggaaaaaatttttttaaaaaagggggaaaaaaaaaaggggggaaaaaaaaaaaaaaaaggggcccgggggaaaaaaagtttaccccaaaaaaacccaaaaaaaaaaaagggggaaaaaaaaaaaaaaaaaggggggggggcccaaagggggcccaaaaaaaaaaaaaggggggggcccccacggccccttttaaaaaggaaaaaagggggggaaaa

SEQ ID NO: 6704 - DNA, 442 bp, Gossypium hirsutum
  Clone ID: LIB3828-009-Q1-N6-F8
gcccggcccataaaccggataaaacaaacaatggtccaaaaaaataatgtccagattacaaacaaaatacagcccaatgcttaacaaactaagcccaaaattaaacaaacccctaacccaactagcctaagcctagaccaaaatatgcctcaaaccccaaaaccctagcctttagcctttatgcgcacagaagccttagccgccttcgagccgagccacgcccacacaccttcgtccatgcgccgggccaagccgagccgtgccacgtcctcgtaggatacctgcaaaacacacaccgaacgcaagccgacaaagaggacagaaacttcccacaaaccacgcccgaaagaaagcagagaaggcagaaaaaaaggcaaaaatcgaaagaaaaattttgaaaaagaaaaaacaaaaaggggcgatttttgtatttttttttggc

SEQ ID NO: 6705 - DNA, 489 bp, Gossypium hirsutum
  Clone ID: LIB3828-009-Q1-N6-G1
gcacaaaagataatcaaaattggcaagaaacaccagtaaattaagatgatctaattaaggtttaagaaaaaattattcatccatgctatttaaacaatttaagatgcggagtaccaatgactaggtagtcagataaagaaagtaagaaagcaatcctgacatggaattctccaaagtggagaactaaaatacaaaacaatccaggaatccacaacacccaaactgtttaggaagaggataaacactaacaaagtagctttggtttcacccttcttgttttggatgctgaatactaatgtaattacttagcaagcatactttgttgggcctgattctcctgctgctgctgatagttgagaggcctcctgaagagcatgatgtgtggttcggggcgatggattgcataatggacccaaccacgactctgctgtactccaattgcacgccattcattttcagagagtaggcgattcttggggagaagtttgg

SEQ ID NO: 6706 - DNA, 408 bp, Gossypium hirsutum
  Clone ID: LIB3828-009-Q1-N6-G10
gataagaaaattcccaaaattaggagagtaaccccaatccaatttcaatccaccaagtacactacagattcagtcttaattgcaacaattaaaataatcagtagtacgtagaacaaaaatgataatttgagcagatgtttctcacctattaacatcaagactttataaaaacaccctatagtatacaacaattctcagttctggcaaagccctttcatctccgaatcgaaatcagccagccaaaaaggtgcttggatgtctagcagcaacaacttctatcatgatggcatgtatgtcgaagtatcaatttgctcaggaagctcctttatatccacctcaaacctttcctgaacctgattaaggacatcagagtctgatgttgatgagacaaatgtaattgcaagtccc

SEQ ID NO: 6707 - DNA, 509 bp, Gossypium hirsutum
  Clone ID: LIB3828-009-Q1-N6-G11
gcgatcattttgtctaaatttttcttatgaatgtggtagtgcaaataatctcatttcttcaaaaaaaaaaaaaaaaaaaaaaaaaaaaaaaaaaaaaaaaaaaaaaaaaaaaaaaaaaaaaaaaaaaaaaaaaaaaaaaaaaaaaaaaaaaaaaaaaaaaaaaaaaaaaaaaaaaaaaaaaaaaaaaaaaaaaaaaaaaaaaaaaaaaaaaaaaaaaaaaaaaaaaaaaaggggggggggccccccttttttttttttttgggggggggggaagggcaaaaaacttttgggtttaggggggggggggccccccccgggggggggggttttgggggggaaaaaaaccggggaaaaattggaaaaaaccggggggccccccccaaaaaaaaaaatttgttttttcccccccccaaaaaaggggggggggggccccgggggggccccctttaaaaaaaaattttttttaaaaaaaagggccccccccccccttgggggggggggggggccca

SEQ ID NO: 6708 - DNA, 463 bp, Gossypium hirsutum
  Clone ID: LIB3828-009-Q1-N6-G12
catctattactgatacccgagtatataatagaccacaagcatcaaatgtgggaaacatgacatacattactcgctagaaaataaatagaaacgggtatcaccacaaaaaaaaaagtagaaatgaaataaaattaacacaacatagtggaagacgaaacagtgctaacacaataaccagcagtagggtaaaagttttaggcaaggatttcctccaatggcttggcttcaagcttgggcttctcattctcagcctctttctccttcaactgttgctgctctttggccagcttcttcagcctggcaagctcaagatccttgctcatcttcctcctatacatctcagcaaatgtgatgggctcctcaaggattggtttatctccctctctgatcttcaatggatacactgtggcatcgggtgctggattttggaacgtggctattgacaatctgctgcagtctgagt

SEQ ID NO: 6709 - DNA, 483 bp, Gossypium hirsutum
  Clone ID: LIB3828-009-Q1-N6-G2
gacaatccaaaaattaaaatttcatttcagaacattacatcatgaggttaggttacaagccattgaggcttctaggaatagcaaatgatatagctcaagggcaggggcacctcatctacctccggtgactacgtcaaacttcattcaacactgtttctacttaaagcgtatgttgtataaacattgtcgatttgtttaagctggcttaactacatgctgtccacttgtataactgatcatcctcccataattaattcattgcattcatattccatttctctcttcttcttcttctttttatgtacatctattcgaattgagatttgagacatcgaaagactctggttttaagtccgacatcggtgaaatgcacgaacatgaaggcccccgtctatatgaagattgatcatcgtcctgtatgtcactgctctattctcatcactcaatttgaatacgaagcaacggagaagaacagctgagaaa

SEQ ID NO: 6710 - DNA, 474 bp, Gossypium hirsutum
  Clone ID: LIB3828-009-Q1-N6-G3
aaaaaaaaaaagcagaaacttttatttccaaggcaacgtttttccgactattttacaaaaaaaaaaaagaagaagatggacaccatatctggaaactgttataatttaaatccaaccaacacaagcccactgtagccgtaacgagtaggggaattatgtacgtttaaaagaatcaccagatccaaaaaggtttggatataagtaatcatcattcatagacggcaatctctgcggcagttgttgatgctgctcttgttcaagtgcatcgtctctggaaaccggtgaatccaaaccttctttagatttgctcactgaaggaacatctgctgcctcaaatcccttgttctcctgatcctgacgtaccgtgttggagtccaaagaatacgaagcatcaatgggataggtaaaagagtgtagatgatcaaaactcgggttttccatactagctggttgatgagggatatttgtatgaaa

SEQ ID NO: 6711 - DNA, 359 bp, Gossypium hirsutum
  Clone ID: LIB3828-009-Q1-N6-G5
aaaaaaaaaattaaaataaaaaaaaaaaaaaaaaaaaaggggggttaaaaaaaaaaaaggccaaaaaggggaaaaaaaaattaaaaaaaccccaaaaaaaaaaaaaaacccccccaaaaaaaaggaaaaaaatttccaaaaaaaaaaaaaaaaacccttttaaaaaaaaaaaaccccccccgggggcccccccgaaaatcccgaccgggccccgggggggaaccaaatttcccaaaaaggaaggccaaaaaaacggggggaaaaaaagggaaaaaaggttccccggggaaaaaaggtttccccccaaaaatcccaaaaaaaaaaaaaccggaaaaaaaaaaggaaaaacccggggggcc

SEQ ID NO: 6712 - DNA, 476 bp, Gossypium hirsutum
  Clone ID: LIB3828-009-Q1-N6-G6
atagcaaagaaaatcatatatattagcatgtacatgcattaattacatatggctacaaaacaagattcaaggaactttaggatattgtaaatcaaatattgttttgagctatttattcttcataattactctttttatccaacaggattttatagcaagcccttctgcaacatcattacttcttattttgtataattaatacgacgacaaccaactcttcctcattatttcatcttaatatggtatcatctccctactttggtggactgggttcactgtccataacctcttctatccctttgctctttacagtttcagcctggcaacatcctgatgcgcacctgggctgaccacactcagcacaagtcccaccgcaaccctgacggcaacactccccactctcacatcccgactgtcctggcattagtgggatttgtgggacttgtgggatctgtgggattagtggaatttgtggg

SEQ ID NO: 6713 - DNA, 432 bp, Gossypium hirsutum
  Clone ID: LIB3828-009-Q1-N6-G7
aaaaaaaaaagcgctaaccaaactttaaacattcttaatttaggggcgacaatttacaaaaaccccagaccataggggcccccggcccctttcattttaccaaacccccacttttttggctacttctcagaaaccctaaaaaaaaagcccttttaaaagttctaacccataaacgggaaaaaaaaatttcacttttaggggttttttttttaaccccgagtttcgtttttttttcaaaacccctactggagctgggggccctgttaatctttgggggcgctttttccatgggtccaaaaccgagtttttaaacctggggggaaaaacctgactcccccctttttttgatcgaaccaccggggaccctatatcctaaaattcccccaaccctttttccacaacgttaaccgagtagtctttaaccctttccat

SEQ ID NO: 6714 - DNA, 487 bp, Gossypium hirsutum
  Clone ID: LIB3828-009-Q1-N6-G8
aaaaaaaaataaacaaattaaaattgtcctaagtccatttacaaataataggcccaaacaaatgtcccaataacagatcaagcctaacccaaccaggctaaaacccagacaactcaattaaaacccgacctagttacaatggcccaatgcccaaacggcccaggacacttttgaacagaaaccctaggatttctttcccttgcgccgcagccaacagtttcgtactggcctccagcatagcccagcgccacacgtgcgcctccgttctttcatgctctacgcccacgaacggtttctccacactcgccaccctccagctgtacctacaatagacttgcaaatatgccatgggtttcctttttgcttcgttgcaatcaaagccgaaaaggggtttcaaggctgaaaaaccatccctcaaagcttgaacgcactggttgccatttatggaggtaaatcggtgtttgaaggaggggatttagggtttgcc

SEQ ID NO: 6715 - DNA, 465 bp, Gossypium hirsutum
  Clone ID: LIB3828-009-Q1-N6-G9
ttttttttttttttttttttttttttttttttttttttttttttttgggttttttttttttttttttttttttttttggggcagaagaagaataaaaaaacccgtttttggggggggagtaaacaagaaacagtcgaatggggcaaaaaatagacctaaaataaaggtctaaaaccggactcctattttaaaatgggaacccatagtccgaacattattggaaaaaaaaagtctgaaataaaccctattggtgaaaccggccaaaaaacgtcccatgaaaggggattccaaatccccccccggggggggcccaagttttagttggctccctaaaccccctgaagggtctcctaaaagacaaagggtttgcagggttaaaagtataaaccccccctgctttgacttttccgcaaatcttgcacccccaaaaaccgaagggttttttttttaccgattactttccgg

SEQ ID NO: 6716 - DNA, 490 bp, Gossypium hirsutum
  Clone ID: LIB3828-009-Q1-N6-H1
aaaatgaaaaagaactgtttttatgtaatatgaataaatatattaattacaattgcactgaatctgttggtatggtttaagcggtggcacttagggtttttgggacagggctggaacatggagtcgggtttaatttgccactagttttaggcttgacattcaaacattgggatgttgcgggttcaggtccggtgtgcttaatatcaatgtctgcaagttccacattttgacatggcgaagaaccgctgcaaataaacttgacagcttctggaagcgcagatgtgccacggatgttcttgaagctaatgttgcttagtttaactttcgattcttcatttatcttgcatttactccatgggcaatatttttgatcaattaggataggggaagagacattattcacgataatatcctcaaaatgtacatctgatactatcccaggagattcgcctggccaagttttgattcgagctccattcgaagtattagt

SEQ ID NO: 6717 - DNA, 485 bp, Gossypium hirsutum
  Clone ID: LIB3828-009-Q1-N6-H10
ccatgaagtgctcactttatccctttttctttttcttctttttatttcaaaattagttcgactaactcaacatatctgatactaatcaagtaccgcagcaacacttatctctcgtattattgggaaatatatccacaaacacatcatctttgaacgttctaacacggaagcagcggcatacaaaagccatgttcacacaacccaaccaaacaaacataactcacacctcaaattgcaaactaaattttcataccaacaactcaatataggaaagcagctcagacgtctccagctccaatcaacgcaagcagcattttctcatagtctccagaggtatctccagcaatcgctttttccagggtcacactgtttcttcgctgatattcctccttaatacgcaccatgtctacctccgcccgagtggcgaccactctagtaagagcccattcatctgttcccagcttattgattgcttgacgtagcac

SEQ ID NO: 6718 - DNA, 441 bp, Gossypium hirsutum
  Clone ID: LIB3828-009-Q1-N6-H11
aattcaaagaccatgattttttaagactaatataagagacaattggtgccagaaaagactgaacatcattttattattattacttcctagggctacaagataattcacataaaccaagaaataaaattggggtgggatccttaacatagatgaataaacaaacatttgaaactgggttcttaatcattttgcagaaggaaactacttagctttagatgccaagcttggggggcttgtttcacgtcatggatgatcttgggcagtttcaaaaaaccaatttgtggatcccataaggacagaagcctttttacaacataaaaatgctagggtggcccaaaaagacagatcaatttttttggggggcctcgaattttgttggagtttcaatgcccatcatgcagcaaaggcctggttctaagattaaaagcaacacaattccaa

SEQ ID NO: 6719 - DNA, 307 bp, Gossypium hirsutum
  Clone ID: LIB3828-009-Q1-N6-H12
tttgggggtaagggggggttgggggggtttttttttttttttttttttcccccccctcccctcgaaaaaaagggggggggtgttttttaaaaaaaaaacacacctcctttttttttttttttttttaaaaaaaaaaaaagagggggaggggcggcggggggggaggggggggaataaaaaaaaaaaaaaaaatatatatttctcctcccacaaaaaatttttttaaggggtttttttttttttttttttccaaaaaaatataataatttcttggtgggggggggggggggggaaatatttttttttt

SEQ ID NO: 6720 - DNA, 354 bp, Gossypium hirsutum
  Clone ID: LIB3828-009-Q1-N6-H2
gaagagaatagggtgggatcgcataaaagaaaatttactgacaatcattcagaaaagataccaaatgtactatgcttgggtatcaaatattgttcgtaaaaaagggaggacaaatgcatataaaaatagcatttttagcaaggacggccgattgtgcagcttagtggtccggcatactttgtgagctcggggaccatttgaccaggttggaaaggcatgatttggtcggcgccaaattgcttgctggccctcggatttcctgatggggtaaaaaaggctccgttctcgttgtggtccccttgtgattcccatttccaattcttccactggcccggtttgtggaggccccttcag

SEQ ID NO: 6721 - DNA, 612 bp, Gossypium hirsutum
  unsure (1)..(612): unsure at all n locations; Clone ID: LIB3828-009-Q1-N6-H3
aaaaaaaaaaaaaaatatttttttttttttttttttttnnnncccnnnnnncccccccctttgggaaaaaaacagannnnaaaaaaaaaaaaaaaaaaacacaaaaancccccggggcccccaacccaaaaaacaaagggggggggggaaaaaagggcccccccccgcccctcttttgggggggggggcccgccccccccccccaagaaaagaggggggtttttttttccccccccccccccccccccctntntttttataccccacccgggggcgcgcggggggggggcccccccccccccccccgcccccataaaaaaaattcaaacacccccccccccacccccccgggggggggggggaagaatgtttctttaaaaaaaaaggagcccgcccccccccccccccccaaatnanaccaaaattttattttctcccccccccccccccccggggttccccctttttttttttttntnnnnnnntttggggggaggagaaataccgcgccccacaaaacaccccggggggcggagnngttggggggggggcggcgcgggggggggcccccccccgcccccccaccttaaaacccccccccccccccccccc

SEQ ID NO: 6722 - DNA, 490 bp, Gossypium hirsutum
  Clone ID: LIB3828-009-Q1-N6-H4
aaacgcttaatgtaagtccttgcaaaggagtttctacagaataattcagtgatgattcaacactgattaggtttgccattttcttcaggaaaaaaattattaaatagcagcaatagaagtgaaaatcaatgcttgtttgatcgtggagacattaattccgaaatatcaggaagtggtaggccctttatctgcatctgcttatacatccattgccaattctcaggtgttacctcacccccaagtgaacgaatcactgcaccaccactacatgagcccactttgcaacattcctctagtgataatcccttgaccaatccatataagaaaccaccagcgaagaggtccccagctcctgtggcatcaaccgcttttgtctcccctatagccggaactcggacaacctcttgtgcgtgttttgcgatgcatccgttggcccccaatgtaaccacagcccatcggcaatatttggacaggtattccagtgcagctt

SEQ ID NO: 6723 - DNA, 482 bp, Gossypium hirsutum
  Clone ID: LIB3828-009-Q1-N6-H5
attgaatcaatgaacttggatatatgatggatattattacataattttaacttgatatgatggaaattttctacataatggcaaatatcaacatcctaactattaataaaaataagacaaattctgcttcttattgacatttggctatttgttaaaatacaagccatgggaagggaaaataaaataaataaaataaaatggatggctagttatttccacccagcaaagaggtagacgagagtctgcttgaattagcaatactgtgaggatatgttgccggcatgaaaaagttgggaatgaatgaattatttaggtactgtcggaggaggaagtaaccatttggtaccttcaacgtagtcaagaaccaagaatggtttagcttccgcatccgatagttgtttgacgaatttctctcgtgtagcaggagtcgcgcctttccccgtgcatttgtattctccgtagtacacagtgtcggctcgttc

SEQ ID NO: 6724 - DNA, 490 bp, Gossypium hirsutum
  Clone ID: LIB3828-009-Q1-N6-H7
aagacaggagaaagttcatattataagcacaaaaatagacatcaaagccttcagttgttgaggacttgaacattacacgtagttgccattttcttttgacatcttgcaaatatatctttgataggattttaattcatagcatattaatgcaaaagttttacaatgcatctttcacatgacatgaacgcatttattcatatgtggctaatgccatttcctactttttccccaactggatttaacacccaccacagcttgcgctctatggaaaaatctccggaaacgtgcatcacaaaccctactgctactacatttgcactcggctagcattttgtttatggggagcctgcttgttcacaaaggtccattagatccaaagtctcaggaactgagagctcgagacggaacttgggaccgtcatagtggtgcaagactggcctaaaagcatcctcttccaatgccttgcataccttccttatacggattctca

SEQ ID NO: 6725 - DNA, 485 bp, Gossypium hirsutum
  Clone ID: LIB3828-009-Q1-N6-H8
agcaaagaaaatcatatatattagcatgtacatgcattaattacatatggctacaaaacaagattcaaggaactttaggatattgtaaatcaaatattgttttgagctatttattcttcataattactctttttatccaacaggattttatagcaagcccttctgcaacatcattacttcttattttgtataattaatacgacgacaaccaactcttcctcattatttcatcttaatatggtatcatctccctactttggtggactgggttcactgtccataacctcttctatccctttgctctttacagtttcagcctggcaacatcctgatgcgcacctgggctgaccacactcagcacaagtcccaccgcaaccctgacggcaacactccccactctcacatcccgactgtcctggcattagtgggatttgtgggacttgtgggatctgtgggattagtggaatttgtgggatttgtgggat

SEQ ID NO: 6726 - DNA, 473 bp, Gossypium hirsutum
  Clone ID: LIB3828-010-Q1-N6-A1
acaagcaaacaacaccactcgcattatttcaaagagtgctgcgcagtgcttacagaattaaagacacgaaagttaatgttaaatccatgacacattacacacattttgtttcatcaaataacatgcaaacagatgataaaatgtgctgatgatgttcttatgaaagaatgcggacaccatgcatgcatgcattcatgcatttgccactgcatgcttttgcttctattttcctttatgtgtcatagtcatggtagccatcccgtcatgtaattattcacactcgggcacccggtgaccgccgatatcgtatcgggctgatatccgatttgtaacgttggctcgcagtccaatggatggaagaagacatcaccctgaggctgatgggttggttgtcggccgtagccgacgtcatcggcatttggattcagctggagtgaatgtacttggtagccttccatcaacctttgttttag

SEQ ID NO: 6727 - DNA, 478 bp, Gossypium hirsutum
  Clone ID: LIB3828-010-Q1-N6-A10
gaatattcagttttctctatcagaaaaaaggttttacagggactcaggcgcatgaatcactaagacataacaattagttaagagagaaaacctcgaacaaaacaatccaactattatccccaaatcaaattgaaatgagttatttcatacccttttggacaagtcaccattcctgtcctcatcatcccggaagttgtcactcggtggatcgtttaggccaaaacctgcggtttcctctttgtagctatcttcggcactaccgagttgatcaccacccccaagtcccacattttcaccaccagccgcaaaaccatcactgccactgccaccaccagcaacttcgaaactcccattgtcgtaattggtggattgaccgaagttacttccatagccaacaccaccaccagtgccatagttatccccaccatagcttccttggcctccatagttaccactgttaccgtatccaatgttactt

SEQ ID NO: 6728 - DNA, 447 bp, Gossypium hirsutum
  Clone ID: LIB3828-010-Q1-N6-A11
caaagaaaagggggggtcagctaaaacgagggaaagaaaaaggaatgccactgaaaaaaacaaaagggggacactaagggggggtctgtggggcttaaaaaagggcttaagggcccccaaccttaggggcggaaaaaaggggttgaggagcccaaaaaaccattagataacaaacgcacttgctttcgaaaaaccgcgcatacaggataagcccaacccccgcctaattcggaaaagggtttttcaccaaaactcttccaacattgaaaacatggcaagggggggctttactccccggagaggggacaacctacttacaccggttataaacacggccaaaagggtaaaacgcccacttaaaaagacccgccctgataaccttttttttggggcaccacttcccgagcctctcccacgattcttaaatgaaaccaaagccataaaatt

SEQ ID NO: 6729 - DNA, 453 bp, Gossypium hirsutum
  Clone ID: LIB3828-010-Q1-N6-A12
aataaaaatcctggaaattttgctcttttctctttcaaatgacaaacaaggaaactgtgagggaatgtttatttccaactcaaaaacattgatacaataggtaacaacctggttcccagaaaaaaagacgacaagcatcgcaaactaattttattcgattttttttttcttttttcctctctatagaaagtccaagcttaaaagaggacatgagttttcattcacttacgcatataattcatcgacgttacattcgccgaggaaaacttttaagctatatggggaaccacagtccccttcggcgattagtgctcggtcattggcggccatgtgttcgatgattttgtatatcatttcaatatcgtccggggcatggcaacggtcagcgatttcttgaagcgtcaatgattcggcagggtcttcacagctggcctcgttgagcaccgctaaaac

SEQ ID NO: 6730 - DNA, 480 bp, Gossypium hirsutum
  Clone ID: LIB3828-010-Q1-N6-A2
gatggtatgaagtctcaaacacctttatttggaaaagaaaaaaacatcagttggcatcaaagattctttaaaagacaatgcagaaaaccatgattggcattgaggtacacaagaacactactgattcaaacacagacgttatcagaaaacatgataagctgctttacaaagtttgttttatttttcagttactttgcacacgaacagggcattggggtaaaccattcatgccatgttccacctagagaatccaatcgcattaacccccatttcaggcctcttgcttcttgtctttagagttgagataccatcccacagcagcaccaagggttgcaacaccagcaagaaccccgtagtttcggtacttatcggttgatactttctcagcagatgttcccgatgtagaggtagtgctaccatcggtcgcagcaccccctgaaccagcatccggtttctcctctggcttgggtcccttgcgtg

SEQ ID NO: 6731 - DNA, 481 bp, Gossypium hirsutum
  Clone ID: LIB3828-010-Q1-N6-A3
gcactgcaagttaactcgcaagtcccaagtttgtatttgaaaggccattcctggttcaaacaaggaagaaatatcctagttagcgcagcttatgttaaacaaacttctctcatctgcccatccggtccaaaccattcaacactttttttccctctcccttctagacagtacagtcaattagactattatttctagtttagacacaactaatatctattattatattatttacaatgttacaagtatccgggtcttgtttcatttacacttcggccaccacatgccgacagcttccccgtgctcagatttggcaatgaagcctgtgcctgcatctcggcaagctctctcacgcgtaacaaaattggtgcgggaatcggcatcgaaggatgcttccgtgaatttgcccctttgtccgtaggtgtctgggcaaagctagctttcagcagattccgccatttgtccttgagatcaacagaagttc

SEQ ID NO: 6732 - DNA, 479 bp, Gossypium hirsutum
  Clone ID: LIB3828-010-Q1-N6-A4
gaggtaaagaagacgtatatattattgcattagatgataacactaacatccatatataacaaacatgtgctgttaaggatgaacagagaaagaacaaaaatgaagaaacagttttacttttacaattcttttcaaggtacgtaatatgattgccaatgcgcaaaaattactaaaacccacaagtattaaactgaaaatcaagaccattttctcaggtcatcttagaaaaatccaatcacagatcagctcttcctggatatcttgggaagggaataacatctctaatgttctcgatgccagtggcaaagagaatcattcgttcaaagcctagcccgaatccacaatgcttaacagttccgtatcgccgcaggtcaagataccactcatatggctcaagaggcaaccccacctccaaaattctgcgaggaatagcaacaaaccatgacaggtcagcagtacaaaacaaaaataccatcatg

SEQ ID NO: 6733 - DNA, 392 bp, Gossypium hirsutum
  Clone ID: LIB3828-010-Q1-N6-A5
gggaaccggaagaggacttatttttctggggggggaaagaaaaaaaaccggaaagggggggttaaaaaacccttatggaaccaccatggggggggccttaaaaatggggggtggggaatgggccccaaaaccccgggaacgggaaggggtcgggccgggggaaaagtggcaggaaaaaaacttccggggggtaaaaaaaaacccccggaaaattggacccattaccggataaaacccccggggggggccataactaaaaaacgattggggggcacaaacttttagttggcaacaggggaaaaatttccaaaaatcccaatgggtggatttttgaaacaaagagggtttacttttaaaggcaaacgatcttaaggattaaaaaattccggggg

SEQ ID NO: 6734 - DNA, 441 bp, Gossypium hirsutum
  Clone ID: LIB3828-010-Q1-N6-A6
ggcaccaatccattccttttttttattcgaaaagaaattatgcaaatctcaacataattaaaaagacagcattgggggggatttcaaaactgggaaaggggcccctacatatcggttttagaacataaaggagccagcaacggggggtggtccaactccaacaatagccgagagctcaagagcagccccggtggggggactaggagccctggcctgagaagggggggggctagcatctccaggggaacctggggggctgccaccgggtgcgggggcgggggccccaacagcgggggaaaccaaggcaaagggggccatggggaccaaagcaagaacaacaattgggggggccattgggtttattaaaaaggaaaagatggggggacggaaaaatgcagttgatctctaaggctggggtattaaacaatagaaaagcccccg

SEQ ID NO: 6735 - DNA, 478 bp, Gossypium hirsutum
  Clone ID: LIB3828-010-Q1-N6-A7
ataacagtccattaatatatatatacatatatatatatgtatatatatatatatttttttacaaactaaatcggtacatggcccaaaccaattacataacctagacttaaaattaaaaccaagtcacaagcctaataacttagcccaataccctaaatgacccaaagacccaaatacaggctcgataggctcagaaaattacaaccccagaatcctagggttctttttctcctgtgccgcagccttcaccagtggcccccagtgccgtacactcctcctggcgccatgcccacaccccatacgccagcacacaccctcgtacacacgccacgcacttgtacctgcaaagagatagacaaaacgacaacaacaacaatggccaatacgaaaaaagaacgaaattgtattcttttatttcttttttgaacattcggctataaagccgatgatttcatattgtaagggggttccttttttc

SEQ ID NO: 6736 - DNA, 477 bp, Gossypium hirsutum
  Clone ID: LIB3828-010-Q1-N6-A8
attaatcatcattcatgaatcgtgatcttattacagtaaagtttgtctgcaattcattcaggcaaggcaaataccaaaacatactactaataaccaaacgacgatcgagcattctaattatttacatagattttgataataaaatgaaaagaacagaaggaagcatgattgattcctcacttttcagcaacatcttgctgatagaaggattcgtaagtggcgactcttggctttgatccaggcagctcttgttcttccataaatcccatcgtcatctttatgaaactttccttgtgcacttgtttccattcctcaaaatcccaatcgccgtacaagttgggatcactagcgttgctccacacataagcgtgggcttgtaatttgtcagaactttccagcaaagagacctcaacgcgagtcctttggtactcaacgtcctcaaattcatccaaaatatgcaattcaggatccgttatt

SEQ ID NO: 6737 - DNA, 473 bp, Gossypium hirsutum
  Clone ID: LIB3828-010-Q1-N6-A9
agtaggaaacatcacccagaaaaaaagataaattgcaagaagtaaatagttctcaaaattttggtcacaacttcataaataaacaactccagctaatctttagaaaaaactactgcagcaatacatatctggatgtcttatgctaaagtttaggcagcattttgggcagcaagcctcttcctagcttcctcaatgatggataacttgatacccttacccttaggaagggacacccatggctttgttccttttccgatggtgaagacattgccgagacgagttgcaaactcatgcccagcagcatcttgaacatggattgtctcaaagctgcccttatgcttctccctattcttaattactccaactcgccctctgttcctccctccagtgaccatgacaacattcccaacatcaaacttgatgaaatcaacaattttgttgctttcaaggtctagcttgatggggtcattagc

SEQ ID NO: 6738 - DNA, 471 bp, Gossypium hirsutum
  Clone ID: LIB3828-010-Q1-N6-B1
aaccaaaaggggttttttaccaaatctaataatcttttaattaacaaattgaattatatgagaaattcagaagaaatttgaaatcctataccaaaaataaaagatgaaaaaaagtttggcttaatttattcctttctcattaagggcctcatttacacccacttcaatttcttctcccatctttaacaaaatgacccccaaactgcctttcaacacctaagctcaaaaaaggctgctttttattcggagtccgattccatattactattacccatagccttcaaacctcttggtctcttctttgagatcttcttctccctgacctcgtatcgttcaagtgttaaatcgcatagccatgcccccggacttaccaggttgagggtacgttgaataaatttcgctcgttttttgggtctctgcggcagcttagatcctttaatggccatgaaatcttcttctttctctttatta

SEQ ID NO: 6739 - DNA, 485 bp, Gossypium hirsutum
  Clone ID: LIB3828-010-Q1-N6-B10
agaagaaaacgagcacctcatcatacttgaaaattttcattccattacaattatttggtttttaagccacaagatggcaatctcagatcccaacccatatttattatggttttcatcatttggcattacaacagacaattttcaaacttggtgatcaaagttaccatgaaaatagtttttaaagacagtaaatgatcaaagggaagaagacaaagagccccagccgccaccacctggtgttaaaatctgaagtatttccccagcctgcacctctactgtgtttttgcctccaaggtagattcgtcttttatcttttgttataagatagttggctccacgagctccatttgctcctccttttagccctctaggtgcatgtactcgcctctcagaaagaatgctaaccacaactgggcgcctgaactcaatttccctcacaagtccattaccccctttgcgatgtcctgctcctccactattttctc

SEQ ID NO: 6740 - DNA, 482 bp, Gossypium hirsutum
  Clone ID: LIB3828-010-Q1-N6-B11
gctactctaataaaatcacttccatattccaaaaacaagttcagtacagaatataacatcattgccatgggttgcttcccatttttttaaattacacactgtaatcagagaatcaaatgacattcaaagcccacctccttcagatgaagaataggaccaacaccgctataacacaccttctacggctcatctaactggtcctgcacatccgaagtccagagagtaagattatcccttagtagttgcataatgagagtgctatccttgtatgactcttctcccagtgtgtcaagctcagcaatggcttcctcaaatgcctgtttagccatgctacatgccttgtctgactgattgagaatctcatagtagaacaccgagaaattcagtgctagccccaatctgatcgggtgcgtcggtgctagatccgccagtgcaatatcctgagcagccttgtaagacaacatagtatcttcggcagcggc

SEQ ID NO: 6741 - DNA, 488 bp, Gossypium hirsutum
  Clone ID: LIB3828-010-Q1-N6-B12
gtcataacaaagaaattctccattaacaaagaaagatggctacagctttgtcctctgtacagtactctattgaaaatggacctatattttgcttgtttggcaggcgagaaaatttagaataaaaaaacaacagaaaaacaaactgacaaaatgatcaaatgatggtgcccacatagccaatgcctgtaatgaagaaggtaatggcttgtagccaaaggtatatgaagtaattgttcttcccgtacataaaatcaaagcacccacataggaaaaggaacgctgaaaatcccaattccaatgtgtttaatctatcgataaattttgatctatatctcttgatcgctttgctattggtcttgtttttattagcttcagcgactttcttcgctacatctccaagcttctcggtgacgacccactcgttggctcggccggtctcgaagagaccgatgagtgtcgcttttgtccgatgcaacgacatcacgttc

SEQ ID NO: 6742 - DNA, 488 bp, Gossypium hirsutum
  Clone ID: LIB3828-010-Q1-N6-B2
attaatacaatttgaaaataattctattctgcaaagtatttgtaaggcccaaattttgcccgggcccaaaaaccaaataaaacaattacaaaacccattacccagttgcaagcccaataagcccaataaacataaaaacttagcccacaaaatattttttgctaaacaagtaaaaaaccctagccccaagcatgtggccgccgaaccatcggcctccccacgcgtgctcggccaccacgcctctgtcatctccactccgcacgcctctaagggtcatctgacacctgaaaaatgaagcagacaccaagacagaagcagacaaacgaaaatgacaaaaataaataagattttcgtaatattgtaaccggctataaagccgagaagaaacgaatgtattaagggggttttttttccgaatttaaaaaagcggttttttcgaattcaaaaaggggggaaccgattgtgaatgaggggattcttgaatattc

SEQ ID NO: 6743 - DNA, 481 bp, Gossypium hirsutum
  Clone ID: LIB3828-010-Q1-N6-B3
aatgtaaattgcgaggatgtattattcaagctaaaaatgacaaagaaaacaatcaccattggtgacagtacaacaacataattaaaaggcgtaaagaaaaaaaaaaggctcaaatgatccaatttcatcctcttcctcatcctcataatcactatcttgttatagttccatcaaaaatgtaattatctcatctatctattcaattccaacctataagtttaactacccaaattgagtagtcctcaaataatttaaattccactataagaaaaaaaaatcgtaccaatcaagctacagattccttagctccttccagcccatcctcaatcatcttcttgttcttctcaattgcagcagcaacctcttgaggcatatatttctcatcatgcttagcaagaacttcagtcgccgaaaagtaacaatcaccgctccttgctttcgacgaaacgccccttgtagaaacgtcccttttaatctcttc

SEQ ID NO: 6744 - DNA, 71 bp, Gossypium hirsutum
  Clone ID: LIB3828-010-Q1-N6-B4
aaatgaagatcactggttaaatttaaaattattaccaaaatgttctttaaaattttaatacatttttaata

SEQ ID NO: 6745 - DNA, 475 bp, Gossypium hirsutum
  Clone ID: LIB3828-010-Q1-N6-B5
aacctcacatttctaaaataataaataacaatttcaatgtaggctaattttaaaaccttcatttaattattaggcgcatttgggtaattaaaatgtgcttgaacagtaagactaaaagcatagtccatatttccaatatgcttttgtgtgtatctattgtttttcatgatagagatataaaccaagaccaaatcgagcacaggccctgcagaatgctatttcctctgctgcgccaactggatcttctatgtcaatgtcgctaagtgatactgtccctgttgactccctatgtgcttctccatcagatcctcgaatagtgagtcgatatacaacagtgatagttccattctcagagaatataacatcacgtacttctccacaccatccaggggcgtagaagctcaacatgcgattggcatggtaccaagggagaaaagtggaagaagaatcagaaggaggcttgacgatgttatca

SEQ ID NO: 6746 - DNA, 483 bp, Gossypium hirsutum
  Clone ID: LIB3828-010-Q1-N6-B6
aaaatgaaaaagaactgtttttatgtaatatgaataaatatattaattacaattgcactgaatctgttggtatggtttaagcggtggcacttagggtttttgggacagggctggaacatggagtcgggtttaatttgccactagttttaggcttgacattcaaacattgggatgttgcgggttcaggtccggtgtgcttaatatcaatgtctgcaagttccacattttgacatggcgaagaaccgctgcaaataaacttgacagcttctggaagcgcagatgtgccacggatgttcttgaagctaatgttgcttagtttaactttcgattcttcatttatcttgcatttactccatgggcaatatttttgatcaattaggataggggaagagacattattcacgataatatcctcaaaatgtacatctgatactatcccaggagattcgcctggccaagttttgattcgagctccattcgaag

SEQ ID NO: 6747 - DNA, 484 bp, Gossypium hirsutum
  Clone ID: LIB3828-010-Q1-N6-B7
aagtccagggtagatattgtattacatctaacaacaaaatgaataatatacatagatccgaaaacaaaatgagaaatgaaatagcaaaacttttattcctttttaacaaaaatttgaaatagacaaagaaacttcatccttctatcaatcaagtacaaccaatttctgatactcttcaccagaaatagcagcttccataacagcaacagggtttatatcaccatcttcatccaaaaacatctttaataaattcttcgaaaatccactaaccaaagcaacccctttttgagttgcaggcactggtgtagcccttgaatgtctcaaattccaaaacacaatttgtgggatcacatctccataccctttctctgtaaatttctttacaataacatcataatcagtctcccatggtgacattgaagcttgatcaaattccatatcactaaacacaaacaaccttttaatcatttgttctggttttaaa

SEQ ID NO: 6748 - DNA, 324 bp, Gossypium hirsutum
  Clone ID: LIB3828-010-Q1-N6-B8
agttgaataatactttattatagctttgctttttcttggtaaagactttcaaacgatgaaagagctttaactttcaaccaaggtacaaacaaggatacgataggaaaccaaaggcagatgtgcttagttcgattggaggatatgccccgtcaacaacagtccatcaaatgttttcaaggctaaaattatttaaaattcataaccaagatcgactccaactttattgatttaaaacttgggaataaatgggttgttatatacataggaataacgacaaattatgaaatagcggcggactaccaacaatttttgatgctaggtcaa

SEQ ID NO: 6749 - DNA, 484 bp, Gossypium hirsutum
  Clone ID: LIB3828-010-Q1-N6-B9
aattaaattaaattttctattaaaattttaactttaaaactaaatataaaaattaatgaatttaagtttaatacataaacattgattcaatatgtaatgtaatacatttaaatttaaaactggtgacagcaaatacagcagctgctagaaaccctacaacaagaactgctgcggcagtaattacagcagttaccattccaagctctaccatcactctgctggatatggaagatgccactggatgaggatactctggtatttttcccacccaagacgtcatgggcatctcaatttcatatcgttgtccagtgtactctcttaaaagatcactctcattcaatctcattgccctttttctgaagctcagaaattgattcaaccataagttggttcacggacgaatatcactcccatttgctcgcaatacgttctctcacatagccaaaccagtgtaaaggaacaataaccatgcctgctacttatg

SEQ ID NO: 6750 - DNA, 469 bp, Gossypium hirsutum
  Clone ID: LIB3828-010-Q1-N6-C1
gaaatgcttaggaagtgggcatttccctatactcaattaccaatttcatatttgtcaacaaattttaagagatatgttttagaataaataaaaaggaaaaaagaaattgacttggatctttccatctaacatcactccttaaacccagtaaccgaactgaactagacgattccctcaaactaaattgttgcggataacttttgattaatccgatctatggtccccacgcatagcagttccatctatgtttctgggcagtttctcataaaagattgatatttcatattttctttttatcgctgaattggtgcaaagtcaagccataccaaactcggccaaaatcttagctcccactgctgaacacctggaaaaaagggaatcttaaaggaaacagtcaaaaatattttctataaaccaaaacgtgttatgtatcttcatcaagacccatatataatttgttataatatgt

SEQ ID NO: 6751 - DNA, 452 bp, Gossypium hirsutum
  Clone ID: LIB3828-010-Q1-N6-C10
aaagagaaaagtcacatttacagccctgatgctggttttgaataatataagaaaaaagacttacagggggtcactcatatactattttttcagggcatgcaattgtaaacaacatctgccatgcatgatgatcatgatagagggtggggaatgaaaaaaaagtaaacaagatcggcgggccccaaattaaacacaaaaaacaggggaagagattggaaactcaaatgagatcggagaaaatccggtttcaaagggacagacaaatcaattaaaccctgattaggcttaataatcgggggttgggagctgctcgtgggtgttgctgatgaaaatgaactcgtaaatgaaaccagcgagcccaccaccgataaggggtccgacccaataaatccaggggttatcccatgtccagctaaccaagggtggtccaaatgaaacagctgggttcattg

SEQ ID NO: 6752 - DNA, 301 bp, Gossypium hirsutum
  unsure (1)..(301): unsure at all n locations; Clone ID: LIB3828-010-Q1-N6-C11
ataaacagttgagaattttaagacttggaaaagttaatacaattgcaaatctttgcaatacgactaaacaatttaagcaactaaatgaacccaacgagcgacacttggaaccccttggttaacagcaaaaaccatataataacctagcggagcaaccgctccatttggtggtgctgtacatttaatcctgtacctgccactatctggaactgacggcgtaacgttaattttaactaatctctgaccttgtgaaaacgaatgtgtagcaaaaggtgcgttcccgaaattgacctnngatgat

SEQ ID NO: 6753 - DNA, 506 bp, Gossypium hirsutum
  Clone ID: LIB3828-010-Q1-N6-C12
agctcaaatcagcaaaaagcgaaagttcgtcgctgacggagtcttcttcgctgaactcaatgaggtcttgactagggaactggccgaagatggatactctggtgtcgaagtcagagttactcccatgcgtactgagatcattatcagagccactcgtacccaaaatgttctgggtgagaaagggaggaggattagggaactgacctctgttgttcaaaagcgattcaagttccctgaaaacagcgtggagctttacgctgagaaggtcaataacagaggcctgtgtgccattgctcaggctgagtcccttcgctataagctcctcggaggtctcgccgtccgtagggcctgctatggtgtgcttagatttgtcatggagagcggagccaagggttgcgaggttattgttagtggaaagctaagggcacaacgtgccaaatccatgaagttcaaagacggatacatgatttcttctggtcacccagtgaacgagtacattgactctg

SEQ ID NO: 6754 - DNA, 488 bp, Gossypium hirsutum
  Clone ID: LIB3828-010-Q1-N6-C2
ataggcaaaaactttgttatattccacgtaaaacgagtatatcagtaatgacaaatgttgggcaggatagaaaaccaaatataaagaacaaaaaaaatagttaaaacttgttaaaatacaggtatgtgaaagtaaatttggtaagttctgcaactttttttacttaagcaaatgacgtgcacgttgattggcacctttcactcgagaattcagttcatcaatatcttcacccagatgatcaagagctttgttttgtctatcaagttcacttcccatatcaagagccatgccctttagatcacccaagatatcacttaaatctgaaagtccatcatcttgcttttgcttctcaagctcaactttctgtatggcgtcggttggctccggcgtaggtgtcttacttccagccttagacttaggtacaggagccacacccaacttctctctctgctcctttgtggcggctttgcctttcttgttatcatctg

SEQ ID NO: 6755 - DNA, 487 bp, Gossypium hirsutum
  Clone ID: LIB3828-010-Q1-N6-C3
caatcaactatccaaacatgttgaagacaaacgaaacaacaggaaaaccaaaacagttttgggacttttagtcagctcagacacaacgacagcaacaatcttgttattcctctagatctgagtacaattactagactatgaattagcaatttagcattgaatacgacccaatataccaatcccattcactcataccctgagaatctgaagcttggtggagaaggcgatggcaacccaatcaggctgggaagatgaccactgtaactgctcgatttcagccccagcggtgtaggcaaggatggggtcaagcccaccctccacaggctgactcatggaggacaagtcccaaatcaaggcctgggaatcatccccggcggtgcaaatgtggcaagagctgtggggtgcccatgcgatggcattgacgctagcctggtgcctctgcagctcaactacccggcagtgtcgggaagcggatatccaaaacaac

SEQ ID NO: 6756 - DNA, 486 bp, Gossypium hirsutum
  Clone ID: LIB3828-010-Q1-N6-C4
actatgcaggggaaatattactgccccattctattagttagttcacaaatctaaatggaacaataaaagttctttttttctctttaggaaaaaaggggaaaaagttaaaacagacaatgttttagttgatggagcggcgcaaagcatcaggcaggcctggtagatctatacatgttcttcccctccgatgaacatttcagaattccaagctttcttcgcatccggctctttcttgtgagttcacttttcctttggtagcccaagattgtttagtcaaccaagcacatcctatagctaaaataaaacaaagaaggaaacaagttaccctgcgtataacgaatgattctgggattcaactcatgatccatttacagccatttcaggtgatgactttgatggtagcaacggacggggatcctctccacttaattgtctattgtctgaagggctatgcaggtaatctgaacagtttctaggagattcttt

SEQ ID NO: 6757 - DNA, 493 bp, Gossypium hirsutum
  Clone ID: LIB3828-010-Q1-N6-C5
gtgggggtacagaataattatcctattggtaatgataaaacagaaggagccgaaacaaaacaactatgctccaaaacccatttttcaaacagaccctttcgttttctatctaaacctccttgaacaaatataagcagatcaaataatgtaataacttaaacctgtctcaacaaatagaacctttggtacaaataactctcttgttaacaaaattgatatcccaaatctctacaagcttaccagaatttttgaacctaataattttattaggccttgcctttccttgaagatcctggtcctctctttgcacccttcttatgaagttgctttttgggtttcaactcgtttgaggttgatgatgacctcccttcttgattctttctatttctagctttcttctcttttttcacattatacatcgtaacagccttgtcaacgttgagtatctcatgtgaatgcttagagattagcttgtttagaacattctcagttt

SEQ ID NO: 6758 - DNA, 471 bp, Gossypium hirsutum
  Clone ID: LIB3828-010-Q1-N6-C6
cttcaaatccctcaatctcattggcacttgtgttaaaaagtacaaaaaaagggcatgtttgacattggaaatcttccaaaaccaaaaggagaatttcagacaaaggactattcattttgatagtaaagtcctgaattctagatgcattattactgcaacaatcataaaaaagctgacaaagattccaacaagaagagccctatcaacaaaaccccagccgcccggggcccaatcctgctcattctctagccccaaggcaatgtcattctccaactttttttgcgcatggttccttcgcttccttataaaccagtgaataggatttttgctggctcgattttccattggactatcattcttggaaaccgtgcatttatccaatttaatctgtcccccgcagatgtctggtccacaagagcaaggttctggctcctttgaacatgcacaacactcgtactggttggagcaagg

SEQ ID NO: 6759 - DNA, 463 bp, Gossypium hirsutum
  Clone ID: LIB3828-010-Q1-N6-C7
ggtccaaaacattttatttcattaaatccatttggaactcaagcttttctcaccctctctctctccccatattatgtatttataccagaattggatacagatttataagcttatttaaattaactgctgaaaggtggaggccttggcatgccttgcacgatgccgcaagtcaatacaccttccggtaagttgtactcatccttgagggatcggttaggggaaataacactagcataaagctgttgcccaaggtaatgcctgtcccatatctccgacctcaggttccacatcccgcagttgtcgaatgtcaataggattgctgaccaggagttggggaatacctgtatggtctgtctgctcacggcgtcaagaagattgtagttcatcctcttctcggggctccatttcccaacgtccatgcccacagcaaagaatgagtagccagacaagtggtaggattgaa

SEQ ID NO: 6760 - DNA, 485 bp, Gossypium hirsutum
  Clone ID: LIB3828-010-Q1-N6-C8
ataatatgtggggaaaacagatttcattggaaaaaggaaagcagagaaagcaatttcaccctttgtttgccattcattgatgaacataaaaatggcttagcaccaataatcacacacacaccatattctgattctctcatgatttagcaccaatcctaaaatgacaaggaggaaatgcatatttgttcaaaatgtttgcttcagcaacaaacccacaatccattattcaactgttcagagttccagaagtaaaatgaaacacatggggagacaagtgacaacaagaaccgtacaattgctcatacagatctacctatgattctccaccaagctccactcgcaggttgtcatatggatatactttaggtgcaaatggaatcttagaggctttatcattccaccaagctaagaatcccaacgatgcaaagaagctcaaaccaccacacatccaagccaatgcctcatactttccgacagtatcagcg

SEQ ID NO: 6761 - DNA, 417 bp, Gossypium hirsutum
  Clone ID: LIB3828-010-Q1-N6-C9
aagagaattaatttagaagttcattcatatgcaacaaaagaaaattatagatatattcaataataataaatttcctcgtaggaaatatgttgttgatattctattctctcaactctcacccacacacataacaagaggaacaagggtaatcttttaagtataatgaaatattaatagattgctcatttaacaaggcttagtgcagacgcatttgcgaaggaaacctttgcaatctccattaggaaaaccctctgtcttgcaaacaatatcacaattgtcatcacgtaagcacaaccccttgaatgcattgcttggggactcgcatatcttatcaccatccgctaccacaggtcccatctctgttgttagaagaactaacataagaagaaccacgattgaaattgaacgagagaatcg

SEQ ID NO: 6762 - DNA, 467 bp, Gossypium hirsutum
  Clone ID: LIB3828-010-Q1-N6-D1
acaaaggaaaaattatttactaattcagaaagtatacaatatcaaaattaatgtttttcaataatatgcagaccaaaatcaaccaatttttttttatatatataaatatactcaatgactcaagtttgacttccgcaagaccacaaagtagatactacaacgtaacatgcttttattttccgatctaaaaatggaccaaaaatcagatatgtcaaatcttaaccattgaacctttagctggataagtctccggggccattgatctccttgttttcgattacaattccgtccggaatctccaacttttctcctggttttgcagcaattttcacttttcccttgagaaccataccagcaccaaaccaaacatcaccagtcacggtaaggctatcaagattaatgatgcttgggattgtcttgaaccgacttaagaagttgctaaccttcttgaattcaggccccaattc

SEQ ID NO: 6763 - DNA, 96 bp, Gossypium hirsutum
  Clone ID: LIB3828-010-Q1-N6-D10
ccctccctaaacctggatatctccctgagagaggcgccctttttttttttttttttataaaaaaaaaagagtccataatgatatgacaaatcaaaa

SEQ ID NO: 6764 - DNA, 418 bp, Gossypium hirsutum
  Clone ID: LIB3828-010-Q1-N6-D11
gagcaaaaaaaaaaaaaacaaaaaaaaaaaaaaggacaaggcaaaaaaaaaaaaaaaaaaaaaaccaaaaagaaaaaggaaaaaaaaaaaccccaaaaaaaaaaaaaaaaaaccccaaaaaaaaaaaaaaaaaaaaaaaaaaaaaaaaaaaaaaaaaacaaaaacaaaaaacaaaaaaaacaaaaaaagggaagggggaagagaaggaaaaagccaccaccaagaaaaggccccccgggcccgggagaaaccaaaaccctccagtgggggaaggggaagggggcggggcgggaaaggggacggggggggggggaaaaaaaccaaaaacaaaaaaaacaaaaaaaaaaaaacaacagggaacgggggccacggcccggaagttgccgttggaaaaaaaaaagaatttgaaaagaaaaag

SEQ ID NO: 6765 - DNA, 488 bp, Gossypium hirsutum
  Clone ID: LIB3828-010-Q1-N6-D12
aagtaaaagacaaaaaggtaaatgaaaatgcatttattagatttacacaagatatcggattggcactcctaaaataagttagcaatttatgctttgatagcagatatggtctattggtaaatcattgcaaagataacacaaacaatgataaacagaaacagcatcttcagataatgatcctgctggccttgtgcggtgcgatgatgatggtggtggtggtgatgatggtatccataagcatggccaccaagatatgaacttggaaagccgtatggaaaaccagcagctggaccaaacatagccgcatcaggaaatccatggacctgaaggttaaacaaggatgggataagaccaccaaaagcagcagagagtgtgaaattcccaaatcgagcagttgccattggtgcaaaacctcccaagcctcccatgaacccgaacccattttggggaaactgaataggtggtggtggaggagccgtttcaggtct

SEQ ID NO: 6766 - DNA, 484 bp, Gossypium hirsutum
  Clone ID: LIB3828-010-Q1-N6-D2
gagtataaacatatggtccaaaacattttatttcattaaatacatttggaactcaagcttttctcaccctctctctcctcatataccataattggatacagatttataagcttaattaaattaactgctgaaaggtggaggccttggcatgccttgcacgatgccgcaagtcaatacaccttccggcaagttgtactcatccttgagggatcggttaggggaaataacactagcataaagctgttgcccaaggtaatgcctgtcccatatctccgacctcaggttccacatcccgcagttgtcgaatgtcaataggattgctgaccaggagttggggaatacctgtatggtgtgtctgctcacggcgtcaagaagattgtagttcatcctcttctcggggctccatttcccaacgtccatgcccacagcaaagaatgagtagccagacaagtggtaagactgaatggcgctctcgtgattctcg

SEQ ID NO: 6767 - DNA, 315 bp, Gossypium hirsutum
  Clone ID: LIB3828-010-Q1-N6-D3
gctcccaccattggcctccccacgcatgctcagccacctcacgcgccaaccactgttcacccacgcctctgacacctgaatctccacggacgtgtcgtcggaaagctttctccgtcgttgcaatcgggttcgaaaggggggtgagggttctcttcttttgtttcttataggacgctgaaggtttggccttcaaaggggctttgaaatggggttggaatgcccatttttgcgcgtagccggccaccgaatgcagtggtggtgcggcgggcagcgagagaacccgatcatcagaagaagatgagagggagagagagt

SEQ ID NO: 6768 - DNA, 425 bp, Gossypium hirsutum
  Clone ID: LIB3828-010-Q1-N6-D4
aaaaaggaaacccatgttatccgggttctttattattatttagtatacttatttgacatgagtgaggacatcaaatttaaaaacccttttttaaaggaaaaatgaacatgccttgatgcatgtttatatcctacagccacccccgactttagctaacatatagctggagactacaaaatgtaccagtttcataaaaatgtacatccaattgattccaaagggcttttggcatttcaagaataggttcaacattcagtttggggtttatgccttgtcatgccccataaaaaatgtcttcaaatgttggaaattacctgaacaacttaatgtaagtgtctacttgcacaaagctggttcctgaagcttcaagtcaaaatttacggcaacagcatcaatgaattcttccgtgttcaaataaaactctt

SEQ ID NO: 6769 - DNA, 156 bp, Gossypium hirsutum
  Clone ID: LIB3828-010-Q1-N6-D5
gggaaaggattgttttatatatacgtgcaataattacataatttataagaggccctcgcaatcaaattaatttatgggaggttatcaaccatatattcattacattgaattcatattcatggccacttttcattgaataaggggaaggcttgcgcc

SEQ ID NO: 6770 - DNA, 410 bp, Gossypium hirsutum
  Clone ID: LIB3828-010-Q1-N6-D6
attgattaaaattttttattaaaatattttagtggttttaggaaagataagaaaaggggggaaaaaggaaagaaaagaaaaaaaagaaaaaaaagaaggagaaaaaaaaaaaaaaaaaaaaaaaaaaaaaaaacaaaaaaaaggaaaaaaagggagggaaaaaacaaggaaaaaagaacaaaaaaaaaaacgcaagaaaaaaagaagaaaggggaggggaaaaaaacgggaaaaaagggggggacaaaaaccaggagatagaagctttaccggaagggaagaaaaaaaaaaacgagccaaaaaggagcaaaaaaaaagaaaaaagattgaaaagggggggaaaggaaccaaatagtaaaaaacggaaaatcttggaaggaaaggaagaaccaaaaaaaaggggggaaaaa

SEQ ID NO: 6771 - DNA, 444 bp, Gossypium hirsutum
  Clone ID: LIB3828-010-Q1-N6-D7
ggagaaaggaatcaaaactttattcaggatcccagttaacaggatagaccaaagcaaaacaagcatttcaatatcaaaatgacaaacgagacttggaaactgattaatttcttggtctcatattatagaaactattccactagccatagaatgcgaaaacaggggagggggacaaaacagaagcgtattagagcatgatatttcactaattttccttccacccacaactcaaaacattaaaataactaaaaagacaacaccctaacaaagttgacaacattgactgcaacaaatatctaaatcaaaaactaaaattactgggacacacccaaccacttagagaagttctcaaactctgtgtaatcactgtcggagatcatagtctgataccatgctttgcctgctgacttgattgctgttgcctcctccttagaaatgggcttc

SEQ ID NO: 6772 - DNA, 502 bp, Gossypium hirsutum
  Clone ID: LIB3828-010-Q1-N6-D8
aaaatcaaaaatttataaatgaacccttatactttttgaagctcatacctagttccattataccaccactttatgttgctacaaaacctaagagcatgctgattcactaaccctaaaaatgaaggaattgcagaacatacaacaagctttaaagccctccatactaaggctacacttatgatgcacaaactgaagaatggctcactattatcgcctccatactatttattatgactagcaaaacagactctgctaacgccaggggcaaaagctatccaaccggccacgacgagatacatcgtacaacttaaccctatctctgacggtgttcgagccaccaaccaccttagttacaatatcagataaatggccatgcccccatcagttagaaaccaagtcggctttcttgtgtatacatcactgaggctgagctcgactgccctgtgcaccgtcgtacccaccaccatacccagcttgttcaccataaagaccatgtgcctga

SEQ ID NO: 6773 - DNA, 490 bp, Gossypium hirsutum
  Clone ID: LIB3828-010-Q1-N6-D9
cagttaaaaagatatattaaatttcttttaaacttttttctgcatattcggatggtcatatctatttatgtatctaatgactaacaaatacaaatataaacttaaatacttcaaaaagaaagtcagactacatactgcaatttatacttgggaggatcctttctttcctattccccacccacctagcataggacaatgaagatcattcaaacacctaacaagttacaccacgctacgcgttgccttctctcatccgtacaaactggatgaaaaataaatttttttaaaagaatggagcaaaattttttgtattagaaaccaaaaggtgacttccttctgctaccaccttctccatactgctcgttccatttcctcagctcattcatgcttgcagcatcataagcaacggatgaacccaccttggcttttgattgaataaagtcatccaaattaagaggccttagtacaccagctgcatcatttttgccac

SEQ ID NO: 6774 - DNA, 478 bp, Gossypium hirsutum
  unsure (1)..(478): unsure at all n locations; Clone ID: LIB3828-010-Q1-N6-E1
ttttttttttttttttttttttttttttttttttttttttttttttttttttttttttaattttttaaaaaaaaaaaaaaaaaaaaaaaaaaaaaaaaaaaaaaaaaaaaaaaaaaaaaaaaaaaaaaaaaaaaaaaaaaaaaaaaaaaaaaaaaaaaaaaaaaaaaaaaaaaaaaaaaaaaaaaaaaaaaaaaaaaaaaaaaaaaaaaaaaaaaaaaaaaaaaaaaaaaaaaaaaaaaaaaaaaaaaaaggaaaaaataggaaaagaaaaaaaggaaaataaaaaaaaaaaaaaaaaagaaaaaggaaaaaaaaaaaaaaaaaaaaaaaagaaaaaaaaaaaaaatgnaaaaaaagaaaaaagaaaaggaggggaaaaatgaaaaaaaaaaaaagaataaaaagaaaaaaaaaaggggtggttaaggtaagaaaaaaaaaaaaaaaagaaaaaaagaagaaaaaaaaaggttggttg

SEQ ID NO: 6775 - DNA, 472 bp, Gossypium hirsutum
  unsure (1)..(472): unsure at all n locations; Clone ID: LIB3828-010-Q1-N6-E10
tttttttttttttttttttttttttttttttttttttttttttttttttttttttttttttttttttttttttttttttttttttttgggaaaaggggggtcattttttaaaaaacccaaattttttaattacagcaaaaaaaatatttggttatccccccaaaatttttttttttattattctaaaaaaaagtatttttaaaccccaaaaaggggttggggttttcccccaaagaaaaaaataccacccccggaagagcccaaagggggcccggaaaaaaaccaaaaacccttaggggggacaagaaaaccccctctccgaaaaagaaaaaaagaagtttggggcggaaacccctttaaacttagggccgggaggggaaataggggggtggaagggaaagacccctcccttggcaaaacnananaggnaaaaaaagaaagaacgtcgcgaagaagaaagggggannncaag

SEQ ID NO: 6776 - DNA, 435 bp, Gossypium hirsutum
  Clone ID: LIB3828-010-Q1-N6-E11
aaaaaaaggtatttccattaccccaattaataaaatttagacaaaagaagcaaccaacaacaccaccccagctcctagccaagccgggtttagccgggtcatccttaaaacctttagcctattacgggccggttatatgggtcattttttggctctctatttactttatctccctaaaaaggtctggtatttacatttggcatttttatttttggggatctcatctttcatcctgcacaggtaatttttccctcacatgacaaaacaggggttcggattttcgtcactgaacatttgaggggcgtgaaggggatgacgtggatcaatcatgtacccttgattcacatatacaggatgcgggtgcatataccctcgatccacgtatccggactggtggtgattcctatatccctcaatcgcataactcggaccacc

SEQ ID NO: 6777 - DNA, 402 bp, Gossypium hirsutum
  Clone ID: LIB3828-010-Q1-N6-E12
gaaaggaaaaaaaaaacaccttttttatgactaatataactaaggggaacaaaatttgaagatggggggaaaatgatgtaaagatattatgcaaatttaaggcctatgtaagcagcacataaagccaacacagaggaaacagcttatgccccagcaacaatcattggcttttggagtccacatagttctaaatgatgatgcaaaggggcccttaaacaaccgactcccgcttccatgatactgtttagttgctttaaagtataccacctgcataacaactgatgatgcttccaaaacaaacaaaccagatgcaatgaataagggaaagaacattccagtacaagcggccattgcagctaatgccccaccgagggccgatgatccagtatcacccataattac

SEQ ID NO: 6778 - DNA, 489 bp, Gossypium hirsutum
  Clone ID: LIB3828-010-Q1-N6-E2
gccattaacaacataatatacctttcatcatatgatacaaggcaaatcaaccatccttacaggcagaaacataaagctttgtccaccatactcgctctttagagaaacaggaaacatcaacatctaagttatcatacttcttagttcaatctaacgtctcaccttatttacctaatgtagctctttttatttaacatagtagttattcgaggctttcggggaaagttctagccatgttgcaacactcaatgaaggccaataaacaagctcttgcacaataaaatatgtaagatgatcaagtggagcttagaagaacaaacagtggtttccctcctaaccgttcccgtccctttagctcgggtaattcaataacacaagcacactccacaacgtgcacccctacgcattcgagtagcctgattgcagcagacaaggttccaccagtggcaacaagatcatctattatcaaagcacgttctcctgctttga

SEQ ID NO: 6779 - DNA, 464 bp, Gossypium hirsutum
  Clone ID: LIB3828-010-Q1-N6-E3
tttttttttttttttttttttttttttttttttttttttttttttttttttttttttttttttttttttttttttttttttttttttttttttttttttttttggggggggggggaaaaaaaaaaaaaaaaaaaaaaaaaaaaaaaaaaaaaaaaaaaaaaaaaaaaagggggaagaagggaaaaaaaaaaaaaaaaaaaaaaaaaaaaaaaaaaaaaaaaaaaaaaaaaaaaaaaaaattttatttttttaaaaaaaaaaagagtttggaaatcaaaaaaaaaaaaaggaaaaagggggtttaaaagggaaaaaggggaaaggggggggtaaaaggggaaggggggaaaagaaaaaaaaaacaaaaaaaaaaaaatggggaaaaaaaaaaaagggggggggggggaaaaagggaaaagggggaccggggggggaaggggtaaaagtttttttggggggggggc

SEQ ID NO: 6780 - DNA, 261 bp, Gossypium hirsutum
  Clone ID: LIB3828-010-Q1-N6-E4
cctatatcaaactttattttatcatttatttattttaaatgaatgaaccgccccacctaacttggaaaaataaattttttttttaaaaccaaaccctactttgtaacaggacactgggaattattacttgaaaacttgatggtatgaagggcctatcctattcattaaaacccatgctgcttccaccatgaaatacaacagtaacacaaaaaaaaaactttttaataatttcagattggactaatggaaaaaatcataaat

SEQ ID NO: 6781 - DNA, 382 bp, Gossypium hirsutum
  Clone ID: LIB3828-010-Q1-N6-E5
ggggccaaaaaaaaaccatgttttatccctaccccgggccccaaaaggggggccccggggaaaaaaaaagggcccggggaaagggttttccccccaaaaaaaaacccggggccatttcccccaaaaaagccccccgggttccggggggggccaaccaaacccccctccaaccagggggttttccccccccccccaaaaagggcccccggaagggggccccccccccccctttccccccccaaaaaattgggtcccccgcccccctttgtttcctaaaggaggggtgggccccggggccccccggtaccaagttctaaaccgggggggggggggcccccagggggggccccccggggggtgggccccccccccaaaaaccccc

SEQ ID NO: 6782 - DNA, 481 bp, Gossypium hirsutum
  Clone ID: LIB3828-010-Q1-N6-E6
gaaattaaatcaggaataatctttattgccataccccaaaagaataacaagcaaactacagaaaagattcctaaatcaacactatagaaaagcagtggaagatgtaccacggccgccaagcccatggtgcaacaaattgtgagcgatgtgatctctagcttgtgcggaagccatggaccttatattattatcagggatgacctcatcgtcgaaaagctcgaatttaagctccggatccatcacctcgtttctcatctcacagatattatgcaaaacgcagcaagctccaagcacgatcggcaactcttgaagcttaacctcggttctcttttgtaaacacgaccaccgccctttcagcctcgcgaatgcctccttggccaccttttcaatctccccgattttctcattgaaagcatgttgagcccaagtgaggttttggtggctgtaaggaaccaaaacccagtccattaatgggtaccct

SEQ ID NO: 6783 - DNA, 491 bp, Gossypium hirsutum
  Clone ID: LIB3828-010-Q1-N6-E7
gaacaccaatttatttagtttaatttaattaagtatgcaacatacacaaatcttcaagcttccatggagttgtggggtttttctcaattcaagtggtgagaggttcttctttggtatcatattggatgttgtagtaattagcaccagtgaaagtgttaccagtgacatcagttgtgacaacggtcccattataaagagtgtctttttgagtgaatacgaagggaacatcacacgtgccatgcgtcatcgatagatacaccgtcaccttagtcatcggtggcacatgagcttggtggttaacttccatcacggtggtcgttgtctttgtctctccccactcgattcctgcttcgagtttggcagatatttcgacacccgctttaccgattaatggaacccctacttcgaaggttgctttggtttcaaggcctaacgtaaaatgagctagccaagtactggtactggtctctgtataagaaagtttcacatcg

SEQ ID NO: 6784 - DNA, 487 bp, Gossypium hirsutum
  Clone ID: LIB3828-010-Q1-N6-E8
gtccctggaaggagctgatacctttgctgcatcagtaaattaatatataatatataaaaatattatagaaatgtataatataatttagaaattaagcctggattattgatttcaactcaacttttccatggtgcttcttggatttcttccctttcttcttccctttcccacggtgcttcttcccttttccatggtgcttctttttcttgtgtttatgtttcttcagctttatctcccctttgtgtgcggctttactagcggaaagatttggggagatagggatcaccccattattttcaggtttactagccgaaagatctggggagatagggatcaccccattattttcaggtttactagcggaaagatctggggagataggcatcaccccattattttcaggtttactagcggaaagatctggggagatagggatcaacccactgttttcgggtttactagcgggaacatctggggaggtagggat

SEQ ID NO: 6785 - DNA, 467 bp, Gossypium hirsutum
  Clone ID: LIB3828-010-Q1-N6-E9
gtaataaaaggaggtttatacagtgcatatgctatttaacaagtgaataacacagccttaagtttatatccccctatagcgaaacaaaggagaaatcaagtagcacaagttcataatactggtaaagagagaacagcagcgacgaaagacagttaatatcagcacttagctatatccgacttgttgctgttgctgcggctgttgataatttccgtacccaggataccctccatagtacatgttggggtcttgtggggcagcgccatagccgtaaccatatccttggctgtatccataatatccagcgttccactggtttggatctgcttgggcctgcttgtttgatgtgctacgaccccatgaaagccgaatactttgtccacccaactgagtcccgttcaatattcggagagattcttcggcacaactcctatcagcaaattgaacaaatccacaacgcttgtttt

SEQ ID NO: 6786 - DNA, 478 bp, Gossypium hirsutum
  Clone ID: LIB3828-010-Q1-N6-F10
cgattggaattatgtgatataccatccaaaaaaaatgaaaatagtaacatcccatggcaattatccgattcattgtaagaaaattgaaaaaagaacatagtctaaggaaaaactaaattgacaaatgggagagaaagcacccccatacccttcatttgattctttagcttacagcttgtcttcgtactcggaaagcggggtcatttgctccttcaatcccttcctcttgcggatctccgcaacatgaattgctgcctgagaattgggttctaatggatccgatggcatcatatcccagtgatcgaacacacattgtgggaaagcctgtcctgatgttgcagcccttagtgtgctggagaatccgaatgactcgatgactggaaggtaagcttttatgttgtagagtggtgttccaggcctctgcatttcctcgaagacgtgtccacgtttctggttaagaacactgtaaataccacca

SEQ ID NO: 6787 - DNA, 479 bp, Gossypium hirsutum
  Clone ID: LIB3828-010-Q1-N6-F11
aaccttaatttttttgtctaaaatgatgatataacatgtctgtgtaaatgacaattaatgactcaatgatcaaaatacaaaaaagtaataacattagcgatcataccataatttttttttaaattcgatgatcaaaacgtaatccaaaattatcaaaacattgtaaacattgaagtccatttgccaatagaaaaagagaacctctaatcttctgaagtcattggtggcactttccaaagccttgctgatcacatatcagaattgaaatgatgattcgacatctaatttcttagctctttgaagcttgcttttccttggacttctggatcttcagaaccttcttcacaattttctgctcttccaccaagaaggctcgaattatcctctctctaacagcactgcaggacaaaacaccaccataagcacgattcacagtccggcggttccttggcaatctagaccttttgtattcagcaggt

SEQ ID NO: 6788 - DNA, 482 bp, Gossypium hirsutum
  Clone ID: LIB3828-010-Q1-N6-F12
actatgaaaatgtatttcaatgtataaactataaattttctgtacacaactctctgaatcaaacaagttatagaaataaatggagcaaaagaaagggcatgaaatgaaggggaataaaaagccccactgctccaatatggtattgcaaaacttgcctcatttcaagcatatacagttttaagccttcggattttgttcccagaaagaatggttgacagagactgcaatccaccatcttctcatactccataatctatctctgttacattctgggccgttgagagctttacaggcctttcttcttcatcatatatatcaaggttttcacaaggcgcggggaagatggtccctattacacgcccttgaacaaacgcgcactggaatatatgctttttcttatatgttatccccacgttcatatccctgaacgtcacgtttctgacaggaatctcctcgctaccatgtatacgaacaggtacacg

SEQ ID NO: 6789 - DNA, 203 bp, Gossypium hirsutum
  Clone ID: LIB3828-010-Q1-N6-F3
cccgaagaaacataaaatcaaacaacataaaatattatgagtttatgattacatatgtctgctagtttcctttgcttcttcctcctcctgttgatcttctttctgcttagttctcacatacatatctatatatataaactgtcccttacatttagctatgatcaaacagtgggtgcctcagttctcacttcgtaaacaatggg

SEQ ID NO: 6790 - DNA, 492 bp, Gossypium hirsutum
  Clone ID: LIB3828-010-Q1-N6-F4
aaacagaaatagaaccttctcatataccaattacagctttgtatcatgatgttacctccctattcaattcaaaatttaatatacaggcgacattatcaaaaaaaaagaaggaaaaattggcaaaatcccacctaatctagttgacctcttcaattcctatagagtttcttatgagaataataagcgttccaaagaacaacaacactatcagaaatggaggggggaaaagggcaaaacaagtcagcaacaaacatattttcccctccagacattaatatgtctgagacgcctttaatatatacattcaaagagtaagccagagtttcggtgttttaccttccaaaaaagttcctcaaatggatttttagagattgctgtcctcttaagatttttaagagttcagtaattagttttccaattttcctgtgcgagttgaggctgctgataagtgccaggtggtggacctacagatccgacagctgcagctgtgga

SEQ ID NO: 6791 - DNA, 484 bp, Gossypium hirsutum
  Clone ID: LIB3828-010-Q1-N6-F5
aaacaaataataaatatcaataaataaaataaatttcgtattattcttacaaaaatgttaaaagttaaaatgataattaaaagttaaaatcgaagtatatttacacgatagtctaagacggcggctgttgcgactgctgaaacatcttcatcatgctctgaagctgttgttggagttcatcgaacttttgacgctgctctacttccctcgctgcagcctctgcttccctcgctttagcctctgcttccctcactacagcctgtacttctctagctgccgcctctgcttctcttactgccgcatctactttaagctgctgctggagttcttcatactttcgttgaacctcagcttctctcgctgctgcatctgcttttagttgtagctggagttcttcatatcttttttgaacctcaacttctctcgatgttgcctccgctttaagttgtgtaatttgctcaattgttgtcgcttgcatctgagc

SEQ ID NO: 6792 - DNA, 475 bp, Gossypium hirsutum
  Clone ID: LIB3828-010-Q1-N6-F6
gctaaacaccataaaatcatttataaacaaataaatgtcatatacaacaatatcaccaatcatcgtattatcagaatatatcatatcctagaattaatgcacatgtacatgaattttaatgtagttttcctacccatccatccactacacaccatatccaaccatacacaccatatcagaaggagtcgtagctcattgtggttaaaccatcgataaaagaaaataattgaagttatactgctaatcagattgtgtggataaaccaccagaatagtgttgtggacaaaccaccagaacaatatgcgagcaaatcgtgaaaacaccaaaattgcagatttaccgccataactctacagatctcctctatcttcgatcaactcaatctcgatgcaatgcataatgtcatttttatcaaaatagcataatcaaatacagtgcagtacaaaagtaagtcatatcatgctgtcaataattc

SEQ ID NO: 6793 - DNA, 441 bp, Gossypium hirsutum
  Clone ID: LIB3828-010-Q1-N6-F7
ggaaacaagaatcctcaaatttttgaacttaaataaagctccaaccccagagttaagatataaaattaaaaactaagcgccataattggcaacaaaaggactcaacgggttgggagccaacacatacccgaacattataccaaaggggggaacataacggagtcagcagcagctcaactttaagttggctccctcaaccttttaaaagtactcctcaccggcacagggctggcagggttcaaagtataagcccccccagttttaactttcccgcaatccttgcagccccaaattcctacagccttttttttcactggatactttccacaaaactcgaaaaagtacttggtggggggactcacccccatctttttaattggcttcctaaaacgggcaccataacgggtaccatatttgccaacaattccggccttttttgtt

SEQ ID NO: 6794 - DNA, 455 bp, Gossypium hirsutum
  Clone ID: LIB3828-010-Q1-N6-F8
aaaaggaataactgccaccattttattaccagcttatgccgacacctaaaacattgttacttacagcaaaggattgtttggtttttcctatattaaaaatattttgatatctatttctatgcattaatacaaaggagaacagcattaaaaacagaacaagacaacaaaactcataggatactgtctgaatatatctcacacctgtctttttaagcaaaaaagactaacaaacatggttggcagcctcctacaactattatgcacaggattgtcgatacagttattatattgacttaccagccatagataggattttccacttgtgggggtaaaaaatgaaggtctttacaatgttgcttgtcgtaatcccgtgtaccaggtattgccccggtgcaaagtctaagcaactcgtttcctgtaagacagtagtgggcaaatgctaaacccccatcaac

SEQ ID NO: 6795 - DNA, 472 bp, Gossypium hirsutum
  Clone ID: LIB3828-010-Q1-N6-F9
agcagaaatttatatagcaaagaaaatcatatatattagcatgtacatgcattaattacatatggctacaaaacaagattcaaggaactttaggatattgtaaatcaaatattgttttgagctatttattcttcataattactctttttatccaacaggattttatagcaagcccttctgcaacatcattacttcttattttgtataattaatacgacgacaaccaactcttcctcattatttcatcttaatatgggatcatctccctactttggtggactgggttcactgtccataacctcttctatccctttgctctttacagtttcagcctggcaacatcctgatgcgcacctgggctgaccacactcagcacaagtcccaccgcaaccctgacggcaacactccccactctcacatcccgactgtcctggcattagtgggatttgtgggacttgtgggatctgtggga

SEQ ID NO: 6796 - DNA, 195 bp, Gossypium hirsutum
  Clone ID: LIB3828-010-Q1-N6-G1
gggggggattacggactggggattcaaaaaaaaaaaaaaactttgtaaaaaaagggggtgatttaatacaaataaaaaaaaggggggggttttggaaacgaagaagccggaaaccaaccctcaaaaaaaaaaaggaacacggggaaaaaggggacgggaaaaaaaaccgggggaaaacggaacccccggaggggg

SEQ ID NO: 6797 - DNA, 422 bp, Gossypium hirsutum
  Clone ID: LIB3828-010-Q1-N6-G10
ggaaggggacccaaagatcttctatatttggggcaacgtatgtcaaatgggaaaattctttatcgcaaatttttaaagccttcaacccaacttgaaaagacaaactgatagttgattttggtttttgaagaagtaaaaaattccgggggattccattaaaaaaatctggggcaaaacccaaaagggaaccctttatttatctattccaggcccccaaaattcagggggaaaagctttaaaagagccccgcccacaaaaaagtggggggaaaccacacaaatttcacaaagcttaattatatccccgatcttaacagctaagggtgaaaaaccggttccttttaccccatcttggcaaactctagggggttttgcagcatgaaacaaacaaacaatcttgggggacccgtgggtccacccgga

SEQ ID NO: 6798 - DNA, 486 bp, Gossypium hirsutum
  Clone ID: LIB3828-010-Q1-N6-G11
aacagagcaaagtaaaaccaggcgttccattctatttctactaacaatttatagttgtttaaaacatcacaagcttcatatcacaattcaggtaatatatatatgtattttacatgtctccctctcagccaaaaattgacaaaaacagaaaaagggcctacttcctagcaaatatttttaccttctcaaatgtaacctatgaccttttaaggtagaacagcatcaaatgtaacctatcacctttctaagtagaacagcatcctctcttagtgtttcctgatgtatcagtgacattaatggtagttccttggccaggaattgcggtactagcagctgcttcctgggctgccaatgcctttttgcttatgatatggtagatctcagtcaatatagttcggaatgccttctcaatgttggttgcttccagtgctgatgtctcaagaaatgaaagaccttccctctcagccagagcttgaccatcctcct

SEQ ID NO: 6799 - DNA, 488 bp, Gossypium hirsutum
  Clone ID: LIB3828-010-Q1-N6-G12
aaagataattcatgctatttaacacaataaaaagtaacccaaattctctccaaggatgatatacgagtagtttgaaccaatgtcatgaaaaccagaccgaaagtctaactgaacaagccttcagtttctggttcaaccagttcaatcaaccggatccgattattgcaatggttttaactctcattacagcgtctctatagccataactaaaaccaagagactaagcaaagccaggtctgcaacaacaatgagcctaaatatgcttttattcatccatttggctatatatatatagggtggatatatgttaaaaacactgaaatcatgattagtagttcctagactgctgaggatcgtgatgagctagatccaactgattgccagagcttgacccagtccagcatagctttagcagcacgagcaaacacagggtccatcgatcctagccgctctttaacagcgtttgccacctcaattatgcattcctc

SEQ ID NO: 6800 - DNA, 486 bp, Gossypium hirsutum
  Clone ID: LIB3828-010-Q1-N6-G2
agaaacttactgaacacttaactgcacatcactctatcgtaggtcatctaagaccaagcatctgccagaaacatccctgccaattatttgcggtgcaaatgaaatcgaaccgactcaacttggagtatagcacttcattggtataacaaatatttaacatcaaatgaaattgagtagcagcagtcaagaactcttcagttactgtgctggtgccatttggatttgtttagccagcgatcagcaccagacaaaaatcttagcaagaggttctctttcgtattgtattctctcagtcaagcagcaaaattggacagcaatcgaatttatgtcaattaactacgcagagcttgcagttaccttcttcctcacaatcctctttctccgggcctttggagctctcgtttcttcattggcagcagattcagcatttccttgtctgatgccaagaagtccaagaccagaaacaatggcagtctttgatataaa

SEQ ID NO: 6801 - DNA, 486 bp, Gossypium hirsutum
  Clone ID: LIB3828-010-Q1-N6-G3
agagctaaaatatttcaattttttagaagtaatgcaagtgcttgagtttgaacttgacagtataattaaatttgagtacataaaccaacccttggctacacttacagtattttattgcctcacatatccgtcgtttaatttctatacgagcaaaattcatccgtgaaccatcaaaacatcattccgctcttccagcagtcttggatctatattcaaccctcatttgtttgaatacaattccgactcttcattttcttgaaattcatgtgtaccaaattcgtgtcagacacgtacttatatcccgatactcatgttcaacaaataaacaaatccaccttaaaaaggccgccttcatcgatggtgactacagcatttccagtgatggcggtaacgtcaaattggaggattttttttctttaatgaataaacaattatggaaatgcgaaaaaaatgaatacttgaacaagaacaaatgatcgaagaaac

SEQ ID NO: 6802 - DNA, 485 bp, Gossypium hirsutum
  Clone ID: LIB3828-010-Q1-N6-G4
ttttttttttttttttttttttttttttttttttttttttttttttttttttttttttttttttttttttttttttttttttttttttttttttttttttttttttttttttttttttttttttttttttttttttttttaaaaaaaaaaaaaattggggtttttttttttttttttttaaaaaaaaaaaaaaaaaaaaaaaaaaaggggaaaaaaaaattttgggggggggaaaagggcccgggattcccaaaacccccaagggaaaaaaggggagggcccgcaaaaaaaaaaaaaagaaaaagggggggggggggaaaaaagggggaaaaaaaagggggggggcccaaaaaaagggggtaaaaaaccaaaaaaaaaaaaagccccgggtccccaaaagggttttgggaaaaaacaaaaacccgggggggaaaaaaaaaattccccccctggggaaggggggggaaaaaaaaaaaggggggggg

SEQ ID NO: 6803 - DNA, 489 bp, Gossypium hirsutum
  Clone ID: LIB3828-010-Q1-N6-G5
tttttttggatcattaacttatatctaaagggtgtaaattcagttgtcacaaaagggaataattaatttttgaaacaataatttcaaagggagttcaagacttcaagagggtgtcctcaaatatatatatgcatgcatgcatatattactgtctctttggtcctcttctacaggcagttactcccagaaactgcagttctaatttatacatagccaagaatatatgcaactaaggtcaaacacttataccataactgcagaatcatttgaaaaaggattttctattgggaaatgattggcatcaattattcgaacaggatgatgattcagggcatgggatcaaattttccaagagattaggactgaaatgattcaaggactggttcctggtattatctatgccattgcttcaacagttcaggtaagcaccaaggagcaaagtagccggagtaaactataacatggaaaaaagtattcctcctcctcaac

SEQ ID NO: 6804 - DNA, 453 bp, Gossypium hirsutum
  Clone ID: LIB3828-010-Q1-N6-G6
aataggaaattggagcaacttcaaagttgcttttaacatttcattgataaaaacactatgctttatgttgtttttcacttttttcctgaaattagtccacagggggaggggaagaccttgatctatcattatagggtttgtcccacgaatctggcagggccacaggcaagtcagccgattcccatgctgcacacaacagcacagctgtaatcaaagaaccatcagctttttgcactctttcatggggaaggtttccaatcaaattgataattattaaaaccattaactgctccaagtccattcagtagctggttccccatatcctgttgttggggattccttagctgatcccgagccatttgtgccattcccatccttccattcatgacagggttatttcccattggggctctgattccattcaccatagcaaactgccctagtccaccactc

SEQ ID NO: 6805 - DNA, 180 bp, Gossypium hirsutum
  unsure (1)..(180): unsure at all n locations; Clone ID: LIB3828-010-Q1-N6-G7
cagagaaggcttatatatgtattccttttattgtttcatactagtaaatcaacaggtacaatctggccgaaagacaaaccggaataaacggggaagaaaaatgggacaaaacacgaagcatacccgacaacaactcacaactttgccagagccattacagaataaaatctatatncctta

SEQ ID NO: 6806 - DNA, 473 bp, Gossypium hirsutum
  Clone ID: LIB3828-010-Q1-N6-G8
aagaaaatgaaaatccatcaattgaaataataaccaacagcaatagtttaaaccggcaatgattttacataagcaaaaaagcatcctaatgcatgcccacatactaaaattccataatctaacaagaattgatctttcaatgaactcggaaaccatgtttcaacgtcgtaaatttaatatctcgaaaagtacgatgctcatcgatcctttctacaggaatggaggaagaataacccatcttcgggggtacttcggccttccatctttaccgtcgaatagcttcttcaaccgacggtgctttgcaagggcccaatttgtcatgatagaggtagcaaccacaaggaatacgtagtcagcaacagtctgtgtagcgatattgaaaccccaaccattggtaaatctcttgagtgtagttcgcgcaaggcacaatggtgaacagaaacccacgaggaatttgataccctccacttcca

SEQ ID NO: 6807 - DNA, 490 bp, Gossypium hirsutum
  Clone ID: LIB3828-010-Q1-N6-G9
ggaggaaaaaatcattttccattataacttaaactacaacgaaatatcaagaaataaaaggaggaaaaaaatgaataaagagaaaaaattgaagatttttgaagaagaagtggttagccagttattggaaaaacaaaaatccctaagattttgggcaacaactatccttgagatttgccaagctcaacgtccttgagtagtgatgagccgtccacttgctttatcagtagctttacatctgatgtagcatcttttcggtagtgcattggcttatctccctcaactgcccaactatatattatcatcccattcacagctatgctcatccctagtatgtttttcaatgtcagctctgagtcaaacagcatccatcctaatatcaacacgcatactgttttcatgtgtcctagcacttggaaagacaccgccgagaatcgtccaatgcacaggtactggcttatgttgcagaaaacagctaaggaacatgaca

SEQ ID NO: 6808 - DNA, 492 bp, Gossypium hirsutum
  Clone ID: LIB3828-010-Q1-N6-H1
aagtaaaaaatatgattctattattaaaataataaatccaaaacctaagacaggccgaacaaataacccaaccccgagtaacccaatctctaaaatatctaaactatgcaagaaaaactaaaagattttccaaagagaaaaggtgggaatgaattgggttcagagggcgcctgaccaataatatgtcatcagcaaaccacagttattgatattgattactagatataacgtcttttccctttcttggatggctctcacttggcactggcaagtttggtgcggagctgcttggcagcagcaaccatattgttcagtgccggtttcacctcctcgtacttgcgagttttcagcccgcagtcagggttaacccacaggatgttggtctccaacaccgccagcatcttgttaattctgtcagcaatctcttcagttgatggtattctcggggagtggatatcatacacaccagggccaattccagcaccatacttc

SEQ ID NO: 6809 - DNA, 491 bp, Gossypium hirsutum
  Clone ID: LIB3828-010-Q1-N6-H10
aaaactaataaaggtattatattaaagaataatattttcaatgtgtcttcatacacttcactaaatttatcaaaaaaaaaaatttgcaaaatagagtttctctactgtaatcacaatcacagcttatacatgcatatctctcttcattatgctattgatactagcattcatggaaatagataaaatacccaaaaaactgcggctgttactatagcaatgggagcttgaaacaattttagaaaagtatgtacaaatagagaataatccatcctgccatggaaaaaactgcaaaaatatgaacccaaaacaacacagcagctgactcctttccacatcctcttaaattagcaacagcaccagaaagcacagatgttggcattgaatgctgaagaagaagaacaaatcgaaacatcttatcaccagcaggaagaaaaccaagcttatcagccatcatcacaatgccaagtcctgcaggaggcaccaagcataga

SEQ ID NO: 6810 - DNA, 424 bp, Gossypium hirsutum
  Clone ID: LIB3828-010-Q1-N6-H11
aaaaaagctaaaaaagggggggttttttctttcatgggtttattaggagacaattgaataaattttgaatttccctaggggtaatcataattttccaattcagggaaaaaggccaacttacccaacatttttcctaaaacaggttcgcttccaagttttttttgaagttcaaaggaacccatttttggtaaaactttgggccattcgggaagagcttccttttttttaaacccaagggtgggggcaaagcgaatttcacccgaaaccccatccaatggggggagaaccacccttgctttcctccacttttgggggggatcattgcaatctgctttggggcttttcactagcattacatcacaatctgatttttcataatcccccgccacttggattttatagtttcctttatcaccagccgttt

SEQ ID NO: 6811 - DNA, 470 bp, Gossypium hirsutum
  Clone ID: LIB3828-010-Q1-N6-H12
acaaatgactcggtccaaaacccggttttaattctgacataatatggagtaagagtgaaagctgttgttaacaataccaaaaatctgcatgtttgtacaataaaataacaggtcatagaaataatcaaatctcatttctcataaactctgattgcaactcattgattgagatcttaagtttggcaggaattttatttatattcacaacactcctattatgttagacttggagctcggataacagtgcgggtcgtttttatggcaacatttttggtgaatgccacacttgcgaatcgaagcaatcgttggcgcgtaggcgccgcgtgcgctacatatgggggtgagctaatcgtaactcgaagctcgtggtggtcaatttcgccatttccacggattttcactggaaatttctgaccgtgtttcacctggctattggaatttttaacattgatctcttgtttgaacatacc

SEQ ID NO: 6812 - DNA, 189 bp, Gossypium hirsutum
  Clone ID: LIB3828-010-Q1-N6-H2
gggaggaaggaaccccatgggtttcggggggctggccggggggaaaattggcccccgggaaaaaaattaccccgggcaaaaaaccccccctacggttaattaaaccaaaaaatggccgggggttaaaaaattcccctggggggggcaagggggtttccaggactagctttaggggggcccggggggccc

SEQ ID NO: 6813 - DNA, 319 bp, Gossypium hirsutum
  unsure (1)..(319): unsure at all n locations; Clone ID: LIB3828-010-Q1-N6-H3
gaaaaaaaatttataaaaaaaaaaaaaaaaataaaaaaaaaaaaaaaaaaaatttttatatgtttcttaaattttaaaattttttagaagtttttttttttttttatctgaaaaaaaaaaaaaaaaaaaaaaaaagcacccaaaaatacccacagaaaaaaaaaaagggggggcaaaaaagaactgttgttaaaaggggggacctggtcttaaatccgttgatttatttttttaaagaaaaaaaaaacaaaacccctaatcctattttttctttcggcatggggggggcccgttaaaacaaagnnnnggggnggggggg

SEQ ID NO: 6814 - DNA, 443 bp, Gossypium hirsutum
  Clone ID: LIB3828-010-Q1-N6-H4
aaaaaaataaaaaaaaaaaaaaaaaaaaaaaaaaaaaaaaaaaaaaaaaaaaaaaaaaaaaaaaaaaaaaaaaaaaaaaaaaaaaaaaaaaaaaaaaaaaaaaaaaaaaaaaaaaaaaaaaaaaaaaaaaaaaaaaaaaaaaaaaaaaaaaaaaaaaaagaaaaaaggaaaaaaccaggaagacccggacgggcccccgcaggcgaaaaaaagaaaaaaaaaaggagataaaggaaagaatggaaaaaagaggggaaaaggtgaactctgggggaaatagaaaaaaaaaaaaaaccccacaaaaaaaaaaaaaaagaaaaaaaaagagaaaaaaagggggggccaaaagaaaaaaaaaaaggacaggaattgcttaaaagtgaaaacccgaaaaacaagggggaaaactggaaaacccaatgggcaaaagaagagggaaaggg

SEQ ID NO: 6815 - DNA, 452 bp, Gossypium hirsutum
  Clone ID: LIB3828-010-Q1-N6-H5
ggacccaaaaagagaaatataggcagcaattttcaagaattagataaaaattttaacaatagaagaaagaaccatcattcaatcaactacaaaaaaatatcatcttttatcctcttcagggtttggctagaatataagctctccacttttcaaattataaagggggcacaaccaacctttccctccatttttacatcatttggggcatgccatatcccattgttaacattactaccttcttttcaccaaccaaaatctaatgaaaaagcttctgcacacggaatcagaaaaatgaacactttttagacgggccattgaaatttgacacaatgaaaaggggaaatgttgatgaagggtcttctacttacatattcaatatagatctttaaatggaccgccggcattgcagggacattgacatcatcgtaatacaaactttgttcatccaaagc

SEQ ID NO: 6816 - DNA, 486 bp, Gossypium hirsutum
  Clone ID: LIB3828-010-Q1-N6-H6
gaaagtaatacagaatggaattttcgataaaagaatcacatgagaagtttctttcaacatacataggaaaacagaggtattccccaaatcaacgctaaaaagggaaaaataataaaaaataaaagctcagccccaaaatgagcattaaaagtttatatctgaaagcatgattagatcttaaccttgaattgtaacctaagacaaacaatagcgattatctcatctgaaaacatgatcgaatctaagaatcatgattatatatgataaaagcatatcccgttttacacattaatcgatcttgacagatgagtagataagccttgtgaaccaaaaacatgcataaaacccaatggtgcccgttagcacgaaaaatgcatatgaagcaactagcatgtatccaaaatacagcatcccagaaaccagcttagtgatctcaagcttcgtgaagaagtagaatgtagcgtagaggaagagatataacgccga

SEQ ID NO: 6817 - DNA, 493 bp, Gossypium hirsutum
  Clone ID: LIB3828-010-Q1-N6-H7
gcagcaccataatataaatttaaagtagagcaaacttagccattagccaacatcaacaactgattgtgcttcttaaaaaaaaatatcaacatttgaagcctggagggatttccttctgacatgcactaaggagtaagctaagggtaatagggatgttgaggttggccccaagcacattggctttaatggcggtgcaaaggcaaagggcagcctctaaatcagccaagccttggagcaaagcacagcatttgctcgaaggaggtgctcccaccactatgtttaccagtccaagcaggtcagcacaaacacctagcttcaatgtgtccttagggcaagaagcaggctttgctgatggtggagggcatgcagcaggtggtggaatgggctttggtggcttgcatgaatggcaagcattggtgaatgataagttgaaaagaagaagagagaaaactgtaaggacagcacaggttttgttggaacccacgcgtccgcg

SEQ ID NO: 6818 - DNA, 482 bp, Gossypium hirsutum
  Clone ID: LIB3828-010-Q1-N6-H8
aaattaaaattgtcatgaagcttttttattataattatttagagttgtcgaaaagccagttgtgtgttgaattttcctaaccaatgtgtgcgtatggccttggcacttgccactaacaagacaaccataaccgctcaagtaaaccagctaaaatgcaattgctaacaaaagaacatacatggttcaaggaaagaattatagtttccgctgagagagagacgtgcaggagctttagctgtaatgaaaacatgccatgggggcatcatgtgtaggctttagaacataacgtagtctctacaactagatgagcttttgtatagaaaactactcattcttgtatctcttctctacttcctccaaactctgaatttccttgtgatacttgcaaatctggtagatacaccagtaaaggaggcatgcagttgtacacaaaattacattcctttgagttttgaacacggatttctccggacgcgtgggtc

SEQ ID NO: 6819 - DNA, 470 bp, Gossypium hirsutum
  Clone ID: LIB3828-010-Q1-N6-H9
attaatattagtaagaaactttttgtaagcctgtaataacccaacgcttggccaccaccaaccttatttcatcttccaatatatgaccccattcagaaaaagaaatgtacgtgcaattataagtgactggatattcaacagaaacatgtaaagacattattgctagtgatgtcatgagttcgtgaatttgacgatgcgctcgcgttaccttacatgattgagcaaccatttgggttctcgtcgctaaaacattcaccgcggctcgtgtaacagtagctatacccgccgccgccgccccagctgtcataaactggcctaccgtaagtctggtaacatgggcgtaggggtggaggtggtccaccataatagcaaggtcccccaccaacgccatgatagcattccgtgcaacagcatccgatggggggatgagccattggtggtggaggacaaggttctggaacctttggtgc

SEQ ID NO: 6820 - DNA, 612 bp, Gossypium hirsutum
  Clone ID: LIB3828-011-Q1-K6-A1
cggccgcgtgggatttccagcataatggcggcctcgacgaattcaagcgttttatagtctacattttcgacaaaatactgaccaggatgcttccaggacaagataaatttattgtgatcggagatcttgaaggttggggatatgcaaattgcgacatccgggcatacctttctgctctctctctcctgcaggattactacccagaaagattaggaaagatgttcgtagtgcatgcaccctacattttcatggcagcctggaaagttgttcaccctttcatcgacgtcaaaaccaggaagaagatagtattcgttgagaacaaaagcctgaaatcaacattgcttgaagaaatagacgagagccaactgccagaaatatatggtggcacgctaccattgattcccattcaagacagctaaaaagcacacacaaatatatatatatatatatatataagttgtttgttaaagaagctttaagggaatagattttatagtctattttcaagatttgttgctattttccttaataatgttatgttcaaaatttaaatttctatctttccttgaagtacaatatattttattattacatcaaatacttgttagttgg

SEQ ID NO: 6821 - DNA, 598 bp, Gossypium hirsutum
  Clone ID: LIB3828-011-Q1-K6-A2
gtcaaatcaccctaaatgaatgaaaaattaaagtttgttaactttgctacgtggaataaacgtcaatccccacatggattgcatgtaagcaattaattaaattttttaaaatttaaaaattcaaaaaaaaaaattatgaagattatttaaaaaataaaaaaattaaaaaagatataaaaattataaagaaatattttttaacattaaaaaaataattaattgctaacatagcatacatgtggagtgccatgtggatgtatgttaacaaagttaatagacattaacatttccatccattttggggtgcttggacaaataatgtaagttcaagggagtaaaagagaaaaaagaaataataaatgagaaactaaaatatatatttgtaaaattagagggtcaaataagcaattatgccttatatcccacaaattgctgatatggtttgattgggaaatttggaaggggtggataccaaatattttattacccatttacatagacagaatacataaagcgaagcatgggagtgattcagcaacatttgacactgaaggaaggtttgcatatgagatcagttatatatttcaaccgctgaaaa

SEQ ID NO: 6822 - DNA, 632 bp, Gossypium hirsutum
  Clone ID: LIB3828-011-Q1-K6-A3
cggcctgctggccctaagctgtgccttcaaagagcctatcgcaaagaggagaagaagattcctccacctacttctaggaatctcccacctagtgcgcacaaagcacccccctcaaaaatgcactcatctgattcaagacagcacttggaacagaaaaggggattacaagagcgtagtaaggataaaatgatgcaccaaagacccccagtatcgtcaaagccacaggtaaacaagccaatcaagccagtctcatcacaatctcacatgaaaccaaatgttcagcgacccaagaaaaagcaattaagtgaagatgaaaaggctctaatgatgatcagaaatatgttccacactgatcgatatccagtttgtgatgatgatgacgttagtgacatggaggcaaattgggatgagattacgaaggaagaaagaagaagtgctaaaattgctaggcaggaggatgaagaacaattgaggttgatagaggaagaagagcggcgggagcggatgcggcggatggccaaaaagcgcaagcttagccaacactgatagattcgattgattgattgtaaccgaatccaagggtagccaggcttgaaattctgaaaaatcttttttcatcttctggtgtttat

SEQ ID NO: 6823 - DNA, 579 bp, Gossypium hirsutum
  unsure (1)..(579): unsure at all n locations; Clone ID: LIB3828-011-Q1-K6-A4
ggcgcagcaaattgggtttccataaccttactgttttcagtatgtttatcggcgtcctatggtaagaggaccggaatctccaccatggctgacggagccgatgggtttcaaccaagcaacggttttccgcatgaagctgatcctgattcttcaacctctatcgatcctgatcctaccggattcggtgctggcataggtataggttatgaaagaagcccttactgtatcgactgcgacgatgtggatatcatgggcggcagcttttgcggcacctgcaattacggatgcccttaccgcaggttcaataatgggtgtggtggtggtatcgcttatatggatgaactcaaacgaacgattaaggaccttaccatgaaacttgatgccaatggtcttttagggaaaaagaagccatgaatatacaagctatggcgccagaatcttcatagatttatatatagattatagaaactacggattctatacaaagagaaagaaaataaagaataaccaagcagcttgatatatgattgaattacaatgtgctagctggntttttttttatcttttaattattatatg

SEQ ID NO: 6824 - DNA, 520 bp, Gossypium hirsutum
  unsure (1)..(520): unsure at all n locations; Clone ID: LIB3828-011-Q1-K6-A5
cacaaatcccacatattccactacatcccacaggatcccacatgtgcccacagtatcccacagagtcccgaaaaatcccactgaatgccaggtacatgtcgggtatcgtgatagtggtagagtgttgtccgtcagggtctgtggctgggacttgtgctggagtgtggtcagncccaggtgcgcatcaggatgttgccaggctgaaactgtaaagagcaaagggatagaagaggttatggacagtgaacccagtccaccaaagtagagagatgataccatattaagatgaaataacgaggaagagttggttgtcgtcttattaattctacaaaataagaagtaatgatgttgcagaagggtttgctataaaatcctcttgggcaaaaagagtaattatgaagaataaatagctcatatcattattcgatttgcaatatcctaaagttccttgactcttgttttgttgcgctgtgtgattgatgcgtgttcatgctggtgtgtgtgattgagctttgctggg

SEQ ID NO: 6825 - DNA, 530 bp, Gossypium hirsutum
  unsure (1)..(530): unsure at all n locations; Clone ID: LIB3828-011-Q1-K6-A6
cccgcaccaccactaccaacatcaccgtcgccatcatcgccaagnagaggaagatgaaaggcgcgagagtgaggagaaggatggggggttcattaagaggtttcgcaagtttttgattaatttttgaaggtatcaatatcatgcacgttatttaatcaaagtgatgcatcaactctgtaattcccttgggtaattttcactttctggtttatttggcctggctgtctttacactacttgattattggctgtgaataatattgcatcctttggtgatgaacaatatggtatttccttttaaaacatactgcattataggactccatttatgataacataaaaaaaaaaaaaaaaaaaaaaaaaaaaaaaaaaaaaaaaaaaaaaaaaaaaaaaaaaaaaaaaaaaaaaaaaaaaaaaaaaaaaaaaaaaaaaaaaaaaaaaaaaaaaaaanaaggggcggccgttttaaaaaaacccaattttacttccccgggcttgcaagtttttaatttttttttggtgccccctaat

SEQ ID NO: 6826 - DNA, 508 bp, Gossypium hirsutum
  unsure (1)..(508): unsure at all n locations; Clone ID: LIB3828-011-Q1-K6-B1
ctcctctcttcttcccataaacctttttccatggccagaggaatcccaaattatgacgacggtggcagcttctatgatcatacaggcggtggtggtggcagtggaggccaatactttacccaatcttcttccctttccacatcttctccttccgattctttgtaccactcgtctatcaatcgcggcaccatcggagacgtatttttcggcaccgacgatataagagacaccagagatttgctttacaaggaagatgtgctggagagttaccaaaaagaaacagcacaaaaatacttgaggcaacgatcaaagaaaagatcaatctcaaatttcgggtgtgtcgagttcttgaaacttctattactatnttgctgcagatgtataatataggctgattaatttctagtctgtagaagctgaaaatcttttgcaattttatgtttatatttttccatcataaattgaatttatttccaataatagtaaggagatcagcctttcagctgtg

SEQ ID NO: 6827 - DNA, 649 bp, Gossypium hirsutum
  unsure (1)..(649): unsure at all n locations; Clone ID: LIB3828-011-Q1-K6-B2
cgggacgccgtgggttgaaaactctntctgcaccgaatttatgggaagttcatggtccatcgtccattcatccggaaagcaatcaacaacatcttttaccgttttatttttgaaaccggaaaacacaatggaatagctgagctattagaaatactgggaagtataatcaatgggtttgctttaccactgaaggaggaacataagctctttcttgttcgtgtactgataccacttcacaaaccgaagtgcatacctgcttaccaccagcagttatcttactgcattactcaatttgtcgagaaagactgcaagcttgctgacactgttatacggggcttgctgaagtactggccggttaccaatagctcaaaagaagtcatgttcttgggtgaacttgaggaagttttggaagcaacacaatctgtggagtttcatcgttgcatggtacccttattccatcagattggccgctgcttaagtagttcgcattttcaggtggccgagagggcattgttcttatggaacaatcatcatatcgaaaccctaataaagcagaaccgtaatgttatacttccgattatctttccttccttggaaaggaatgcaagaagccactggaatcctgcagtgcagagcttgacactaaacg

SEQ ID NO: 6828 - DNA, 650 bp, Gossypium hirsutum
  Clone ID: LIB3828-011-Q1-K6-B3
cccagcgtccggtttacaaagacgtcgaaggagcttccactcaatgggatgatattcaaagaaagcttgggaatttacccccaaagccaccagctttcaatcctgacccttttgaacccgcacctgacccggattccgtccctaaggacaagtcttggatcgatgaaaagactgaagaagagcttgaagaaatcgaagatgatgtcgatgatgatagattccttgaagaatacagaaagaagaggctggctgagatgaggaaagctgttaagatttcaaagtatggatcggttatgccaatttccggatccgattttgtacgggaggtttcgcaagctcctcaggatgtctgggttgttgtcattctctacaaagaaggatttccagagtgtgggctgctcttgcagtgtttggaagaattggcagttaaataccctgcaacaaagtttgtcaagataatatctacagattgcattcctaactacccagatcgtaatcttcccacactcttggtgtataacaacggagcggtgaaagcaaattatgtaggcttgcatagttttggccgcagatgcacgcctgaaggtgtggccttagttctttgtcaatcagatcctgtactgaatgatggtcaaagtgggagcaatgca

SEQ ID NO: 6829 - DNA, 649 bp, Gossypium hirsutum
  Clone ID: LIB3828-011-Q1-K6-B4
aacaagttggagtgtatgataggttctcaaatggatcaagcaacattagacaacctgctcatcccatctccatatggaacaagttatttatatgatgtgaaccttgttcttagatttctgaaagcatttctatgtgaaggaggctggcgattatcaccaacacgaatgaggaaggttgctagcttgatggatctgtatattgcagaagtagctccggatccttttttaagattgtcgaagtttctagcgttggtggtggccttgccggattctgccagggactgttgggatgaattataccacgcaatcgacgtttatctggaggtgcatgcagggttgtctgaagaagaaaaagtgaaggtctgttgcgcactgaactacgagaagctctcttcggatgcttgcgtacacctttcccagaatgcgaaatttccatcaaaaagctcggtacaagctctcgtttcccagcaattgaagcttaagaacttactgcagggcactaagaacagtaaacccgacatggattccccttgtaaactcaatgaaacccgaggcaaggcaaagaaaggtgaaggcagtgaacaaattgttctttattcagggagattagacatatcgggcgacaacgagaacctcagagctcatttac

SEQ ID NO: 6830 - DNA, 625 bp, Gossypium hirsutum
  unsure (1)..(625): unsure at all n locations; Clone ID: LIB3828-011-Q1-K6-B5
ttcatggccaagncattggattcgataacctcagcaggacccgatagtcatcaagcagtggcttttagggcaactgctgatagggtcatcatgttcaactgccatttcactgggtaccaagacactctttatgctcacagagagagacagttatataccaactgtctcattactggaacggtggatttcatcttcggggatgcggcgagcattttccagaactgtatgctcatcgtgaggaagccagggcctggccaaaattgcatggttactgcacagggcaggaatgatcttggaacaaactcagccattgtgcttcaaaactgcaccatctcgggcgcccctgattacatcccagtgaaggatacaaacaaggcatacttggggcgtccctggaaacaattcgctaggtctatcataatgcaatctaaaatcgacgacatcattcaaccagagggttatgccccaatgacaggtaccataggaatagacacttctttcattgccgagtttggaaataggggacccggtgctgataccagccgtagggtagcatggaaaggtataaaaaagatagatataaatgaagccaacaaatggactcctcgcgtctatcttgaatctg

SEQ ID NO: 6831 - DNA, 582 bp, Gossypium hirsutum
  Clone ID: LIB3828-011-Q1-K6-B6
cgcagctgctgatagtttatatttgcagggtaatgacatcaaagcattgagatcgtattatcagtcacttattgaacatttacgagtccagcagaatggaagccttgttttcagatagcagtggccatatgattatattttctaactgagggctccacatacacacacacacatattttgccagcaaaggttcccaccatcttgcaatttgtgttgttccattttcctcattcaagtctcttatgatttgaagttaacattgcaggtttctttatgtaaatatcaaatgtgttctgttgcttgtttccatggacaaagaggtattttttgagttgctcaaatatccttcagtttcatcctgctgaattagggtgagtttttgtgagagcttttcatagttttccctttcattttttggatgcattttttttaatcttcaattaagtgtatgtgtgacttagattattaccccctccccctcaaaaaaaaaaagaagaaaaaaaaggccattagccatttcttttattcattgttttgatacaattattttggggccaaagtttataattataaattcaattc

SEQ ID NO: 6832 - DNA, 520 bp, Gossypium hirsutum
  Clone ID: LIB3828-011-Q1-K6-C1
gtttatctggtcggtgtatttttgaggaaatccaattttcttgaaagattcccgaccgacgattattccatgtttatcttttcgtcaaaatctcgaaaatcaaaacaattccggtgtttttgtttttgaagctaaagagtcatcttgttttccttctccggatcgcttgattttgccgctaaacctcttctgattttgcagctaggtacactgtgagattttttggaatcaggcgtaatgagaagattgcttgctacgtgactctgaatatttcaagtacgaaagttgaaaaataaagaagaatcgtttcaagtactcatctatcttttttttccttcttactttcactttttagggtctgaaatttcttgaactttgctcaatttagtcgaatctgaactgcactatggatgcttatctgtatgcaaatcaaaatattatagtctataagtttaaatcggtatgatgtaaaacattgtatatcttcataatgttacttttgtacccatccttttagacc

SEQ ID NO: 6833 - DNA, 432 bp, Gossypium hirsutum
  Clone ID: LIB3828-011-Q1-K6-C2
atttcttggcaagaaaataggaatggagaagagatcatggtgttgtggatttgtgcaatggtgataagctcaatggttatggaagagggtgcaaatgcgacaccaattagctacccagggactgaggaaaaaaccgtcaagttccatgcaaaattggaggcggtaattgcctcccaccaccatgcaacgattatgacagaggatgttcaccccaaaaaagatgctcgaagtcatcatacaatgcccatctttcattgaccacaactagaaaatgcacttaattaacttctctctctttgtttttttttgctatcaaattatatgtcaaaaaagaacaattaatcattccatatgcagattcattccttattattgtaacccatgttttccacaaatatatacttcaacagtgttttacgaattctgaaataa

SEQ ID NO: 6834 - DNA, 550 bp, Gossypium hirsutum
  unsure (1)..(550): unsure at all n locations; Clone ID: LIB3828-011-Q1-K6-C6
tgggactaagtgaatgattatccaaatgtcccttctgttgcagattaaaatataacctaattattacatccaaaataaaaagttaataactggtaaaatatatgatgggcaccccaaatctcattgtttgagtgttgttcagagttgggatgaaggaaatgtttatccaaatgttgcttgtttaancgaaaaaattaagttattaacttttttattttggatgtaataattaggttatattttggttgggactaaggaaatgattattacatgcaaaaatatccgcatgaaagacatacaattggattacggaataaatggtaaaatatatgatgggcaccccaaatctcattgtttgagtgttgttcagagttgggatgaaggaaatgtttatccaaatgttgcttgtttaacgaaaaaattaagttattaacttttttattttggatgtaataattaggttatattttggttgggactaaggaaatgattatccaaatgtcccttcatgttgcagatataaaataagtaaatgcatcttttttatatc

SEQ ID NO: 6835 - DNA, 659 bp, Gossypium hirsutum
  unsure (1)..(659): unsure at all n locations; Clone ID: LIB3828-011-Q1-K6-D1
gcgaggcttgtctcctcttgtccgagtcctgtttgcaaatcattcatacagtttgcaggacttcggccttgaaaaaaaccattcattttaatatttttttttctccaacagaatcgaataggaaatccgaacacagaaagaagctaaaagaaacatggccggagtgggaaatagaagttttagcttgattttgtatttcctgtgcttgggggttataatccctagcctcgaggctcacatcgcagaatatgatgactattggagggaaagggaattgcaagctaaagaaaacctggagaaggcttacaatcctaacccagaggaagtcacccagcatttcaacgaccatgtggccagaaacttgatggggtttcgcaccaattccacaaggaggatgttgaagaagcgtaagggaggtccttgtgaagcaaccaaccctatcgaccaatgctggcgatgtgaccgcaactgggaaaagaacaggaaaaagttggctgattgcgcacttggatttggccgtggtactaccggtggaaaggatggacccatttacgttgtcactgatcctaccgatgatgttcttaacccaagtcgcggaactttgcgtcatgctgtgatccagaaccgnccactttggatcactttcgctagggggatga

SEQ ID NO: 6836 - DNA, 411 bp, Gossypium hirsutum
  Clone ID: LIB3828-011-Q1-K6-D2
gcaaataataacaatcaccggcggatccccattcgccagcaattaaacgcaggtctcattcatttccggtgcgtttaataatccctttatacgccatggacatgaagaaggtctccaccgccatcattgttgctgctgcctcaatgagcgccgtcatggctgccggtgcacctgctccttccccttccgccggtggttctagtcctagctcctctcctgcttccgccccagcatcaggaccagattccagcgtggctgccgcaaccttgcctgttcttggatcattggttggggcttccattgttactttgttttcttgcatgctgcagtaagctacatgtatgaaaaataacatgtgaacgaatatagtatataattagtgattaatggtagtgatgagaaacataagat

SEQ ID NO: 6837 - DNA, 376 bp, Gossypium hirsutum
  Clone ID: LIB3828-011-Q1-K6-D4
aaggacccggtgttggcattcacgaacatcatgttgtcccaaaggttccgaaattgagactcttggttttggttttgaacgtggtcctgaaaaatgggggtcttctggatgttccggtaatggatatcctggtgggttcgttctaacattgtctcaaattaccagaggtgccatgatttgcacggataccacaggtccctcaaatccctcaaattccactatatacccacgaagcccactatttccatataatcccactaatgccataaaaggtgaaatgtgagagtggggtgtttagtcaccacggttgccgaggaacttgacctgagtgatgacgggccaggtgcgcataaggattttgacagccttaagctgt

SEQ ID NO: 6838 - DNA, 659 bp, Gossypium hirsutum
  unsure (1)..(659): unsure at all n locations; Clone ID: LIB3828-011-Q1-K6-D5
ccccgcgtccgcgcaacctcctctctgcttttgtttccagtctggcggaggcgcaaaaacctctgctcttcaaaaccattaaaatcaaaatcccaatttgcatcacatttcatccaaatctgaaatgcccaaatcaaattcatccaattcctcctcagatgaggatgtaaaagcacctaatatgtttgaaagagcaaaggaagagatagaagctgtgattcatgttgggaaaatacatccttttggtaaggaaactcatgggaagcgagatgatattaatgaaaacaccccattggatgatgtgaaagcacccaatgtgtttgaaagagtaaaggaggagtttgaggcccttgttgaaacagtccatcataaaaaagagtctcaaactcatgttgatgaaagggaccattctgacaaggaacaagcaaaacatgacaaaccagaaaatggtgtcaaggcccctaatttgattgaaagagctaaggaagagataggggccatcttgcaccatgacaaatcatcaaaccatcaccacaaagaaactcatggngaagagtaatgatatagatgaaaccaccccactaaatgaagttaaagcacctaatgtgtttgaaagggctaaagaagaaatcgaagctattgtcggaacaatccatccg

SEQ ID NO: 6839 - DNA, 645 bp, Gossypium hirsutum
  Clone ID: LIB3828-011-Q1-K6-D6
gagaggtcgaccaagtagattttaacaagactgtagagtactggcaacaagacaagtggactggttgcttccctgtgaagtggcacatcattaaggacgtcccaaacactttgctgaggcacataacacttgagaacaacgagaacaagcctgtcactaatagtagggacacccaagaggttaattttgagcaggggatccacattcttaaaatttttaaagatcatcccagtaagacgtgcattcttgatgattttgaattttatgaagctcgtcaaaagacaatccaagagaaaaaggctaagcatcagctgttacaagaaaaggttttgagtggagagcctaatgatgctgtaatggagaagaaagaaaatgtggcaatagcaaagaacgcttcggaaaaatctgtggagtcagccttgataaaagaaccaactgttgcatcaacaacagaagtagtaaaggctaatgtcgatgtgaaacccgtacaagagaatggatcagttacagcaactgaagatggccccaactcagtttgtgttgcaagtgcttgctaattgccttcttagatttggaaatagtgttgtacttttggttggttattgacaagttagctgattcagatcagagcctctgattggctgg

SEQ ID NO: 6840 - DNA, 652 bp, Gossypium hirsutum
  unsure (1)..(652): unsure at all n locations; Clone ID: LIB3828-011-Q1-K6-E1
gtccctcgattcatgagaaagggtgaggaagttaaggctgtggttcctgagtcactcttgaagaacagaanaggctgaagaatgggagcttgccaaaagcaggagcttgaagtttcaaagaagaagaaagtcgagaaccgcaagctgatttacactagggctaagcagtatgcaaaggagtacgaggctcaggaaaaagagctgattcaattgaagcgggaggcaaagttgaaagggggattctatgtagatccagaagctaaactcttgttcatcatccgaatccgtggtatcaatgccatgcacccaagaacaagaaagatcttgcagctattgcgtttgagacagattttcaatggtgttttccttaaagtgaacaaggcaacaatgaacatgcttcatctggtcgaaccttatgtgacttacggataccctaatctcaagagtgtgagggaattgatttacaaaagaggttttgggaagttgaacaaacagagaactgctttgactgacaacgcaatcgtggagcaggctctgggcaagtttggcatcatctgtgtggaagatctcatccatgagatcatgactgtgggacctcattntaaggaggccaacaatttcctctggcccttcaagctcaaggcgcctttgg

SEQ ID NO: 6841 - DNA, 643 bp, Gossypium hirsutum
  unsure (1)..(643): unsure at all n locations; Clone ID: LIB3828-011-Q1-K6-E2
gcatggcaggcactagggagtgcactggaggggggtaccaattttgttcagaagcttgagcattctgctgtgaacattgcagattccattcagcatggaggtttacccgctggttcagttgcaccctcattaattgagtctggaaaagcctttacgacaaagggaatgcaagtgcttgaatatgtgggaaaggagactatggatttactgatcaatgaaactggtatagaagttgaaaagaactctaagggcactgagcatctatctgatgaggatcagtcggtagaggaagttagttttgatcgatgcttctacatatacggaggtccagagcagttagaggaactggaagcattatccagccattatgcccttctgtttaaccggagaaaagcaaaattgccttctgaacagaaatctgtgtatgagggaaagcttaaacaaatccaacaaattttcagtttagatgctgaaattgatggaaatggtccacagtcggccaaaggaaagaaaatagagactggaattgatggcagtcatgatgagatgaaaattntacatgattcaagtgtcagcaaggctgctgatatggctgttgggttcacaaatgcattggcaggattagctgttaatgatgtaattc

SEQ ID NO: 6842 - DNA, 448 bp, Gossypium hirsutum
  Clone ID: LIB3828-011-Q1-K6-E4
gcggaaataccctcggccaacaacaagatttctacgacgtcagtttggtggatggctataacatcgctatgtccattacacctttcaaaggcgccggtaaatgtagctacgccgggtgtgttagtgacttgaatttaatgtgccccgtcgcgttacaagtgagggataataaacaagtggtggcttgtaaaagcgcttgtttcgcttttaattcaccgagatattgttgtaccggcagcttcggcagtcctcagtcgtgtaaaccgacggcgtattcgaagattttcaagactgcttgtcctaaagcttattcttatgcttacgatgatccgaccagtattgctacttgctctcgcggcaactatttggtcactttttgcccacaccgccgctagaattttttaaggctaaattagcatcgtatttgggtgttttttttttttttttg

SEQ ID NO: 6843 - DNA, 639 bp, Gossypium hirsutum
  Clone ID: LIB3828-011-Q1-K6-E5
gcagtccctaggaacaattaaaagtaaccgaaaaaaaaacacagattaagacagaagcatggccagccagctcgtaggaacaaagagagcttgtgtcgtgggtggcagcggattcgttgcctcattgctggtcaagttgttgctcgagaagggttacgccgttaacactacagtcagggaccctgacaaccagaagaagatctctcaccttgtaacactacaagagttgggagacttgaagatctttcaggcggatttaactgatgaagggagctttgatgcccctattgctggttgtgaccttgtcttccatgttgcgacacccgttaactttgcttctgaagatccagagaatgacatgatcaaaccagcgactcaaggagtggtgaacgttttgaaagcttgtgccaaagcaaaaacagttaaacgagtcgtcttgacatcatctgccgcagctgtgtctatcaacacactggatgggacagatctcgtcatgacagagaaagactggaccgatatcgagttcttatcatcagcaaagccaccaacttgggggtaccctgcatccaagacgttggctgaaaaggcagcttggaaatttgctgaagaaacaacattgatctcattacagttatccct

SEQ ID NO: 6844 - DNA, 622 bp, Gossypium hirsutum
  unsure (1)..(622): unsure at all n locations; Clone ID: LIB3828-011-Q1-K6-E6
tcttggtcttcatttgttttcctccaaaaggaacaacagnagtaataaaacttcattcaaacaagggaaaaaacttgaagtaaaacaattgagagaagatgtcgtggcaagcgtatgtcgatgatcacttgatgtgtgatatcgagggcaaccatctctctgccgccgctatcattggccaagacggcagcgtttgggcccagagctccaatttccctcagttcaagccagaagaaatcactggcatcatgaatgactttgctgaacctggatcgcttgctccgactggattgtaccttggtggcacaaaatacatggtgatccaaggtgaacccggagctgttattcgagggaaaaagggccccggaggtgttactgttaaaaagaccaacctggccttgatcattgggatctatgacgagccaatgactccaggccagtgcaacatgattgtggaaaggcttggtgattatctcatagaccagggtctttgatcactttggtgtaaccttaattgttgcaattcttcctggcttcttctatacaaaagtgcatctaccaccacctcttgtaatggttggctgcaattaaataatagtattactagtattaaagtcgtggg

SEQ ID NO: 6845 - DNA, 652 bp, Gossypium hirsutum
  unsure (1)..(652): unsure at all n locations; Clone ID: LIB3828-011-Q1-K6-F1
catctttaaagttcaaaaacgagttcttatcttccaanaaaccttgttctactcattcttggactcctattggtcgccttacctttctttgatgctggatttcttctttcatttgttttctttcaatttctaatatgttttttttttgtttagatccttgttcgacagcttctttttcatcaagaacgacctaaatgactccaaacacctgggttttcattgttcttggctgaccgaaccttctctttaattattcttgtgatttcattcagtttttagtctatgttcttcaaatatgttttaattgtttgcattcacttaattagtagccttaattcttaattctatctccttgttttattattacttgatttttgttgttttcctttcaattctaacttggattgctcaggttgagtcaaactcgaacttcaagtttcctttcatttgtctaaaaccctaaatcaaattcgcgacttggacaaacttatgatcctattccatgcgtatcccgatagttggcatctattttttgagcattttaggtgttatttgtgtctttataaatttatttacatcaaaatagcctcaaaacaaattttttaccaaaacgttatttgaaaaaaaaatcaatgggtaaactttntttccg

SEQ ID NO: 6846 - DNA, 442 bp, Gossypium hirsutum
  unsure (1)..(442): unsure at all n locations; Clone ID: LIB3828-011-Q1-K6-F2
acagcttgagatctgagagcaaagccctgtttttcattggggttttttgtttgaagttctttggttgtcaacctgattttttttaaaataatccttgctttttagttttgggtgatttttgagtgtnataataatatatctctttctggttatttcggggtcattctttcgttcgttgtttttgggtttttgggattggaatttttggggaatggaggtttcggtgttgtggagttgttctcaagctactgtcccttcatctgtattggggtttagcgtttcattgtttattttcggtgcttttatcgtgatactcttttctcgggtaccattcggtgtttcgtttgtttgtccttttggttgggttaatctgggctcttattttcatcgcatgctgccctttctgttcgccttcctgtttcgaagtcttcttcgtttttct

SEQ ID NO: 6847 - DNA, 600 bp, Gossypium hirsutum
  Clone ID: LIB3828-011-Q1-K6-F3
tccagccaccccaacagtttcgaaataccttccacgtcaaccctaagcttaaaaaatctgtcaagaagttaatcaccccaccgaatgtgttacaacagctggtccattcctaggtgaaactgctgatataagtcccgtgactgttcttcaagctgagattgaagcaattgatagcaaggctaaggaagccttggcaaaggctacaaaactcgcagcggatcccactacctcaaaaaccatcacttttcccctaaatatttgcattgatggttacaaagccattctcaaaaacaaacaagcaatccttgatgctatctctaaacgtgacgctgatgacctaaacatggagttaagctctaatgtggatcatataagccagtgcgaagatgcgttcgaagaagccaaaattaactccccaataccagaactgcattcgttacttggcaagattattttcaacagtataaacattggtgttgatatggttgattttgagaacaagaattaattttaaataatctataaatgacattaagtctataattatatatattttgtaaaataatttattttaatttgaatgccctttacattttgttt

SEQ ID NO: 6848 - DNA, 660 bp, Gossypium hirsutum
  Clone ID: LIB3828-011-Q1-K6-F4
gcgaacgtgaatttcgtgtggaagtggatatcttaagccgactcgaccatccaaatttggtgtctttgattggttattgtgctgatgggaagcatcggttcttagtctatgaatacatgcaaaaagggaacttgcaagatcatttaaatggtattggtgaaacaaaaatggattggccttcaaggttgaaagtggcacttggtgcagctagggggcttgcttacctccattcaagctctgccgttggaatttcaattgttcatagagatttcaagtccaccaatgtccttctcaatgccaactttgaagcgaagatatccgattttggactggccaaattgatgccagagggtcatgacatttatgtgacagccagagttcttggaacatttggttactttgatcctgaatatacatcaacgggtaaactaactttacgcagtgatgtttatgcattcggagtggttcttttggagcttttaacgggacgcagagctgttgacataaaccaaggaccaaatgatcaaaaccttgtactccaagttaggcatatactgaatgatcgaaagaagctacgtaaagtgattgatccagagatggctcagagttcatacaccattgaatctatagctatgttcgcgaacctggcatcacgttgcg

SEQ ID NO: 6849 - DNA, 625 bp, Gossypium hirsutum
  Clone ID: LIB3828-011-Q1-K6-F6
gcacgcagtgggttctctcctctgttactttattgacacttggtgctgtactgacgacatatattggggaacggatttctgatctaaagcttggaaacggcacatctcttttaatatttacaaatattctatcctacttgcctgcatcttttggaaggacagttgcacaagcatatcaggatggtaactacattggacttgttgccatcattatctcgttcttcctgctggtacttggcatcgtttatgttcaggaagcagagaggaagattccaatcaactatgcctcaagatactccagcagaagcggaggacttcaaaaatctgcttacctaccctttaaggtaaacagttctggagtgatgccgattatattttctacatcatcccttgctcttcccggtactttagcacgatttactggcatatctgttctaaagaaggctgcagttgctttgaatcccggagggtctttctaccttcctaccaatatattgttgatagccttttttaattactactacactttcctacaactggaccctgatgatgttagtgaacaactgaagcggcaaggtgcttcgattccactggtccgacctggtaaaagtacagcagcattttt

SEQ ID NO: 6850 - DNA, 653 bp, Gossypium hirsutum
  unsure (1)..(653): unsure at all n locations; Clone ID: LIB3828-011-Q1-K6-G1
ggnagttattcatattccttcgtatagaagcgaagttatttacggtgngaacttagttctccagctctcgtaagtttgttcccagttttgtatttgccatctataccaggtttacctctcttgcttctcttcgtcttcatctccctttcatttattctaccaaaaacgcctcttacttgtcatttttttctcaaatatcgtgcaagactcatttttctttctttatgctctagtcttaacaatgcaattcaactgttcgatataatgcttctttatacaatttgtttctggctttcagggggtgttgtttgtaagatgttgaagcaagcgatatggaaggtgttgagcgaaagggtagttttagattatggtgataaacttcttttgccttgtttgtacttgcccacgacttcttttcacgctggacagatacattaacagttgtgcattaagtgatattactgaatctaagcagcttttggataagcttgttgtggtgaagtataatggagctttgggaaagaatatgggtttcggtggtcccgagtaaacaattatctaacttctggaagtttgatccttattttttttccaagaaaagaaagcatttcttgatgattccatagttatatattaaagacttgcctctacat

SEQ ID NO: 6851 - DNA, 98 bp, Gossypium hirsutum
  Clone ID: LIB3828-011-Q1-K6-G2
ccgtccgaaaaaaaaaaaaaaaaaaaaaaaaaaaaaaaaaaaaaaaaaaaaaaaaaaaaaaaaaacaaagaaaataaaaaaaaaaaaaaaaattaaat

SEQ ID NO: 6852 - DNA, 159 bp, Gossypium hirsutum
  Clone ID: LIB3828-011-Q1-K6-G3
gattcgcttcatctatttatatttctatatgatggccctttccccatctttatatttctctcttcattccagttgtttaactaactatcgactttaacagagatctatactggcggacccaggagtagttgacggtctgcggcggaatcagcagggaaa

SEQ ID NO: 6853 - DNA, 606 bp, Gossypium hirsutum
  Clone ID: LIB3828-011-Q1-K6-G5
gcgcttcattaatacacgcctgcttgtttggagcaaatgagtggcgatttgaagtctgtaattcgcaaaggcaatgtagcatatgggaattttcatgatgatggggatctctgctctcctgatctcggggagttatgtgatggtaaaagcgagaatgggtttaaactagagcgggatgctaagggtttagagaccgggaaatctagcattgctaatacttgcccctcaaaagatccagttgcattgcctatgacatattcggctcctgttaattctaaacgagatgttaaattgccgtctcgtggggaccgtattcctaatgcttctttttcaagacataggaatgatattaagttaggtagtagagatgatgatgaaaacttttctaggttcaatagacttagctacaggtttaaggcttctaggcctccgacacgtatcggagatcgaaggataaggaagttgctgacatccaaatattggaaagtagctccgaagttgaaggatttcgaacattctaaagccgatggaggaataaggcctctttatcgcaagcggaagtcctactataactatgacagatgtcaatacgaaacacactacaaa

SEQ ID NO: 6854 - DNA, 621 bp, Gossypium hirsutum
  Clone ID: LIB3828-011-Q1-K6-G6
gcttttagctctccttttgatcatctcctttttggtttttcgtaaagtgaaaggatgttaggcattttcaagaaagaattaatgaatcctccaaaggagctgcatagcccagcttcactcacttcatcaaacaagcccaagcttcccaatcaaatcatcaaccatttcctttcttcaaatcccaacaatgctttctcaatggggttcggatcctcagcttgctttgcttatgctcccacagagaatcgtttccccagtcatcaaaggttgttttgtggagtggatgaaatatactgcatattcttgggggatttgaataatttgagcagcctgctaaagcagtatgggctgtcaaagggcaccaatgaagccatgtttatcatcgaagcatatcggaccctccgagaccgtggtccgtacccggctgaccaggtccttaaggatcttgaaggcagctatggatttgtggtgtatgatagcaaagctggaagtgtatttgctgcattgggtgcagatgaaagggttaatctctattggggtgtagcagctgatggatcagtagttgtttcagataacttgaagcttataaaagaaagctgtgctaaatcatttgcaccattt

SEQ ID NO: 6855 - DNA, 633 bp, Gossypium hirsutum
  unsure (1)..(633): unsure at all n locations; Clone ID: LIB3828-011-Q1-K6-H1
cggnagcgtgggcgngagcgtggggttcataataaggggaaccgaaaacggaaaagaaacgaaaaaggcaaaccctaggaaattcttagcttccgattttgattcanttgaagatttacatttcgagatcttaattcttcagtaatccagaggaactggttgttcttggccaatgtcgaattccaaggggtcaactaacataagaaatttgatgttttctggcaagcatgccttacttcctcctaaaagtccatttcctacagtggcctcaacatataatgatagtgcccccaacagtgtaattggatcaaaagcaattcaaaaacctagagaaggaagtacataccaccagcgcacttcctctgaaagccttctgatagaggaacaaccttcttggcttgatgatctccttaatgagccagagactcctgtgcgcagaggaggtcatcgacgctcatcaagtgactcttttgcatatattgatgtatctaatggtcctaacctagattatgcagcacaggatgagtatggatataaaaatatgatttctggactttcttggngcgtctcaaggactttgatcaccacaattgcaaagatggtcggcttaactctttccgtgctgatgtgaac

SEQ ID NO: 6856 - DNA, 352 bp, Gossypium hirsutum
  Clone ID: LIB3828-011-Q1-K6-H2
taatcccactaatgccaggacagtcgggatgtgagagtggagagtgttgccgtcagggttgtggtgggacttgtgctgagtgtggtcagcccaggtgcgcatcaggatgttgccaggctgaaactgtaaagagcaaagggatagaagaggttatggacagtgaacccagtccaccaaagtagagagatgataccatattaagatgaaataacgaggaagagttggttgtcgtcttattaattatacaaaataagaagtaatgatgttgcagaagggtttgctataaaatcctcttggacaaaaagagtaattatgaagaataaatagctcaaaacaatattcgatttgcaat

SEQ ID NO: 6857 - DNA, 613 bp, Gossypium hirsutum
  Clone ID: LIB3828-011-Q1-K6-H3
gctgattgcacttttccatcaatcatcagtttcttgttattcttttttatctgtatgataagagcgccatggagacaggtcaaaccgtaaccccgatcccgctatggaatattgtggtgatttcagccattgccgccgggatccaattcggatgggctctgcaactttctcttctaaccccttatgtccaaacccttggtgttcctcacgtctgggctgctttcatttggctttgtggtcccatctccggcctcgtcgttcaacccattgtaggctacagcagtgaccgttgtacctctcgcatcggtcgtcgccgacccttcattgctgttggagcttgtttcgttgccgtcgctgttttcatgattggcttcgccaaagacatcggtcaccgatctggtgattcactgcaaaatcccacaaagcctagggccgttgccatcttcgttacaggtttttggatcctcgatgtggctaacaacatgttacaaggtccatgccgcgctttcttggctgacctttcgtcgaatgatcataaaagaatgaggatcgccaatgcgtggttctcgtttttcatggctgttggcatcgttttaggttatgcagctggttc

SEQ ID NO: 6858 - DNA, 638 bp, Gossypium hirsutum
  unsure (1)..(638): unsure at all n locations; Clone ID: LIB3828-011-Q1-K6-H4
ccaaatgggnaaatccgcagtgatgaaaccataagaaatcccagatctgggctagttttgacgggaagtagagatagttcaggtatgattaatttggttgtggatcataagtatgatggttctaggcaaactttctatgccagcaacaatacaaagccagcagtgaccaccattgtcggttacaaagacatgtgcttgctagcaagtggaagtcgggtgtggctggaagactgcgtgagcaacgatgctgaacaacaatgggcgatatatccagatgggaccatcaggcctcaaaagaatagaaacgggtgcctcaagtatgcaaatgattatagtgggttggtcaacgtggctacgtgtgatggatttgttgaggaacgatgggtatttcgaagcgatggaaccattttgcataagatgactgagatggtaatggatgtgcttgatcctactgcaacccttcttgaggtctcggccaatcattacaacaatcaacaatttagccagatttggtttcaggtgcaaccatgaaaacaaaaaagagcatatactggtctctttccatgtattgaatgaataaatgctgggatgatcatgtacccaacaccgtttgctaatagacactntttatcttcttc

SEQ ID NO: 6859 - DNA, 606 bp, Gossypium hirsutum
  Clone ID: LIB3828-011-Q1-K6-H5
gtgagcagttgtctggttttgcattcactgttaatggatgggtgcaatcttacggatctcgatgtgtcaagccaccaatcatctacggtgatgttagccgccccaagccaatgactgttttctggtcatctaccgcacaaagcatgactgcacgcccaatgaagggaatgcttactgggcctgttaccatccttaactggtcctttgtcagaaatgatcagccccggtttgagacttgctaccagattgccttggccatcaaggacgaagtggaggatcttgagaaggccggtatcaatgttatccaaattgacgaggctgctttgagagaggggttgcctcttagaaagtcggagcacgccttctacttgaaatgggctgtccactccttcagaatcaccaactgtggtgtacaggacactacccagatccacactcatatgtgctactccaacttcaatgacatcatccactcaattatcgacatggatgctgatgtgataaccatcgagaactcacgttcagatgaaaagctcctttctgtattccgtgaaggagtgaagtatggtgctggaatcggccctggtgtctatgacatccactctc

SEQ ID NO: 6860 - DNA, 570 bp, Gossypium hirsutum
  unsure (1)..(570): unsure at all n locations; Clone ID: LIB3828-011-Q1-K6-H6
tngaaaaatcatacatgtgaacgaatattttattttattttttattttatttgtaagaaacatgtgatgaataatgaaaaaattgaaatggagctttggaaagtaaaaaaaaaaaaaaaaaaaaaaaaaaaaaaaaaaaaaaaaaaaaaaaaaaaaaaaaaaaaaaaaaaaaaagaacaaaaaaaaaaaaacacaaccaaaccacaagcaaaacaaaaataataaaatagaaaccaaagtccacctaaactgaccaccctggcccaacgttaaacaccggggaaaaccggggaaaaccccgaaccttacccaccttgaatggccttcgccccttatccccccttggcgccagttgcggaaaagtgcccaaaaggcccgcccctaccaaccttcccaaaacctgcatggccaaagtgacgaaccctacaccccctgattaagcgcatcaagcgcggcggttacgggcattacgaccattacaaccgccacacccgtaagggcccaacctcccgctcctttcccttcctttctttcctctttcgccgcttttcccggtttacccctaaaacc

SEQ ID NO: 6861 - DNA, 277 bp, Gossypium hirsutum
  Clone ID: LIB3828-011-Q1-N6-A10
atcatcataatcatcaaactgcatcagttcaaaaagccgaagataacaattcacaaaggcagttgcttccattattgcaggcagccaaaccatgccatgaaggcaagcataaaaaataaaaatcaaccagatgcagtctttttctgctggaaaatgacagcatagataggaacaaacacaccaatgctgaaggctgtcaaaactccaagagacattgtcagcttctgatttttcatcctatccaagttgtacatatgtttagcatggaggtaatacg

SEQ ID NO: 6862 - DNA, 554 bp, Gossypium hirsutum
  Clone ID: LIB3828-011-Q1-N6-A11
atcgagaaatgagcatgcctgaaatcgagtagagcatatcggttttaatttacaatgaccagaaacaaatggtagaaacgatccaaaaaagagttgatataatataagcgaaaccgtagcaattaccagtgttaaaaaaaaaaaaaaccaaaatttatgttacagatgaaatgcctgtaagaatcctctaaaaaatctaaaatctaatttcatcacttattggggctactgagctcctaaaggttccgatggctgctgcagcaactcaagttcctctaaatccaaatcctcggtgtggattggcggtatatcctcagcctgtagtaactgatgtggttgctggtcttgtgccattgtgtagggttgcggctgtgacatacggtaatatggctccttgagatcgagtttgcaagatgatgtctgaataattcctccttgttctgccccgggaccccacattttagctgacaatgttaggtatatggtataactttgagcattatgggcaatcatatgaagttggcctgttatttcttgcccggccataacgtaaa

SEQ ID NO: 6863 - DNA, 572 bp, Gossypium hirsutum
  Clone ID: LIB3828-011-Q1-N6-A12
agccaatcttggattttaattgaatatcaataagggatttcaatatgactaacaaatatccaagtcaaatgaaacaacacatagtaagaaacaatatgactaacaaatatcaatggggggaatataatagctaacaagtacgaacatacatcatcaaacattaacttttaccagtgtagatgaataaaccaacagcgacaataatgagctatgctattttgcagagacatcgcagtccggagatttgctgattgcatttgcatttcctcagcaaccttcctctactttttattggtttgggtttaattttcattaaattgcatgctcgaacccttcaagctaaccatgcttgctacctgtaactcagccaagtaaatcatctgaaaaccagattgtggcaagttttgtcgcaaggatacggacaatcaacgaccttcactgcggttctgtcgaaataccaatctccaacagctatagcgattggcttgtttctaatttcaggagaattatcagcaaaccatgtgtcttgcctttctgattggcagtgagcaaaacatgaatttataaataat

SEQ ID NO: 6864 - DNA, 575 bp, Gossypium hirsutum
  unsure (1)..(575): unsure at all n locations; Clone ID: LIB3828-011-Q1-N6-A7
gcaccttccataataaagaatatcttattaatataaataaaacatagggaaaaaattgtttaacttaatcaataattgacaacatgattactaataatgataataaaaaaatactaatggcgatggttttggaagtttacactccagggaccatgtcaggataacaaggagtgccggtttgcgaaatccatttgtcagtttcagtttcaagaaagacgccaggagtccatttcttggcttcatttatatcgattgtcttgatagctggccatttgaccctgccttcggttttagcccctggtcccctattttggaactctacaaagtaaccggtgtctagtcctacggttccttccatgggggagtaaccctctggtgtaatgatgtcatcaatattgctttgcattatgatggtcctcgccaaagctttccaaggacgaccaagatacgtcttgctcttgtccttcaccgggaggtagtcaggggcgcctgagatggtacaattttgaagcacaatagctgagtgagtgtatgggaatttccttccgtgggccgnaatcatgttgttctggttt

SEQ ID NO: 6865 - DNA, 570 bp, Gossypium hirsutum
  Clone ID: LIB3828-011-Q1-N6-A8
aacaaagaaaacatatatattagcatgcacatgcattaattacatatggctacaaaacaagattcaaggaactttaggatattgcaaatcgaatattgttttgagctatttattcttcataattactctttttgtccaagaggattttatagcaaacccttctgcaacatcattacttcttattttgtataattaataagacgacaaccaactcttcctcgttatttcatcttaatatggtatcatctctctactttggtggactgggttcactgtccataacctcttctatccctttgctctttacagtttcagcctggcaacatcctgatgcgcacctgggctgaccacactcagcacaagtcccaccacaaccctgacggcaacactctccactctcacatcccgactgtcctggcattagtgggatttttgggacttgtgggatctgtgggacttgtgggatctgtgggattagtggaatttgtgggatttgtgggatctgtgggatttgtgggatttctggaattcttgggatttctggaatttgaggaaatggtagaacgaaac

SEQ ID NO: 6866 - DNA, 476 bp, Gossypium hirsutum
  Clone ID: LIB3828-011-Q1-N6-A9
aaggggaacatattatttttattatatctttatttttaatctaatttttattatttattttagttttgattctaaatttttatttttattttaataaaaaatttaatttgataatgaattttaataaaaaatttttggttttatatcatggatattattcttcccaatattttgataatgaattttaaattttttaaaaaaaaaaaaaaagggcggccccccttttttttttttttttcaacaaaaatttaaaatcttttttaacaaagttaaaaccagtttaaaaagtcttattgggccaaaaaaaaataatgcccacctgacaaaaaaaacatcagcttgattcaaattctcaaaaaaataaagttgaattttaaacatgggaacccgtaattgggaacccccttccaatgatctctccaccaaaaaaccaggcatagcactcaactccaatcaaagcacccctgcctgcattt

SEQ ID NO: 6867 - DNA, 547 bp, Gossypium hirsutum
  Clone ID: LIB3828-011-Q1-N6-B10
agttgcaaaaaaaacactattatatctacatatttagagaaaaccttctgactttctatacattttgtttcaaaatcagaagccattcacagttttaatcacaaaaaacttccaaaaccagcctatacaaactagcatttattaaaacccagttcacgataatcatcaaaccaaccatactaaaacgaaattaccttgccattatttaacacacgctcacttccggccttattgcgagacccgaccccgtgttgaatccgacccgcttctacccaattcctccccacccggtaccacaattcctgagtaaactggcactgcacccgcatttctaactccataatatataggttgtttcacaccatcaggagccactcttaatgcgggatcataagggtccacgtgcgttactggcctgtatccttgacccacaccagcaaccggccgatgatacccaaccggtatttgacccgttgacattggatactgctggacatactgtggccggatttgaacaggttgaacctgcggatttcccggttgaact

SEQ ID NO: 6868 - DNA, 537 bp, Gossypium hirsutum
  Clone ID: LIB3828-011-Q1-N6-B11
agatcaaaatgcatgcttcatttgtaggacatgaggtgatagaaattcataatcaaaatagatgacaaacgccacacggttttgccttcatttgtagagcatgaagttattcgaatattatcacaatagcacaacagtcaaacaccataatcattggggaagcgtcaaagcgcttcacttgagcagccccttagacttcaaatattccacggtttggtcgtagatttcctcgatcccatacttaaagctgaatccttcgctaataagcttctctgaggaaatgatcaacttgggtttggaggggaaatctccaaaatcggtagggactttgaagtcagggtatcttttgttgaggaactttgctagttctggcacactggtattgacagcactgcatatatatcgacccgatgcagattctttttcagccagaaaaacatgggctcggcattcgtcttccacatgtgtgatagagatcgaacctgacagcatctgcattcctttcaaagcatttatgaggaattcattgcctgaaat

SEQ ID NO: 6869 - DNA, 605 bp, Gossypium hirsutum
  Clone ID: LIB3828-011-Q1-N6-B12
gcatgtaatgaaatttatagctcattcgacaagaagtaacagaaataaggcctcctaggacaaaatttgccttttagaaaacatcattaaactatcttttccaggtttttgttacatctcataagacttcggtttggtcataaaaaggaagggaaagcaactatatgtgaatttaactatcataaaaacaaaaggaaagcatttaaagattgaagatggatccagcttggtctcccattaatggcaacaggtgaaaagccttctcatttgcctcaccgaaaaatttgaacagtcgatatccttggaaacaaattctctctatttccttccactcttggctgatgggggaattaggcctcttttctctaagcttttaaatctatctcttgcaagtgtagcacaaccctttagctacggagagatccagtaagttcttcggataagaggacttgtgggggagcaggctggaatttatatttccctaagcgtggtggacaagacttaagtctttcttgcttagctatggcctttcgaagatgcctcttttgcttctcctcatcctctttggctatttcttgtaaaatatctggcaagttgtcaatgtc

SEQ ID NO: 6870 - DNA, 190 bp, Gossypium hirsutum
  Clone ID: LIB3828-011-Q1-N6-B7
gaaatcacaagcttcattataaaataaaatttaatctcaaattatttcagatcttgattcactgtgctaaaaataagtcctcaaccaaggccaaatggaacttttgaacacctttctgtttcctagtcctaaacacaaagatacaaatttccagtctataaatgaaaaagtgcagaaccccacgcgtccg

SEQ ID NO: 6871 - DNA, 571 bp, Gossypium hirsutum
  Clone ID: LIB3828-011-Q1-N6-B9
ttttttttttttttttttttttttttttttttttttttttttttttttttttttttttttttttttttttttttttttttttttttttttttttttttttttttttttttttttttttttttttttttttttttttttttttatttttttttcggggggaaaaacccctttaaaaaagggaaaaaatttaaaaagaaaggggaaaaaaaaaaaggggaaaaaaaaagaaaaaaaaaaaagggttgaaaaaaaaaaaacccctaaaaaaaaaaaaaaggggggaaaacccccttgggggggggggaaaaaaagaaaaaaaaaaaagcccccccgggggaaaaaaggggcccccaaaaaatcaaaaaaaaaaaaccggggaaaaaggaaaaccggggggttaaaaaagggggaaaaaaggggatttaaaaaacgggccccccaaaaaaaaaaaaaaaaaaatttggaaaaaaaaaaaccgggaaaaaaaaaaaaaaaaaaaactttttaaaaaaaaggggccttaaaaaaaaaattttttttccctaaaaaaaaaaaaagaaagggggggagg

SEQ ID NO: 6872 - DNA, 580 bp, Gossypium hirsutum
  unsure (1)..(580): unsure at all n locations; Clone ID: LIB3828-011-Q1-N6-C10
atataacanaanaaaatcatatatattagcatgcacatgcattaattacatatggctacaaaacaagattcaaggaactttaggatattgcaaatcgaatattgttttgagctatttattcttcataattactctttttgtccaagaggattttatagcaaacccttctgcaacatcattacttcttattttgtataattaataagacgacaaccaactcttcctcgttatttcatcttaatatggtatcatctctctactttggtggactgggttcactgtccataacctcttctatccctttgctctttacagtttcagcctggcaacatcctgatgcgcacctgggctgaccacactcagcacaagtcccaccacaaccctgacggcaacactctccactctcacatcccgactgtcctggcattagtgggatttttgggacttgtgggatctgtgggacttgtgggatctgtgggattagtggaatttgtgggatttgtgggatctgtgggatttgtgggatttctggaattcttgggatttctggaatttgaggaaatggtagaacgaaacccca

SEQ ID NO: 6873 - DNA, 603 bp, Gossypium hirsutum
  Clone ID: LIB3828-011-Q1-N6-C11
atctcaataaatctatttgagattttcatccgattaaaagaaagaaaaagaataaatgtcttgagtttccttatctaactcaatgaataaagaatcggctcgccacctctaggaacaaacattaaatggcctaccaaataagatgatcagcggagactgatcaagctaaatgcacctacgagtaacagcttggcaggcaacaaaagaaccacaaacaaatgcatgtgctgtgatgcaaccagcctactgaatcttttcaaggattctctccctgtttgtaaaacgccagcaaagttgaattggtcttgccccgcattcattgttgctactgacctccgaagaatgataccacccgcatttatgtcgtgaggtaataccaggggccaccagatcttgcgtcgctgctctctcttggtcttcctgatgcgttttagctcctgtcgtatcacgcctttaacacattttaagtaagaattcatgtcatggtctctttggattgttccttcagaaccatatgcagaacggtcgcttaagatctcaagtggatgtggtgagttaaagaaaactctctgtgcagccaagagcagcttctcttcactatca

SEQ ID NO: 6874 - DNA, 579 bp, Gossypium hirsutum
  Clone ID: LIB3828-011-Q1-N6-C7
ttttttttttttttttttttttttttttttttttttttttttttttttttttttttttttttttttttttttttttttttttttttttttttttttttttgggacggggggggggaccgggaaattcgggggggggccgggggggggcccaaaaatcccgaaaggggagggggaggaaaaccgggggaaaaaaagggaaaagggggaaacggggggaaaaagaaaggcaaaaaaaatccccagaaaaaaaaagccggaagcaaaaagggaaaaaaaaggggggccaaaagagaaaaaaaaaaaaaaggggggggggaaaggaaaaggccaactaaaaaaaagggaaaccggcccaccccccggaaaaaaaaaaaaaaaaaacggggggggagaggggaaaaaaaaatcgaaccccgggggggaaggttttttcccaaggggaacggggaaagggttatttcccccaacgggaaggcccaaaaaaaagtgcaccaccccccccaggccggggaaaaacaaaaaagaaaaaatccccctgggggggggccaaaggggggaaaaaaacaggggggggggggg

SEQ ID NO: 6875 - DNA, 515 bp, Gossypium hirsutum
  Clone ID: LIB3828-011-Q1-N6-C8
actagaatattgctcacatacatatgcattaattttcaaacatttaatcttaaaactattgccaacaatttcaccaaatacttatcaacttttcaaatggaaacaccaatcattagaggtaccaaaatggtagccattgatttcaacacttttctacctaatgataactttgaagacccagaaatatgttggctactatcagcaggtaatggggcaggcaccggaaaatcatcttcaggggaagaaaaaaatgggactggtgatggaggtggtggtggcaatagaggtggtggggccactgaagaaggtggtggtggtacaagaaccatggtgttagagcaagtatgtagagatatattactttcagggtttaacaccccatcgataccatggcaccggatggacgatccgatagtacatatattcgggctaatgattttaacattattgaggacgaaacttcttcgaccaccgccattcgagacattcatcaagtactctggcattaaactggg

SEQ ID NO: 6876 - DNA, 521 bp, Gossypium hirsutum
  Clone ID: LIB3828-011-Q1-N6-D10
atggtactgaatgaccgatatgtgacagtcaatcaaatgaaatgatattcattgaccagattctaatagattgattgagcactgaaatgtttcaactcaatccacacacaccaacaaagaatttcaaacaagcccctagaatacaattttgagtaaaacctcatctcaaagcaagcaaacacattccctaaaaaccaaaccctttatctaccataagaaacttaaaactgatatagctagaattcaaaggcaaccaacctttactctgtacaaagaccggctccaacaagctcactccagttattagcctccaaaaaatgagaaaaacccacgctttttgggctcctcctcaaccataacagccttcatgctatcctgctcaacaagcctccaagcggcttgctcgaaggccaacccagcaagcgtgggaggcttattcagaacaagtgggtaccctctgttggtgcttctgataacctcggaatcctcaggaattacccccaacaatgccaaccccagca

SEQ ID NO: 6877 - DNA, 609 bp, Gossypium hirsutum
  Clone ID: LIB3828-011-Q1-N6-D11
aacaataaaagatagtgaaacattgttacttaaatgcgaaccatgaacaatgtccatgtccatacaaagtttgtttatttatggaaacagcactggaactgatcctaactaagcaccctcaggatctgagtacaaccccagaaccaagatgtccatacatacatacataaatcacccacatagaaatagaaacaaggaacatcgattattttcaaagaacattacttttgcagaatactgagatcaaaatccatgagcactaggatcctttaacaattgttactggacaagttgcatttaccatcacatggttgctcacacttccaatcagtaccctttgaatggtgccaaggcctctgctgcccattaccaaacaatcaagcttcaaatctgcaacagattcacatattttatccctggcatcaccccagtaaatctttgtgacaatattcacctctttctgccttgaagccgtatcaaccaagtctaaaacctcaggatcaggttccacctcataatgtttcatcacttccttctctctgaactccgataatggaatcaaaggtgagccactggtggaccaaagaaagttacgagactcgtcgctct

SEQ ID NO: 6878 - DNA, 312 bp, Gossypium hirsutum
  Clone ID: LIB3828-011-Q1-N6-D12
ggtgtgtcgagcgatactcaagggcgaataggatgaatgggtggaaacaaaattaaaattgcactgcatcatgaacataatttgtacatgcattgatttactgaatgttctttacattatgcttaaattttgctatgatgctataaattgaatgttttactatttgaacaattatatatataatgttttaaaaattaaattcacactgagttgtcatatgctcactccccctttttttaactctcaagtaatatagaaaactaggactcggaatggcatcgaaggaacctcagactagcaactcgttttttc

SEQ ID NO: 6879 - DNA, 490 bp, Gossypium hirsutum
  unsure (1)..(490): unsure at all n locations; Clone ID: LIB3828-011-Q1-N6-D7
ggaaggactgaaaccttggcattcactaagaatgtgaaaagaatctgaaacaatgaaagcatcacaaagaacagtctaggatttacaataaataatgtacactatttcatcatacacccttaaaacactcaaaaacccagcaccaatgtatacagagataaaagataatctcctttcatgctctggatggtggaaacattttggacatttacctgcaattgcacttctcctgaggcaggtagcttctgctcttaagttccgtggatttcggcaacaagaaatacaggaaatctacaagttcactggaggacttcccttgaacaaaagatcataagcaatgtgttcccaaggcaatgttatagacattaagcaacatttgagaggtatcatttcttcatcagaagatgaagtggcagaagccactgcataagcgttctttgctgctacagatgcacccacgcgtccgcccacgcgtccgcccacgcgtncg

SEQ ID NO: 6880 - DNA, 595 bp, Gossypium hirsutum
  Clone ID: LIB3828-011-Q1-N6-D8
aactgctcatgctttgttactaccctccaccatctttattctccacaaacatgcaattaaacaaagtaaacccaaccaaaactccatgaaagaactcaactgagttccatgttaaaggtcataaaaggattatataatctcatgcctataaactgaaacataaaacatcacctaaatacatttaaactgcttaattgatgataaaattccacagaaaaaaaaaagaaaaaaaaagtggatgcatggcatacaacagctttaaacttattgacatgtatcatacttgtcctgagaaccttcgccactgaataccttcaattctagcattcaaacagttttgtcgaactgtgctcgagaatttctcctagcactttccaaaacagttttatctacggtaatgaagtaggccgcaattgatgctccactgatgataagagcttgagcagtatggttgaggtttgcctttgcccaaggaatcttacgtactgcaatcaaggtaggtacggcgctgacaacggcggcgaccgcagccgccttgacaccggcacgaattccttcttgagagaattgcttggctctcaaattcttctcgtct

SEQ ID NO: 6881 - DNA, 585 bp, Gossypium hirsutum
  Clone ID: LIB3828-011-Q1-N6-D9
aaaacaacctaaaatcaaatatatattagtattatttggttgaaacagatggtgctacagaggaagagaatcgggtcaggtcgccccaggtttacaaattcttcaaagcttacaccattatgaacttaaagcacaagttcaataaaattatttaaacgatagagatactcaagcttgtcgggaaaaacaggcttccaacttcaaggtgtcttaaacttgggcggtgacggaagtaactgataacaggagatgagagatgaaacaaatccaaaggctcccgttactcgaggggtgactttcttcggtgccaattgaagaagcccaactgctactactatatccattcccgctttaacaagggccaaagtcctctcatttgaattttggagcttcgcacgatactcctcattcttgtacttgtcactatccttaagtctcttttccaactttttcattgatgcagatagccttccaagctccccaagctcaaccaatgtggtacatattgatgatcccatccaacagaaaagggatattcgtccaatcaactcagcacgttctttgttcttatagatgcctgttctg

SEQ ID NO: 6882 - DNA, 390 bp, Gossypium hirsutum
  Clone ID: LIB3828-011-Q1-N6-E11
ggggggggtccccaaaaattggtacaaaccttttaaaaaaaaaaaaattttaagcccttgccctgaaacccaaggggaaacaaataaaggaaaaacccccaaagggggaaaaggggttgaaaaaaaaacctataaaaaaaaagggttacgggtttaaaccccaaaaaaaaaaatttgggcccaaaaaaaacctttttaaaaaaaccggccaatgatttttttcccaaaaaaggaaccaaaagggtcttggggcttttttttgaaaaaaaattaatatcccaaacgggaaaccccaaattgggggggggggccttaacaaaaaatgggcatttgaaaaaaaaaaaaaaaaccggttattggggttccaaaaaaaaaggacccggggggccc

SEQ ID NO: 6883 - DNA, 542 bp, Gossypium hirsutum
  Clone ID: LIB3828-011-Q1-N6-E12
tttttttttttttttttttttttttttttttttttttttttttttttttttttttttttttttttttttttttttttttttttttttttttttttttttttttttttttttttttttttttttttttttttttattttttttaggtttttggtggaaaaaaaaaagggggggaaaaaaaccggcaaaggggaaaagaaaagggggtgttggggaagggggtgggggttaaaaaaaaagaggagaaaaaaaaaaaaggggggggggggggggaaaaaaaaaagggggggggggtgtggaccatttgaaaaaaggaaaacttgagggggggagaaattaggactgggggaaaaaaaaagcgggggggcaaaaagatgggggggggagggaaaggaaaaaaaaaaaaaaaaggggggggggaaaaaaaaaaaaaaaaaggggggggggggccaaaaaaaaaaaaaggggggggggaaaaaaaaaaatgggggggggggaaaaaaaaaaaggggggttttttaatattttaaggggaacggggggc

SEQ ID NO: 6884 - DNA, 596 bp, Gossypium hirsutum
  Clone ID: LIB3828-011-Q1-N6-E7
agccaatactactaattttcattattgtaaaccaatggaacaaggctggaatgcaaacataacgagtaatacacacaagcttttcacatatattaaactacacaaaacagcacataatcgccaaacttcgctctctagtataacgaggcattaccacatgacatagtatcaagtagcataccacctttacatctcatgaacagcttcctcgtcttcatcctcgtattcaagttcatcctcagctgttgcatcctggtattgttgatattcagaaacaaggtcattcatgttgctctcagcctcagtgaattccatttcatccatcccttcaccagtgtaccagtgcaagaaagccttcctcctgaacatagcagtgaattgctcactcactcgcctgaacatctcctgaatggaggttgagttgccgacaaaggtagatgccatagacaggccccgaggaggaatatcacaaacactggacttgacattgtttggaatccactcaacgaagtaggatgagttcttgttttgaacgttaatcatttgctcatcaacctctttggtgctcatcttacccctgaacatggctgaggctg

SEQ ID NO: 6885 - DNA, 507 bp, Gossypium hirsutum
  Clone ID: LIB3828-011-Q1-N6-E9
ccccacccaaaaaagcaaatgggttattaaaacataaaattaggtttggggctacttcacttcacttacacggggacaggaaaaggggggttaaaaattcaggcaaacattttgggggtaaaacaaaaaaggacaaaacccaggggggagggaacacacccgggtaaaactttaatttttggaagaaaggggcctttaacaaaaattcaggggggggggcataacaacatttgaggacccaaaccaatcaagccattgaaaccatgggaggattgggagcacttggggggctttgcctttgcccgcccacgggggtttaaaaaaccagctatacctttgggggaccaccccaagaaaaactctttttccaaaagggcatcatcaaacaaaacttaaaaaactaaagccaccccctttggtgccccagggggggccttgccacaaaaaaaccccataaaagggaaaagccttctcggggacccccttttattgggtgaaactgctgcc

SEQ ID NO: 6886 - DNA, 526 bp, Gossypium hirsutum
  Clone ID: LIB3828-011-Q1-N6-F10
ttttttagtttttttttttttttttttttttttttttttttttttttttttttttttttttttatttaatttttttttttttatattttttttttgtaaaattttttttgttttatttttaattttatatttaaaattttatttttttaaaaaaaaaattaaagggattaagttaaattttttttttgaaggaaaaaaaaaaaaaaaaaaaggggaaaaaaaggaaaggaaaaaagtaaaggggcccaaaaaaaaggaaaaaggaaagaaaaggtgagctaaaaaaaaaaaaagggggaaaccggaaggaaaacctgggtgggggggaaaaaaaaaaacttttttgtttaaaagggggaaaacccaaaaggggaaaaaaacaaaaaaagggttttaaagaagaaaatttatccagaaaaggtggaaaaaaaaaaaaaaggttccgaaatttgggcaaaaaaaaaaaaaagaccacttttcccgggagcgggggaaaacccgggaaaaagagaccggcccctggggg

SEQ ID NO: 6887 - DNA, 597 bp, Gossypium hirsutum
  Clone ID: LIB3828-011-Q1-N6-F11
tcgcatttttttctctcactttcagctttgcatttcgtctcttttggggaaggtggtttgatatgggggcctcctggattttgccagatctcggaaccgagatcctgatcccggtttgtgccgtgattggaattgccttttctctcgttcaatggattctcgtttcccgggtcaagctctctcccggtcgagactctggtgcccccggtaacaacggtgccgctggtaaaaacggctacgctgattacctcattgaagaagaagaaggtctcaatgaccacaatgttgttgttaaatgtgctgaaatccaaaacgccatctctgaaggtgcaacctcatttcttttcaccgagtatcagtatgttggcattttcatggttgcttttgcaatcttgattttcctcttcctcggctccgtagagggtttcagcatgaagagccaaccttgcacatatgacctatctaggatgtgcaagcctgcccttgccactgctgcgttcagcaccttatcattcttgctcggtgcagtcacttcagttgtttctggctttcttgggatgaaaattgctacctatgcaaatgctagaaccacccttg

SEQ ID NO: 6888 - DNA, 450 bp, Gossypium hirsutum
  Clone ID: LIB3828-011-Q1-N6-F12
aaaaataaatgtgcactgaatttcaaatatacaaaaaacatgtggacttgcatcatatttcaactttcaaattttcattgtataatttaacccaaaaaataattaacccaacacgaaatgtagttgaaaccatattgtattatgattattattaagtgacacactatgattttcctattttagctttgggaaaataaaaaaactaaaatggttattacatatgacatgatcaaattaaaagcaaattagaaatatgtgacatttaatttattcataaacaaattcaactagcattctacccgcaaatctcaaacttagaagaggaaataaccggcaatggcaacagctttggcgatagcggataacccaattatggttgcactgctactgctaggcggcagaccagttgcagcaccactgatagcattaaccgcattgtcaagacggcct

SEQ ID NO: 6889 - DNA, 545 bp, Gossypium hirsutum
  Clone ID: LIB3828-011-Q1-N6-F7
cgattatcgattaattcggttcgaaatcgggtaattaaccaaattcaataatattattatataaaatatattttttgaactttaataaaaaaaatgaacattgacaatgtattcttttatctgttttatacttattttaatcaaaagacaaaatcctacaaagttcagttaaaaaaaaaaaaaaaaaaaaaaaaaaaaaaaaaaaaaaaaaaaaaaaaaaaaaaaaaaaaaaaaaaaaaaaaaaaaaaaaaaaaaaaaaaaaaaaaaaaaaaaaaaaaaaaaaaaaaaaaaaaaaaaaaaaaaaaaaaaaaaaagggggggggccccccctttttttttttttttggggaaaaaaaaaggggcccaaaaatttttttttttaaaaaaaattggggaaaaaaagttttttcccccctttttttttttttaaaaaaaagggggggccccttttttaaccttaaaaaaaaaacccccgcaaaggggggggggtttttttttcctttttcccaaacccccaaaaaaaaaaaccccttccgggggggggg

SEQ ID NO: 6890 - DNA, 519 bp, Gossypium hirsutum
  Clone ID: LIB3828-011-Q1-N6-F9
ccctcttttttttttttcttttttttttttttttttttttttttttttttttttttttttttttttttttgggggaaaaacatcactaattctcagttttctttctacattcacaggggcgggccccccaaaaaaaaaaacaattgggataatgcccccaaaaaatatgccaaaagttaaaagaaaggaataaaattggcccttgaaagctaacccaacacttggttgttcaaacaatgcccttgacagatccaaatcaccgggaatgcaaagataaatcagccccccagaaaaatctttctagcttctaattcaaaatcttaaatcccagctgaatggcccccggattaaatggcttcctggaacccagggatccgctggaaaaactaattccaaagacccatgagaaaaacaagtttggaaaacccttcaggatttaactggcagtaggggttatgaatagggcaaaaacaaaagtttcggttttacactgcggcaaccaattgcttttgggttcac

SEQ ID NO: 6891 - DNA, 578 bp, Gossypium hirsutum
  Clone ID: LIB3828-011-Q1-N6-G10
accagcatgtagaatcctctctttctgttctttgaaatattttaaaattcacaacggaatcacttcgttttgacacgagaacctacagtttttcgataatacaatgtccagaaagtatggttacggggttttcctgtatcgaaacaacccaaggtaaatgaattggggatgaatataatcaaccctttaaagagtatttcttccctgtaaatggctggaactttggctcttccttcttttcaggctgctccgatctagtctcttttccggattcctgttttgtatccttagaacggttgacatgtgatccgaatatgagtttcccttgagcctggcctgcggtagcttgtgaacttgatcccgaataaggtcgggtattattcccattagaaatagcaggtcctttgtcttttgacccggatgaagaagctggtggagactgctgcttcagaggcttcccatccaagcgtcttcccgtaccagtaaaggcgctaaactttggttcagcctcagcaggagcttctttaacttgagacgatgctctgttcgaagagttggtgcagcaggccgttctggcc

SEQ ID NO: 6892 - DNA, 569 bp, Gossypium hirsutum
  Clone ID: LIB3828-011-Q1-N6-G11
gcctataatatttcatcattcagttcatttgctttcataaaactcaagacaatatttagaaagaaacttcaaagaaagaaaaatcaagtctgcaaatatccagaaatgcaacagcagttacagcaaaagtaaatgactaattctttcacatccaaaacaggaaaaaaaagcccagcaactgggagttgagattttgaattgccaaaatggcaataactttccttctccttagtcctcatattcgggttcctcttcttcttcttcgtactcttcatcatcagctgttgcatcttggtactgctgatactctgagaccagatcattcatgttgctctcagcttcagtgaactccatctcatccatgccttcccctgtgtaccaatgcaagaaggccttcctcttaaacatagctgtgaactgctcactcacacgcctgaacatctcctgtatggatgttgaattgccaataaatgttgatgccatcttcagcccagtgggtgggatgtcacaaacagtcgatttcacattgttcgggatccactcaacaaagtatgaggagttcttgttct

SEQ ID NO: 6893 - DNA, 227 bp, Gossypium hirsutum
  Clone ID: LIB3828-011-Q1-N6-G12
acaagcaaaataataagttgaatttcataaattcaaaggaaaatcatgaaatcattatttatgaggaaatgtaggttccatgattgattgatggatttcacactctaaaaatagcaacacaagaatgaggcattgacttttatagaaatgggggtggggggtactaactacttatatccagctgatgttgctgcaactttaaggagtaggccgaagagtgaaaaagg

SEQ ID NO: 6894 - DNA, 159 bp, Gossypium hirsutum
  Clone ID: LIB3828-011-Q1-N6-G7
ttttttttttttttttatttttttttttcttttatgtaggttattgaggccttgccctcttctattctaatttggtttggttttttcaaacctaagccggtaattaaataaaccaaaccaaattagaataaaaaagggccaggccccactaccccacct

SEQ ID NO: 6895 - DNA, 573 bp, Gossypium hirsutum
  Clone ID: LIB3828-011-Q1-N6-G9
gaaccaagtctatcttatggactgctgcagaatatgtctatctaatctaaacaaataaaacccataaaccaagataacccaaactaggtgccttctcaaaacttgtgaggcaggaaataataaagaaacaaacacgagatcaacgtaagaggtgacattggttggatttaaatccacttttcataatatgcatataaaggtataaactgtaattccctacccatcatatctgtttccttgttggccaaatttgtagttgcacctatctaacatggcctccacaggcagcagagagcacctttccagttcctccgcctgctttctcattctcgtttaacaaaagaacttctgcaaagctcttggacattttcttcacgatatcattagggagtgagacgaggtttgatgcttcacacactaaatcatcggaagccactaggctggttagctgcctggccttcctttcctgcattgctttttgccgctcttcgtagaaataaaagtcatcaaggattgaagaatgactttcataattcttgaaaatgtttatcatctcaatgccctgttcaaact

SEQ ID NO: 6896 - DNA, 271 bp, Gossypium hirsutum
  Clone ID: LIB3828-011-Q1-N6-H10
atagcaaagaaaacatatatattagcatgtacatgcattaattacatatggctacaaaacaagattcaaggaactttaggatattgtaaatcaaatattgttttgagctatttattcttcataattactctttttatccaacaggattttatagcaagcccttctgcaacatcattacttcttattttgtataattaatacgacgacaaccaactcttcctcattatttcatcttaatatggtatcatctccctactttggtggactgggt

SEQ ID NO: 6897 - DNA, 481 bp, Gossypium hirsutum
  Clone ID: LIB3828-011-Q1-N6-H11
aatgtcaaataatgcaataaacaaaatcatccagacatgatctttttaggtaacaaaaaggaaagagaatccagagccacagggcaaaatagaaccttaactttaatactagcatgggaaaatcaaaaactacaaaagccctgtaaccaaccactcaagcttaaaagattgtttaggacatcgagggctatatcagatggaagtcttctaattgactaaaactagaggttgccaaaaagcatataagtgaggcatatttaagaatctgcaatagtaacctccacctcaacaccaggttcaatggtgatagatgtgatctgcttgaccacatcaggggagctgaaaagatcaataactcgcttgtgaacacggagctcaaatctatcccatgtgtttgttccttcaccacagggagacttccttgttgtgatgtgaagaaccttggtgggcattctcactggccccttaacccttagtctct

SEQ ID NO: 6898 - DNA, 575 bp, Gossypium hirsutum
  unsure (1)..(575): unsure at all n locations; Clone ID: LIB3828-011-Q1-N6-H12
tttttttttttttttttaatcacccagcaaaagagatgaattgagcttacaagccaaaacatgcttctcaacatcccaaaggaggaaaaaaaaaaccagaggacctactaggttaacactgctggcgggtggtaaaagtcccacctctgccatctcctcctgttttaacaaacaacagaaggaaacgtgacccttaatacttttttttttaaaaaggtcccttaattaggacacctaccccctaataaaactaaaaacccaaaatgataaaagggctactttaaaataagcccttcacatttttgagtgacccgaaagtcccactttggggccctttngntggggtctaatatgctagctttcctaaaagtcaagctggttaaatcctacttcggatgcttggtttttttttcttgtnatttttttttaaaccttcaaacgcccttggtgtttttgtgttcctcttgcggttttggcggcctttggtggtttgccctggtgcccccctcctggggcccccttgttggcctccccgttcgggcccgcgcttgtgttggcccttcccgcgaagggtt

SEQ ID NO: 6899 - DNA, 578 bp, Gossypium hirsutum
  Clone ID: LIB3828-011-Q1-N6-H8
atataaaataattatagcttttataaaattagttaattaaaaaatattgaatgaaattatttagttagaagagagagaatgaatgaatgaatcaaattcttgcgcctctcaaaggaaatgttgtatcaatattaaatgattaaaactccttgcaaggagaatgaaaacaataaagaaagaaacatttcctcaatatccccaaacatctcgctcatatcttgaagttgaaatgcggttacatgatgagagttaattgcgagtggtctaacaaggcttgtttgggcggcactcgagtgttcctgaccacctcaccaggagtggcaccatgtgagccggcttatacgctatcatcttgtagcctccgaatttcttggcggccttcgggtctcctgattgtgtgaaaatggcaccgttcaacatcaaatcaccctctgatctccaatcccagttcttccactcttgctcagttgcatattccctcttgcaaacctgtttagctgcaatgttacgtggggctctaaatcggttgccatggctgataattgtagggtgactgctgcctccaatagcggacatga

SEQ ID NO: 6900 - DNA, 528 bp, Gossypium hirsutum
  unsure (1)..(528): unsure at all n locations; Clone ID: LIB3828-011-Q1-N6-H9
gccaaaaaaaggtttattactgggaatatatatatatatctttgttcatcatcacaaagtgaagaaacagagataatatattcattagttccatccaagatgtgctaatttttgttctaatgcatttcagcagcagcgccagcggctcttattttggcattaacaaacttaccaaactccgcaagcttgtcggtttcaggcataacgtccttcacagcggcgtgggaacagaacctgtccgccccttttaccagaccaggcgttttcccctcgtccagcagcttcatcgcgttgaacttctccgtctctcttagccctcccagggtgctcccntatgctttttcaaggtgcccaacttcatccccgccaatgttacccttccctttgctgcacttgtcgtgtgcttcttcctcnatgccaacccttctttcccttgcgcttttgctgctttctttgcttcctctcctttggcggctccttttcttttgcccggtggggaccccttggcgtcttggtttgccgcccctt

SEQ ID NO: 6901 - DNA, 437 bp, Gossypium hirsutum
  Clone ID: LIB3828-012-Q1-K6-A1
gtatgccaagaactagctgaagaaactggggcaagcagaagatgctgaaaggcagcgtttgaggaggcagagaaaaagagagaggaggaatcaaaggatgacccagttgattccgatgctgaggatgaagatgatgccgatgatactgaagggcacgagtctgattccgataccaaatcagacgatgatgacaaggaagatgctcatgatgagctctaagcactgcaatatctcgcagacaattcggtttggtataaatttttccctaccctttattttaaaaaaaaagttctagttttaggagtttcctgttagaggaaaaaggaattgaatgcttcaggcaaaagaactttcactgatgctttcttaatatgattttaactgtctgaacaaaggcatgctctttttcttttttatgatcactagatatttttact

SEQ ID NO: 6902 - DNA, 643 bp, Gossypium hirsutum
  Clone ID: LIB3828-012-Q1-K6-A2
gtgatgcacaactaactatgtcccagaagcttcagttgtcaggtggataataaaattttagcttctttttttccccttcttttggtagaaagtgtttggtactgtgcttgaaaactgacatatatcaaaatcaagatgagcttggactagtcataaaacatgaaataccttttttgctggatgggtgttctactcgctatgtaaattcaagcttcatctatcaaacctcattaatgtcatcatcattcagatcatttgtgcctatatatgatttttaggcgatttccttgataaagttgaatcgctttgacatcacaatagcttgaatgaaaataattactaccttactatgttacctttttgccatcaccttctcccgattctttcttgcgcgaataagaggctaaaattatgatgtcttttattttctaaggtctagtttgagaaggataagaacatcacttttaccctctccccaaactctatttcctttcctactgtccaaccaccaacatccttgaaggggacaaacagaaatgaagggaagcatatcttacttcacttgccctatctgatatattcattaaattcaaaaacttatgtttgatggttttttttctttaatcattgtttgtttttctta

SEQ ID NO: 6903 - DNA, 574 bp, Gossypium hirsutum
  unsure (1)..(574): unsure at all n locations; Clone ID: LIB3828-012-Q1-K6-A3
ctatttgttaanattatcgaaaaagaaaatccttttgttaatcataaaaccttatagaagaacaaatggcacgccaaatccttgctcttactctcgtcttaatttcccttttcgtgatggtttctgctgacatcaagaccgccgccaccaccgttgttgccgctacacccgacagtaatggtgacattggacacattggtaaagttgcaggtgcaccctctagtgttggtacagttgaaggccctgttggcagtgcggttgctggtgctatcagtggtgttgctactggccagcctcctagcagtgatggtgcaaccatggttggggtaacggctgctgtcaccggagctgctgctgttgccggctactttgtcttctaagtttgagattttcgagcaaaaggctggttgaatttgtttatgaataacaaagggtcccattacatactaatttgttatcgtcatatgaaatatgtattttagcttattattttctaaaactaaaaacttcaaaatcatagttttaggtgtacagatacttgcatattaactgacttaatgatagcatgattgcc

SEQ ID NO: 6904 - DNA, 51 bp, Gossypium hirsutum
  unsure (1)..(51): unsure at all n locations; Clone ID: LIB3828-012-Q1-K6-A4
naaaaaaacaaaaaaaaaaaaaaaaaaaaaaaaaaaaaaaaaaaaaaaaaa

SEQ ID NO: 6905 - DNA, 422 bp, Gossypium hirsutum
  Clone ID: LIB3828-012-Q1-K6-A5
ggcggatccccattcaccggtaattaaacgcgggtccctctcatttccggtgcgtttaataatcactttatacgccatggacatgaagaaggtctccaccgccatcattgttgctgccgcctcaatgagcgtcgtcatggctgccggtgcaccatctcctgccccttcagccggtggttctagtcctagctcctctcctggttccgctccagcatcaggaccggattccagcgtggctgccgctaccttgcctgttcttggatcattggttggggcttccattgtttctttgttttcttacatgctgcagtaagctacatgtatgaaaaatcaacatgtcaacgaatattttattattttattatttttgaaagaaacatgtgatgaatattgaaaaaaatgaataaaatggagctttgatt

SEQ ID NO: 6906 - DNA, 544 bp, Gossypium hirsutum
  Clone ID: LIB3828-012-Q1-K6-A6
cggtcgcgtgggcggacgcgtgggaaaaatcttgatgtctaaattgcaaaacctcgtgttgcatctatggttggcattgggcacttcattggcatttttgcgtttgcttgtgaatggtcaatactgaacttggtgggaaatgacctaagaagttttattctgtattgaaatctgtgttgtggagaataaggtggaaaatggaagtttgcctacttgaacatgagctgttactgtagaatgagaaatatttgtggccactgttgcaggatgaatttggttgtgatcagtcttgttgctgcgtagcagtttgcacggcaggccatgatttttctgctagcagcggtatatgacatctcgacttattgttatgaaaataaagttatgggcaataacagataaactgaagtcactgttgcttcgtcttaaattttccacggtagactaaaggggtaccaacatttactttgtcatctatttggttttccttggaaactacttgtttgatgtctccttttaaaaataatagtaaacatcaattatcatc

SEQ ID NO: 6907 - DNA, 422 bp, Gossypium hirsutum
  Clone ID: LIB3828-012-Q1-K6-B1
ctcctctgtgttttccacaaacctttatacatggacagtagcaatcccaaattatgacgaccggggcagcttctatgatcatacacgcggtggtggaggcagaggaggccaatactttacccaatcttcttccctttccacatcttctacttacgattctttgtaccactcgtctatcaatcgaagcaccatcggagacgtatttttcggcaccgacgatataagatacaccagacatttgctttacaaggaagatgtgctcggacagttaccaaaaagaaacagcacaaaaatacttgaggcaacgatcaaagaaaagatcaatctcaaattactggtgtgtcgagttctagaaacttctattactatattgctgcaaatgtttaatataagctgataaattacttaatctgcgaagctgt

SEQ ID NO: 6908 - DNA, 636 bp, Gossypium hirsutum
  Clone ID: LIB3828-012-Q1-K6-B3
cccagcgtccggtttacaaagacgtcgatagagcttccactcaatgggatgatattcaaagaaagcttgggaatttacccccaaagccaccagctttcaagcctgacccttttgaacccgcacctgacccggattccgtccctaaggacaagtcttggatcgatgaaaagactgaagaagagcttgaagaaatcgaagatgatgtcgatgatgatagattccttgaagaatacagaaagaagaggctggctgagatgaggaaagctgttaagatttcaaagtatggatcggttatgccaatttccggatccgattttgtacgggaggtttcgcaagctcctcaggatgtctgggttgttgtcattctctacaaagaaggatttccagagtgtgggctgctcttgcagtgtttggaagaattggcagttaaataccctgcaacaaagtttgtcaagataatatctacagattgcattcctaactacccagatcgtaatcttcccacactcttggtgtataacaacggagcggtgaaagcaaattatgtaggcttgcatagttttggccgcagatgcacgcctgaaggtgtggccttagttctttgtcaatcagatcctgtactgaatgatggtcaaa

SEQ ID NO: 6909 - DNA, 226 bp, Gossypium hirsutum
  Clone ID: LIB3828-012-Q1-K6-B4
ctttcctcgcaataatccataagaatttgcaaatttagatcaattaattcttctcgaacaatacttattctgatatatatatacatatatttctcccttcgaaatgtatcgaaatctttgtaattagaaagaataggatattacaatttacgagattgaatcttatattcgaatgaaacttataatattaagcaagtttaacaaatacaactagtttacttatgtt

SEQ ID NO: 6910 - DNA, 631 bp, Gossypium hirsutum
  Clone ID: LIB3828-012-Q1-K6-B5
aacctccttttcttttctttctttctttttttccccttgttttcttattgtcatttgtgcctctttttttttcattacaagaaatggcttttagtgggacgacagagaatgcaggtcttgtgataagactgttcatttcattgaaatggtatctgttgatggtgtaccttatcataagacttgttttagatgcagtcattgcaaaggccttcttgtgatgggaagccattgtcaaagggaaggaaacctttattgcaagcctcactttgagcaattctttaggggaaccgggagttacacttccaaagacaagcccaatggactgcaaagggcaccaagcaaagttgcatcccttttctctggcacacaagacaaatgtggagtctgtaagaaaacttgttatcctttagaaaaggtgactgtggaaggtgaaatataccataaaaactgctttaggtgtgcacatggaggttgttttcttacaacatcgtcatatgccgcattggacggtttcctgtattgcaagcaccatttcgctcaattgtttaaggaaaaaggcagttacagtcatctaactaagacatcttcgatgaagagaagcccctctggcgggaaattcgatgccgaatct

SEQ ID NO: 6911 - DNA, 482 bp, Gossypium hirsutum
  Clone ID: LIB3828-012-Q1-K6-B6
gaaaacctggtgtccaaggttgtcaaggtgggacatcaacccaacacttacaccctctccactccactggctttctccacttcatgcccttcggcatccattgatgctaaatcatgtggagctcaaaggggatcggttcatccaagaccgtcgatctgccactacccccggagtggggacttgcaccatccagctattatgttcctttcttccccatcatcggtatcccttgatgactatctcagtggattagagacagtgtaatagcagtaattaatgtcataagtatttgtgagaaagacgtgtgatatatatatttatatagttcttcgctgctatatatataataatatagtttgtgagtgcagactcgtaagattttatgtaatttctattaattatgtgtattaattaaaagtggagagtttgatgtaaaaaaaaaaaaaaaaaaaaaaaaaaaaaaaaaaaataaatttggggcg

SEQ ID NO: 6912 - DNA, 478 bp, Gossypium hirsutum
  Clone ID: LIB3828-012-Q1-K6-C1
gtttatctggtcggtgtatttttgaggaaatccaattttcttgaaagattcccgaccgacgattattccatgtttatcttttcgtcaaaatctcgaaaatcaaaacaattccggtgtttttgtttttgaagctaaagagtcatcttgttttccttctccggatcgcttgattttgccgctaaacctcttctgattttgcagctaggtacactgtgagattttttggaatcaggcgtaatgagaagattgcttgctacgtgactctgaatatttcaagtacgaaagttgaaaaataaagaagaatcgtttcaagtactcatctatcttttttttccttcttactttcactttttagggtctgaaatttcttgaactttgctcaatttactcaaatctgaactgcactatggatgcttatctgtgtgcaaatcaaaatgttgtggactgtaagtggaaatcggggtgatgtaaaacatgg

SEQ ID NO: 6913 - DNA, 661 bp, Gossypium hirsutum
  Clone ID: LIB3828-012-Q1-K6-C4
agttaataaacttaagggttatgttgatcagatggttacagaagctgaggactacttctcaaaatggggggatagtggtgaggtggaccttaagtatgaattggagcatctcatcatcttgactgctagtaggtgtctcttgggtcaagaagtacgtaataaactttttgatgatgtttctgcactcttccatgatcttgacaatggcatgctccctgtcagtgttattttcccttacctacctatccctgctcatcgccgccgtgaccgagctcgaaagaagcttgcaggaatctttgcaaatatcatagcttcccgtaaaagtgctggcaagtcagagaatgacatgttgcaatgtttcattgaatctaagtataaagatggtcgcccaactaccgaggctgaagtaactggcttactgattgctgcgctctttgccggacagcataccagttctatcacctctacttggactggtgcctatctccttcgtcacaaggagttcctatctgctgtgattgaggagcagaagcaaataatgcaaaagcatggaaacaaggttgatcatgatatcttatctgagatggacaccttgtatcggtgcattaaggaagctctgagacttcaccctccactgattatgcttctacgtagttcacac

SEQ ID NO: 6914 - DNA, 584 bp, Gossypium hirsutum
  Clone ID: LIB3828-012-Q1-K6-C5
ggcaggcgcagcaaattgggtttccataaccttactgttttcagtatgtttatcggcgtcctatggtaagaggaccggaatctccaccatggctgacggagccgatgggtttcaaccaagcaacggttttccgcatgaagctgatcctgattcttcaacctctatcgatcctgatcctaccggattcggtgctggcataggtataggttatgaaagaagcccttactgtatcgactgcgacgatgtggatatcatgggcggcagcttttgcggcacctgcaattacggatgcccttaccgcaggttcaataatgggtgtggtggtggtatcgcttatatggatgaactcaaacgaacgattaaggaccttaccatgaaacttgatgccaatggtcttttagggaaaaagaaggccatgaatatacaagctatggcgccagaatcttcatagatttatatatagattatagaaactacggattctatacaaagagaaagaaaataaagaataaccaagcagcttgatatatgattgaattacaatgtgctagctgtttttttttatctttaattattatatgaat

SEQ ID NO: 6915 - DNA, 634 bp, Gossypium hirsutum
  Clone ID: LIB3828-012-Q1-K6-C6
gagagaggcgtctgtaataaaatctgcaatcttaattctgtcggtgtttttatctgtacgcttcagttcgggtgttaggttgctccaggaacagcccaatgatgaccccaaaaacatggacgctattcctcccattgatgcactcaaccctaccgagttgaatggacccggtgttggcattcacgaagatcatgttgtcccaaaagtgctgaaattggtactcttggttttggttttgaaggtggtcctgataaatgttgttcttctggatgttccggtaattgtaatcctggtggtttcgttctaccatttcctcaaattccagaaatcccaagaattccagaaatcccacaaatcccacagatcccacaaatcccacaaattccactaatcccacagatcccacaagtcccacagatcccacaagtcccaaaaatcccactaatgccaggacagtcgggatgtgagagtggagagtgttgccgtcagggttgtggtgggacttgtgctgagtgtggtcagcccaggtgcgcatcaggatgttgccaggctgaaactgtaaagagcaaagggatagaagaggttatggacagtgaacccagtccaccaaagtagagagatgataccatattaa

SEQ ID NO: 6916 - DNA, 648 bp, Gossypium hirsutum
  Clone ID: LIB3828-012-Q1-K6-D1
gcgaggcttgtctcctcttgtccgagtcctgtttgcaaatcattcatacagtttgcaggacttcggccttgaaaaaaaccattcattttaatatttttttttctccaacagaatcgaataggaaatccgaacacagaaagaagctaaaagaaacatggccggagtgggaaatagaagttttagcttgattttgtatttcctgtgcttgggggttataatccctagcctcgaggctcacatcgcagaatatgatgactattggagggaaagggaattgcaagctaaagaaaacctggagaaggcttacaatcctaacccagaggaagtcacccagcatttcaacgaccatgtggccagaaacttgatggggtttcgcaccaattccacaaggaggatgttgaagaagcgtaagggaggtccttgtgaagcaaccaaccctatcgaccaatgctggcgatgtgaccgcaactgggaaaagaacaggaaaaagttggctgattgcgcacttggatttggccgtggtactaccggtggaaaggatggacccatttacgttgtcactgatcctaccgatgatgttcttaacccaagtcgcggaactttgcgtcatgctgtgatccagaaccgcccactttggtacactttcgc

SEQ ID NO: 6917 - DNA, 640 bp, Gossypium hirsutum
  Clone ID: LIB3828-012-Q1-K6-D4
gttccataccaacgtctgagctcttcttctcactctgtttggatccgagaaaatgaaaagaaaaggcgcaaaccctggcgatgcctgttgcaccctctctctcctttatatgcaacaaagtaagctctatgtctctctccaacactgcttccctccccgtttcaaaccctcccaagcatcatggtctaagcattgtatgcgttcgtgttggcggagtggaaattccaaacaacaagagagtggaattctctctgcagtacatccatgggattggtcgcacgagggctcgtaaaatcctatgtgatctccaaatggagaacaaaatcaccaaagatttgtcggaggaagagctcattacgattcgtgatgaagtctccaaatatatgattgaaggcgacttgaggcggttcaatgctcttaatatacggcgattgaaagagattcagtgctaccgaggggttcgccatattcagggattgccttgtagaggacagcacaccaaaaacaattgccggactttgaagggtaagagagttgccattgctggtaagaagaaagccccccgttgatcttaaccgtttttgtttcgatgaagcgaatcatgttgaattttatgtttgattcgaaatgaatgcattgt

SEQ ID NO: 6918 - DNA, 624 bp, Gossypium hirsutum
  unsure (1)..(624): unsure at all n locations; Clone ID: LIB3828-012-Q1-K6-D5
ctcttttgngatacatctatctctggttttcctttttttttgattcctttggctcttgcgcagctagcaaaacaagatggcagatggcgaggatattcaaccactcgtatgcgataatggaactggaatggttaaggctggatttgccggtgatgatgctccaagagctgtgttccctagcattgtaggtcgtccgcgtcatacaggtgtgatggttggcatgggtcaaaaagatgcatatgttggggatgaagctcagtccaagcgtggtattctgactctaaaatatcctattgaacacggtattgtcaacaattgggatgatatggaaaagatctggcatcataccttttacaatgaacttcgtgtggctccagaagaacacccggttcttctcactgaggcaccactgaacccgaaagccaatcgtgagaaaatgacccaaatcatgttcgagaccttcaatgctcctgccatgtatgttgctatccaggctgttctctccctctatgctagtggccgtacaactggtattgttctggactctggagatggtgtgagtcatactgtccccatttatgaaggatatgccctcccacatgccatcctccgtctcgaccttgc

SEQ ID NO: 6919 - DNA, 629 bp, Gossypium hirsutum
  unsure (1)..(629): unsure at all n locations; Clone ID: LIB3828-012-Q1-K6-D6
gnatttatgggtncatgatgtgatcccagttgactctccagtaacacttcccataatttatgaaagaggtctgtttggcatatatcatgattggtgtgaatcatttagcacctatccaagatcttacgatcttctccatgccgaccatatattctccagggttaaaaagaggtgcaatttcgtggctgtggttgccgaggtggatcgtattttaagaccgggaggaaagcttattgctcgggatgatgtcgaaaccattaccaagctggagaatatggtacggtccatgcattgggaagtccggttgagttactctaaggacaaggaaggcttgctgtgtgtccagaaatccatgtggcgacctacagaggtggagacgctcacatatgccattgcttaggcatgctatctcctatcatcacattctcatttttgccacattttgcaatttttggggattagttctctatgttatagcctttgtaggcttgtatcatgtaggcctttagtttattattttttattttattttattcctttaaactctgagcttggcgtttccaagttttcctgtaatatcatactgngagttcttcaatggaaaataatgttcaagcattatggctgga

SEQ ID NO: 6920 - DNA, 301 bp, Gossypium hirsutum
  Clone ID: LIB3828-012-Q1-K6-E1
cggaagcgtgggctattttagcttctcttagtacattccagcagatgtggatatcaaaagcggagtatgacgaatctgggcctgccattgttcataggaagtgcttctagatatgtgcttgtgttcttttgctgttaccttgtgtggttttcattttgttttgtttgtttttttattttcgtccatcatgaatgtatgagatatggtttataagtattgttatatgctagcatgctttgtagtgtttacatataattattttattctataatgataggaatgttgcttggttttaacaatc

SEQ ID NO: 6921 - DNA, 509 bp, Gossypium hirsutum
  Clone ID: LIB3828-012-Q1-K6-E2
gccggtaaagaagttccctctcacagttgtgaggacaacgatcggtcgggactacgtcctttccttcaccattggtgatgctaacaatgcatgcgaaggttccatggtggtcgaggcattcgctaacaagaacactgtcaaggtcacgtatgactcgaaaggcaaaggaggattcaagcaagcgagacttcgatttaaagctgactcgacacgaaccaggataatgttctatagcacgttttacatccatgaaaaatgacaactcgggttctctctgtggaccagtggtggatgatgtgaagttggttagtattcaaaaattgcatcatttgtaaaattcatgttttaaatttgttttgcattgattatgctacaaattaatgtgtttcatccatttaggggtttactttaggattatttaatctatcaaattaatgagttcaccaccaatgttgacatttatgtatctactttcttcgttaaattaatggtgtgaaccaagttctttt

SEQ ID NO: 6922 - DNA, 445 bp, Gossypium hirsutum
  Clone ID: LIB3828-012-Q1-K6-E4
aaaactctctttctcgtcaatatggcagcaaatggcgctgtttctgacaagagcttgatcgtcagcttcggtgagatgctgatcgattttgtccccactgtctccggtgtttctctactcgaagctcccggcttcctcaaagcccctggcggtgctccggctaacgtggccattgctgttgctagactcggaggcaaagcgtcatttgtcggaaaacttggggacgacgagttcggtcatatgctggccgatattctcaagcaaaacagtgtctccggtgacgggatcttgtttgaccaaggcgctagaactgctcttgccttcgctacgttacgcgccgacggagagcgtgagttcatgttctataggaatcctagcgccgacatgctgttgaagccgagggagttgaacgttgatcttatcagatcttccaaggggtggcact

SEQ ID NO: 6923 - DNA, 271 bp, Gossypium hirsutum
  Clone ID: LIB3828-012-Q1-K6-E6
cgcggagacgcgtggtgctctgttcctactcgcatttcccgtagctagattggtaaggactctctgtaaggtagaaaaccgcagtaaacaaagcgctctctctcttggtgaatccaatcatatccaattgttgagaggggcaacgaggcggctcactagttgttcgtctgcgtggaggtcgcaccaggccacctccgctatcgcctctcgtcctttcatcgacggctccgattcttctgattgtgtcagatccaatttatccttctcctga

SEQ ID NO: 6924 - DNA, 631 bp, Gossypium hirsutum
  Clone ID: LIB3828-012-Q1-K6-F1
caaaacgcctaagtcttacaatcacatactctctttgcttgaagtcgaagaggatgagcccagccaagacttgtcccccctaatcaccactttacagcaacagctctcctcggactccgttttggatgcccctttccctctttgtgaaccagcaacaccatcgccctcgaacccagacaaggaaaccgccaccaccgtcctcagcttagaagactgcacatcagcaacttgttccttgaaagaagatgatgatgatgatgataaagtgcaagtcataagacatttgcttgaagcctctgatgatgagctggggattccaaatagagaagatggcgatggagatggtagcggtggtggtagtgatgttggctttgaagtttttgagttggaagaaggtttcaacaatggcggaaatgggtttgcattgtgtgatgggttatgggaacttgaagatgaggctgctaattactatactttgttacagtctgaactcttcatgtagcttcatggccggagaaactacgaagcagaaagaaatggtaggggtaaagaaggggaaaaacagggagtgaggtggggaatatgaaaaatgaaggcgattatttttttggggattaattcattttggaac

SEQ ID NO: 6925 - DNA, 640 bp, Gossypium hirsutum
  unsure (1)..(640): unsure at all n locations; Clone ID: LIB3828-012-Q1-K6-F2
cccagcgtccgctctctctaaatctcacttcaaaaaagtctgttttttttaactaagttcaaactggctatcgaaaatcaagaatccactgttcgtgaaatcaagcccaagaacagaagaatcatgggaggtggnntggacctgatgatagaagacaacaataacgacaagtggccgccatggttgaaacctttattgaaagaacagttctttgttcaatgcaagcttcatattgattctcataagagtgaatgcaatatgtattgcttggattgtatgaatggttctctttgttctttttgccttgcttatcacagggatcataattacattcagataaggagatcttcgtaccatgatgtaataagggtatctgagatacaaaaatatttggacatatctggtgttcaaacttatgtaataaacagtgctaaggttgtcttcctcaatgaaaggcctcaaccaaggcctggtaaaggtgttatcaatacttgtgaagtctgtgatcgtagccttgttgataactttcggttttgctcccttggttgcaagattgttgggacgtcaaaggattttcaaaagaagaaaagcaactagcgatggtatcgtcggactctgaggattcatacagtagtagtag

SEQ ID NO: 6926 - DNA, 623 bp, Gossypium hirsutum
  unsure (1)..(623): unsure at all n locations; Clone ID: LIB3828-012-Q1-K6-F4
taatcttttagcttcttttatgctagtatagaagacatcgacttttcctttctttagcattatnngggaaactcatgctnnatttaatgaaaaactccaggcattatggatgcgagatttgggctcttgttcctcttcatgttgggtgctacttgggcatgtaacgcccgacaactagaagttgttgagatagaaatctcggatccatcagttgtccaggtaaactggaggcaagatgaaaaagtgatagaaacggttgctcggaacgacaacgtgtgcaccttgtgtgagcaatttactactgaggcagttgattacctttcacagaataaaatgcagactgagataattgagattcttcacaaaagttgctcccgtttacgagcttttgagccccagtgcattacacttgtggactactatgcacctctcttcttcttggaaatatcttcggtacaacctcaagatttctgtacaaagttcaacctttgtcaaaaagttgcacttatatcttcacaattccgcgaagatagttgtagcatgtgccaccgtgctatttccgaagtactaatgaagttgcaagatcccgatacaaagttggagatactcgagcttcttttgaa

SEQ ID NO: 6927 - DNA, 635 bp, Gossypium hirsutum
  Clone ID: LIB3828-012-Q1-K6-F5
gcagtggccttcaggccactgctgatagggtcatcatgttcaactgccatttcactgggtaccaagacactctttacgctcacagagagagacaattatatagcaattgtctcatcactggaacggtggatttcatcttcggggatgcggcgagcattttccagaactgtatgctcatcatgagaaagccagggcctggccaaaattgcatggttactgcacaaggaaggaatgatcttggaacaaactcagccattgtgcttcaaaactgcaccatctcgggtgcccctgattacatcccagtgaaggatacgaacaaggcgtacttggggcgtccctggaaacaattcgctaggtctatcataatgcaatctcagatcgacgacatcattcaaccagagggttatgcccccatgacaggcaccataggaatagacacttctttcattgccgagtttggaaacaggggacccggtgccgataccagtcgtagggtagcatggaaaggtatcaaaaagatagatataaatgaagccaacaaatggactcctcgcgtctatctcgaatctgagacttggatttcgagttccggcgttccctatagtcccgacatggtccctggagtctaaacagct

SEQ ID NO: 6928 - DNA, 640 bp, Gossypium hirsutum
  Clone ID: LIB3828-012-Q1-K6-F6
gggggcaggcagtgttgagtattgactaccctaaaaaatgaaaaaattaaataaaacaaagccctagatattgtactagttcgaagttaaaggaaagctctatatacttccaaaaacattttttttctttttgctttggaagatcttagaactttatatgaggtcttgttcttcaaacacccacaagttttaataagcaaatgatttgtatgtgaaagggttttataagctaaaattttttacatgatttttgcaggtcaatgttccatgcaacagcttgtttgaaacagtaacagtcagatgtgggcagtgcaccaatctctgttcagtaaacctggcagcttcctttcaatcaagggctggaaaagatgtacaggtgcctaattacacatcatcggagtacagaattgacttagggtcttcctccaggtgcaagaacaagttaccaaagcgagcaacaactataaacactaccactcaagaaaggattgttaatcgacctcctgacaagaggcatagggctccttcattgtacaatcagttcatcaaagaggagatacaaaggatcaagctgaacaatcctgatatcactcacagggaggcatttagcactgctgctaagaattgggctcgcttccct

SEQ ID NO: 6929 - DNA, 530 bp, Gossypium hirsutum
  Clone ID: LIB3828-012-Q1-K6-G1
caaaacaaataaaataaaataaaacaaagggagactccctttctctgctaggccgacggcctcccaagacctccgtcgcgccaccaacgtgttcggcgaccggtgccggaaagtggtcccgttagcccctgtttcacggtatccttgaaagccaaagctctctcaacccacgggagtcgaaaacaaaggaggtccacgaccgcttggacccgattcgggcgacggaggagagatcctccgacggcgcaaccacggccacccggtgtcagacgaggccgacggctgtggtcagaagcgtgcatgagtgagcctggcagcatgcggcgcttggaggcttgggggcaagcagcagctagggttctctgttgctgaaattttttaatttcctgggctagggtttaggtttgttgtgtttaatgtaactggactgattattttttgttaatttgggctgtttcgggttctattgggccccgtgcagtcctcttctctctagaaaacataatttggaataaaataaaacttaatat

SEQ ID NO: 6930 - DNA, 598 bp, Gossypium hirsutum
  Clone ID: LIB3828-012-Q1-K6-G2
gaaagatggtggttgatagattgcaatccaatttttggttcttttctcaatggaaagttgcaccatcatgtctaccagttcgtgatatggtctccccttaaaataatgagattggagctaactagataagttacttcctttatcttgtttggcaaaaattgtagccacaatccttttttgcatgaaggacattgatgatatgcctaagtggaaatgggataaaagaagacatttcttgataaaatcagcttatggtgaattggattcaaactcctttaggagtgactcataatggaaacatatttggtgctcttgttggttgcaaatgattaaagttttctttggttggttcataatgatgcaagaatgagttaggagatatttcagtatcggtgcaagttgtacattgtgcaaaaatttagtagaagatattaaccataaccttaaataatgttttatgtccacctctatcaggttaaagcttattaaacaagaaaagattgatggttttttcaatttagatattcaggagtggcttcttcttagcttgcaaagatcaagttattttgttactaattgagacattctatttggagtc

SEQ ID NO: 6931 - DNA, 639 bp, Gossypium hirsutum
  Clone ID: LIB3828-012-Q1-K6-G3
ggaggttccattcatcggaactacgatctcctcctccgacaccgactccacatcgtcggcgaagtccaactcccagtgcaccactgtttattagctctcccaggtgttaggaaagagtaccttgcacgagtcatttctcatccacaagccctctcccagtgtgaacacacgctcaccaaactcgggctcaacgtcacgcgtgaagctgtcgatgacaccgccggagccgcggagtacatagcggccaacaaccttcgtgacaccgccgccatagcaagcgcacgcgccgctgaactttatggacttcaaatcctagccgatggtatccaagacgattcgagtaatgtgacgcgcttcgttatgttagctcgggagccaatcatcccgcgcactgaccggccattcaaaacgagcatcgtattcgcgcatgataaagggacgagcgtgcttttcaaagtactatcagcgtttgcgtttaggaatatcagtttgacgaaaatcgaatcccggccacaccgcaataggccgatccggttggtagatgacgccaacgttggaaccgccaagcatttcgagtatatgttctacgtggatttcgaagcgtcgatggcagatgttagagcccatacgcgttggccg

SEQ ID NO: 6932 - DNA, 542 bp, Gossypium hirsutum
  Clone ID: LIB3828-012-Q1-K6-G4
tctagggccatcactgctcatccttgagctctgccgcgtgtggtcttagcgccgacgcgccatcctaagaaccaccgcacacggtggctaaggttcaaaaaaccctccctcgccagtcgtcgggaaaatcacgaagctcacggtggtaatctcgtcagcgttgatggaggcgtagaatctggttatgaggagccctgggtatgctaagaaggtgcattaatggcctcgattttagggagctagacagacgctcctcgaggcttctagaagacgttgcggcgctagaagaaagagggcagaaaccctagggtttcctgcttgggtctgtaatagtttgggccagttgggcctctttagtcctgggtctgtttgggtctgggtttgctggatgcttgtaactggatatgggcttttgtatttggccttaaggactgctttggggttttgggtagcaacagtgggcttgctgagtagggatggtttattgggttttggctaattgtaaaaggtctgtttaaaaaacttttattattatttttgat

SEQ ID NO: 6933 - DNA, 559 bp, Gossypium hirsutum
  unsure (1)..(559): unsure at all n locations; Clone ID: LIB3828-012-Q1-K6-G5
cggncgcgtgggctttcctccctattcctctttcccataccctgtcacccttgctaataaaaccaccttattagacatacctaaccatgtcgtggcaaacctacgttgatgagcacttgtatgtgtgacatcgtaggcactggtcatcacctttctgccggtgctgtcgctggtcatgatggcagtatctgggctcagaaggtctaactttcccaatgtcagcccaaggagatcactgacatcatgaaagatttctactaaccaggccaccttgcccctacaggctcgcaccttggtggcgcaaaggttatggtcattcagggtgagcctggtgctgtcattcgtggaaaaaaggatctggaggggtgactattaagaaaacagcacatgcacttgcgtgcagggatatatgaagaaccaatgactccggggcaatgcaacatggctgtggagaggttgggcgattatcttgcagaacagggcctgtacacgaccacctaacttttcatattcaatgccttaattcccccatatatcgacgattcttcttttttaagtc

SEQ ID NO: 6934 - DNA, 249 bp, Gossypium hirsutum
  Clone ID: LIB3828-012-Q1-K6-G6
gtcaatcattagatatttgattaacattgttcagtcgggtggtattggtgaagatgtcaaggcaacctcccatggtcatcattagatatttgattaatctaccaggtttttgatggattgatttcgggttttcatcgtttcgccttgttacctaataataagttgatgtttatgtgtttggttgaagtatgatgaaatggtgatgcttaatttcaatattatcaatatattagtatttccttttcagat

SEQ ID NO: 6935 - DNA, 649 bp, Gossypium hirsutum
  unsure (1)..(649): unsure at all n locations; Clone ID: LIB3828-012-Q1-K6-H1
cggnaatacacccagttctccttactgaggctcctcttaacccaaagctaatcgggagaaaatgacccaaattatgttcgagaccttcaatgcccctgctatgtatgtagctatccaggccgtgctctcactttatgccagtggtcgtacaaccggtattgtgatggactcgggagatggtgtcagccacacagtgcctatttacgagggttatgccctcccacatgccattcttcgtcttgacttggctggtcgagacctcactgattacttgatgaaaattctgactgagcgtggatattccttcaccaccacagccgaacgggaaattgtgagagacgttaaggaaaagttgtcttacattgcccttgactatgaacaggagctagagacctcaaaaacaagctcatcagtagagaagagctatgagttacctgatggtcaggttattaccattggtgctgaacgtttcagatgccccgaagtgcttttccaaccatccttgattggtatggaagctgcaggcatccatgagactacatacaattcaataatgaagtgcgatgtggatatcaggaaggacttgtatggtaacattgtccttagtggtggtacaaccatgttccccggtattgccgacagaatgagc

SEQ ID NO: 6936 - DNA, 635 bp, Gossypium hirsutum
  unsure (1)..(635): unsure at all n locations; Clone ID: LIB3828-012-Q1-K6-H2
tcattcctcaattcccttcttcctgtataaaccaaaccccttcacttcacgcccttctttctctttngaaaaattaatccaaaagcatttcctaatggctcttcgttcgtcagtcaccagaagaaccctaacattgggcctaaattccacgaggctgctgcctctgtctcgatcattgcagactttctccctccccgatcttccttacgactatggcgctcttgagcccgccattagtggagagatcatgcaactccatcaccaaaaacaccatcacacttacatcactaactataacaaggctttagagcagctccatgaggctattcagaaagatgattcttccaccgtcgttaagttgcaaagcgctatcaagttcaacggcggaggtcacgtcaaccactccattttttggaagaaccttgcccctattcgtgaaggaggaggtgaacctccaaaagcttccttgggttgggctattgacactcactttggttcattggaatcattgattcagaagatgaatactgagggtgctgctttgcagggctctggttgggtgtggcttggagtgaacaaggaattaaagaaactcgttatagaaacaactncaaatcaggatccactcgtgacta

SEQ ID NO: 6937 - DNA, 624 bp, Gossypium hirsutum
  unsure (1)..(624): unsure at all n locations; Clone ID: LIB3828-012-Q1-K6-H3
gattgctttactttttgagctctcatagtcatggccgacgatctctgtttcttcaccaaggattctttcatcctaaagtcgtcaaagaagtctccattggtgttgaggacggttgtattgttttttgtaatggtttgtggagtgtatatctgcacgatttgtttgaagcaaataagcactggcagcaccactgaatttttgaattttagagtggtccaaaagccctgtccagaacctaatattgagccatgggaaattccttacgtacactatccgaaccccaaaacttatagcagggctgaatgtgcgtgcaacccattccagtattttgccattatgtcaatgcagagatccgggagtggatggttcgagacattattgaacaatcatactaacataagctcaaatggggagatattttctgtcaaagttaggaggagtaatgtgtcaacaatttttgagactttggacaaaatttataacctagactggatgagtagtgcctcaaaaaatgagtgcacagctgcagttggcttgaagtggatgcttaatcagggactgatgcaacatcataaagaaatagtagaatacttanatactcggagtgtttcaactattttcctc

SEQ ID NO: 6938 - DNA, 648 bp, Gossypium hirsutum
  Clone ID: LIB3828-012-Q1-K6-H4
ctgtaataaaatctgcaatcttaattctgtcggtgtttttatctgtacgcttcagttcgggtgttaggttgctccaggaacagcccaatgatgaccccaaaaacatggacgctattcctcccattgatgcactcaaccctaccgagttgaatggacccggtgttggcattcacgaagatcatgttgtcccaaaagtgctgaaattggtactcttggttttggttttgaaggtggtcctgataaatgttgttcttctggatgttccggtaattgtaatcctggtggtttcgttctaccatttcctcaaattccagaaatcccaagaattccagaaatcccacaaatcccacagatcccacaaatcccacaaattccactaatcccacagatcccacaagtcccacagatcccacaagtcccaaaaatcccactaatgccaggacagtcgggatgtgagagtggagagtgttgccgtcagggttgtggtgggacttgtgctgagtgtggtcagcccaggtgcgcatcaggatgttgccaggctgaaactgtaaagagcaaagggatagaagaggttatggacagtgaacccagtccaccaaagtagagagatgataccatattaagatgaaataacgaggaagagttggt

SEQ ID NO: 6939 - DNA, 636 bp, Gossypium hirsutum
  Clone ID: LIB3828-012-Q1-K6-H5
cgtcgcgagcgagcgactagctaagcggaaaacttcgttctcctaaagaacgttaaaagtgaaagcaagcgagatagagagggcaaagcaaagatgcagagagtgaaggctgtattaaaagctaggcattcatttcaaagacttgggatcctctctcatcaaagatgtctctctgctcagcccaactatgctctatatgatgatttcgaggaccaggttttagtggaaggaagagctaaatcaagagcagcaattctcaacagaccttctgctctcaatgcacttaccgcctcgatggcagctcggctgaagagattgtatgaatcatgggaagaaaaccctgatattggttttgtcttaatgaagggcaatggcagggctttctgttctggggttgatactgttgctctccatcgcttacttaatgaagggaaagtttatgaatgtaaaaggttttttgagacgctatataagtttgtatacctacaaggaacatatttgaagccgcatgtggcaatcttggatggtataacaatggggtgtggaggtggaatttctttgccagggatgtttagattagtgactgataaaactgttttttctcatccagagactcaactggggttccatcctgat

SEQ ID NO: 6940 - DNA, 632 bp, Gossypium hirsutum
  Clone ID: LIB3828-012-Q1-K6-H6
ctttgattaaaaaaagatgtcaagccaaatacacctcagaatttacagacaaggttgaagaaatggctgatcaagctcagatgaagaaggatgagatgatgagccaaacatccatgaactctcagtcttctgatcagaatgctagttatacttctcaggcctccaacttacttcaacagacaggagagcaaatgaagaacatggcacaaggagctgctgaagcagtaaagaacactttgggaatgaacaatgctactaataatgcttctaatgccccggacaccaaccatccaagtaacccattttccaggggttgaatttttccttacccgggtaatttacatttgaggtcacagaatttagcatcaattatcatgtacgtcacgtatttttaattttatcgaattaagtcgatcaattttaattattaataaattaatttctgtatgttaatttcattaagtaattttaatggaaaattttgactcggtaaacttcattctgatatacattccgagcttgctttgacattaaagttatttaacgaaattaacataaattacttaatttgttaataaaaaaaaatatgatgataaaattcgatgaaattaacgatttgtgtcctatatgaa

SEQ ID NO: 6941 - DNA, 605 bp, Gossypium hirsutum
  Clone ID: LIB3828-012-Q1-N6-A10
ccaaaattccctaatttatagttatgtgagtcaacataaatggaaccagcgttttgcaaacaaactcctataaagaaaacaaaagccattaacatattaagtcgagccatcttccttatttattcacttcttcgtcttcttaactccctcggcttgttggggtgccgctgtgggtgttgccttcacaccaggtccctgtgcaaggcgttcctctcttctggccaactttctctccctgctggccttgttcttagcacgcttggcctcaaactgatcagcaatggtcttctctctcgccttctcagccttagacttgtggatactctccatcaagacacgcttgttcttaaacacattacccttgaccttcatatacatgtcatggtaaatgtgcttgtcaatcttcttggattccctgtacttacgaagcaatcgcctcagtacccgcattctcctcatccaaagaatctttgttggcaaccttgcctccctggtacccttcctcttaccatatccagagtgtcttccctttctcttggcctccttcatcctacgtgcgcgagagcgggagtgaatcttagtaggcttcctgatgatgaacccat

SEQ ID NO: 6942 - DNA, 571 bp, Gossypium hirsutum
  Clone ID: LIB3828-012-Q1-N6-A12
caatcaaaactgtccaaataaataaagtaatgagatttgaatacaattgtcacggtacatagtattttatatgaagtaatatataacccacccttctcaagaataggttatatgtaaagctttcaaagtacaatcatatcttgtaaataggtgtgattcccaggagattgaagcattttctcataaccactgccattgcttcacataatagtagcctacttgtttccttatctgacccgataaccttgcactcaggattgttgtaaaatttggagaagatttcggataaattatagaggtagtcacacacaacattcggtaacaaattggtacaagcctcctcaacaacctcagcaaactgtagcaaatggagccccaaatcgcgctcatccttatgctccaatactaatgtccccttcttcgcacagttgacaacatcaagtgcttgtgccaccagtttggtgaaacatagcatcgatctcatcaccatcctccatttccagctcattaggagtttgctcgcctcgctggcggtgaccatcgaacaagaagacaatcgagttgaaatcca

SEQ ID NO: 6943 - DNA, 596 bp, Gossypium hirsutum
  Clone ID: LIB3828-012-Q1-N6-A9
aatgaaaaataataatagtatttctgaatattataacagcgtaaaagagaagtaggggaaactgaacggataactctacggcatttttttttcctctaaccggtaaataacataacgcataaatttcaaaaccctaaacatttctattgcatcatttgtgccactcaaaaatttcgaatccaacggtccacggcctgcaagctagagatgctacagttttacttgctgtagagatgaacgaacgagaagatgaagaatccagccatcatagaaaatgcagctccataataggggtaagcagcaggtatgaatctttcatattcattgtgtctatatggtctgacaggaatctgctttgaaagggataaactagtatacccaagcttttggtgctcgaccttgaattggaaaacaccataaacatcgggaaccttaaatgatgcggaatatagaccctttttgtcagatgataaagttttcaaaacataggggctcatcatgtaaaactgcacttggacatcattagcaacatatggctcccagcttgttccagaccactcatagatctcaactgagtattccaactcatcattaat

SEQ ID NO: 6944 - DNA, 501 bp, Gossypium hirsutum
  Clone ID: LIB3828-012-Q1-N6-B10
gggtgcaaagtatcacatgggaattcaaattattttttttaataaacgtacaaatgaagtgatgaaccaaaaaaaagggaagaagaaagcaagtaaaatggattgaaccccgagtaatattttacatttattcattcaccatttttgattcttcaatacttcatggtttcgtagatttttgctggcttactgcaaatagtaggaaaagaaagaaacaagggtggctccaaccaaggacacaagaacaggcattgttgaggttgcgacgttggagtctgggcctggggcagctgctgaagctgaagctgaagctgcacctggagctgaagctggagctggagctggagcggagtcagcagccaggaccgcgctcatagaggcggcggcgacaatgacggcgcaggagatcttcttcatgtccatggtattgaagaataggcttagtgagagtcgagagacctgctgcgagacggaaaacaaaatttattaatttggttttct

SEQ ID NO: 6945 - DNA, 539 bp, Gossypium hirsutum
  Clone ID: LIB3828-012-Q1-N6-B11
aaacaccaaaattcaagcgacctttattagaattaattaatattgggcacttaagaatcagaacaggaaatgaaactagcaaatcatgtctaatacaaaaatcttgcttaacttcccctgtttggaactttcagatagcatgcaatttatcaccaatagtacttaaaacctacccgacataaaaccgtagcaaaaatataaaagagtgaacacaaacagaagagaacaaccgcactttatataggaagagacatgaatcaagcatgctttgcctggaaatccttcatgaaagcaaccaacttctcaactccagccaaaggcatagcattataaatggaagctcgcatgcctcccaccgacctatgtcccttgagctgcaccatcttctccttctcggcttcctttaaaaactcagcctccaactctgacttctccaatgtgaatggaacattcatcattgaccttacagatttctcaacagggcacctgtagaatcctttgctttcatcgatggcattgtacaatataccagctttctt

SEQ ID NO: 6946 - DNA, 466 bp, Gossypium hirsutum
  Clone ID: LIB3828-012-Q1-N6-B12
aaaaatataaaaaaaaataaaaaaaaaaaaaaaaaaaaaaaaaaaaaaaaaaaaaaaaaagaaaaaaaaaaaaaaggaaaaaaaagggggaaaaagggggaaagggggggggggggggggaaaagggagaagaaggggagaagggaaaggggggagagggggggggaaggggggggggggggggaaaaaggaaaaaaaatttgggggggggggacccggggaaaaaggggttgggcaaaagggaaaagtttgaggaaaaaaggggggaatggggggaaaaggggggcccggggaaaaaagcggaaaaaaccgctttgggggccccggaccaaaaaaggaaaggggggggaaaaaagggaaatatcgggcgggggggggggggggagacgtttgcccgttgggggggccaagggggggctgggggcccttgggggcccccccccacccccgggggaatagggggggg

SEQ ID NO: 6947 - DNA, 607 bp, Gossypium hirsutum
  Clone ID: LIB3828-012-Q1-N6-B7
atatagaaagtaattcatgaactcccctaggtaattgttattcagcccatcccagttcagcaacacttgaatttctcatttccaagaaaaaaaataaaacatataaaacagaaacataaaagaaaaggaaaaatgttaacttacacaagttggctgattgtagcaattagcaaacaaggggtaccaccaattcttagggagatccgattaaccgcttaataccggttttctgctctgctgtaagcttggtagggaacttgatgttgaatttgattctcaaatttcctttctttgaaggatctttaggaataggcattccttccccttttacaacttcttcatatgttggactgatgatgttgttgatagggacagtcagattccgtccatcaagtgttgtcagctgtgctgtataaccagttagagcttccaccagagatatcttctgagttacgataagatcattgccgtctctcttgaacacactgtgaggcttctcatcaatgatgaagacaaggtcggagggaataacccctcgttgctcatttcccttctcgggaaaagttatttttgtgccttttttccaccccggcttaatatcaatggt

SEQ ID NO: 6948 - DNA, 597 bp, Gossypium hirsutum
  Clone ID: LIB3828-012-Q1-N6-B8
aaatccaacaagcttttagtattacaataatcaaaacatggtaacattttacatcatgtaaatgaggtcttccggtgaatgtaaatacactttttagatgatactatttgttagtagggtacattcgtactgtttctggctgcttcagttagagtctataaaaagcagctaccagttttgcagggcttaaggggaatgtacatacaggatggtcctctatatatattgctagttagttatactgtcaatagagatatttatcaattaggattttgcagaatatgaacattgaagatcttatcaatgaaaatttgatgcctttagttccaaccccacaaaattgcatctggtttaatggaattacagagcttatgcaaaaaataaaataataataataatgtgataaaatcttaaaatcagggtagatattttaagagatgaatgaagaactatacccacacggtggggtattggggtttgaatataggtgaactgtcacatcaatggatcagcgattatgaaatgattatcttgttgagcttgaacttttagcaaattttgcaaatcggtccatacctcgttccagtaaattttcca

SEQ ID NO: 6949 - DNA, 599 bp, Gossypium hirsutum
  Clone ID: LIB3828-012-Q1-N6-B9
aataacattgtttctattaataaaaactccattacagaacaggcaatatagtgtacgaagagataagagaaagcaaaaaagtagacaataacacccaaatacgatgctaatttagccttaaaaaattctagcggcggtgtgggcaaaaagtgaccaaatagttgccgcgagagcaagtagcaatactggtcggatcatcgtaagcataagaataagctttaggacaagcagtcttgaaaatcttcgaatacgccgtcggtttacacgactgaggactgccgaagctgccggtacaacaatatctcggtgaattaaaagcgaaacaagcgcttttacaagccaccacttgtttattattcctcacttgtaacgcgacggggcacattaaattcaagtcactaacacacccggcgtagctacatttaccggcgcctttgaaaggtgtaatggacatagcgatgttatagccatccaccaaactgacgtcgtagaaatcttgttgttggccgagggtgatttccgctaacgtagcgggtggggttccgccgagcccgttgcagaataaggaaccgccgcagtcacctgtcgcgcaacggccg

SEQ ID NO: 6950 - DNA, 578 bp, Gossypium hirsutum
  Clone ID: LIB3828-012-Q1-N6-C12
gcctataaagaggactgaagcatgtctaacttaaaactggttcaaatgggagaaatgaaatggtaccgatgggatcagtagaaatcgtgagttctaactgtctatcaaagctacaaatatcggaccaaaccgccgcacttgtcgacgagtaaaatcaagctgaaaatcaggctgcctgtagcagcaaactttgtacattgcttgtgaaactattagaggaaacgagtcaaccgcgcattagatcgatgtcaacatgagtgttacgcatatccattgttcgtgaaccaggccatacacctgctggtgaaggtggaatcagattttgactcggtgaaatgccagacggagatactagattgtcgacactctgattatccgagtcatttagacattcttgaccttccggtttcttgttctttgcctttggaccaccccattgaaaacttccgacaatcacctgaactgggcttgctgcaataagcatccctccgacacctccaccaatgacgcggccatcaggagtggcaagggaaacactaagagcaccacttcggctgcaagagccattgttgctgatc

SEQ ID NO: 6951 - DNA, 615 bp, Gossypium hirsutum
  unsure (1)..(615): unsure at all n locations; Clone ID: LIB3828-012-Q1-N6-C7
gtatctctaataacatattattacttttaattctataataatgaaaaaattacangattgcaacacttccatgatataatcgcatgcaatttctttcccttttcattctccaaatcgcaaaaaggatatataataataataataataataataatactaatgataataataatcatatataataaaacactaatggccatggtttagaaagcccacactacagggaccatgtcagcctaataaggaatgccggctcgtggaacccattggtcaaatccaagaaagaccccaggggtccatctcttggcttcatttgactcaattatcttgatagctggccatgtgaccctaccttcagatttggcaccaggacccttgccctcaaactcagcaaagtaggcagtgaccaatcctttggtgccgtccatgggggcataaccctctggtgtaatgatgtcttcgattgtcgatcgccttatgatggctctcgccaagggtttccaaggacgaccaaggtacgtcttactcttgtccttcaccggaaggtaatcaagggcacccgtgatggtacagttttgaagtacaagggctgactcagcgtctatatatagcctt

SEQ ID NO: 6952 - DNA, 557 bp, Gossypium hirsutum
  Clone ID: LIB3828-012-Q1-N6-C9
gccctcttttattttttatttttttttttcttttttttgttatgttgttgttagttattgtcgagtactcttaaatgataagtgctgtttttttctgggttaaaaaaaaaaaaaaaaaaaaaaaaaaaaaaaaaaaaaaaaaaaaaaaaaaaaaaaaaaaaaaaaaaaaaaaaaaaaaaaaaaaaaaaaaaaaaaaaaaaaaaaaaagggggaacaacaaaaaaaaaaaaaaaaaaaaaaaaaaaaaaaaaggggggggcccccctttttttttttttttttttgggcgggaaaaaaaaaatttttttggggggcccccggtttttttttaatggaccaaaaaaaaaagtgggggcccttggagatttcccaaaaaaaaaaaaggggggggttttttaaagccccaaaaaacactttttttttcaaaaattttttttaaaaaaccccctcaaaaaaattttcactttttttttaactgaaaaggggggaaaacccccccccctgggaaattggatcaaaaaaaaaaaaacattcccccctttggggggggggggggt

SEQ ID NO: 6953 - DNA, 493 bp, Gossypium hirsutum
  Clone ID: LIB3828-012-Q1-N6-D10
cattgttattttcatgttattcattgttttgaataaatggaaaagtaaaagcataaacacaacatactttccaaagctccatttcaattttttcattattcatcacatgtttctttcaaaaaataaaaaatataatataaaatataatattcgttcacatgttgatttttcatacatgtagcatgtaagaaaacaaagaaacaatggaagccccaaccaatgatccaaggaccggcaaggctgcggcagccacgctggaatctggtcctgatgctggggcggaaccgggagaggagctaggaatagaaccaccggcggaaggggagggagcaggtgcatcggcagccatgacgacgctaattgaggcggcagcaacaatgatggcggtggagaccttcttcatgtccatggcgtataaagggattattaaacgcaccagaaatgaacgagacctgcgtttaattgctggagaatggggatccggtggtgattg

SEQ ID NO: 6954 - DNA, 586 bp, Gossypium hirsutum
  Clone ID: LIB3828-012-Q1-N6-D11
aaacaaacgcactatgatttattattattacttgtaaaagacaacatgcaaactgcctcttctaataaaaacatacaagcacaaacactaaatttaaacgacctgcttgggacccaggaaccacccattacagagaacagattgaacatgaaaaatgcccccccccccccaaaatgcctgcttgaaccttctctaaactctctctccctgccatatgccaattgcatgttagtttagccaataggcaagctatcattggtgggtcatttccatgccccagtcccaagcctcatccaccttaatactatcacatccttattcaactagaattgaaactaattgatttcaacatgcaaacttagctaacagtaagcccactacacaagcttccattgattccccatcttacaagcttatttactcggtagtagtattctcagcttgagcttcagctggtttctcttcttcctttgcagcttcctctttgggtgcttccactggggcgccttcggcttctgcttttacttctgctgctgctgctgctgctgctgctgctgcttctgaagactctgtgctttctttggtt

SEQ ID NO: 6955 - DNA, 592 bp, Gossypium hirsutum
  Clone ID: LIB3828-012-Q1-N6-D12
aataccaactttcttccttccactgaaaaatgatgttcaaaaaaatgttacactgaactgcaaaatgcaaatcatatatatcaccgggatctcaaggatttttcaataattaagcattctactctaaacaggctcatcgttgctacgatagagatttgataccttattcggtttcccttcaacatctgctttagtagccgtatcctgaattatccatggggttcccagcaggcacggtctcgggttcctttatttccacaaccacacaatcggacatcaagaatgtcttggccactgatgcagcatgctccaagcaacatctgaccaccttggttggatctataattcctgcagacataagatcctcataatttccagtggcagcattgaatccatacctagggttatcgttggagagcaccacacttccatttacaccagcatttttagctatcaattttagagggtaactcaaagctcgtttaacaatatctgctccaaccttttcttcatcattatcgagtgaatccttgatagcatccaccttagaagcaagtcttagcaaagtacatccaccaccgacaacaatacc

SEQ ID NO: 6956 - DNA, 580 bp, Gossypium hirsutum
  Clone ID: LIB3828-012-Q1-N6-D7
caaaaaaaaactcgtacaataatagctattaacattaatgttctcaaaacccttgaatattaaataataataagcaccacaatacagtctccagctccaaacatcctcttaagcaaaatgcttaaaagatggaaggtaagcaagtagggaattaagcaccaattgtccgcccaccgccagccccatagggcccgtcatcttaatggtggcgatacggtgaaaggctaaaataatagtacattaatatcaagtagaccatcgtacaatgatccctaacttccccgacataaaccagacttttgagttcacttaacacggcacaccaaaaaaagccaactaaatgcaaaatgtagaccaccatcaaaagcaattacaaaacttagaagcacttcctgtggacaatggatggaccggattcatcatactcacccttggaaatccacatctgttggaaggtgctgagtgatgccaagatagatcctccaatccagacactgtactttctctctggtggcgcaacgaccttaatcttcatgctgcttggagcaagagcagtgatctccttgctcatgcggtccgc

SEQ ID NO: 6957 - DNA, 585 bp, Gossypium hirsutum
  Clone ID: LIB3828-012-Q1-N6-D8
agccaatactactaattttcattattgtaaaccaatggaacaaggctggaatgcaaacataacgagtaatacacacaagcttttcacatatattaaactacacaaaacagcacataatcgccaaacttcgctctctagtataacgaggcattaccacatgacatagtatcaagtagcataccacctttacatctcatgaacagcttcctcgtcttcatcctcgtattcaagttcatcctcagctgttgcatcctggtattgttgatattcagaaacaaggtcattcatgttgctctcagcctcagtgaattccatttcatccatcccttcaccagtgtaccagtgcaagaaagccttcctcctgaacatagcagtgaattgctcactcactcgcctgaacatctcctgaatggaggttgagttgccgacaaaggtagatgccatagacaggccccgaggaggaatatcacaaacactggacttgacattgtttggaatccactcaacgaagtaggatgagttcttgttttgaacgttaatcatttgctcatcaacctctttggtgctcatcttacccctgaacat

SEQ ID NO: 6958 - DNA, 555 bp, Gossypium hirsutum
  Clone ID: LIB3828-012-Q1-N6-E10
agagcaacgaagaagtatgatttcacattaacgtcatgtatgatcttatttgtccacaactaggatttgttattcactaagtacaatgtaaattacttaaagaaatttaaaggatgatggattgagctagatataattaatatcttccctagtgtggcacaacacgatggtatatcaaacgaagtcaagggaagagcttggaacaataatctttgtcgctggtaattggcggaagagaaacatcaacaccgcattgggtagcaattaaaggtatccgcgcagtgaaggagtcagatgtgccaatatttgctaatgcattaacaaggcactcgcagatagcccgtcggtcatctttggtctgtgcttcgtaagcaatagtttgagcacccaaacaacatgcccgcgatggaacatctgcagcaccgttgccagacaggaagctgaggcatgggagtaattctatggcaacttcagtgcaggaaggtgcagctgaaatttcttggacagtcagggctgataaagtaagcaagaggagcatgggtagaaagttgaacg

SEQ ID NO: 6959 - DNA, 590 bp, Gossypium hirsutum
  Clone ID: LIB3828-012-Q1-N6-E12
accaaaaataaacaatttgtgtgattaatttatgttttaggattgaagatattaatcatgatattatcttttaatctaatacaaatcatgtagcttcaattactcgaattgaatccatttatgtcaacctaaatacctctctccagtatttaacccacccccacagaagtcatccttttttcccaccaaatgattccgctttcacatgataatttcccaggccttcaaaaatggacctgtacagcagcgatggccaaattgatgcgaatcgtcttgtgaatcgacttaacgatatccctcaccggcgactggatgttagccgcttccaactcgtcctcgcagggagacacagacgcggaatcggcggagagttcttcgatgatgtggttggcgttgtgctcggtgatggcttccatggctttctgatccgagtagatgatgtcctcgaagttcttgacgcaagtccagaggatctcgccgcattcgggggtggtggatggatctttcatgataatattagctttgtccaaggcttctctcaccttctggttggtcgcctcgatacccaccctgaggatggaaatgggatc

SEQ ID NO: 6960 - DNA, 579 bp, Gossypium hirsutum
  Clone ID: LIB3828-012-Q1-N6-E7
gcttgtgaacatcaaattcatttataacaaataaaagaattagaagacaatgaaacccctcgctttctctcaatgttcatgaagataaaaacaaatagacgaaaaagaaccgtagaacaaagcagagctgcactaatagcagtcattgctttctctttttgatcattttctcccattgaactgtttagaaacatttgcggtgaacgattgacggaccggattcgtcgtactccgccttggcaatccacatttgttggaaggtgcttagggaagccaagatcgagccaccgatccagacactgtacttcctctcaggtggtgcaacaaccttgatcttcatgctgctgggtgctaatgaggagatctccttggtcatcctatcggagataccgggaaacatggttgtaccaccactgaggacgatgttaccgtacaagtctttcctaatatccacgtcgcacttcattatggagttgtatgttgtctcgtgaatgcctgcagcttccataccgatcaaagatggttggaaaagcacttcagggcatctaaaacgttcggcaccaatggtaatcatctgac

SEQ ID NO: 6961 - DNA, 599 bp, Gossypium hirsutum
  Clone ID: LIB3828-012-Q1-N6-E8
ttttttttttttttttttttttttttttttttttttttttttaaatttaattatattttttttttttttaaattaaaaaaataaataatataaaaatttttaaaaaggaaaaaaaaaaaaaaaaaaaaaaggaagaaaaaaaaaaaaaaaaggaagggaaaagaaaaaaaaaaaaaaaaaaaaaaaaaaaaaaaggggaaaaaaaaaaaaaaaaaaagaaggaaaagggaaaaggggggaaaaaaaaaaaaagggggggggggaaaaaaaaaaattttgggggggggaaaaaaaaaaagggggggccccgaggggggcccagggaaaaaaaaaaaggggggggggaaaaaaaaaaaaaggcccggggaaaaaaaggggggggggggggggaaaaaaaaaaaaggtccaaacaaaaaaagaaaaaaggggggggactctttttttttttaaaaaaaaaaaaaggaggggccaaaaaaaaaaaaaaaaattttaaaattaaagggggggggggggggcctttccggggggggggccaaaacaaccaacaccgagggggggggaaacaccccccccaaataaaaaaaaaaaaagaggggggc

SEQ ID NO: 6962 - DNA, 589 bp, Gossypium hirsutum
  Clone ID: LIB3828-012-Q1-N6-E9
atagcaaagaaaacatatatattagcatgtacatgcattaattacatatggctacaaaacaagattcaaggaactttaggatattgtaaatcaaatattgttttgagctatttattcttcataattactctttttatccaacaggattttatagcaagcccttctgcaacatcattacttcttattttgtataattaatacgacgacaaccaactcttcctcattatttcatcttaatatggtatcatctccctactttggtggactgggttcactgtccataacctcttctatccctttgctctttacagtttcagcctggcaacatcctgatgcgcacctgggctgaccacactcagcacaagtcccaccgcaaccctgacggcaacactccccactctcacatcccgactgtcctggcattagtgggatttgtgggacttgtgggatctgtgggattagtggaatttgtgggatttgtgggatctgtgggatctgtggaattcttgggatttctggaatttgaggaaatggtagaacgaaaccaccaggattacaattaccgggaacatccagaagaacaacattt

SEQ ID NO: 6963 - DNA, 384 bp, Gossypium hirsutum
  Clone ID: LIB3828-012-Q1-N6-F10
aatgaaaatcataacattctatttatagaactaattatttattttcaaaaatcccaccatgtttttagatggcaatttgtttaatgttttggcggcattttcttgacaatcattttatggatcatcaatagggatatcgccgctaaaacttggagtggtaggctgagaagtaggggaggaactagcagcactgccacctgtagaagctccaactggggcacttgcagggctaccaccggcggatgaggcgtcggcgaaaaccacgccggcgagggcaatcaaaaccaaagcaagaacaacaagttggcgtgccatttttgtttcaaaatgggggctctgtgtttattaagcaagaaatattttttaagagaaaacagagaaaaa

SEQ ID NO: 6964 - DNA, 599 bp, Gossypium hirsutum
  Clone ID: LIB3828-012-Q1-N6-F11
gaattaaagggagaaatgttattctattgaaatttcaaacacaggacatggaagcatacacttattttacaagatgatgatgatgggactaagggacgtagagatttcaaacataaagactgccgaaaactaaagactctacttaggacgaagaaggaaggaaaaaggagcatgatgaaaatgaggtaaatttgacagatttattattattgttattgttatcattagctcacatactcattggactttgtggatcgttcagtgctgcaatggctgtttcaatctgcacctttaactcatccttctacctttcatcagcctcaacaaacacggttttcaacagtttaccggagaccgccgtgatgttggccgtaataattttaagcttcaatgattcaaatacctcgcatagtctaaccatcgagtccgtctttttgctgcaggttatactcaccaccattgtcctttctcccatgtgcgtcactttcagttcaagcacttcaatatggcaagctcttgatccaccataatcaaaaatgttatcgagtttagtcttcttagatctcagccctggtaactctagatcatattccaaacct

SEQ ID NO: 6965 - DNA, 545 bp, Gossypium hirsutum
  Clone ID: LIB3828-012-Q1-N6-F12
aaataattgaatttgattgcttgcgtaagtaatcatccattgaaccgaataatgatccaaatacgatcagaaaacaaacggaaactttataattaataatagaaagggtgaagtaaagaaaaaaaaggagtggataaagtcgagtaagtatagaaatgtgtcttgttctcaactggataacgcctaaaaattttcatctctagtgatttcaaaaacagggagcatgctacaaacacaaattgtcccacactagaaggtaagatctttaggatcctccacaatcttagccagtgtttgcaagaatgcagctagatcagcaccatagatcactcggtgatcggccgtcacatttacctgcatttggttcttcatgccaatgcggccatccttgctagccaccacggtgggctgagaagctccaaccgccataattgctccagttccaggtggcagaatggcatcaaaccggtccacaccaaacatcccaaggttagacagggtgaaagtacctgtattatattcatgaggttgcagttgcttggccc

SEQ ID NO: 6966 - DNA, 595 bp, Gossypium hirsutum
  unsure (1)..(595): unsure at all n locations; Clone ID: LIB3828-012-Q1-N6-F7
gccctnnttttttttattatttatttatttttatttttttattttttttttattttttttttattttttttttatttttttttttttttttttttttttttttttggaaacaaaagcccacttttaaaacacccaaaaagaggggggattcaaaaaacccccaaatgggtttttccagaacccaagcaaatagacaagggtttacccccaagaaaatggggttaacaattttaaaataaacacccgggaaccggcccggaaaacacttcttggggggggccaggcagggccacaggaggggctccccccctccattaaaaattaaaggggccccggggcaaatccaccggggaactccccccagaagggccttggaaaacagggggaaccaccaaagaaaaagcccggggtccaaaagccagggggggtccgggtccacccccccaaaaacccattttaaaggggtcaggaaaaaaaacccccacaaattcgggggggggcccaggggggaacatttcagggggcccaaatttaggacccatgggggctaaatttagttcatcaacgggaaaatttggggtttggcgggggccaa

SEQ ID NO: 6967 - DNA, 599 bp, Gossypium hirsutum
  unsure (1)..(599): unsure at all n locations; Clone ID: LIB3828-012-Q1-N6-F8
aatcagttgtcaatctataagtatatcattatttcaagtatcataatcatcaccaatacttgaacaaacaacagctgatatttgggccaaaaaacaatgacataacaatgaatccgaatatgtactcgaaacacgagtaaaaatccatgaaatttctcaattttttggggggtccctgtttgcaaaagaaccaatgttcatgtgtaaatcaccttatacgaatctcgtccgtaatgagggtttcgtcatgaaagtactttcttaacttcgtccgtaacctctttctgaggcttttccgcatgaagctttgcgactattcccttctcggaataataatcaatcaccggttgggtttgcttgtgaaatgcatcaagccttgacttgagaactgctgcagtatcatcttttcgctgcaccaaaggttccccggtcacatcatcaaggccgggaactttaggaggtgcaaatttcgtatgataggtcctaccgctagcagggtggatccaacgaccagtaatccgctcctccaagactgcatcatcaatcgcaaaatcaagcaccttatcgattntgactccttgcttttcaagcatgtcatc

SEQ ID NO: 6968 - DNA, 576 bp, Gossypium hirsutum
  Clone ID: LIB3828-012-Q1-N6-F9
aaaagctgattagaaaacttgggttgcaacaaggatgaaatccattatctcatatctaaatgatcaccatcaaacaaatttaaaggtacaggtacaccatccatcctaagtcatgtcaaagagctaacactgtttctccacctgacacaacaacacatctttccgcaaattttttaatctcacgcagttaaaaacacatcaggctttgatcccctctcccccatccatgacagggaaagagcaaaatatcacccataactatagttaacagcatttcaggtttcagctaaaatgatttcatgtgctcggttcagcctcctttttctctgaagatccgatgccatgctcctcaggctttgcatctccttcggccttgtcatctggctttgtcacttcttgcccttcatcatcactgtcctcaaattcatccatgccacccatgccgcccatgccacccatcatgtcacccatgccgcccatgccgcccatgccgcccatcatgtcgcccatgccgcccattcccccgaagttcgagaagtccattcctcctaagtcaagatcaacaagacccttgtc

SEQ ID NO: 6969 - DNA, 500 bp, Gossypium hirsutum
  Clone ID: LIB3828-012-Q1-N6-G10
ccaaattctttttattataaaaaataaaaacggggaacacaaccaaggccggggcaaggcgcaagcaaaaaacatttaaatcaaataaatatataaaaagggaagatccaccggccaggcagggaggggggaaaaccaaaaaagaaaaaaaggccgagcccggcaacaacgggaacagcaccaacaaaacgggaggctaagaaagaaacggccccagaaggggagggggcgagagcaccgccggggggggggggaggggaacggccggggccaagggagggggagggaaaagaggggggagagggagaaggcgaggaaaaaaaaaagggggggggcacaaccgccgcttaagccccaacaacggcaaggaaaacaagggggaggacaagcaaaactgggcgagccaacttaatggggggggggaaattttaaaaaaaaaaaaaaataagtaaatgttcttaatggaatccaagggaaaagcggacccgtgggacaacccg

SEQ ID NO: 6970 - DNA, 590 bp, Gossypium hirsutum
  Clone ID: LIB3828-012-Q1-N6-G11
ccttgtaattatatatattacaagtgtttcagacagaacacaattacagtgtaaaattagaaactcccagaatcccgagcaatttctattattattcccatagcatctcttccatattttgctaaagctgaagaacgaggctattattaaaaagtccattatgaaatgagtttggttcaccaaaatcactcacttaggcagaagccatgtgccggatcaagtcgatcacacgagaactgtaaccccattcgttatcgtaccacgcgacaagcttaacaaaattgtcatttaatgcaatgccagccttggcatcaaagatgcttgacctgctgtccccaacaaagtcagttgataccaagtcttcatctacgtagccaagaattccttttaaattagtttcagattccgccttgatagtggccttgatatcttcataagaagccttcttctcaagcctaaccgtgaggtcaactacagagacatcaactgtgggaacacggaatgccattccagtcagcttgccattcaatgatggcaacactttgccaacagccttggcagctccagtgctgctaggaatgatattgaac

SEQ ID NO: 6971 - DNA, 481 bp, Gossypium hirsutum
  Clone ID: LIB3828-012-Q1-N6-G8
ggagcagcccaaatttgatcgggctaaaattggataaataaatagtccattacaggccagtttacaaaggcccaaataccaaaacccaacacccgggtacaacccaattagcctaaacctttggcccaaaatttacccaacctaaatggggcccaatgcctaaacagaatttggaaaccctaggtttccagatgcttcgcgccgtaatcaccccagcagtcacgccccttaaacttttggggttccatttgccccaatcgacgccatgattcccgggttcaaatttggccgtagttgaagcccaaggaaagcagatcagggccagcagcgtcaccatcagggcctgatcatttggattcgctgatttccgggcgagacatcattaaatttcttcaggggtttgagacgtttcgaactctaaccgccgtacgtgggggcgttgatgatggcgcgtgggcccccaatgatcggagcgtggccg

SEQ ID NO: 6972 - DNA, 335 bp, Gossypium hirsutum
  unsure (1)..(335): unsure at all n locations; Clone ID: LIB3828-012-Q1-N6-G9
ttntttttttttactccaaatactcatatcataaaaaaataaacttcatccactacaaagacaatccataattgattaataccatcatcaagtatcaaagcttaggaacaaacttactacaaaaataaacttcaaacatatgtcataactngaaacacatggaaaaagattactcatatgattcccatatttgatccaaagattactttcttttgtttttgtgaatcataaaatagcaaaatatgagatcaatcacccttcttcctgaaagagcatccttcagtgagtctagctcttcctcctgttggttgacaaagaacagtctgacaattccc

SEQ ID NO: 6973 - DNA, 591 bp, Gossypium hirsutum
  Clone ID: LIB3828-012-Q1-N6-H10
gattgtcagatatatcagcttagcaaaagacaatggaacttgaagaaggaatacaaagaaggacatggaacttaaccagttccaccaagaacacccttcagtttcttaacctgagcatcatctaggaaggtagtctcctctataatgttggagggcaaatcatttccaaacaaggcgaagtctaggatttgaacaccagggcttggactactgaaagatcatatgccaatgctggtgttgtacctgcattgatttgaaagtgcaataaaccttgggggaaaaccatgatatccccagttttaagagttttgaagtaaactttgttggcagatgatacgaatccggcatcaattatgccttgaataacaacaatgatttccgaactgtcggggtgtgtatgcataggcactactccgccaacagccaaatccagacgagctatggaaatgccgagtccgttaacaccaggaaactgagcagtgaatgctggtgttacagcagcttttatgaggtttgaagtgttgcccgcgtgtagtccggagaaaacgaaatcgtctacagtgactagttcaagccttttgcaagagtacc

SEQ ID NO: 6974 - DNA, 563 bp, Gossypium hirsutum
  unsure (1)..(563): unsure at all n locations; Clone ID: LIB3828-012-Q1-N6-H11
gtcctggtcagaatattctaattaaatcaaaccaacaatacaaaaaaaggaaattcacagcaggatccacagctgaataaaagagaactgtggggttttatgtggtgcttgcatctacaaggtggttgttgttgttgttgtaataagaatctacggtcataaaattgttgatcatgtgtgaatgttggtggtggggtcaacgagcgatgtcagatttagaagtgaaacccaattgttgctccatttcccagctgagcttggaggccacccctgaatgtttaggttcatgctcctcgagcttgcacatgagttcttgggcagtttgggcagagacaattatgtcacgggcagctggggctatgaaaccttcatccaccgcattgtctatgaatgataaaagcgagttgtaattcccatcaacattcaacagtcccacaggtttggcatggattcctagctgngcccaagtgatcccttccaggagttcttccccggttccctttccccctggcaagggcnattaaggccgtcgcttggcgagccctttccgctttccgttgggg

SEQ ID NO: 6975 - DNA, 407 bp, Gossypium hirsutum
  unsure (1)..(407): unsure at all n locations; Clone ID: LIB3828-012-Q1-N6-H12
gaaaaaaacaaataatgattacgtaggacgaatacggtgaacatgtccgaaaataacagagatataaatctcacaacaactctatcccaagtattaacttttaatttatatgaatcagctaccttataattttggcgggggcgacgacagcacccaatatcatttttctattactttcttcttcttttccttctctaaacaaacctttccatgttgggatgggatggggacaactattctcttttcccccccttttctagcctttgctctggttgtccatgcagtttctatttcagacatggtaaaactctctccannnggggttntgaactgtgtgaaagatcatcanttttggctgngatgaaaccgagggtcgctcctcttgcttctcaacttgttttcctctc

SEQ ID NO: 6976 - DNA, 507 bp, Gossypium hirsutum
  unsure (1)..(507): unsure at all n locations; Clone ID: LIB3828-012-Q1-N6-H7
atcaaaatgggcaaagttctatttattcatcgaaggaactagtttacaagacaatccatgatttttacatatataaaaactcgtagaaaaatataatatatacacctattgttatccatgtattatatatagaggagattcatttacttcaaggaaagcatacgatgaaatgagattttttattattatccataatatatatatatatatatgagaggctacggatgaccattcattcaccttggctggtatccataacaacaataggttttgattttcaagaagcaactgatctgccttgtttgactcagtaaagtgtatatatcttccaatccattgtnagatgatgatcatctcacaaatcaaaggaaacagctttgaattggatcattttgctgcgcaacttagcnggcaagatatcaatcccttcgnctctgctttaggctgagagtcgtcccgttcacgtctctgggctactttcacaaactcatctgagcttaaactccc

SEQ ID NO: 6977 - DNA, 501 bp, Gossypium hirsutum
  unsure (1)..(501): unsure at all n locations; Clone ID: LIB3828-012-Q1-N6-H9
accaaactatttttaatatttttgaagaagaaaaaagccaaatttttttatttttcagaattaaatcaacttaattgagtttcacaatttgaaacagccagtgaaacatatcagccctacctttaccaattaacatcaacaaacaccaccaagtgttaacaacttttacatttttggatccataccattcccaaatttaacgaatttagaatccccatgcctttggttgggtgggttaaaagaacatcagcccaaagccgattcagaggatggggatgggtgccggggatgggtggttgttgttgagaaggttgttccccttggggagctggtccctgggggtaagtntgtgggggttgttagcccgggcctgtttaacgggctctgcttccagctcgcccagctgggaacagggcctttcctccgcctttttcgccncccttagcctttcccncntctttcgggtttcctttcttctctgctcctctctttcccttctct

SEQ ID NO: 6978 - DNA, 451 bp, Gossypium hirsutum
  Clone ID: LIB3828-013-Q1-K6-A2
gtagtaaagcgcagcaggagccaagaaagaagagaggaaggtgaaactgctactgaggaagtgaagaagagcagccatgtcttgaggaagctggagaaacgtcagcagagtcgcacacttgacccccatatcgaggagcaatttggtagtggtcgtttactggcttgcatctcttcacggcctggtcaatgcggccgtgctgatggatatatcttggagggcaaagagctggagttttacatgaagaagatgcagagaaagagggggaagggagctgcctaaaattttgttgcttttgagtatttcatcattaagatcaaaatgtccttttttttttgcctttcaccatttgagaacatttgaaattgtgttagttttgagcttttttttttttagtttgaatattaattattgtgtacttttatatacttgcatgttattttttgtactt

SEQ ID NO: 6979 - DNA, 637 bp, Gossypium hirsutum
  Clone ID: LIB3828-013-Q1-K6-A3
attcgcttcatctttttatttctattcatcgtctttccccatctttatatttctctcttcattcctgctttttagtttacgattgaagtaaagaaagatcgataatggcgggtggaggagtaattggcgtcggcggcggcgacagcaggaagccgtacccggggaaccttactccttacgtcactataacatgtattgttgcagccatggggggtctgattttcggttatgatattgggatttctggtggggtgacgactatgacgccattccttcaaaagttcttccgaaaagtgtgggagaagaaggaagctgataagtcgactaaccaatattgtcaatacgatagccaaaccctgacgatgttcacatcgtcgctgtatttggccgctcttttgtcttccttggtagcctccaccgtcacccggaggcttggaaggaaattgtccatgctctttggtggtctacttttcttcgccggagctcttatcaatggatttgccaaagctgtttggatgttgattgttggtagaatgttgcttggtttcggtgtcggattcgccaatcagtcagtgcccctctacctctcagaattggcaccctacaaatatagaggagcattgaacattgggttcca

SEQ ID NO: 6980 - DNA, 636 bp, Gossypium hirsutum
  Clone ID: LIB3828-013-Q1-K6-A4
cccagcgtccggcgatggaagcaaaccgcgagcaacaacaataatcgtaatgaaacacagagagagaaagaagaacaactgtggagctggggagcaggaacggatggacagctgggcaccctcaggctccaagacgagcacctccctcaactccttaatgtcccttcactatcttccgcttcatccgtctctatgctcgcatgtggcggcgctcacgttgttggcttgacctctagtgggaaagtactaacatggggaaggggaaactcaggtcagttaggccatggagacatggattgcttgctatctccaaagattgtaatgtctttggagagttactgcatcactcaagtttcagctggatggagccattctggatttgtttcagatgaagggtgtgtttttacttgtggagatggttcgtttggccagctcgggcatggtgattacaggtcacattgctctcctgttaaagtatcattttttgttaataagcatgttgaacagatagcttgtggcatgcgacattcgcttgtcctactgaaagatggttcaggaaatctactttatggatttggatctggaaagcgtggtcaattgggtatttcaatagatagaatcaagtctgtcaatgct

SEQ ID NO: 6981 - DNA, 644 bp, Gossypium hirsutum
  Clone ID: LIB3828-013-Q1-K6-A5
cttagttatgcattagttataactaaaaaccatattttcacatcaggtgcatcaggtactaatgcagctgtcatcagaggtgctttaagagcagagaaaccagagttgcttacagtaatattaccacagagcttgaagaaacaacctcctgagagtcaggaattgttggaaaaggtgcaaactgtgatagagaagccctataatgatcatctacctttgatagaagccagcaggctgtgtaatagggacatcatttcacatgtacagcaagtcatttgctttgccttccatgatagcaagttgttgatggaaacatgccaagaagccaagaatctcagaaaaattgtgactcttttttacctggactgaaacattgccttctaatgtctatataaatcatttagagacagagcttttgcctgtaaattatacatattggttaaccattttcccctctgtagagtcaacaatgagaatggggggctagttttctcctcctctcatggcaggtgaagtggatttcttattggttcattgaatattggaaggaaataattataaatgcattttgttgtgcattaatggttaaaataagttggatatttggaaagttgtgttggttgaatgtaatgggttatgcattc

SEQ ID NO: 6982 - DNA, 315 bp, Gossypium hirsutum
  unsure (1)..(315): unsure at all n locations; Clone ID: LIB3828-013-Q1-K6-A6
naaaaaaaaaaaaaaaaaaaaaaagggcggagggctggtcgatgatccaagctccacgccgacgtgcgcgcgaatgcgtagctctagttcttcgataccgaaacccaatatcactgttccgtggccgtacaacgtacaacactggtgacagccctaaaccctgcccatctccaatacttattgcagcttatagcacatttcccccttctggcagttgtagcaataaggcaccaggccgatcccccttgccatagccaacacatgctcaatgcggaaggggacatggcactggccctgtacattaacctcaagcgc

SEQ ID NO: 6983 - DNA, 257 bp, Gossypium hirsutum
  Clone ID: LIB3828-013-Q1-K6-B2
gtggtagatgacgatgaaccgaatatcgtaaatattcatccattggatgcatgggctacttggaggatggaactagccaaccaaatgttcgatgaatggcaagcatctagaaattagttaggtttagggacaaaatgagtttgagttaatttgtttttgttattttacgtatctagtttgtgaaactttagtggtgtttgaattgttttttgtattgtactaaacttgttgaattataatttagtttcttttcattc

SEQ ID NO: 6984 - DNA, 350 bp, Gossypium hirsutum
  Clone ID: LIB3828-013-Q1-K6-B3
cccagcgtccggtttacaaagacgtcgaaggagcttccactcaatgggatgatattcaaagaaagcttgggaatttacccccaaagccaccagctttcaagcctgacccttttgaacccgcacctgacccggattccgtccctaaggacaagtcttggatcgatgaaaagactgaagaagagcttgaagaaatcgaagatgatgtcgatgatgatagattccttgaagaatacagaaagaagaggctggctgagatgaggaaagctgtttagatttcaaagtatggatcggttatgccaatttccggatccgtttttgtacaggaggtttatcaagctcctcaggatgaa

SEQ ID NO: 6985 - DNA, 290 bp, Gossypium hirsutum
  unsure (1)..(290): unsure at all n locations; Clone ID: LIB3828-013-Q1-K6-B4
tcgatacaagtcggattgtttgataggttctcacatggatcaagcaacattagacaacctgctcatcccatctccgtgtggaacatgcgtttcttgtgatgtggcccttggtcttagatttgtgctngctttcctgtgtgttgggggctggcggtgatctccaactctgtttgtgaaggttgctggcttgctgggtctgtgtcttgcgttcgtcgctcctgctcctgttgtgtgtttgttctttttctcttgcgttgcgtggttgcctgtgccgggttctgtctgtgtct

SEQ ID NO: 6986 - DNA, 276 bp, Gossypium hirsutum
  Clone ID: LIB3828-013-Q1-K6-B5
aaactccattttcttttctttctttctttttttccccttgttttcttattgtcatttgtgcctctttttttttcattacaagaaaatggcttttagtgggacgacagagtaaatgcaggtcttgggataagactgttcattgcattgaaatggtatctgttgatggtgtaccttatcataagacttgttatagatgcaatcattgcaaatgccttcttgtgatgggaagccattgataaaggtaaggaaacctttattgcaagcctgacttttagc

SEQ ID NO: 6987 - DNA, 636 bp, Gossypium hirsutum
  Clone ID: LIB3828-013-Q1-K6-B6
cccacgcgtccggggcaaccatttctttaaggattgccatattcgtggtactgttgatttcatttttggaagcgggaaatctttgtatctgaacacaaaaattttgtggaaggagatccgggacttacagtaattacagcacaagcgagagaaagttcatcagaggacacgggttattcgtttgtgcatggtagcatttctggaacagcgaagaatgcatttttgggcagggcctggaagagcagcccaagggttgtttatgcatatactgaaatgggcaacgttgtcaatcctgctggttggtctcataatctccaacctgaacgagccaaaactgtttactatggagaatataaatgcacggggcaaggcgccaatcccaagacacgggagccattcgtcaaacaactaccggatgcagaagctcaaccattcttggttcttgactatgttgaagctaccaaatggttgcttccttctccaacagtacctaattaattcattcattgtcaacttaatcacgcaagtagcatatcttcgcaatattagaaatccaagtagaccctcatctacctcttcgccgggtggaaataactagccttctatttcattttatttttccttcctaaggcttgt

SEQ ID NO: 6988 - DNA, 648 bp, Gossypium hirsutum
  unsure (1)..(648): unsure at all n locations; Clone ID: LIB3828-013-Q1-K6-C1
ggaaaactgatattgttgcactgaagaatacatggatgctcagtactatggtgagattggtatcggaactccaccgcaaaagttcactgtgatatttgacacaggaagctcaaatctgtgggtaccatcaactaagtgctatttctcggttgcatgtttcttccattccaagtacaagtcaagtgagtcaagtacttataagaagaatgggaaatctgcttctattcaatatggtactggagctatttctggtttctttagtaatgacagtgttaaagtcggcaacttggttgcgaaagatcaggaatttatagaggctactaaggagccaggtgttacatttattgcggccaaatttgatgggatattaggacttgggtttaaggagatttcagttggggatgctgtcccagtgtggtacaacatggtcgaacaaggtcttatcaaagaccaggtattttcattttggcttaatcgcaatgtaggagaagaaatgggtggtgaaattgtgtttggtgggattgatccaaaccactacaagggcaagcacacatacgttcctataacacaaaaaggctattggcagtttgacatgggtgatgttcttattggtgacanaccaactggatattgtgctggtggttgtgc

SEQ ID NO: 6989 - DNA, 427 bp, Gossypium hirsutum
  Clone ID: LIB3828-013-Q1-K6-C4
agttaataaacttaagggttatgttgatcagatggttacagaagctgaggactacttctcaaaatggggggatagtggtgaggtggaccttaagtatgaattggagcatctcatcatcttgactgctagtaggtgtctcttgggtcaagaagtacgtaataaactttttgatgatgtttctgcactcttccatgatcttgacaatggcatgctccctgtcagtgttattttcccttacctacctatccctgctcatcgccgccgtgaccgagctcgaaagaagcttgcaggaatctttgcaaatatcatagcttcccgtaaaagtgctggcaagtcaaaaaatgacatgtagcaatgtttcatgaaatgctaaggtaaagatgggcacccaactaccgaagctataaagactgacttactgattgct

SEQ ID NO: 6990 - DNA, 633 bp, Gossypium hirsutum
  Clone ID: LIB3828-013-Q1-K6-C5
ctttgccgtatattcacaaaaacccgtcaaattttcaccacaaattgaagaacccttgtttatcttctattaaaacccaccaaatacaatccaaatcaggtctatttccaattttctgcacatcgaaacccagcaccaagaacctgaaaacatgcaagaattgcaaaacccaattcgacccattgctcaatcaccctcgagcatgccattttcacactgcccatttcggaggggaaacaaagaggaaatttgagagtgtatatgcagggggcaccatggatacacctgaatctggtaaagtatttcaatactggcattgttgtggctctgaagatccatttgatcctggatgtactgctgctcctcatgcttcttacgacgactaatgccggttcgccgctgtcttcaaagactgatgccgggtcggtttctttataaacatttaactttgtatgtatttattattggaagtacatttcattcacattttgtaggaaaaaaaaaccatgtgataatgcatctgtttattgtaggttcaagatgaactatgtgagatgttgagactctgttagtgtagttgttttttcagttttttatggttcattgaacagttgaaccaatgatttctttccg

SEQ ID NO: 6991 - DNA, 543 bp, Gossypium hirsutum
  unsure (1)..(543): unsure at all n locations; Clone ID: LIB3828-013-Q1-K6-C6
gnttagtgtcttccagtttgtacttacacagcgggcaatatgtgtccacacacaacattctcctcgccagattatcgaaatgcggcaccagattattaacaagcctccaaatgtgaattttgattttatcaggaatacttaatgaccacaaatctttgtaaaaatctatgtaaacctcctcaataataggcatgtaagcagtactctgtagatgagctgcaaatagtacccgatacccactcttgactgtatactccccagaaccttcatatttccagaccaccctatcctctggtctacttacagatatgggaatagtaagaattcggtccactgtattctcatcaacgatctttagaagcagcgttctatcccaggaagccaaggatcgttccagatgttaatgcgatcccccttgccaacccgccacaggaccccatctccaatcacttcacgcgcaatacaaatacttctccaggtaaaaaatgggtaagctccaatctttgctgataagacattagacttaagaaaataccgggcttt

SEQ ID NO: 6992 - DNA, 458 bp, Gossypium hirsutum
  Clone ID: LIB3828-013-Q1-K6-D1
gcttaatggggtatcaacctcgggagcaacttaatttggaaatagatgggaagcaacatcactgcaccgggtatagaatccggagctctcttccattgaatattagctggataggcttgatcacctctgcactcaaactatcatagacaaatatgtgggtttggcgcctaacatcgttctggttcaagtaggtaacatggaaataggaggctttatacactgtcaattcatatgttcctggaatgcgttcttgtgtaggaacatcagtacttgccgtgtgtcttccaatgcaaatgaataaagaaccatggaatgactgatcattgatatatatgttggtgctgcaattttcaccgctttgatccaggcattttacatggctatgatgggatcatttacttataatacattgctttttgaagtgactactggtgtgggaacatcagtacttgcctttt

SEQ ID NO: 6993 - DNA, 302 bp, Gossypium hirsutum
  Clone ID: LIB3828-013-Q1-K6-D4
gttccaaccaacgtctgaagctcttcttctaactctgtttggataccgataaaatgaaaggaaaatggcgcagaccctggcgatgcctgttgcaccctctctctcctttatatgcaacaaagtaagctctatgtctctctgcaacactgcttccctccccccttcaaaccctcccaagcatcatggactaagcgttgtatgccttcgcgttggcggatcggaaattccaaacaacaaaagactggaattcgctctgcagtacatccatgggattggtgcgcacgagggctcgataaatccta

SEQ ID NO: 6994 - DNA, 639 bp, Gossypium hirsutum
  Clone ID: LIB3828-013-Q1-K6-D5
tagtaattgaaccaaaaaaaaatactgggagtttcaggcactttggagtatttgtctgatttgatgagcagtagtggtcataaacacaagaagagaaaacaattgcagacagtagagctgaaggtgaggatggactgtgatggttgtgaactcaaggtcaagaaggccctctcttcattgaatggagtgaaatcggtgaacataaacaggaaacagcagaaggtgactgtaacgggatatgttgaagccaacaaagtgttgaagaaagctaagtcaacagggaaaaaggctgagatttggccttatgttccttacaatctggtggctcaaccttacgctgttactgcttatgacaagaaggcacctcctggttatgttaggaaagtagacaacaatgtaagcagcactgctaccgtcactagatatgaagatccttacatcaccatgttcagtgatgaaaacccaaatgcatgttctgtcatgtgaagctgcaatttcatattactatttctttttggttttctctgttagatttcctggtagatattatgacaagattgttgagttattactaatcaaagggagttcatctttttctttttaattttcaaaatggtcctggtttgtttgtagtcttgt

SEQ ID NO: 6995 - DNA, 634 bp, Gossypium hirsutum
  Clone ID: LIB3828-013-Q1-K6-D6
gcccccacagtcttcaaactaagttcctttctttctttttttgactttctttcaaggaaagaaagggagaaagattttatgctttttttattataaaataaataaaaaaaacaatggcgaacaacgttgctgttattggtatttgttcggtgttcttggtagcagtggtggtggcagtagtggtgggtgtgacacagacacaaacaaaagaggagagtgattcaaagagcaatagcatatcgagttcaaataaagcggtgcaggcggtttgtcaacccacacatttcaaagatgcttgcgagaagagccttgcgtcatctaattccaccgacactaaggagttgataaggacgagtttccaagcagcgatagaggaagtaaggaaagtgttggcgaattcaacgacgatacaagacttaaataaagatgacaacaacagagaggcgcttaaggtttgtcaagaagtgttggatttatcgattgatgacttgcaattgtcgtttgataagatgggggaatacgatatgagtaagatcgatgattacttactgaacctgagagtgtggttaagcggtgccttaactacccaacaaacatgtgtagacacattcgcgggagtaagtaatgaacaagc

SEQ ID NO: 6996 - DNA, 533 bp, Gossypium hirsutum
  Clone ID: LIB3828-013-Q1-K6-E1
gggacagcgggggctagtttagctgcgcttaatacaagccatcaaatgaggatatcaaagagcgagtatgactaatctgcgcctgccattgctcataggtaggcgcgtctacatatgggcggggagactgaaagtgctgccgtgtgcagttactatctccagcgggaaacgctttcagtctggcaccgcctgcgactgcctgtggatggagtcaccaactcttgctgtgtggttacccccaatgctgccgtgacatatgaggatattggaggcgctcaaggcggagccttcatgggtggtacaggtgcagatgctgctcaggctggaggcgctgccgctgacgctgaagcttcagcagctgaggagaaaaacgaacagaaagatgatagtgaggacgatacaggattctctctggtcgatgaagcacacctactgccttactgactgtctagatcttagcaagcagctacattttcattattcatttatgcgtgaattaaactatagcgggtgacagtgggcacttattccta

SEQ ID NO: 6997 - DNA, 391 bp, Gossypium hirsutum
  Clone ID: LIB3828-013-Q1-K6-E2
atttcttggaaaaaaatagattgcagaagagatcatagagttctggatttgctcaatgctgatatgctccatggttgtggaagacggtgcatatgcgacaccaattagctacccaggactggtgaaaaaaccatcacgttccatgcaaaattggaaggcggaaatcagcctaccacctccatccaacgatactgacagaggatgttcaccccaaaaaacatgcgataagtcatcattcaatgcccatcttccattgaccacaactagaaaatgcacttcattgactaatctgtatatgatttgaattgctatcagattatatgacagcatagtacatataatccttctttatgatgtattcataccttattattgcaacaaatgtatgcca

SEQ ID NO: 6998 - DNA, 312 bp, Gossypium hirsutum
  Clone ID: LIB3828-013-Q1-K6-E4
cccctttccggtggcccccctccggttttttcttgggttttgtggtctgtggcgtcgtgctgcggcgcttgtctttgtgggtggtgtttggtggccttggcttgtgtgttgcgtgttctttcttcctgctggcggtgtctttgggcttgggggtgttctgcttcgtggcctttggtgtggttcctccgtggcttgcgtcttttgtccgtctcttggggccccgcgctcgtcttctcctggccggtgtgcgctgcggggggtgtgttcgttgtctggttcttgtttggcctggctgcttctctgctcttgcct

SEQ ID NO: 6999 - DNA, 637 bp, Gossypium hirsutum
  Clone ID: LIB3828-013-Q1-K6-E6
cggaaatactttctccatacatgcccgaaacgactgaggaatccgaacttcacaatggacaccaaccacaagcagaaccggaaccggaatcaaaagcggaatctcaacccgaatcgaaaacggagccagtgaccgtgaaaacaaaccggaggaggcactgaagctggaacctgttgtaaccggtgcggatccgaacacgaaggaggaggacaaagagagctcgatccaatccaatgacgcggccacgccgtcatccactgaccaaaatgctcggccgcagctgcgaaaagatgaagggaatcggactttcacgatgagagagttgctaactgaatttaaaagtgacgaagaggaagtaggctctccttacagtcgagaaagcacgcagagacaatccaaccaaaacagtgctgcaatggagttggtcagtagtgtcaccggtgctgatgaggagggccagtctcgccaacgggttcttgtgtatgctgccaagaggtatgctgctgctctagagaaaaacccagaagattatgatgctctttacaactgggcattggttcttcaggaaagtgctgataatgttagtccagattctacttcaccttctaaaaatgacttgctagaggaggcttgtaaa

SEQ ID NO: 7000 - DNA, 646 bp, Gossypium hirsutum
  unsure (1)..(646): unsure at all n locations; Clone ID: LIB3828-013-Q1-K6-F1
gcttaatgggttatccaccatcgtgaaagacttaacattccaaatgtcggcaacatcgacagcacggggttcaatcgtaagcttttgtcgactgaagattgcttgagtggattagtcaagctgaccggaaactccttcaagcaaaaccaatggatttgaagcctaacattgtggttgctaaagatggtagcgggaaatatgatactattaacaaggcattggctgaagtccccgtgaaaagtcccgatcgatttgttattcacattaaggctggtacctacaagngaaaaaatcaacgtgaccaagcagatgactaatgttgtattcatcggtgatggcccaactaagaccatcatcacaaatgacattagtgtcgctaagaatccaccggttagaacataccgcactgcaactgttggtgtggatggagctggtttcatggctaaggacattggattcgataactcagcaggacccgaaggtcatcaagcagtggccttcagggccactgctgatagggtcatcatgttcaactgccatttcactgggtaccaagacactctttacgctcacagagagagacaattatatagcaattgtctcatcactggaacggtggatttcatcttcggggatgcggcgagca

SEQ ID NO: 7001 - DNA, 322 bp, Gossypium hirsutum
  Clone ID: LIB3828-013-Q1-K6-F2
gccagcgtccactctctctaaaatttcacttcaaaaaaagtctgaacttttgaactaagcacaaaccggctcatcgaatatcaagaatccaccgccctgggaaatcaagcccgtagacacaggaatcatggggaggtggtggccctgttgacgaagacatcgctgacgacgagcggccgtcctggcccgtaaccttgattgaactgacactagtttgttcactgcttgctccctattgtttgctactagaagtcaatgcggtttgcctagcctggactgtattaatggcactggttggggcttgcatcgtgcttatgacaca

SEQ ID NO: 7002 - DNA, 466 bp, Gossypium hirsutum
  Clone ID: LIB3828-013-Q1-K6-F4
agcaaactttttatttaaaaaaacatgaagaggttttcccttattgttttgtgcgtggtgactctagtggtggtgttattttcgggtgcagagacagcgccagcgccaaaatgtgataaccccttggagtatagctcatgcttgaacgcgtataagaagccacctccatcagctggttgttgccagaaaatgaaggaacaagcaccatgctattgtgagtacatgaagatagaagatgtcaaacgtgtttttgacagagttgagattgcgaaaatggctaaattgtgtggagtttcatattcttccacctgctagaatcccatttggtttcatttgactatctctggctgggataacctggcatctcaataaataaaattttatttgaaaactattttttactcataatttcgactataatgtacttgtgtccttttttttggaatgatactggtcatttgctatt

SEQ ID NO: 7003 - DNA, 634 bp, Gossypium hirsutum
  Clone ID: LIB3828-013-Q1-K6-F6
gcctttttctcccttttagcatatagacaatagcaaatacagcaatggcttccagtgggcagcttcatgtggatttcgagctcaagtctcctgcagaaaagtgtggggaaccattagggactccaccacgattttccctcaagccttgtcccatgattacaagagcattcaagtgctagaaggcgatggcaaggcccctggatctgttcgtcttattaactatgccgaagggtctccaatcgttaaggtatcaaaagagagaatcgaatcagtggatgaagctgagaagaaatatgtttacagcatcattgatggggatctcctgaaatactacaagactttcattggcaagatcattgtggttcccaagggagagtcgagcttggttaaatggtcctgtgagtttgagaaggcaagtgaagagatccctgatccaagcgtcattaaggaatttgcagtgaagaactttaaggagatcgatgactatcttcacggtaaggcttatagaggccaggccatgccatgccatgccatgcatgatcctagccctgtttaatggattctctcatgttttcttagtaataaaataacatgcaaggatcccacttcaaaatatttgtctaggatccatcct

SEQ ID NO: 7004 - DNA, 633 bp, Gossypium hirsutum
  unsure (1)..(633): unsure at all n locations; Clone ID: LIB3828-013-Q1-K6-G1
tcccccaaagttttaacttttggtggaaagaatttttttgtgcaaaaaagggaaaaaaacagtttttttatttttaaatatttatttgataaatgtggggagctccagcagaacctgcagattcttattatgaggtccgacctgaatgtactgatgttccgaacaccaaatttaagatcaggcctggaaaaactctaagcgtgaggagatggaaagctgcattttctccagatggccgtttggatattgccaaaactctagaccgtatacatcgtggggggatccatccgacaattagaggagaagtatgggagtttctacttggttgctttgatgccgatagcacatacgaggaaagggatcagatacgtcagcaacgaagggagcaatatgcaaaaatgaagagtgattgtcgtgaaatatttcctgtcgttggaagtggcaagtacataacagcacctgtaataaccgaagacggtcagccaattagtgaccctttagtacttgcggagacaagtcaagatgataatacgatagaaattgtgaaggaactaacgagtcgcgatcctttggacaataaagtaatccagtggctgcttacattgcatcaaatangcctggatgtgaggcgta

SEQ ID NO: 7005 - DNA, 626 bp, Gossypium hirsutum
  Clone ID: LIB3828-013-Q1-K6-G2
acagcttgagatctgagagcaaaggccctgtttttcattggggttttttgtttgaagttctttggttgtaaacctgattttttttaaaataatacttgatttttagttttgggtgaattttgaatgtaataataatatatctctttttgattattttggggtaaatttttcgttagttatttttgggtcttcggaattggaatttttggggaatggaggtttcggtaattaggagttgttctcaagcaacaaaccctaaaacagaattagggtttagcgattcaaggtttagtttcgggaaatttaacgagaaactattttctcggaaaccaaacagtgtttcgtttgagagtccattaaggaggggaaaatctgggctcagaataacagcgcaagctgcccaatctgatcgccttcctaaatcgaagtcttctacaaaatcaaaaactcttaatagaataagattatctgctggcctgcctctagatgttgtgtctggtggtacagtcaaccagtttcgagcaatatcagcggggcttaaagctttgaaacttctcggtttggaaggtgttgaattgcctatatggtggggagtggtggagcatgagtcgatgggaaagtacaac

SEQ ID NO: 7006 - DNA, 641 bp, Gossypium hirsutum
  Clone ID: LIB3828-013-Q1-K6-G3
ctttcgctcgctcacttcccatttctgaatttctcaatcactttcaggtatctgaagaatcagcaaaatggtttcctttgaaatgaacgatcgaaaaaaattgggctgggattaacgggatttggcatatttttctcatttctgggaattatcttctttttcgacaagggattgcttgccatgggaaatatccttttcatatcaggagtgaccttaaccattggtctgaagtccaccatgcaattttttatgaaacctcaaaattttaagggaacaatttcttttggtgttggcttcttttttgttgtcgttggatggcccatatttggcatgatattggagacatatggattcgttgtactcttcagtggtttttggccaacactggcagtgtttctgcagaggataccaattcttggttggctattccagcaaccatacatcagatcgttattggatcggtatagaggcaggagggtgcctgtctaaccatgccatatatcagagaattggaaatagtgggggttcttatgaacaaataggcacaagtcaaagcgatggaatgaatggtgtgaattatataaaaaaaagtctatgcaaagtggtgaaacatgctttcatgaaatgatgttatgtagtac

SEQ ID NO: 7007 - DNA, 582 bp, Gossypium hirsutum
  unsure (1)..(582): unsure at all n locations; Clone ID: LIB3828-013-Q1-K6-G4
aaaatcctctttctcgtcatatggcagcaaatggcgttgtttctgacaagagcttgatcgtcagcttcggtgagatgctgatcgattttgtccccactgtctccggtgtttctctagccgaagctcccggcttcctcaaagcccctggcggtgctccggctaacgtggccattgctgttgctagactcggaggcaaagcgtcatttgtcggaaaacttggggacgacgagttcggtcatatgctggccgatattctcaagcaaaacagtgtctccggtgacgggatcttgtttgaccaaggcgctagaactgctcttgccttcgttacgttacgcgccgacggagagcgtgagttcatgttctataggaatcctagcgccgacatgctgttgaagccggaggagttgaacgttgatcttatcagatcttccaaggtatttcactatggatcaataagtttgatcgtggagccatgcagatcagctcatttaaaggcaatggaagtagccaaaggagctggtgcattgctctcatatgatccaaaccttcgcttgccactntggccttcagctgatgaggcta

SEQ ID NO: 7008 - DNA, 636 bp, Gossypium hirsutum
  Clone ID: LIB3828-013-Q1-K6-G5
gaaattttcctcgctctctcttttatcctcactttctcagccatcaaagacacccttttcttctcttaaggttgtaaaagatggcagatggtgaggatattcagccacttgtttgcgacaatggaactggaatggtgaaggccggatttgccggtgacgatgctccgagagccgtgttccctagcattgttggccggcctcgtcacaccggtgtgatggttggtatgggccaaaaagatgcatatgttggtgatgaggctcaatctaaaagaggtattttgacattgaaatacccaattgagcacggtattgtgaacaattgggatgatatggaaaagatttggcatcatacattttacaacgagcttcgtgttgccccagaagagcacccggttttacttaccgaagctccccttaacccgaaagctaaccgtgagaagatgactcaaatcatgttcgagacctttaattcacctgctatgtatgttgccatccaggctgtgctctctctgtatgctagtggtcgtacaaccggtattgtgttggattcgggagatggtgttagccacacagtccctatttacgagggttatgccctcccgcatgctattcttcgtctcgatttggctggtcgtg

SEQ ID NO: 7009 - DNA, 633 bp, Gossypium hirsutum
  Clone ID: LIB3828-013-Q1-K6-G6
cggccgcgtgggcttttcctctcgatttcccgagctaattggaagagtcttgaaggtaaaaaccgaagaaacaaagcgctctctctctttgtgaatccaatcaaatcgaagatgttgagagtggcaacgaggcggctcacttcttgttcgtctgcgtggaggtcgcaccaggccacctccgctatcgcctctcgtcctttcatcgacggctccgattcttctgattgtctcagatccaatttctcctcctcctcattttccttctctttcgcttctcaattccttcttcccaccagaggttttgcttctgagtcactcaccccaaaaagtgaccacagtgtgattcctgatgttccagcaacagtggctgctattaagaaccccagttctaaaatagtttatgatgaatacaaccatgaacgttttcctcctggtgaccccagcaagcgggcatttgcctattttgtcctgacaggtggtaggtttgtttacgcatctgttatccgtctgctcatcctcaagcttgtcctgagcatgtcagccagtaaggatgttcttgcactggcttctctcgaggttgatctctccagcattgaacctggcagcactgtaactgttaagtggcgtggaaag

SEQ ID NO: 7010 - DNA, 624 bp, Gossypium hirsutum
  Clone ID: LIB3828-013-Q1-K6-H1
cgattctgaaatttgcctgccgctccatctctacatcacaggaatggcgacagatgttgcagcccccgccaccgccgcacccaaagacccaacccaacctcaccttgaagtaaaactcttcaaccgctggagcttcgaggaagttcaggttgctgatatctccttgagtgattacattggtgtccaagcttcgaagcatgctacctatgtgccacacactgctgggaggtactcagttaagcgtttcaggaaggctcagtgcccaattgttgaaaggcttacaaactcacttatgatgcatggccgaaacaatgggaagaagcttatggcagtcaggattgtgaagcatgccatggatattatttatctcttgactgatcagaacccaattcaagtcattgttgatgctattatcaacagtgggccacgtgaagatgctactcgaattggttctgctggtgttgtcaggcgtcaggctgttgatatttctcctcttcgtcgcgtgaatcaggccatctatcttttgaccactggtgcacgtgagtctgcattcaggaacattaaaacaattgcagagtgtttggctgatgagcttattaatgctgctaagggatcatctaacag

SEQ ID NO: 7011 - DNA, 630 bp, Gossypium hirsutum
  Clone ID: LIB3828-013-Q1-K6-H2
gcaccatgatcttaaggtcaaagactctaaaaccctcctcttcggcgataaaacccgtcactgttttcggaatcaggaaccctgaggagattccatgggctgaagccggggctgagttcgttgttgagtcaactggagtgttcactgacaaagacaaggctgctgctcacttgaagggtggtgctaagaaagttgtgatctctggccctagcaaagatgcacccatgtttgtaatgggtgtaaacgagaaagactacaagccagagcttgacattgtttccaatgctagcagcactaccaattgtcttgctcctcttgctaaggttatccatgaccgatttggaatcgttgagggtctcatgactaccattcatgccattactgcaacccaaaagaaagtcgatggaccggtgctgtcaaggtatattttcaatctgattctgatcagtcccttcaacatcattcctagcagcaccggtgctgccaaggctgttggtaaggttcttcctgccctcaatggcaaactaactggaatgtcattccgagttcataccgttgatgtatcagttgtggatctcaccgttaggcttgagaaatctgcatcttatgatgagatcaaagctgctatca

SEQ ID NO: 7012 - DNA, 441 bp, Gossypium hirsutum
  Clone ID: LIB3828-013-Q1-K6-H4
tattcttcaataccatggacatgaagaagactcatgcgccgtcattgtcgccgccgcctctatgagcgcggtcctggctgctggcgcttctccagctccatctccagcttcagctccagctgcagctgcagcttcagcttcagcatctggcccaggcccagattccagcatcgcaatctcaacaatgcctgttattgagtccttggttggagccacacttgtttctttctttgcctactttttacagtaagccacagcaaaaaatggatgaaaccatgaagtattgaagaatcaaaaaaagaaatggtggattaataaatgtaaaaatactacttggggtgctttctttctttttgttcattgttgaagatggctttcttcactttacttgtttgtacgtttatgatatatgtttgaattccaagtgatactttgcactcc

SEQ ID NO: 7013 - DNA, 622 bp, Gossypium hirsutum
  unsure (1)..(622): unsure at all n locations; Clone ID: LIB3828-013-Q1-K6-H5
gggatacccaatgagatgttggctgctctcagctcttcccctgctgatgctgatttgtgggttcgccaaatgtatctgcttatgttggcaaaggtggtgctgatatcaggtttattgctgtcggaaatgaacctttccttacaagttacaacggtcaatttcagtcctatgtaatccctgctatggcgaatttgcagcagtctctggtcagagcaaatcttgctggatacataaagttggtagttccttgtaatgctgatgcctacgaaggcaatgttccttctcaaggggcatttcgatcggaactgactcaaattatgactcaacttgtttctttcctaaactcaaatggttctccatttgttgttaatatatacccatttctaagcctctatgggaactcggaatttccacaagactatgcattttttgagggtactacacatcctgttatagatggtgcaaacacttacaccaatgcatttgatggaaattatgacacattaattgcggccctcagtaaaatgggatacgggcagatgcccatagttattggggaagtgggctggcctacagatggtgcggtcggtgctaatctcactgctgctgaggttntcaacca

SEQ ID NO: 7014 - DNA, 627 bp, Gossypium hirsutum
  unsure (1)..(627): unsure at all n locations; Clone ID: LIB3828-013-Q1-K6-H6
ctcccttttgcttctataacgttcgcgctcctgttccaaggttcaagatgccgngaaaagtcgattccaaaggacgcggcgtatcaagtaatacatgatgagcttatgctggatggaaatccgaggttgaacttggcttcatttgttacaacatggatggaacctgagtgtgataagcttatgatggctgcaattaataagaactatgttgacatggatgaataccctgtcaccactgaactccagaatcgatgtgtaaacatgattgcaaacctgttccatgctccggttggggaagaagagacagcagtaggtgtgggaacagttggttcctctgaggctataatgctggctggattagcttttaaaaggaggtggcaacataagagaaaaacagagggaaaacccactgataatcccaacatagtcacgggagctaacgtgcaggtttgctgggagaagtttgcaaggtattttgaggtagagctgaaggaagtaaagctgaaagagggatattacgttatggacccagaacaagcggtagagctagtagatgagaacaccatatgtgtagcagctattttgggatcaacgctgacaggatgatttgaggacgtgaagacgttg

SEQ ID NO: 7015 - DNA, 581 bp, Gossypium hirsutum
  Clone ID: LIB3828-013-Q1-N6-A11
attcatgccatgcatacattcatgacttaaacacaaagatcatgaaaagagaagggttacatagtagccaaataaaattgattttaaaggatcaccgacagattctcatttttctctctaatttcacagcttttaacaccaaaaaataatcccaaaaaaaagtaaaaaaaaagagagaaatcccatgtgccggtaatacacaaactcgccggaaaattcatttccggggaaacccctccccagaagtatccaaaaataatctaaactggtggtagtggtagaaatgaagaatattacatcgaaactagatcattccaaaaagaaaaaaaaccctcctcttcaaacaaacaacttaagtaattttttatcagttcctctgctgccttgcccttgttgatctgcaaaaacactttcgaagcacgtcgtcgtcacagattcctccgagttcatagaaggagtccctggtcgacgattatcggtaactcgcttgcccgaaaagctcggggtcaagccaagatctagatcagagggctgtagtttcttgaattcttcttcgactcttttacgcttgggtgaaaccc

SEQ ID NO: 7016 - DNA, 419 bp, Gossypium hirsutum
  Clone ID: LIB3828-013-Q1-N6-A12
aacaaagaaaacatatatattagcatgcacatgcattaattacatatggctacaaaacaagattcaaggaactttaggatattgcaaatcgaatattgttttgagctatttattcttcataattactctttttgtccaagaggattttatagcaaacccttctgcaacatcattacttcttattttgtataattaataagacgacaaccaactcttcctcgttatttcatcttaatatggtatcatctctctactttggtggactgggttcactgtccataacctcttctatccctttgctctttacagtttcagcctggcaacatcctgatgcgcacctgggctgaccacactcagcacaagtcccaccacaaccctgacggcaacactctccactctcacatcccgactgtcctggc

SEQ ID NO: 7017 - DNA, 599 bp, Gossypium hirsutum
  Clone ID: LIB3828-013-Q1-N6-A7
cttcaaaaaatgggagaaactatagccccaggtactggcaattaaggttctcaacttcaaacttctgtatccagaatccagacaaccattcatgtataaatggtgattaaacagtatttaaccactaccttttaaatgacaaataatttctttgtttttacactaatctatatctcttaaatttctagttggatcccattcttactccgagtgaaaaattttgcgaaaccatttcggttcttctctgaactggcatgagttgatgacacaattgaagacgaggatgaagatggtggtgtgttgccatttccatcattcttatttccttgagggctagaatggtcagcaccaactctttttgactctggatctgctttgggtgaatatgtttcattagaatgtaacttccaaggttcactagatttcgtaatcaacgacactcctctagagaactccggtatgctcgtggtgttgattaaaaagtcttcaagtgtcgcaagagatttcagttgctgccctaaagatgctattgttttttgacactcagcaagttttccagcagcaacggccaaatcctcctgttttatcttcacttcaac

SEQ ID NO: 7018 - DNA, 611 bp, Gossypium hirsutum
  Clone ID: LIB3828-013-Q1-N6-A8
aaataataataataataataataataataataaaacacgagagttaatgaaacttacagaattgaaggtgttgacataggttatcttaatcattgaaaagtgagtatccacaacaaatcacactcaggagtcctcaacaacctttctaccttacaaaataaatttaccccgatgccctcggcggtatctacaatgcacccccacctctaagcaaattcttcatcattctctgtcactctaatgtgtcggggttgctgacctgaccgatacacactccacatcttacagtaggcccgttcaaggttcctaacccagcgtgccgtgtcaaaaagagggcaagtcattctggctgcttttaatttatcggaaagctcttgaagctttggacgatttagagcaagtgacactgctttctcttcatattctttcaaactactgacgatcatctcctccccaacaccagtagccaggcacaaagaaccagcaactctagtagccatcttttcaagtggaagggtcaccattggaagaccagcccatagaacatcggtgcctgttgtgtgtgcattgcataatggtgtatcaaggaagagatctgccaaggcactgcg

SEQ ID NO: 7019 - DNA, 570 bp, Gossypium hirsutum
  Clone ID: LIB3828-013-Q1-N6-A9
aaattaaaccaataaatatttttaatttcattaaataaaatataattcatattatttttacaaaaatgttaaaaagttaaaatgataaaattatttatatagtacattatgacggtggatgtcacgattgatgaaacatcttcatcgtattctaaagctgctgttggagttcatcgtactttctgctctgctttgcttccctcgctgccgcctctgcttccctcgctgctgcctctgctttaagttgtagcggagttcttcatatttcttttgaacctcaattgtggtcacttgcatctgagccatctggtcttttaacctctgaacttcagcttgagactgactcgccgaaggcatgtattgccgtgagctggatccaaaatattggattgggttaataaaagatccttgaaatctaacccgaccatacctttcaggacccaaaactttagcaataatctggttatcaatgtcttcaagatgaacagaactctcactggaagcaatcgcttcgtactccgcctttttatcctttagtttttccataatttctgcagcttcaggagtcat

SEQ ID NO: 7020 - DNA, 574 bp, Gossypium hirsutum
  Clone ID: LIB3828-013-Q1-N6-B11
aaaaggaaataccatattgttcatcaccaaaggatgccatattatttacagccaataatcaagtagtgtaaatacagccaggccaaataaaccagaaagtggaaattacccaaaaaaattacagagttgatgcatcactttgattaaataacgtgcatgatattgttaccttcaaaaattaatcaaaaacttgcgaaacctcttaatgaacccccaatccttctcctcactctcgcgcctttcattttcctctcctcggcgatgatggcgacgttgatgttggtagcggtggtgcgagtggtgatcgttgttgtcatgatcttgttcatgctcgtggttataaggacgaaccttcctaaagtctacgtgctccttcgactcggcgccattattgggaaacctggtccatctcccccggatctggtgaccaagtctgattgactccgggtcggaacgagatctctcgtccgacagtgccataccgttaccgtgagaaacatagcgcttgcgctggaaccgcgagttcaaaggcctgaaccttctatggtaacggcagtcatgttcattacggaac

SEQ ID NO: 7021 - DNA, 560 bp, Gossypium hirsutum
  Clone ID: LIB3828-013-Q1-N6-B12
aatattactattgatgcaattaatttttattacatgggcaaaggtttttagaagtgagatcatggggcagtagaatgaccttcaacttcctccccaatttcatcttgaagttcaaaatatcccatttctgtaagaactttcttgcattcaggaagagcttccttcttcatgtacccaagattgttggcgaatcgataaatcccactgacaccatctgcctttgtcaagaccaccctggctttcctccatacttcagtaggttcattgcaatcagcccttggactcttcaccaggctcacttcacagatctcatcttcgtgatcacctttcacctcgatcttgtatcctccggcttcgtcggtaactacgtcttggctgtgcgacacgattttctcgttggtaatgttccggcattccaatttcactgatgcgcccttaattggtttgctgattttggtctcaaattcaacacggcaagtgtcgcagtaaactcggccttcaacgatgaacttctcttcagggttggcggcggcagcgaagccgaggagggttgaaaggca

SEQ ID NO: 7022 - DNA, 488 bp, Gossypium hirsutum
  Clone ID: LIB3828-013-Q1-N6-B7
gggggatggggttggaaaaaattggggcctttttttttttgccggcgggcccggggagatggggcttattacaaaaaaaaaaaaagggttttttagcaaaaaaaaaaaaaaaggggggggcgccctttttttttttttttttttttttttcccccaaagttttttttttttttttattaaaaacggggcacacttttttggccggggtttttcccaggcaaaaaacatttaaatcattttttttttttaaaaggggaaaccccccggcccggcttggggggggtaaaaccttaaaaaaaaaaaaggccgggtccggaaacaaggggaacagccccaaaaaaacggggggctttaaaaaaaacggcccttgtgggggggggggcaaaacccccccctttgggggtagggggggaaccgcttgcccccatggggggggggggaaaagagggggaaaatgttaaagggcaaaaaaaaaaaaaaggttgggg

SEQ ID NO: 7023 - DNA, 603 bp, Gossypium hirsutum
  Clone ID: LIB3828-013-Q1-N6-B8
aaagcaatgaaagaatgaattcaattgattttgattgccatgcaatggtgaaaatttgaaccctgaaaaaaattaccccgtacacaagaccctccctacgtctcattacacttaaaatttgcttgcgtttaaagatttcccttgaaggtttaatgagtattccagtactagctttatgcttctatttcttcttctgctgcttcggctttaggttgtgattcatcttcttttggttttgattcggaatctgattcagcttcagaccttacttcaggtgaaggtgcagctgaacttttctttgaagtagatgtctctgtaagatgagcataggtgcctttctctttgaagagttgtgaaaagtgatgcttacagtaaaggaatccttccaatgcagcatatgttgatggtgtgagcacacaacctccatgtgaacacctaaagcatgatttatggtagttttctccttcaatagtcaccttctctaaggggtatgcagttttcttacaggcaccacatttgtcttgtgtaccagagaagaatgatgcaaatttgctaggagcctttcccgttccattcgaattttcagaggagggttttgcattc

SEQ ID NO: 7024 - DNA, 597 bp, Gossypium hirsutum
  Clone ID: LIB3828-013-Q1-N6-B9
gcaaattcacttcacggttgaattttggacgcttaaagcaattttgtgttaaatctctttcagtagttcaaggtccctctctcctcaaagtataatgtacagatgcaagctttaaatgcaacaagatcgtgaagctaccaaaacctgtaaaatccctttgcttagtaaccaccaagggtcgtaaagtgcactagaccattagaattattagttcagttcctcacaaaacttggaattctgatttggttccttaaacatctgtacaactgtgtctaccgaaagccgatgatcttccccttgatttgcagccaagacattttttgccaagtaacttctcaccactgcagttcagtcaagcattagttgatttacacactcaactctgtacaagattcatgccgtacggcagcaacattcttattttccgggaatattttcacctgaataaatggtctattgaacatctaactggaatcaataaatggtctattgaacacctaaaccccgatccttggcaaatgacctacctgccacctcacttccttgctcttcaaccttattcctcgaatttctgttctggttccatatttgatccat

SEQ ID NO: 7025 - DNA, 558 bp, Gossypium hirsutum
  Clone ID: LIB3828-013-Q1-N6-C11
aatacaaattggtaggttttattgagaaagaaagaggatagaaacagttataatatgtccaagaaacatttcgagaaatcgaaaaaaaaacaaaggctagaaaaacaaatccttccctcttctctaccctaagtacatctccatgatttaaactaaaatatacatatctaagataaaaatcatttatgttcgggcccaattttacccgggccttaaacacaaaacacaaataataaaacaaaattaaaacaaaaaacccaattacagaggcccaatacccaaacccgaaaaccaaagtcaacttagggtttcagtttttgaaaccctaagcgccgcactagctccagaccgatggtcttctgccgccactcgcttcagacccttggtctccgggccgctgcgcgtctatcaccgccactgacccatcaccggcgcatgtcaatcacctgcttgcttcgggagtcggtgtcggaacttgtcttcgccgtcaccggagttggataggtagaggtctctttctccttttttctctcattcccacggtcgagaaggccaagc

SEQ ID NO: 7026 - DNA, 586 bp, Gossypium hirsutum
  Clone ID: LIB3828-013-Q1-N6-C12
actcttccaaaaaaaataaccttgttattaacaaatttcaaacaatggcaacttcattcataagcagtatgaggcgaaagaggtaatgacctcaaagcaccaatcatttgaatgttcgtgcggatcaattctgattttgttcccttacttcctacatttcgtacaacttcaatggttgtcttcgctaacaagtcatccgacaagcttgaagaaagagatgctgaaaacaaaagaatgattagtcaataatttacaaaaacagaatatgtcagcttatccaaatgatattgccacctcctctaggagttgggattccagcaatgccgagcttcgatccccaacacttgcaaattccccttccctgattcccctcagtccttagcatactttgtacaaaactaaataaatatgatacacatcttaaaagatatatataaagactcatcaattcttttttcttcattccttacagttgtcataaataccaaccattagattaagtatcaaagaagtaaaacctctactaattgctccattttagcatgcatgtattaaataacaagaaatagaaggcatctagccttct

SEQ ID NO: 7027 - DNA, 520 bp, Gossypium hirsutum
  Clone ID: LIB3828-013-Q1-N6-C7
attcatataataattaaagataaaaaaaaacagctagcacattgtaattcaatcatatatcaagctgcttggttattctttattttctttctctttgtatagaatccgtagtttctataatctatatataaatctatgaagattctggcgccatagcttgtatattcatggccttctttttccctaaaagaccattggcatcaagtttcatggtaaggcccttaatcgttcgtttgagttcatccatataagcgataccaccaccacacccattattgaacctgcggtaagggcatccgtaattgcaggtgccgcaaaagctgccgcccatgatatccacatcgtcgcagtcgatacagtaagggcttctttcataacctatacctatgccagcaccgaatccggtaggatcaggatcgatagaggttgaagaatcaggatcagcttcatgcggaaaaccgttgcttggttgaaacccatcggctccgtcagccatggtggagattccggtcctcttacc

SEQ ID NO: 7028 - DNA, 581 bp, Gossypium hirsutum
  Clone ID: LIB3828-013-Q1-N6-C8
ataaaattaaacatcatatattaataatttatattttcaaagccataaaggcagaaattaaaaggtgattgaccaggcaaacatttcttaccatataatttattttttattatatataaagtatggaaaattggtcatgcacccaattgtcccaccaatcgccttcggatctcaggtaatttctgcttgaaagcaacttctaggcgtgcatctaaagtattttccaaaacaatcttcccgtcttccgaagccaacacaactccgcccgagcagtaaggttgatgggcaaactcatctccgttagcgggcggtggtggtgggagataaacactgtcgataacaatcttaggtggaggtacattgaatttctctgcgtactctcgtttagcttcatcgataatagtttccaccagcttacgatccacctctcggcacctcaacaacaccgacggttccctcagccgaaccagactctgcaccaccaatgccttcaccaggtttttatacccccttttgtcagtgcccaaacgctgcagctctttcctcgcgctttcttttatggagttcaccaactcttcctg

SEQ ID NO: 7029 - DNA, 575 bp, Gossypium hirsutum
  Clone ID: LIB3828-013-Q1-N6-C9
agtattgtaaagtgaattcaaaatccaaaatagtttgtcattagatcacatttaattaaactcatcttgtacccaggaccaggccactggaaataagctggcagtttctgcaaatggcaaatgttatttttcagacaaaaacttacaatcatccaatatgatccaccttttcattttccccaacttataccgcagagtgaggactcctggggataatataaaattttcatgcagagtttgactcatcaacagcctcatcattgccacttttttcttggttgccagcaactggtttctcttcatttaaaacacgacctgtcataggatcaacaggacgcatgtcacgcggtccacccttgcgtcccattgccaccatgggtggcggaggcaatactccagccctgaaaagatgcgttggaccggctctgaaggctgtgccccaactgataaccaatacttgactctttcaaagttaagacccattcgtttacctccatcttggcctggcaaaggattgtagtaaccaaggacctcaagatgcttcccatctcttggggatctgctattggcagcca

SEQ ID NO: 7030 - DNA, 521 bp, Gossypium hirsutum
  Clone ID: LIB3828-013-Q1-N6-D10
ggaaatctaattatccacattttatataagatcttcaaataacaacttgggaaacaaaacgggaacaatgattcgttttacatataggggctctgacaattcaatgcttggtgggaaagatctaagggaaaattcgaacccacattgatcgacgggaagggcctccattggggttcacaaagagcatgtaataaccagggggggcaatgttgcttttaacgggagcttgaaaaacaatgttgtttgtatttatggcaacatttttgttaaattccacaattcccaattgaatcaatctttgattcatagcaaccccgtgcgtcacaaatgggggggagtaaatcggcacttgaagcttttggggggcaatttcgacatttccacggatttgcactggaaatttctgaccgtttttcacctggttattggaattttcaacaatgatctcttggtggaacatacccaagttcgggtccaagtaatggggcgagaacttctcaacccgaacttgggtggggaac

SEQ ID NO: 7031 - DNA, 597 bp, Gossypium hirsutum
  Clone ID: LIB3828-013-Q1-N6-D11
gaaatgaaacactcttttatttgtagctttactcgtttaatatggatgatacccaaaaaacgaaataataaagcatatgtgaatgttgaaatttacctatactgggaaactcatagtgaaggcaagatgcagtgcccactagaaatgtcaatatcaacttacacaacataagataacaacccttcttagcaccatacacctcgaatggatcctgtttcaccaatcattggccagcaacataacatacatgcatacatacattgtcacttgctcaaccagtagatgaagataagaaatgtgcatacagatgcaaccagagagagaatgatggtatccatagactttttcctctttattgcagacagaatctgatttaccgttggtaggcggctgctaacattgctgagctttgaattaatccccccaaaagtagaacgttgaaggacaagtgcaccaagagttgcttgagcttgtgaaataacattatccatatgtcctgtatttcgactgatggccgcatgctccttaagtagagcctgttctgtggaaccaacaccttcttccaagtctaatctagtccgatcaaattccctaaaa

SEQ ID NO: 7032 - DNA, 538 bp, Gossypium hirsutum
  Clone ID: LIB3828-013-Q1-N6-D12
gaccataaaccaatctgcttgcaatacttaaaatttatgacaatggcaaatgttgtagcctttacaatttcgacacattgaaaaccatgaaataaagggaaccgaaaaaaaaaaaaacaaggaaaatttttacaatgcatcacctatttatatatatataacatattatctgccaaagccacccccaccaaaccccccgtttttttttttgcaaagataaacgtgggaccgggggctaatgaaatcaatatatttctctgtttatacccctgattttccaataacacccataggggaattgtaaatctggcagcagtttttcccgaaacactcgaacaatgatccgaactcgaataattttttgcaacttttaacttggatcactgaccttccatgaaatttgggcctaagacggtttcattcaccgggatctgcctccagattttgggaaattgtggaaggatttatacgtttatcttgtttgagagttgtcatcggcttttattgaaacgcggctttatcggcaccggcggggagt

SEQ ID NO: 7033 - DNA, 593 bp, Gossypium hirsutum
  Clone ID: LIB3828-013-Q1-N6-D7
ataaagggtctacttgcttcaataactctatattattcaactacatggccatgggaaaacccttgtaataacagttaaaaacatctgaatcttggttccaatgcttaaaaagttccaattacaacaagagttgatagcaaatggttttgttctcaccaatgaagaagattaaaattggtctgagtaaagcttgacctcatctagcgggattagaactggaactgaatctcaggtgaatagccgagagcatcaagatggccagccatggctttgttcatcggtggagggccacaccttagaatcttgatatcaggagctggtgctgggcagtgggtctgaatcatttcctttgacacaaagccggcacctccattccagacttcaggaggctggttcaaaacatagtagactttgaagcgaccagggtacttggcaacaaggctatccaactcttccttcaaaagaatgtcctcatatgtaacattggcataaataaggtgtacgtttgtcatgtcttttgggttctccaatatggctctggctacttggaacattggagtaatgccagagcctccagcaatcatcccaaatgc

SEQ ID NO: 7034 - DNA, 547 bp, Gossypium hirsutum
  Clone ID: LIB3828-013-Q1-N6-D8
atggcaaaacaaaaaaacataaccagaaccaatggttaaagaatacccaatgagtatacatttaatgtttctttaccacacgatgtcatctaaataagaaagtatacatatggatgatataattctttagagacaaatacagatcaatccttagccaaaaactatgccgagctaatcaccaaacgggtcactttggacgctactacaagaatcacatccttaatactacacattcacttccatcatatcaaaagtatatcaattacaactaaaagctacttgccaaattcagagttgaaccgtcctgttctattaggaaccggactagacaaaccaggttgccggggcttatgcagttttaaagatcggcaaaatagtgtttgtaaatcctacatgcaaagagagccggtatctgctgccgcatcagatgattctggcagtatgagaaacagtttgaagacttcttaccctaataacaacggattcagtaatcgccttcatctattatagatgaggtggtatcatccggaaaaaccccactcccctg

SEQ ID NO: 7035 - DNA, 605 bp, Gossypium hirsutum
  Clone ID: LIB3828-013-Q1-N6-D9
aaataatagtatagattacacttccaattataaagtacaaattctacaaataaaaatcctgaaggtaccaaaacataactttaacaatgcttttgaaaaagcaattaatatattttatatggtaatactataattttgagacacgacttaaggaaacatctatgagacaccgaatttgctgctgtttcccatgccatgatctctgatcaaaaactataatgtgatctaacgacatacttattagcttctgaatgcttttcatctgcctttctagcatcattaatgtattttctttttctccagtcaaaatcaccagcaaactcccccttctcttctcagtaacatgagttaatgccatgttatctggtgtgttcaatccaaaggcttgttcgaaattaggcttcaacacatacataggtcacaagattcttatcaatgcacatatagattctgaataaggtctacatcagttatggttttacataaaaaataaataaaaagtgtgaagcagcaaagagcctttggatattcttcaggagtgaatctgccgtcggcaaaaaacataaatacaaaacatctcaatttcattcaactaatgaacagct

SEQ ID NO: 7036 - DNA, 479 bp, Gossypium hirsutum
  Clone ID: LIB3828-013-Q1-N6-E10
cagtcaacatcatcatcattttgtgcataaattgattggagggtaaaatgggtcacagggattccattaggacgctggtgctcatccattactatcttgtaaccaaaaagctcgcaacatgctcttctaaaaactgaaattctatccgcaaaaacagtcttgtatctctcttcacgtttttcaagtgtcgcaatttgttcttttaatttcgttatcttctcagatatatacgagtcaaccagcttcccagtgtcacctgattgacttttcaattcttcaagagcttgtaccttctcatttgtcttttgtaactcagtttttaatgcctcaatagtttgttttgcctcattatcaacagcaagagtatttaccattcgcagaacttttgtatttgaagctgaataatcaccatgacccagctttgactccaatagtgaaatctctgaacgaagtcgatcactctccctgtctagtgattt

SEQ ID NO: 7037 - DNA, 503 bp, Gossypium hirsutum
  Clone ID: LIB3828-013-Q1-N6-E11
gcacaaatggagagtttcagatacaattcgtataccggacagattaccatagtataacacaaagatttctccaccgattccttctagtcgagcctcccggtctgccattataccccgagaagtaaaaagaattacaatccccatcccgcctaaaatcctaggaatttgctgatagtgagaatagattcgcagacctggtcgactgatccgacgtaaatctaaaatagtgctatgtggtccttttctattccgtctatgtcgtagggttaaaaccaaaaaatatttgttgcgttcccgatgtttccttacgttatcgataaaaccttctcgtaaaagtattctaacaatggttccagtgatgttagaagatcctattggaatcggtccttttctattcatatcagcatctcgaatagagggtattatgtcagcaatagaggacttacccatgggaaactaaaatggtcgttggtaccgaattttggtatacccaacgtggactt

SEQ ID NO: 7038 - DNA, 609 bp, Gossypium hirsutum
  Clone ID: LIB3828-013-Q1-N6-E8
aatagcatgtaagcaacatttgcatttcacagatgaataggctacatgaagccttgtttttctaaaaaaaaaaaaaacaacgtacgccctagcgaatttaacataacaaattgccaatttcagttcgccaatcacaattatttttttaatccaagatcatgaaaaatccgtcaaagcacattattactctccccagtcttccagacttccggtttcaccaatcaaaagtaaagccctcccttcattcaaacaatgatattacctttccctacggcttgagtgccaaggccagcccgactttagcactcttttcaattgctctggtgtccacgtctccagagatagtgaagagggattttgggcgccactcatgctggataagaccacttgctctgccgtagttgttcagtcgagccttcactgtggtcaacgggtcaagagcatgctgtgtaccaatcgtgagagtgttctcattacttgaaaagctatgggtcagctccgcaccaaccgctgtgttcgtcaatgggctaacaatgtggtagtaggaagcattaagagtgtcacctttatcatttaatgttagggaagcaatgaggtcagaatgggtga

SEQ ID NO: 7039 - DNA, 599 bp, Gossypium hirsutum
  Clone ID: LIB3828-013-Q1-N6-E9
atactaggtaaagctttttcttgcgggtttatatatttatttctttcattatatattaaatgatcgaagttcgatcactaccaccatcactcttactgaaacaacaagacaatttatgttttaagatgaaaaggaaaatatcaaaagcacaacattaaaatcaaactcttctttaaaagcaagcataagaattcaaagcaacctagatcctagttgcaggcttcgggattagccaagaggtaagcttcaaggggcttgtaaactgtctcactccctttaattcgagccttgatttcatcttccgttataacattatctccaacagtgtagaatttcattgagctcttgcaaatacttcctccacctgcagctgcctcaaacttgttctcatagctaatcttttcaagcttatcccccaaaggcccaccttcaattaaactgtaactgtatgaaaaattattttcatcatgtcttccaatctggtgcttcatatattggaatggaaagccttcaacaaagttgatttttacgatacttccggaactaggattagcttcaacctcaatactcttgactgcattaggagcagccgcgggcca

SEQ ID NO: 7040 - DNA, 586 bp, Gossypium hirsutum
  Clone ID: LIB3828-013-Q1-N6-F10
aaaccataactatttccctatatttatattcataaatataatatgccatatgatttaaatgtaaaaacaacccaagagcacaaaagaaaattaaaataaaataaggttaataaagcaaacattaccttaaatgaaaagaagattagcaagagcaggtagataattttttcatctcacttatttctaaatcaggaccagcgatgacctcaatcttagatcctttcaacgcggtggcgtgatcagcaccgttgagttttccgtttccacattccaaggattttttacaaagcagaccgtaaatctcatccagcagcttgaaaaaagctttatccacattgtcaccgctaagagcggacgtctcggcgaagaataggccctgatcctctgcgaactcaacagcgtcttcagttggaacggctctgaggtccactagatcagctttgttcccaatgagcatgatgacgatggaattgtcggcgtgggcacgtagttcttccacccatctggccacgtgatcgaagctctgccgcttggtgatgtcgtacactagcattgcccccaaggcacctctataatacgcacttgt

SEQ ID NO: 7041 - DNA, 457 bp, Gossypium hirsutum
  Clone ID: LIB3828-013-Q1-N6-F11
aaaaaaaaaaaaaaaatgggttaaaaaaggggggccccccaaaaagggaggggggggaaaaaaaaaaacccccctttaaaaaaaaaaaaaaaaaaaaaggggttaaaaaaaaaacaattttaaaaggggggaaaaaaaaaattcccaaaaaaaaaaaaaaaagggggccccccttaaaaaaaaatttaaagttaaaaaggggggggaaagccccaaaaaaaattgccccttttaaaaggaaatggggggggggccccccccaaaaaaaaaaaaatggaaccccttccccccaaggggggggcaaaaaacccctttggggaaaacgggaaggagggggtaacccggggaaaaaacccccaaaagggggtttaaaaaaacccccaaggggctccccccagggaaaaaaaaaaaagttttttgccgggggggaaaaaaaaaaaaattttggggggccccc

SEQ ID NO: 7042 - DNA, 562 bp, Gossypium hirsutum
  Clone ID: LIB3828-013-Q1-N6-F12
agaaaacgaagaacaggaaaatgttccataatcatcaaatacataatctccaacagatacgatacaccataggcacataataaaagtgacgataatttttaaagtaaaagtaacagtacacaccaattttgctttcacagcaatattatatgattaacagtgcatgaacttagcttatggatacggaaatcatcgcgagatagatattttaatcaagcaagggatagggggggagatcggagcctccgccactgtgaaggctaggatggtttggctgcaggcgtaaagcaaatatacgaggacctccattttgatacccgatcagggtatcataatcccctccattatcaactaatccatatggatcttctttcagggattccagttcatgtaagagatttttgtgtatctcttccacattcctcacctttttcctggaagtatcgatctggttggagagaacacgatactttctatcacgaataagagtgacagagctctccatttcttgttccaaagcaccaagatcttcgatgctcaaatcattcaaacagtcgcccat

SEQ ID NO: 7043 - DNA, 595 bp, Gossypium hirsutum
  Clone ID: LIB3828-013-Q1-N6-F9
agcgtgttgaaggttttagcagaaatttatataacaaagaaaatcatatatattagcatgcacatgcattaattacatatggctacaaaacaagattcaaggaactttaggatattgcaaatcgaatattgttttgagctatttattcttcataattactctttttgtccaagaggattttatagcaaacccttctgcaacatcattacttcttattttgtataattaataagacgacaaccaactcttcctcgttatttcatcttaatatggtatcatctctctactttggtggactgggttcactgtccataacctcttctatccctttgctctttacagtttcagcctggcaacatcctgatgcgcacctgggctgaccacactcagcacaagtcccaccacaaccctgacggcaacactctccactctcacatcccgactgtcctggcattagtgggatttttgggacttgtgggatctgtgggacttgtgggatctgtgggattagtggaatttgtgggatttgtgggatctgtgggatttgtgggatttctggaattcttgggatttctggaatttgaggaaatggtag

SEQ ID NO: 7044 - DNA, 533 bp, Gossypium hirsutum
  Clone ID: LIB3828-013-Q1-N6-G10
attaaaaaaattatttatatatgaataaaatcacgtattaaatgtagttatgttttttgataatataacaggcctattttacccaaggcccaataagacccaaaatacattcataaaaattacaagagaaaaacaaaaacagtccaattacaaggcccaaatgccccaaacccgaatggcccaaaacttaaaaaaaactagcccaaaatcttaaaaattttcagaaaaaaaaccctaggtgcggcacacctaagtctacctagcctaccaccgccactgtcacactgcctctgccacccttgctccactgccccaattgcacctgcggagaagcaaaaaagaaataataagtagcaatgtaaacaagttgcaagttggctataaaaaagcctcaagcaaaatgtaacttttttttatagagattaaatcaaaacacacaataaattgaatgcaaaaatacaaaaagattcaaaaacagaatcaatcaaaagaatacaaaggtagctttttatcttttttttttttgctttttt

SEQ ID NO: 7045 - DNA, 465 bp, Gossypium hirsutum
  Clone ID: LIB3828-013-Q1-N6-G11
gcaaaaagccttgtctattttcaaaggtaattaaaaaaacattacagggggcaaattacaattgggaatttaaatataaaaccctaaataaaaataaaggggaaaaaatgacaacaaaggggaagataccttcggaaatttctcagcacaactttatgacagcaaaatttgttcattattgctacaaattggaagtggctgaaattatgacaagtttttggaccgactaatttaataataataataatggacccccccaaaaaatctttaattaattaattaattaatttttcttcccctcttcaccgccttcttccaagtaagccttttttctcctatcaacaccagcaaacaaacaaatcacaagggaaaaacgtggcgtacatcccatggaccttccaattagtcttaggccgggtgtttcataaaagtggttttgcattaaccgcctaagactaattggaa

SEQ ID NO: 7046 - DNA, 502 bp, Gossypium hirsutum
  Clone ID: LIB3828-013-Q1-N6-G12
ctaaaaaaaaaaactcatatacagtcttttcttttatgtaaaaggagtatttcataaattaaaaaaaaaaagtaatacgatattaaatacgaccataggcatcgaacttcaatacggtcacaactcggacacattccattacactataaacaaacatgaagaagaaaaaacacaaatacattaatttaagtgaatgagaaacctgaggtaccaagcatggatgaaagatgatctgttaccacatccacgtgacggactgctcaaaggatgatatatattcaggtcagttaggcgcatcgatggttctatatctgataatctcaactccaaggtagtcgagacagccatgaacagcaacatgaggcttcccaacctttactcgaactgcagatatttgagagtgatttgtgaaggtttttgatgcaatcatttgagccactgattccaaaagatcatgagatggcccttccacaacttccttcactatcctattacataaaag

SEQ ID NO: 7047 - DNA, 606 bp, Gossypium hirsutum
  Clone ID: LIB3828-013-Q1-N6-G8
aaaaaaaaacaaatttatttgcgaaataaaaataattataagagttacaacgtcatcaaaaaaaattatacctctgctattgattaagcggtcggggtagattttgctgggataggggcagaacatgcagctggattttgtttgccactaactttaggcttcacattcgaacattgtgatactgcaggtccagtcggtccactatgcgtaatttcaatgtctgcaagttctacattttcacaaggcaaagtagcactacaaataatcttgacagcttctggacgcgcagaagtgccgtgaatgtttttgaaactaatgttgcttagtttaactttcgattcttcatttattttgcatttgttccatgggcaatatttctgatcaattataataggagaactgacattggtcacggtaatatcctcaaagtgaatgttcgaacaagtgccaggttcagcacctggccaagttttgattctaacaccattggaagtattagtcatggtgcaattttttactgtaactccatcaactggttcttcatttttaaacaatccgagactaccaatactgataccatgtcctggtccacaagttactccattg

SEQ ID NO: 7048 - DNA, 588 bp, Gossypium hirsutum
  unsure (1)..(588): unsure at all n locations; Clone ID: LIB3828-013-Q1-N6-G9
cgagtaaatgatacttanattacttctaaaataatcggaaaatccaacaacaaatttaaaatccatatcaagaaatataaaattaataaaaaataaataatgaattaatggcaataaatttttaaggttgagggatttattaatccaagctttccaattcccttcccagttgctttcctagaaattgcttcattggtccttccattattttctattttcttctcagtgcttggcttcttgcatagcatgaaattcctagcccgtattgatccaattgcctcccagggactcaatgcatgtgatccaacactaggggaataaagaagaaactcattaagatccgatccaagaacaggtaacggccttcacgagcatatgatttcaaagcaatatcaataacagtaccaaccagttctccttcattaacaacgaaccggatcggaccggaacttcccaaaacagagacgctattcaataacttattgcctttacaaccctgattcttcttctgctcattgtgaaccatctttttttcaaaaaatcaaatcaaaatccactaaatatcgcgacgaaaaaaatgggtttctt

SEQ ID NO: 7049 - DNA, 567 bp, Gossypium hirsutum
  Clone ID: LIB3828-013-Q1-N6-H10
aataataataataataataataaaagaagtatgcaaagtgtcgaaagttcttgaagtaattttactacttaataataataaatttgaaggataataaaaagcagatgaggaggtaggactagggaggcaacttaaaaatcagatttccaaataccagaatcgccttctccacaagagttgtgcacgtatttcatcttctccaccgacttacacactccactgcacgaccaatcaaatgatgccacgcatatgttccccgcttgtgccttccattcacaatctggaggggtcccacaacacatggaacgatcgtccacgtgttcaacttccaacccgatcaaccatgatcctaacgacacgtcttcattggcgtatctgtgcaaaatgggcgagttgatggaaatataggcagcaagatccttggaaatgccataaatttgaccagtggcatgcctgaaatacttgtttccatcttctccaaatttccagtactctggttcatgatatttcacccctttctcagaaagaactggtccagatttcatgcaccctatgtacactcttggc

SEQ ID NO: 7050 - DNA, 567 bp, Gossypium hirsutum
  Clone ID: LIB3828-013-Q1-N6-H11
gataccaaatggtgacatcatttgaataacaagcaaaaacagaatcaagattgaaagtgaatcaaaagttgaaaccaaattttcatgaccccaattcagatccttcaaatatgacctaaagtgctttgcatctacagagcatatagcgacaaaatcagacaactaccagcaggcagatgctccactacgagagctacaaagtgaccataatttacagtgtgactgaaatcaacacaggcaaaagggagaaaatactgggagctgaggtcgtaagcaaatccacaccaatcaccaaccaacacacaacttcacataggaggctgtccaatgtcagaaataatgttatgtcagacactcccgactccacccttactccacctactccaacctaagtccccgaggatgcagccttctttctagcctgtcttaaggatgctactacacacttgtcacctaggttcagtatctttcgctgcaggaacttttgaagggtaactggatagatccatgtcaataagtgacatatcgtatggcgcagaataagaatttgagtggtccacaagcagt

SEQ ID NO: 7051 - DNA, 492 bp, Gossypium hirsutum
  unsure (1)..(492): unsure at all n locations; Clone ID: LIB3828-013-Q1-N6-H12
aagtgtaaatgtcaaatatagatatgttcaaacttttagaagtttttttcaagcaataaaagactaatacagtagaatttatttggaagattaaaaagccaacaagctcacctcatattaacaatggtaatagtaagctttccactaacctttgaacagaaaactgaaagaaagtccaaatttatttatctacacttgcagcattttcaggaacaagctcatcgctgcaactacttcgtaccaggatttctgccaactcaccgacttggctatcaatttggtcgggatttccaccatgtcaaccaactcagaaatcgatagaatatttaagtcaaagatggctcaccattggtttttggcagcaacaaggacctcctnctttttctgagcagcnttgtcccaactgaggtcttgcatcataccccgtcttcgatgtccgtcccaactctctttgttctctcattttgtccacntgccgttccctaacgcctg

SEQ ID NO: 7052 - DNA, 503 bp, Gossypium hirsutum
  Clone ID: LIB3828-013-Q1-N6-H7
aaataaatccaatagtccacattttgtattgtatatgatctttaaaagataatgtgtgcaacaaaacgtgaacaaagtgattcattaatttttctttataagagaatataataatttcatataacgactttgcgattcaatgcttccagtgaaatatctatggcaaaaattgaacccacatcgattggcggcaaggcaccccattgtagtttacgaagagcatgtaataaccaggtggcgcaatgttgccattcatgggagcttgaagaataatgttgtttgtatttgaggtaacatttttgttaaattccacaattcccaattgaatcaatctctgattcatggagatcccatgggtcacaaacggaggtgagtaaatcgtcacttgaagcttttgttggtcaatttcgccatttccacggatttgtactgtgaattttttgccgtacttcacttggctattggacttgtcaacaatgatatcttgtcggaacatggccaag

SEQ ID NO: 7053 - DNA, 570 bp, Gossypium hirsutum
  Clone ID: LIB3828-013-Q1-N6-H8
caagtcccaggcaacaacaatttgtattatacgataacaaagcaacgagtccacattgagaaccacaaaaaaacacactaaaatacgcgggtctaacacgacagttccgatgaaaacattaccttcaatcaaacatatccacatcatgtcgacacattttgtaacaagcaccaaactaaaagactaccgtcaacttgagatcaccaagttcaaaggccgccaggaccattcatgttcttctgctttgctgctgctgccgcttctaattcatgtctagatgggaacttgcactgcagagatgttattgttgatctcaacaaactatctccgactatcaatctcagctttttgacaaaatcatcacgacttatcttctttgccctgaatagttcataatgattagtaacttgatccatatctgaacgagggattttgtttgagatagcagcaaacaacattgggaaaggcatccaaggagatttaggggtctttgaagtgtttgaacccaggctaggatcattttcgtgggatccacctgattctgaggtttggtgattaatactccccaat

SEQ ID NO: 7054 - DNA, 467 bp, Gossypium hirsutum
  Clone ID: LIB3828-013-Q1-N6-H9
aaaaaagggggaaaatttttttaccaaaaaaaaaaaccaaaaaatttcaaaaagggtttaaaaaaaaaaaaggaattaaaaaaagggggggcaaaaaaatttgggggaaaacccataaaaaaaaccctgaagggggggggtaaaggggaaaaaaaaccaaaggggggggaaaaaaaaaaattaaaaaggggtttttaaaaagccggccaaaaaaggggaaccccgtttaagggccgcccgggggggcgggggggaaaaaaaaaagccaaaaagctttggggggggagtaaaaagggggtaaattttaggccaaaaagggggggccggaaatttaaattttgggggggcataaaaaggtccccggccccatttaaataaagggggggaaaggggccccccttcattttaaaaggggggaaatgggccatttcctttcccaaaaaaaaaaattttttaccccccagggg

SEQ ID NO: 7055 - DNA, 651 bp, Gossypium hirsutum
  unsure (1)..(651): unsure at all n locations; Clone ID: LIB3828-014-Q1-K6-A1
atgccatcaagatccagaacaattgctcagaagaagaattgcaaccggtccaggcagcgatccatttgaggctttagttgtctctcatcaggataggctgctatccaatactaaacttcttcattcaacataccacatttatcccacgaactagagctcctccaattggtgctcaatgctcgaatagaaattttgcttacagaatgactgaagaactacataatccatgggttaagagattgttgattggttttgctcggacatccgagtataatgggcctagaatgccagacggtcctcattgcttgattcaagaaattgattctcaattaccggttgcgctacctgccctccaacttacatataagatatttggttcttgtccccccatgcaaagttttgaccatgcaaagttgctaacagattctggcaaacttcagacgcttgatatattactgaaacgtctccgggcagaaaaccaccgcgttctattgtttgcacaaatgacaaaaatgctgaatattttggaggactacatgaactatagaaaatataggtacctgaggcttgacgggtcttccacaattatggatcgacgagacatggtcagagactttcagctgcggaatgacattnnttgtgttcttgctg

SEQ ID NO: 7056 - DNA, 642 bp, Gossypium hirsutum
  Clone ID: LIB3828-014-Q1-K6-A2
gttgtagccaactccttgttccgtccacccaaacccatcctcccccataaacaccaccctcttcaacccatctccagtcactccctacccaaatccccactcaattccaccttccttaaaccccatttttcccactcagattcttgcagattccgattgattgccgcagcttcccttggggaaaccgatgcctcctcagacgagccccttcctttggtcggtgaagactctgccgccttcgatttggggacccaaaacattgtttcttgggtttattttactattattttgggtgttgttctttttgttcttgatgttatctggattgataattctactggttttggaaaagcttttattgatgctgtttcgaccctctccgacagccatgagattgtaatgttggccctcattctcatatttgccactgtccatagtggcttggctagctttcgggacatgggcgagaagatcttgggaaaacgtgcataccgtgttctatttgctggcgtatcccttccgttggctgttagcacagttgtgagttcgaaatttattacactggatgatggcactctcatctagagttgattttgtgggacatgatgtcttgtggctttagtttgaaattcatggcctctc

SEQ ID NO: 7057 - DNA, 622 bp, Gossypium hirsutum
  unsure (1)..(622): unsure at all n locations; Clone ID: LIB3828-014-Q1-K6-A3
gctttctattccaaaaataatcgacagcttcgaccgttgaaatccacaaatctgaaatagaaaagggtatttgtagttcttgcgattcgactcacgtagcaactgccaagctgattctccatgatgggcggttacaagagtttccttaccccgtcaaggcttcttacgttttgcagaagaatcccatgtgtttcatctgcaacgccgatgagatggacttcgatgacttcgtatccgccatcgaggaagacgaggagcttcaacccggtcaactttacttcgctttgcccttgagttggctcaaccatcctttacaagctgaggaaatggctgcattggccgtcaaagccagctccgctttgatgaaaaccaccgcctctgaaaaatgcaggcgcgggagtaaggcggttacccctttcgcgttttctgaagggtctcctcgccggaaggtttcacccgccgccggtgctggtggtgggaacggcggggagaagagagggagagtagggagaggggaagttcaaggctgtgtttgagttctatccctgaatagagatgaggggtggtataaatgtaaatatgtaaaaatgggagggactngttagtgaaatcattggtagaa

SEQ ID NO: 7058 - DNA, 282 bp, Gossypium hirsutum
  Clone ID: LIB3828-014-Q1-K6-A4
aaagattctatctagctacgcgtgagttgtttgcaactataatgctattcccatagctagcaacatcattcctgagcagcatatttcaatggtgtttgtggttagtctatttggtttgctttgaaatgaataaaaacatagataaaagtataagctgtgatgatgccaatttaggtaggattcatgtatctagagataggtaggacacatttcaggtattgcttaatttaacttgcagctataaagtcacctgttcttgttagttatttatttatttttatc

SEQ ID NO: 7059 - DNA, 533 bp, Gossypium hirsutum
  Clone ID: LIB3828-014-Q1-K6-A5
ttttgtgtcggaaaaagataaagaattgaagagggtttcctttgttatcttgtgtgtggtggcactagcggtggtggtgttttcgggtgaaacatgcatggtggaggcagtgacatgtaaccccatcgagctcagtccatgcttagcggcaatcatggtgccgtcgcagcctccttcagccgcttgttgcagtaagttgaaggaacagcaaccatgcttttgtggttacattaaggacccaactcttaaacagtatatgaacaatcccaacattccaaaggtagctagctcgtgtggagttgcatatcctcctaagtgttaaaatgttgcttcattagagcatttccttcttcaaggactaatatgaataaatgaataattaaatgaaacataagtttatctattattaaactcatagtccaaataattttcttaattttaatatatatacatgcataatgattcaaaattcaaataaaggagagagataatgttgaaatctatgttatttaatttttttttgaagtatttgt

SEQ ID NO: 7060 - DNA, 621 bp, Gossypium hirsutum
  unsure (1)..(621): unsure at all n locations; Clone ID: LIB3828-014-Q1-K6-A6
ggnaaattcagatgtatacgatatcagtcaaagcggcggatctaatggtggagaatccgggtcagttcgtgtgcgattccggcggtttaaaagtgggttttcgggttcatgggctgacggcagatgaagagttggaacggcggcgactttatttccttcttcccatggaattgctttactcggtgctgacggaagaggaaatgagttgcctcagttgtaaggcagataaggcgttgaaacatgcgagctttaatattgggaagattttacctgtttttaatgagttttgcattttcccgtttgaagctaagtccccgccgcaaaacgccgtgaacgacggtgcgaaagattccgtcgtggtgaggttttcgaagcagagatcgtggaaaccggcgttggagaccattgttgaaagttgaaaccccttgtaggcaatgttagaccaactaattttgtacatccatacatccaacggtggagtttttttttctttttcgaattaataagttaatatgtgtctttattttgatatttgaaaatataaaaaataaatacgattttaatctattttactcatagtgtatcaaataacaatgtctatatacatttatctttgtaatc

SEQ ID NO: 7061 - DNA, 662 bp, Gossypium hirsutum
  Clone ID: LIB3828-014-Q1-K6-B1
caccctgcagtcttcgtagcagccgctgtttgtttaagtgtgttgtagccaaaaacccaaaagccagacaccgaataaaaccctaaaagaacaccattttcactgtaaaaatgagcattaaagccatggatttttctctcagaatcaacccatccatttgctttacacaaaacctaccaaaaccttcctccaagcttaggtttctcactgttagatgctctctccctctcacctctgacgatgccgccactgggttggcggagaggccatggaaggttgcggatgctaggctggttcttgaagatggttctatttggaaggctaaatcttttggtgcctctggaacccaagttggtgaagtggttttcaacacttctttaacagggtatcaggaaattctaacagatcctagttacgctggtcagtttgtcctgatgaccaatccacatattggcaataccggagtaaattctgatgatgaagaatcgaggcagtgctttcttgccggtctggtgatcagaagtctaagtatcagtacttcgaattggagatgtgtggagacccttggtgattatttagcagaaagaaatttatgggaatttacgatgttgacacgcgcgcaataacccgcagattgaggcaagatggaagtcttattgggg

SEQ ID NO: 7062 - DNA, 617 bp, Gossypium hirsutum
  unsure (1)..(617): unsure at all n locations; Clone ID: LIB3828-014-Q1-K6-B3
gcgttcgccccgcgtccggtttacaaatacgtcgaaggagcttccactcaatgggatgatattcaaagaaagcttgggaatttacccccaaagccaccagctttcaagcctgacccttttgaacccgcacctgacccggattccgtccctaaggacaagtcttggatcgatgaaaagactgaagaagagcttgaagaaatcgaagatgatgtcgatgatgatagattccttgaagaatacagaaagaagaggctggctgagatgaggaaagctgttaagatttcaaagtatggatcggttatgccaatttccggatccgattttgtacgggaggtttcgcaagctcctcaggatgtctgggttgttgtcattctctacaaagaaggatttccagagtgtgggctgctcttgcagtgtttggaagaattggcagttaaataccctgcaacaaagtttgtcaagataatatctacagattgcattcctaactacccagatcgtaatcttcccacactcttggtgtttaacaacggagcggtgaaagcaaattatgtaggcttgctttgttttggccgctgatgcacgcctgaaggtgtggccttngttctttgtcaatc

SEQ ID NO: 7063 - DNA, 635 bp, Gossypium hirsutum
  Clone ID: LIB3828-014-Q1-K6-B4
aacagttggagtgtatgataggttctcaaatggatcaagcaacattagacaacctgctcatcccatctccatatggaacaagttatttatatgatgtgaaccttgttcttagatttctgaaagcatttctatgtgaaggaggctggcgattatcaccaacacgaatgaggaaggttgctagcttgatggatctgtatattgcagaagtagctccggatccttttttaagattgtcgaagtttctagcgttggtggtggccttgccggattctgccagggactgttgggatgaattataccacgcaatcgacgtttatctggaggtgcatgcagggttgtctgaagaagaaaaagtgaaggtctgttgcgcactgaactacgagaagctctcttcggatgcttgcgtacacctttcccagaatgcgaaatttccatcaaaaagctcggtacaagctctcgtttcccagcaattgaagcttaagaacttactgcagggcactaagaacagtaaacccgacatggattccccttgtaaactcaatgaaacccgaggcaaggcaaagaaaggtgaaggcagtgaacaaattgttctttattcagggagattagacatatcgggcgacaacgagaacctc

SEQ ID NO: 7064 - DNA, 635 bp, Gossypium hirsutum
  Clone ID: LIB3828-014-Q1-K6-B5
ctttcacaaatttcaccctatatttttctctctctccaacgcccccaaaaaaatcaacagcataagaaagaccagtgttttagactcttttttaaatgtacatttgattttcgtttacccgttggtttttgtttcaaaggtcgaagaaagctatgagatttttgtagctttttgttcttgaagagtggcggcagggagagagggaggattttggacggcttagatggatcgagaaggaggatcccacggcggatcttgttattactccgttcttggaattcgtaaggatgcctctttctctgatattcgcactgcttatcgaaagctcgctatgaaatggcatccagacagatacgccagaaacccatggatcgccggagaagccaaacgtcggtttcagcaaatccaggaagcttattccgtcctctccgacgagagcaagcgatcaatgtatgacgccggcttttacgatcccttggaagaagaagaccaagacttctgtgattttatgcaagagatgatgtccatgatgaataatgtgaaagacgagggtgatagttttgaggatttgcaaaggatgtttgcagaaatggttgatggcatcagcttcgacataaacaccgatccaacggtga

SEQ ID NO: 7065 - DNA, 636 bp, Gossypium hirsutum
  unsure (1)..(636): unsure at all n locations; Clone ID: LIB3828-014-Q1-K6-B6
ttcagcttcttacctcccattccaggttgggtatttttccccctataaacccttttcttaatgaatatttttcatttgatctctgcaaatgttagttcatttggtgctacggttctttatttatcttcaatttgtatttgttcatctgggtattaagcaagttatgttaatttcactcagtcattggttttggtttcataggaagttggcttacggtcaattgtatttttttaggtaacgatggaattggattttttgtaggcattttatattagtgtttaggaatttatgttatttttagatttataggaagtgaagtaatggttaattcaagttattttaggttaattatattttttgggaatttctcttcaagttcttatgataaagtgagaaagtatatgtaagctggatttaccatgtcaaacagttttctttttctttttgtgtgtgtgtatgtgtatgtattctctttagctttgaaggatggacctaataattgtacaaagggacaatcaaaactctattactgctgattttttgttagattagagtgaattagatattaaagacgggtttgtaaaagacgagtttgctaactgaggataataatnctttcaaccttctattactctg

SEQ ID NO: 7066 - DNA, 657 bp, Gossypium hirsutum
  unsure (1)..(657): unsure at all n locations; Clone ID: LIB3828-014-Q1-K6-C1
ggnaaactgatattgttgcactgaagaatacatggatgctcagtactatggtgagattggtatcggaactccaccgcaaaagttcactgtgatatttgacacaggaagctcaaatctgtgggtaccatcaactaagtgctatttctcggttgcatgtttcttccattccaagtacaagtcaagtgagtcaagtacttataagaagaatgggaaatctgcttctattcaatatggtactggagctatttctggtttctttagtaatgacagtgttaaagtcggcaacttggttgcgaaagatcaggaatttatagaggctactaaggagccaggtgttacatttattgcggccaaatttgatgggatattaggacttgggtttaaggagatttcagttggggatgctgtcccagtgtggtacaacatggtcgaacaaggtcttatcaaagaccaggtattttcattttggcttaatcgcaatgtaggagaagaaatgggtggtgaaattgtgtttggtgggattgatccaaaccactacaagggcaagcacacatacgttcctataacacanaaaggctattggcagtttgacatgggtgatgttcttattggtgacaaaccaactggatattgtgctggtggttgtgcagcaattgc

SEQ ID NO: 7067 - DNA, 189 bp, Gossypium hirsutum
  unsure (1)..(189): unsure at all n locations; Clone ID: LIB3828-014-Q1-K6-C2
catctggctgtacaagcttcgtgcaatgggagtatgagtgcctatagnaaactcaagatttagagctcataccatacactttctagagggatcatggnatgaggcaaacacagcgctcggaaagaaagcctgctctactcggtcaacctgtcagttctctgttttttcgggggcggaaatagtcgcccg

SEQ ID NO: 7068 - DNA, 391 bp, Gossypium hirsutum
  unsure (1)..(391): unsure at all n locations; Clone ID: LIB3828-014-Q1-K6-C4
cccagcgtccggcgngagaagctaanacccttccccanaacactaccaacgacgacaagctcattctctatggactctacaagcaagctactgttggaccagtgaacaccagccgtcctggaatgttcaacatgaaggaaaagtacaagtgggatgcatggaaggctgttgaagggaaatcgaaggaggaagcaatgaacgattatatcactaatgtaaaacagctgcaagaggctgctgctgcatcttcttgacgtgtgtgtgagaatagaaaatggtgtaattttcaagccctttgatacctatgggtttgaaaaggtctaaaactatgaataagcaatgtactatgttttattgctattaagttatattaatgaattatggtttattt

SEQ ID NO: 7069 - DNA, 533 bp, Gossypium hirsutum
  unsure (1)..(533): unsure at all n locations; Clone ID: LIB3828-014-Q1-K6-C5
cacaaatcccacaaattccactaatcccacatatcccacaagtcccacatatcccacaagtcccaaaaatcccactaatgccaggacagtcgggatgtgagagtggagagtgttgccgtcagggttgtggtgggacttgtgctgagtgtggtcagcccaggtgcgcatcaggatgttgccaggctgaaactgtaaagagcaaagggatagaagaggttatggacagtgaacccagtccaccaaagtagagagatgataccatattaagatgaaataacgaggaagagttggttgtcgtcttattaattatacaaaataagaagtaatgatgttgcagaagggtttgctataaaatcctcttggacaaaaagagtaattatgaagaataaatagctcaaaacaatattcgatttgcaatatcctaaagttccttgaatcttgttttgtagccatatgtaattaatgcatgtacatgctaatatatatgattttctttgctaaaaaaaaaaaaaaaaaaaaaaaannanaaaana

SEQ ID NO: 7070 - DNA, 642 bp, Gossypium hirsutum
  Clone ID: LIB3828-014-Q1-K6-C6
gggctctgtcactagggtttcgaactttccttgatttttttccctgaaatcgctgctttcgaaggcaatatgagacccattttctgtggaaactttgagtatgatgcacggcagtctgatttggaacgactcttcagaaatttgggagaatcgaaagagtagatatgaagtctggattttcttgggatgtaatggaggagctcctcagaattctgtttcatgcctgtgacgagcttcctcttcttgctttcaagaagagtcactctaatccccaatggcatcgtcatccctcattttcctcgggcattttttcctttcattcctcatgactttttcccagcctcaaattcagacatgtttcaaggtagaaacattactgacctcatggcagaggctgcagaaaatatggagaaagcacactaattccttgacccacgtgagacatccaattttggattcttgttccttgacatcacttagttcatcacacaaggatttgctttcatatatatggaagatgagagagatgctgaagatgccatccgagcacttgatcgaacagaatttggtcagaaaggacgtaggcttcgtgttgaatggacaaagcatgagcgtggcattagaaggcccgatggtgggggc

SEQ ID NO: 7071 - DNA, 658 bp, Gossypium hirsutum
  unsure (1)..(658): unsure at all n locations; Clone ID: LIB3828-014-Q1-K6-D1
ggagaagcttggaagagccacggnggcaattgaattaggggcaaaatggggaagaacatcatccaccaaggaagacgccggcgccctcttccattctcttcgatctgcttacgctgctacccttgtcaatctcaagatcattgatttatatgttggttttgcaatcttcaccgctctgatccaggtagtttacatggcaatggtgggatcatttcctttcaattcatttctttctggagtgctttcttgtgttggaacagcagtccttgccgtttgtcttcgtattcaagtgaataaagaaaacaaggaattcaagatcattgatttatatgttggttttgcaatcttcaccgctctgatccaggtagtttacatggcaatggtgggatcatttcctttcaattcatttctttctggagtgctttcttgtgttggaacagcagtccttgccgtttgtcttcgtattcaagtgaataaagaaaacaaggaattcaaggatctaccacctgagcgagcttttgcagattttgttctttgcaatttggtgctccatttagtgatcatgaatttccttggctaaatcgcgcctccaggtttgctgtggactgttggctgtgattcatatttaaagcatgaaatgaaattcttaggtcattac

SEQ ID NO: 7072 - DNA, 380 bp, Gossypium hirsutum
  Clone ID: LIB3828-014-Q1-K6-D2
gcaaataataacaatcaccggcggatccccattcgccagcaattaaacgcaggtctcattcatttccggtgcgtttaataatccctttatacgccatggacatgaagaaggtctccaccgccatcattgttgctgctgcctcaatgagcgccgtcatggctgccggtgcacctgctccttccccttccgccggtggttctagtcctagctcctctcctgcttccgccccagcatcaggaccagattccagcgtggctgccgcaaccttgcctgttcttggatcattggttggggcttccattgttactttgttttcttgcatgctgcagtaagctacatgtatgaaaaattaacatgtgaacgaatattgaatagtatta

SEQ ID NO: 7073 - DNA, 502 bp, Gossypium hirsutum
  unsure (1)..(502): unsure at all n locations; Clone ID: LIB3828-014-Q1-K6-D4
ctccgtcgatctgaggatgagaagtaaaagctcggntctgaaagcctaatgggaaaagctccagctcaaaagatgatgatgtcaagatgatcgatggagaggggtcatccaatgcaagtggagaatcaactgtgacaacatctcaagaaggggttccctctgacaaggaaacacgtttaaccgggatttatgatttggttgccgtgctgacccacaagggtcgaagtgccgattcagggcattatgttgcgtgggttaagcaagaaagcgggaaatggatcgagtttgacgatgataaccctatcccgcagcgagaggaagacattgttaaactttccggaggaggtgattggcacatggcatacatctgcatgtacaaggcacgcactgtttcaatgtaatctttgtttttattatgaactgtactttcggtttttttttccctttttttttatttgcttcgaacatgagaaattgtgaaatggccaaatagatatttact

SEQ ID NO: 7074 - DNA, 417 bp, Gossypium hirsutum
  Clone ID: LIB3828-014-Q1-K6-D5
gtcgcctagctagcaaactttttatttaaagaaacatgaagaggttttcccttattgttttgtgcgtggtgactctagtggtggtgttgttttcggatgcagaggcagcgccagcgccgaaatgtgataaccccttggagtatagctcatgcttgaacgcgtataagaagccacctccatcagctggttgttgccagaagatgaaggaacaagcaccatgctattgcgagtacatgaagatagaagatgtcaaacgtgtttttgacagagttgagattgcgaaaatggctaaattgtgtggagtttcatattcttccacctgctagaatcccgtttggtttcatttgactatctctggctgggataacttggcatttcaataaatgaatttttatttgaaaactattttttttactc

SEQ ID NO: 7075 - DNA, 519 bp, Gossypium hirsutum
  unsure (1)..(519): unsure at all n locations; Clone ID: LIB3828-014-Q1-K6-D6
gnatttatgggtcatgatatgtgatcccagttgactctccattacacttcccataatttatgaaagaggtctgtttggcatatatcatgattggtgtgaatcatttagcacctatccaagatcttacgatcttctccatgccgaccatatattctccagggttataaaagaggtgcaatttcgtggctgtggttgccgaggtggatcgtattttaagaccgggaggaaagcttattgctcgggatgatgtcgaaaccattaccaagctggagaatatggtacggtccatgcattgggaagtccggttgagttactctaaggacaaggaaggcttgctgtgtgtccagaaatccatgtggcgacctacagaggtggagacgctcacatatgccattgcttatgcatgctatctcctatcatcacattctcatttttgccacattttgcaatttttggggattagttctctatgttatagcctttgtaggcttgtttcatgtaggcctttagaggattatg

SEQ ID NO: 7076 - DNA, 590 bp, Gossypium hirsutum
  Clone ID: LIB3828-014-Q1-K6-E1
gcgaatttgcggtttgttagttcgtgtgtgaaacagtaatacaaggcaaaaaaacgatgaggtgttttcacatttgtgtgcacgagcaaaggcggtgagtggtctgccaagcagttggcagggagagattgaaagctctgctgcttccacttacgagctccagcggaaactcgtccaggctgccaccgcctgcgactcctctggtggtgtcacctactctttctctgtcgttacccctaattctgccgttttccacgtggttattggaggtgctgtaggcggagccttcatcgggggtggaggtgctgctgctgctcctgctggaggcgctgtcgctgccgttgaagctcctgcagctgaggtagcaaaaaggaagagaaagatgagagtgatgacgatatgggattctctctctttgattaagctcctttactgccttactgcctgtttagatcttagcaagttgctacattttcatttttcatttatgcgtgaattagactattttgggtgacattgggcactttttctagttaggagaagccatttttcaggataaatttgacaatattatgagtatgttttttggc

SEQ ID NO: 7077 - DNA, 429 bp, Gossypium hirsutum
  Clone ID: LIB3828-014-Q1-K6-E2
atttcttggaagaaaataggaatggagaagagttcatggtgttgtggatttgtgcaatggtgataagctcaatggttatggaagagggtgacaaatgacgacacacaattacgctacaccaggtactgaggaaaaaaccgtcaagttccatgcaaaattggaggcggtaattgcctcccaccaccatccaacgattatgacagaggatgttcaccccaaaaaagatgctcaaagtcatcatacaatgcccatctttcattgaccacaactagaaaatgcacttcattaacttctctctctttttttttttttgctatcaaattatatgtcaaaaaagaacaattaatcattccatatgcttattcattccttattattgtaacccatgttttccacaaatatatactacaacaatgttttaagaattct

SEQ ID NO: 7078 - DNA, 456 bp, Gossypium hirsutum
  Clone ID: LIB3828-014-Q1-K6-E6
tcttggatcttcatcttgtttgtcctgcaacaaggaacaacagaagaataaaactctcatcaatcaaggacaaaaactcgaagtaaacacaattgagagaagatgtcgtggcaagcgtatgtcgttgatcacttgatgtgtgatatcgagggcaaccatctctctgccgccgctatcattggccaagaccgcagcgtttgggcccagagctgcaatttccctcaattcatgccacaagaaatcactggcatcatgaatgactttgctgaacctggatcgcttgctccgactggattgtaccttggtggcacaaaatacatggtgatccaaggtgaacccggatctgttattcaagggaaaaagggccccgaatgtgtcactgtaaaaaagaccaacctgcccttgatcattgttatctatgacgagccaatgactcctaaccactgtctcattttt

SEQ ID NO: 7079 - DNA, 654 bp, Gossypium hirsutum
  unsure (1)..(654): unsure at all n locations; Clone ID: LIB3828-014-Q1-K6-F1
ngagtttatcaccccaatccggaggaggtggtccggcattacaatgaccactttgtcaataccatgcttgagttaataacaccagaagggtgttgaaaggaaagaaaacggtccctgtgagattactaaccccgttgatagttgttggcgatgtgatcctaactgggtaaagaacaggaagaggttggccgactgtgcccctggatttgctcgtggtacgaccggtggaaaggacggcaagttttacgtggtcactgaccctagtgatgatatttctaaccccaagcctggaactttgcgtcatgcagtcactcaactcaggccactttggatcactttcaaaaaatccatgatcatcaagctgaaacaggagctcatcgttacaagcgacaagaccattgatgcaaggggagctaatgtgcatatttgctatggtgctggtattactgtccagtttgctaggaatgtcattatccatggcctccatatccatcacattaaacccgctactggtggcatcattagggatgctgaaaaccacattgggttaaggactgccagcgatggagatgcgatctctctgtttggagcaaccaacatttggcttgaccatctttccctttatgattcctctgatggtcttatcgatgttat

SEQ ID NO: 7080 - DNA, 441 bp, Gossypium hirsutum
  Clone ID: LIB3828-014-Q1-K6-F2
gcaaataataacaatcaccggcggatccccattcgccagcaattaaacgcaggtctcattcatttccggtgcgtttaataatccctttatacgccatggacatgaagaaggtctccaccgccatcattgttgctgctgcctcaatgagcgccgtcatggctgccggtgcacctgctccttccccttccgccggtggttctagtcctagctcctctcctgcttccgccccagcatcaggaccagattccagcgtggctgccgcaaccttgcctgttcttggatcattggttggggcttccattgtttctttgttttcttgcatgctgcagtaagctacatgtatgaaaaattaacatgtgaacgaatattttattttattttttattttttattttgtaagaaacatgtgatgaatattaaaaaattgaaatggagctttgg

SEQ ID NO: 7081 - DNA, 608 bp, Gossypium hirsutum
  Clone ID: LIB3828-014-Q1-K6-F3
gtttttactctcaccttctcccactcctcgtaaaaccctagttctcagacgccactaaaaccttagtcctctcactcgtctttcatcatcctcatcaatggagttctggggtaacccattctttcttttacttatctctcttcgattttatgtttatgtttcttttactttttgaagctttgattttttttttaaaaaattctaatgaaatgatgctagctttcccttgggttttatttgaacttctctctttcaatgggaagcttgtttttgtggccgtgtttgattgggttttgggtttactgttgtcaacgctaatagcatcagttgctggtttcattatttgagatttatcagtatgatttgacacatggtaattattttgtcattggatggtagcttgttgaaaatgattatatgcaaattatatttttcaggattatacttgagacatggacatattgtttttatttcaaattgggttaatcaaattggatcatcttttatgctactattaggtattgaagttaaagctggacagcctattaaaacggaccctggtgccagtcatgtcatccatctttcccaggcaacacttggtgagtcaa

SEQ ID NO: 7082 - DNA, 491 bp, Gossypium hirsutum
  Clone ID: LIB3828-014-Q1-K6-F4
actggacccggtgttggcattcacgaagacatgttgtcccaaaagttccgaaattggtactcttggttttggttttgaaggtggtcctgaaaaatgttgttcttctggatgttccggtaattgtaatcctggtggtttcgttctaccatttcctcaaattccataaatcccaagaattccacagatcccacagatcccacaaatcccacaaattccactaatcccacagatcccacaagttccacaaatcccactaatgccaagacagtcggcatgtgagagtggggagtgttgccatcacggttgcggtgggacttgtgctgagtgtggtcagcccaggtgcgcatcaggatgttgccaggctgaaactgtaaagagcaaagggatagaacaggttatggacagtgaacccagtccaccaaagtagggagatgataccatattaagatgaaataatgacgaagagtcggttgtcgtcgtattaattatac

SEQ ID NO: 7083 - DNA, 186 bp, Gossypium hirsutum
  unsure (1)..(186): unsure at all n locations; Clone ID: LIB3828-014-Q1-K6-F5
tncgccaaaatcatatatgcacttcaattatacatgtaactcttgttttagaatgtcacatatgtgaggcacatggctgcgtttttgaatctaaaaaaaaaaaaaaaaaaaaaaaaaaaaaaaaaaaaaaaaaaaaaaaaaaagagaaaaacaaaacaaaaagaaccaaagctaaaaaacgcaaga

SEQ ID NO: 7084 - DNA, 549 bp, Gossypium hirsutum
  unsure (1)..(549): unsure at all n locations; Clone ID: LIB3828-014-Q1-K6-F6
ggcttatcggctgtacagattttgttaaacgttggtggtttcctcataactctgttggcaataattgttttcacggtttacgccgaaacgtcagctaagaaattgcagagagaagaagaattggtatagcagtaaggtatggtattggtttacagataaatttgtccatgagaaacatgtttatagggatggatgaagttttatatttgctaaataacttcatccgtatgtgacacaaggggggaaccaaagacaaatctaacatcatgngagaaagatcattttctttcttacatcacacgcttaattgagagaccaaggcaaatactgtttgacatttatgtatataattctatgtcattttgttgttgactttatgactgtttatattatgcaaaatgtttctgttaatggttttcaactaanaaaaaaaaaaaaaaaaaaaaaaaaaaaaaaaaaaaaaaaaaaaaaaaaaaaaaaaaaaaaaaaaaaaaaaaaaaaaaaaaaaaaaaaanaaaaaaaaaaaaaannaaaaaaaannaaannaaa

SEQ ID NO: 7085 - DNA, 459 bp, Gossypium hirsutum
  Clone ID: LIB3828-014-Q1-K6-G1
ggggctcctccgggtagtggctcacaaaaggggggccaatgatcttggagcttccacttgataagattaggagacccctaatgcgcaccagatcaaatgatcctaacaaagtccaggaactcatggacagcattcgacaattggacttcaagtgcctatcgatgtgcttgaagttgatggagtttactatggtttctctggttgtcatcggtatgaagctcaccagcgccttggactcccaacaatccgttgcaaagttcgacgaggaaccaaagaaactctcaggcatcatcttcgttgaatggaagtatatgctcatacagtgcatttcacaactttgattatgcacttctcagctggttggaagttgtgtattctcaacctataatcaagtttgtatgttaatgttacaaacaacttcacagcaagaaataatcgatagtcatttatagcgtgtgt

SEQ ID NO: 7086 - DNA, 263 bp, Gossypium hirsutum
  Clone ID: LIB3828-014-Q1-K6-G2
attaagtcactactcagaagtaaaatatcaattagcctgttactttatcagaatgtgttatatttcctcaacaatgtctaatttgagtttatagaagcaataaacccatgtagtaaacagtggatgtagtaaacctattttagtctaatttcaaagggtttttgaatttccaatttagtctataaattttcaagtttattactgtacatattgaacttgtgcatttttttttgcaatcaattagttgcactatttgaacttgt

SEQ ID NO: 7087 - DNA, 642 bp, Gossypium hirsutum
  Clone ID: LIB3828-014-Q1-K6-G4
gctacatctactatcccgtgacggctatgcataaggcggttggtggtttcggtggcctccgtgttaacagccgtctactcatccctgttccctacgctgatccggctgatgactatactctcttagtgggagactttttcaacaagggacacaccagcctcaagaagattcttgatagcggtcgcaaccttgggagatgtgacggtgtccaccttaatgggaaagttgcgaaaggtgatgggaaggatgaacctctgtttacgatggaggcaggcaaaacgtacaagtacaggatttgcaatacgggtatcaagacatctctgaacgtcaggttccaaggccacaccatgaaattggttgagatggagggttcccacacaatgcagaatgactatgactcccttgatgtgcacgttggacagtgcttcagtgtgcttgttactgccaaccaggaaccaagggattactatgtggtggcctctacccgttttaccaaacgtgaggttacagcaactggcatcatccgttacaaaaatggcaagggagctgcctcatccgagttgccaccaccacctgttggttgggcttggtcactcaatcaattccgtaccttccgttggaacctgacttctaacgctgcta

SEQ ID NO: 7088 - DNA, 76 bp, Gossypium hirsutum
  Clone ID: LIB3828-014-Q1-K6-G5
aaaaaaaaaaaaaaaaaaaaaaaaaaaaaaaaaaaaaaaaaaaaaaaaaaaaaaaaaaaaaaaaaaaaaaaaaaaa

SEQ ID NO: 7089 - DNA, 349 bp, Gossypium hirsutum
  Clone ID: LIB3828-014-Q1-K6-G6
gcttttagcttcctttgaacatctcctttttggtttttcgtaaagtgaaagctgttaggcattttcaagaaagattaatgaatcctccaaaggatctgcgtagcccagctttactcactttatcaaacaagcccaagcttaccaatcaaatcatcaaccatttcctttcttcaaatcccaacattgctttctcaatggggttcggatcctcagcttgctttgcttatgctcccacagagaatcgtttccccagtcatcaaatgttgttttgtggagtggttgaaatatactgtatattcttgggggatttgaataatttgagcagtctgctataagcatgatgggctgt

SEQ ID NO: 7090 - DNA, 658 bp, Gossypium hirsutum
  unsure (1)..(658): unsure at all n locations; Clone ID: LIB3828-014-Q1-K6-H1
cttattttaaaaataaaaaagnaaaaaaaagtaaatggnaagggaaaaagaatcgagagcagtgaagtttatgttgcagcaatgtgtgtaagtattctcctctttgctccggttggtgtgtcccaaccaataccagcggataaatctcaagtaaatgcttggtttaatggcattatcaagcccgtgaaagaaaggggtaacaccttagaccctgaattggttgaggccgagacagaacctagaattataaaggtgatgcaaggtgggggtggagaattcgataccataaccaaagccatcgagagcgttccatcagggaacaccaaacgtgtgattatatccatcggacccggatcttacaaagagaaaatcagaattgaaagaaataagccttttattacatttttaggagatcctaaaaacatgccaaatttgacatttgatggaaccgccaagcagtatggaaccgtagatagtgccactcttattactgagtgtagttactttgtgggtgctaatctcaatatagtgaacactgctcctaagccagacgggaaaatggtaggagcccaagcggttgctttgagagtctctggtgataggtcagctttctataactgtaaaatcatcggcttccaagacactntgtgcgatgaca

SEQ ID NO: 7091 - DNA, 595 bp, Gossypium hirsutum
  unsure (1)..(595): unsure at all n locations; Clone ID: LIB3828-014-Q1-K6-H2
tgaacttctcatttgtttctagtctacaatggaatttgaccaagcctgttcatgaaattgctcttccgtgctttgcttgaccgtttctgtaaaagtctcttggtttgtaataacaaaccaacagctccttgtgattaataagccatgtgtggcttgcaatggtctgcagcatccatggtcttccggtttcagaacataagccttggcagagctttgttgttatttgtcggtggcgctttgtgcattcttggttccaagttttgcgatgcttacatcgattgttcaccccgtctaacctaatcgctcccttagctttttggtcgttggagattggggctgttttggattttccaatccttctgacgttgctttttctttgggaaggattggcgagaaactntttctttttttcgtcttctcacccggtgatggtttctttgatcatggtttntcaggtcgttttgttccagcttttagagactctttctctttctgttttctgccttggcttgcgctttccctggttcagtgttttgggttaacctggttcttgttgctttgtttgggctcttcttttccctgtttttcgaatcgt

SEQ ID NO: 7092 - DNA, 268 bp, Gossypium hirsutum
  Clone ID: LIB3828-014-Q1-K6-H3
accggtctgcattgcacttattccatcatatcataagttatcttgtgattacttttttatctgattgataagcagcgccatggtatacaggttcaaaccgtaaccccgaatcccgctttggcattattgagggaggaatttcagccattagacaccggagtagccaattaggatgggactcagcaacttttctcttctaaccccttatgtccaaacccttggagggccaaacgtctgggctgattttattaatttttgaggatctata

SEQ ID NO: 7093 - DNA, 599 bp, Gossypium hirsutum
  unsure (1)..(599): unsure at all n locations; Clone ID: LIB3828-014-Q1-K6-H5
gtcaattcttngaagctactcgagggtgatggagagtttggctttcaacattatggcaaggatagatgatgttctttatgttgatgatgctataaagcaacgtgctgcggcagaaacagtttctcttttcagcaggagcggtttcagtggtcgtccaatccaaaggcgattgtctcctagtcccttctcaattcaacagactccttatgcctctcctttcgcaacacccaccttttgttctccaaccccactcaccggaagtccacgacgagcagcttcctctttgaagagaaatgatattaaggaagaacctgaccggaaatttgaaaaaccgttcgcgagtgaatttgagaaggtgtggtcgtatacagatagcctgagcgcgagaagggtttcagaaaatgctccggagagagactgaaatcaaagattcatgatcccatgtaagataaagttctataaatggaagtaactcagtttagttgggtgtctgactggttaagaaatattggtatatctagtatttgtatatttctttgcattaggaagattagtcctatttttcgagtggagtcgaagctagtatcgatcggtttgac

SEQ ID NO: 7094 - DNA, 625 bp, Gossypium hirsutum
  Clone ID: LIB3828-014-Q1-K6-H6
ctagttctcccctgacttgaactttttgtgggcaatcttccttttagtgtggatagtgctcagcttgctggcttgtttggaagtgctggaaatgttcagatggttgaggtgatttatgacaaggtaactgggagaagtaggggatttggttttgtaaccatgtctactactgaggaagtggaagctgctgctcaacagttcaatggctatgaacttgaagggagagcgttgagggtaaactctggaccacctcctcctcgtagggaagaattttctcctagggcgagaggtggttcaaccatgggtgcttcaaatcgtgtctatgttggtaacctttcgtggggcgttgatgatttagcactggagaccttgttcagtgagcaaggcaaggttgtggaagcaaaagttgtttatgacagggaaagtggtagatcaaggggtttcggctttgtaacttacaattctagtgaagaggtggatggtgctgtcaaaacatttaatggtgttgagttggatggcagaccaattcgagtctcagtggccgagtctaggccaaggcgtcaattttgagtgcaactggtatctaccggtactgctaaagttctttgggaatctacaaacatgc

SEQ ID NO: 7095 - DNA, 567 bp, Gossypium hirsutum
  Clone ID: LIB3828-014-Q1-N6-A10
gggcgaaaaacatgtataggcatatatatagatgatatgtataaatgtttcaagtagtatataccaactcttgcttgcttgaaacagcaagttggaaccaagtgttacaacaaatagagtccatgaccatgtattgcccatataagtgtatagttcttacattctgtcttaataaaaaccaagacaacagataactctaataaatagctgaggaagaagaaaaaccggaacccaaagtttagttcaagagagcgctgccctccttgacgagcacaaacacactcccagcatttccccttgaaatccgcagttcatcgtcaaggtatgttgtaagcaaccatgattcaacattgctgtttgataatgggatcttcaatggcggttggctggaaatggtctttgcaacaaatgaagctgtgtcttgcacaaaggtcagcaagcccttaataggagtgagatcaattttttgtcctaaaaattccacattttctggtaacactatggagtctgtcagctggggagttccaattatgccttcttgaaacttgatctgcacacgtttggggc

SEQ ID NO: 7096 - DNA, 574 bp, Gossypium hirsutum
  Clone ID: LIB3828-014-Q1-N6-A11
cactgaaacaatcaatatgatttttagttcatgcattatagcaagcaaagtttacaaccaacatgggttttaatggagaacaactctacaatttacctaatgttgatttccatagaattatattgaatggcttcccaaagagcatgtaaatcatcaaatggttccgggcagcggagtaaatataaatgcttttttatgacaaaacatcatgcgaccaaagtgaaatgcttatatcagatagaacagggtattcagacggattgtaaactattgagttgcaaaacttcctgtaggcattgaacagcagcctcgtagtttaagaatcccatgaaccaaaattcatgggcatcaacagaggtaacttggatgtacttttcagaagcattcactttgcttgttgatggatttattgcttttagttgatgtaatgggattattaccttataatagctccattcagtctgggtaccatttttatatgaaagaggactatcactgcaatatgcaagcttttctgtagatacatatagaactcccatgacaggacctgctgatgtagataagtaacatgcaa

SEQ ID NO: 7097 - DNA, 513 bp, Gossypium hirsutum
  Clone ID: LIB3828-014-Q1-N6-A12
caaaaaaaagtttttactcaaaagcagacaaatactaataataccaagaaacctcaacaactactgtcacagatttaatgcattaaaacagcaatcaaccaaatcaagcactgaaaggaacttctaatcaaacaaactgaatcccatatcgtcatcactctcttcctctggttcttccttcttcttttcctcagcaggaggtggagcagcggcaccaccaccaccaccagcagcaacaggtgcagctgcggcaactggagcaccagcaccaccagcaccaacattggttataagatcctcaatgttgcacttttcgaaaagctttgcaaacaagcttggccaataagattcaaccgagacatttgcagctttaacaattgttgcaattttctcagcggtgatgggaatgccatcatcatagagaattaaagcagcgtaagaacaagcagcttcgccagccgtagacatcgtttcaaactgagagaaaaatctgagaaataggcaaaatctgag

SEQ ID NO: 7098 - DNA, 518 bp, Gossypium hirsutum
  unsure (1)..(518): unsure at all n locations; Clone ID: LIB3828-014-Q1-N6-A7
agattaaaatctagatttgacatatggngaaaatgttcaaaaacataaaaaccaaacaaaatcacagctcgggttttcacaaataagtaaacacaaacggatttcaaaatagaatcttaaatatcttatcctacaccttaatggcatacttcctcatggggaagtacatttccttcttcttttcacgttctgtcttcagcgatgcctgatgcttggtaagccttctcctgatggctctggtcttctttggacggagatcaaggggcaagaaattcttcttcttatatgcctccctcagtgcagccttctgcttctgtgagatcactgtcaacacctgagcaattgacaacctcaccacctttatcttggaaagcttgttaggtgcaccaccggtaactttggcaacacgaagaagagcgagctcagctttgagatctttcaactgagccaaaagctcagtttttgatttctgtctcaactcatggaccttgattctcgccattgcttcttccgctgct

SEQ ID NO: 7099 - DNA, 586 bp, Gossypium hirsutum
  Clone ID: LIB3828-014-Q1-N6-A8
ataaatacattcggtatttagtttatctcatagccaaatcaatccaacattatatgcatcaataccaaactcaaacaaaagaaaataagccattttcgcatggctattaatttcatatataaattgacccaaaatcaacatttcgactatgctatacatgccatatattcaaaaacaacttaataaagaaccaaaagtaactgtcgatagtgtgataaggctttctgatgatccccgagctcataacgaattccaaaatctcggatatcgacggacacagtcgactactcgactactttcaacttcccccgatctaatttcgttttcttctgttcttgatcagttagatcctccatgtttacaggctttacatcgacaatattgaaagtttgattgctaatttccaagttccaaagatttatacgtagatcatcggctgatataaaagtttctccatcactgctcttttcaaagcctgccttagagaggtcaccctgctctagtgcatatctgtcggggcgtaggtgagaatcagatgccaatagcttattcggagcagtgtcaaagctgttaatcttatgcacaa

SEQ ID NO: 7100 - DNA, 94 bp, Gossypium hirsutum
  Clone ID: LIB3828-014-Q1-N6-A9
atactaaataattggcctattacttaatataaaataataataacagtaaacgggggaaaggaaatagaaacatttatttaacatgtactttttt

SEQ ID NO: 7101 - DNA, 549 bp, Gossypium hirsutum
  Clone ID: LIB3828-014-Q1-N6-B10
tttttttttttttttttttttttttttttttttttttttttttttttttttttttttttttttttttttttttttttttttttttttttttttttttttttttttttttttttttttttttttttttttttttttttttttttttttttaatttttttttttttttttttttttttttttttttttaaaaaaaaaaaaagaaatttttttttttaaaaaacggcaaatccgggacatatttttttgggaaaaaaaaagaaaaaaaagggaggggattgggggggggggaaaataaaggggggaaaaaaggggggggtttttattttttaaaaaaaaaaaaaaaaaaaaaaaaaaaagcgggggggcccagggaaaaaacagaggggaaaaaggggaaaaaaaaaaaagaaaaaaaagggggaaaaaaaaaagagagggaaaaaaaggaaaaaaggtggggcgggggaaaaaaagaacgggacaaaaaaccaaaaaaaaaaaagagggggggaaaaaaggaggggggggggggggggccctggggggaag

SEQ ID NO: 7102 - DNA, 577 bp, Gossypium hirsutum
  Clone ID: LIB3828-014-Q1-N6-B11
aaaaaatagaaatataaatattttattaaatagaaatataaatattttattttggcaaggcaagggaatattattttaagttgattcatttaaaagtatgatgaaatttactaaatttctcatacatttattctaatcaagtgctgcaaaaccatgtgaatcttgcacagtccaagagaatgtcctcttagtaatgaattacggtcacgttatattcaataataacagtggtgccatcgaaaaagtaattcttgagtcgtgcatacccttctgccatcctgaattctcctcttcctcccaccaccgaaagctcacgttccatctttattaacggattccttgaaaatatgctaatagagctgcccttaaactttccggcagtaaatccaaaatctaagtacatcaccacagtcgttgaatttttgccggacaagatcccaagtcccagagcattcccaatcacctctgagttgtccccaggacctatcttgaggggatcatcaatggcatatagggtgccaaatggcactgatgagtagttgtcgttgcttgtgttgttagcttgggctaccatgac

SEQ ID NO: 7103 - DNA, 560 bp, Gossypium hirsutum
  unsure (1)..(560): unsure at all n locations; Clone ID: LIB3828-014-Q1-N6-B12
cgagagagaggcaattttatttaagagaaagtagctacagcacggtagaggaccccaattacgttttaccactagactagactagactagaaagccatgaaatctccctcaatacaataatgacttttaatatgatggcctaataaaataacctgaagctaaacttagacttgaatttctacgtgccatctgtacatctcctccgatggcactggcaatgtaagtgtcaccaatccggtggctgagtcatagttgaagtgagtgtcggcattgtccacacaacacttcaacggatgctgagatgagtatgcaccaaacctcccacaaccccggactttgagactgatcgctgctgttggattccggttgttgctgagtgaagttgtcaactccgaggaaacctcgccatcaaagaactgcagtttctcattggatgtcatttgtacttcgaacttctccacggcaccgntgctgttgaacatgtcaagaaggccgattggtgcaaatgaaatggtgttggaaatttccttgacgggacagaagtggaatagttcatactc

SEQ ID NO: 7104 - DNA, 530 bp, Gossypium hirsutum
  Clone ID: LIB3828-014-Q1-N6-B7
cttggaggatcgaagaaggaaggggggggggcaatgcccagaaccattaaaagggaagaaaaagggaacaacgttcacaagccaagaaaagcgggaaaacaaaggacaacggccaacccccaaaaaaaaccaaaaaaaaaaaaagaaaaaaaaaaaaaacaaaaaaaagagcaaaaaaaaaagaaaaaaaaaaaaaaaaaaaaagacaatgaaaaaagcaacgagaaccgagccccgggcccccgaaacccggaaagggccaaaaaccaaggacaaaacaaaaaaaggcggatcccgggggggccaggaacaaaaaaaaaagggggatacccgggaaaagggctgaaaaacaccaaaaaggacaaaagggagtgggcgggcgacgagccaggaaaacaaaaaacaatctgggggaaaccaaaaaacaaaaacccggaagccaaaaggcgggagatgaaacatgaaacattccggaaaaaagaaaaacccaaaacccaaaacgaggggccccaagggaaaaccgaaacggg

SEQ ID NO: 7105 - DNA, 613 bp, Gossypium hirsutum
  Clone ID: LIB3828-014-Q1-N6-B8
gcttgcaaaacatagtttgatctaaatccccatacaaaacctcacatacaatgaaaggtctaccaaaaacaaataagtgaaagagaggaaagaaagcttaaaagtgaggacctaaatcacatcacaattatatatagattaaaacttacatgataacttcactctgcccgttttttgtggttaagaaaaactcggatcggtgaaaccttgacactaaactaggcttgccggattgcaatagatgtcgttcagctacatatgatcaaccttgtcgtcatccccgctgactgaatccccagcatgccgccaagaagaagttagattcctggcctttctgtccaactgaagattttcgagggcagctgaagctcgaatcacgtcttctgggaggtcatcatcatatctccaactatactcttctttcctgtaaccagacatggaggagcctgctctcctatcagacgactgcgaggcagggaccggccttcccaatggaggcaagcccccagcaacagtagatgatgagggtcttcttgtgttacgagactctgaactagacgaggactcaatttcttgtgatctccttccacttcctcttgcttgggttaagttc

SEQ ID NO: 7106 - DNA, 478 bp, Gossypium hirsutum
  unsure (1)..(478): unsure at all n locations; Clone ID: LIB3828-014-Q1-N6-B9
tttttnttttttttttttntttttttgttgggaatgaagcagtcagctgattagactatttaaatcagaaatccatatcacatttttaagttgactgaacagtgataagaatctatgtaaagtttgccacaagcaatttcaaaagttttaacacaatggtcaaatcttcgattgcaattttagcaggcctgcattagggtataattcctttctccttcataaagtacacagcaattgcaagtagcaccattaatatgatcatccatgtcattccaccactactcgtcttgtccttgattggggtcaacctagcacttgagtccagtgatgcagaaaccaaagcccttgaatcaggggagaacgtcaatgctgtaaccaaaccaaggtgagcttttttaaccatcatctgaacccgcatattggcagaatctatgataaaaaggtctcctccgactgttccaactgcaaggaacttccc

SEQ ID NO: 7107 - DNA, 561 bp, Gossypium hirsutum
  Clone ID: LIB3828-014-Q1-N6-C10
ataggaaaaacaatgcgaaatttgattcaaatttcaaggagtggagaagccaccgacgacttaggaagagagctaatctttgataggcacattcagttcaatctttgacaataagtattcagtagcagtattagatcctatttgtatttcaaaagtaagaaatcaagaggcttcgacattatcaattcatcacaagacagattaatttgtcaatgaaattgtataattattgcccgtgcgcttatttaggaaaaactcaagcttcgcctttaacatccaatatgctaagacttgttcgacgaggctgcataatccttatacttgatcatcccagcatcggcatgctaagactcatttgatgtggctgcatcatccttatgcttgatcatcccggaatcgacgagaatcggaatctctgcagcaagccatggggcaagtcccaaacacagtgcatgtgctattccaaacctaggacaattttttgcccaaagtggcttgaaatgcacggtcagacaaatcttccctcctctgtacatcttattcatctgcgtgtaggcgatc

SEQ ID NO: 7108 - DNA, 532 bp, Gossypium hirsutum
  Clone ID: LIB3828-014-Q1-N6-C11
actgaagaaagactataacgttctacagtaaagataaaaaattagtgaagaataaaacaaagctaacaaaagcaaaaaaagtagagacgagcattggcatatacacaagcccgcaatactgaaagtatgtataatttaaaatgaaagagaagttgaattgcagagaggctttattcggagtccttaaggctttcacgtgtaagccacattgccttctgaattatgaacactacatcattctaatattgctacaccagctgagaatctgatattgccactgattcccagagtaacgctgctaagtatctatttatcactttcgctatcgagcgcttatcattataaaagatgtaaccttgaggccttaagattcggtccatttgtaacaacatatccacaatgctacattgcctcctttcgatattagagaacacgggccaagcgtggatcagatcgtaagatctcgggtacgtcgagtagctttcgcaccagttatgcacacttgctaacagtcctatgtcatatactattt

SEQ ID NO: 7109 - DNA, 588 bp, Gossypium hirsutum
  Clone ID: LIB3828-014-Q1-N6-C12
gaagtgaaacaataatagttcagtagagaaagaagaccacctatgtggttagaatagtagggctcatattctgccaaatacttattgacccaattcccagatttacaaaacaaaataaccctttctcagcccccacccacattcaacaaaacctgcttactacctacacattcttccttcttattttcacccaaataaccatttcatttcatcttcttaaccctatacttctatactacaatttcatcactatagcaaactaacatctttttctcctacaactacccaaaaagagatcatgaaaacccaaccacccaaagctgctcaatatgtccattcctgaggtaacgcaacttcatggtttattccttgatgttgcctgaaattcccctgcttctggttccaaccacttccaagtttcaaagcagcatcaatttcggcggtgacattagcgttcaaccgaggattaagctggggttgagcaccaagttcatcaagatttaagttcaaggcctgaaccactctagctggaagcagaacagtaggacaagctggcttcttgcggggttcagaaggtgcaccaatacg

SEQ ID NO: 7110 - DNA, 603 bp, Gossypium hirsutum
  Clone ID: LIB3828-014-Q1-N6-D11
gaaaataaacctatcttatttatggcagttaatgaaaaagctacatcaagcaacttcttaaaaaacaccaaaacccagtagccatagaagcagcatagcataaaaaaaggagcctaaaaagaccagatattatgaaggaaacacaattcaataagccctttttcaaagctgtccacagtcagcaataacaacaggcttggaagtcctcccaccgctagaccccaccttctcaatcgctttaaccacatccatgccttcaactacctgtccgaacaccacgtgctttccgtccagccactccgtcttggtcgtgcagatgaagaattgagatccgtttgttccgggtccagcgttcgccatggaaaggatgccaggtcccgtgtgcttcttgatgaagttctcgtccgcgaacttggctccatagatggattcacctccggtaccgtttccggcggtaaagtcgcctccttgacacatgaaattggggatcacccggtggaaggatgagcctttgtagtggagaggtttgccgctacggcctacccctttctcgccggtgcagagagcacggaagttctcagcagtccggggagtgcaatcggc

SEQ ID NO: 7111 - DNA, 555 bp, Gossypium hirsutum
  Clone ID: LIB3828-014-Q1-N6-D12
aggaaacaaaccaaacatttatatatatttcaactcaactatactaaggcaaatagtatataacattatatagcctcgttaaactaaatggtaacgttttggctgtgggctacagtcttgtgcagccgtatcagtctttttcccttacatatttgcccttcgtctctttaccacttaaaagggtcaatactggttaaaaaagtcgaaacccaaaaggaaagaagtagaaatggaaatggatcatggcggggaacttgtattttttttcgtttttactgctaaagtttttttcactcttggggttaataagtttttcttttgcaaattggttcttccttcctccaaatcgtcaaaaagaaaaataataaaacacatatttatcaaactctgaaattcttgccggtgaatgtttgaccaaactgccaatgggcgggaacgatgttccaagaggtggaagtgcgcctgtcactgcctgtgaccctgaaagagagtgactgaccaacaagaacggcgtttgattgccagttctgaccccagtttcggctcatgctcatc

SEQ ID NO: 7112 - DNA, 607 bp, Gossypium hirsutum
  Clone ID: LIB3828-014-Q1-N6-D8
aagcatgaatcgtaagctttatattttcgcaaatcccaagataaagctgtttcgttattagtccatacaagagaaaaacaaaaataaaaggaaaattttcttacaaggacaatctctattcatttggcattttcttgtgattcacggcaagaatactgctcttcatcttcagaaaacctaatgagcgcatatatcctactcattatacagcaagacctgatggagcagcggcggcggaagcctttggcttgggcttctcaacaacaatggcctgagtggtaaggaccattcctgcaactgaagaagcattctgcagagcacatcttgttacctttgctgggtcaataactccagcctccagcaagttctcaaatttgtctgtcatagcattgtaaccaacctcccattcactactcttcaccttctccaccaccacctcaccttccattcctgcattttgagctatcaacgaagctggtgcaaccagagccttctgcacaatgtcagctcccaagcgctcatctgcgtcttcaagcttctccttaattgcaggaacacaacttgaaagatgaactaatgcagcaccaccaccaggcacaattccttc

SEQ ID NO: 7113 - DNA, 590 bp, Gossypium hirsutum
  Clone ID: LIB3828-014-Q1-N6-D9
aaacaccaaaattcaagcgacctttattagaattaattaatattgtgcacttaagaatcagaacaggaaatgaaactagcaaatcatgtctaatacaaaaatcttgcttaacttcccctgtttggaactttcagatagcatgcaatttatcaccaatagtacttaaaacctacccgacataaaaccgtagcaaaaatataaaagagtgaacacaaacagaagagaacaaccgcactttatataggaagagacatgaatcaagcatgctttgcctggaaatccttcatgaaagcaaccaacttctcaactccagccaaaggcatagcattataaatggaagctcgcatgcctcccaccgacctatgtcccttgagctgcaccatcttctccttctcggcttcctttaaaaactcagcctccaactctgacttctccaatgtgaatggaacattcatcattgaccttacagatttctcaacagggcacctgtagaatcctttgctttcatcgatggcattgtacaatataccagctttcttgtggttcttcttctcaacctcttccagtcctccctgcttcaaaaggtcttc

SEQ ID NO: 7114 - DNA, 602 bp, Gossypium hirsutum
  Clone ID: LIB3828-014-Q1-N6-E10
gcaaagtaacttattattgccataaatttaatataagttgatacatgaactgaataggcgttaagcttcccgcccacaccatcaaaggcttctagtctttaacaataaacacacaaattcataggattctaaaaaaggaaaaaagaagaagataaaactgcaagccaagtggagcacgaccaattacttaaaaggcatgtttgtttaactttaagcagcaacactatggagcacaacagtctcaacagtgaggccaggtccaaacccaaagagcactccccactccaatccttctcctgtggtctgaagcccatcttcccttgatttcttcctcatctcatccaaaataaatagaacacaagcacttgacatgttaccatactctgaaagaacgtgccttgtggctcgtagcttctctggcttcagtgctaatttggcttctacttgatctaatattgctggaccaccaggatgagcaatccaaaaaaggagttccaatcggatatgcccaatggttgaaatgcttctaccaggctcttttctatattcttcgaaataagccccggaacatccttaagaaggtgaaatgtaagaccaacttc

SEQ ID NO: 7115 - DNA, 571 bp, Gossypium hirsutum
  Clone ID: LIB3828-014-Q1-N6-E11
ttttttttttttttttttttttttttttttttttttttttttttttttttttttttttttttttttttttttttttttttttttttttgggtttttttttttttttttttttttttttttttttttttttttttttttttttttttttttggaaaaaaaaatttactttttttttcgggggaaaaaaaaaaaacaaaaaaaaaaagggggggaaaaaaaaccgggggggaaaaaaaaaaaaaaaaaaaaaaaaaaaaaaaaaaggggggggccccttttttttttttttaaaaaaaaaaaaaaaaaagccttttttgaaaaaaaaaaaaaacccgaaaaaaccagggcccaaccccaaaaaaaaaaaaagggggcaaaaaaaaaccccaaaaaaaaaaggggcccaaaaaaaacccctgggtttaaaaaagggggggggggggcaaaaaaaaaggggcccccccccaaaaaaaacaaaaaaacccctggccccggtttttaaaagagggggcccccaaaaaaaaaaaaccattttctgtgggggaggggggaaaaaaaaccttggggggcc

SEQ ID NO: 7116 - DNA, 558 bp, Gossypium hirsutum
  Clone ID: LIB3828-014-Q1-N6-E12
aatagacaaatcaaagaataaatcaaagaattttatattgtacaagtgatttacttaggtgccatatatcataaaaacggctaaattctatacacgtgtctgtcagataactgcacgcttctttactaatatttatccacaaataaaatttttatttagaaaaacaaaaccctaaatttcctcacgttgtcggcgattttttccaggctcccacaaaaaaggagaaaaaatatcggttcaacgactgtaagcaccaccttggcttgaacttgacgaaatactccctgaacttccgctcccaaagagcaaatcggagcagtaatttcccaaatcatcaggggtatatctgacaagtgattcggcccacatttctttcatcagctgcactccgccgtacttatcgaaaagctccttgtagatggggccgatccgtctggccaacgagagctttatctcatctcggagtttcgggtcggttacgacccaagaagtttgcttcttgtaagcttcttcgaaagcggagttgaattttctgaaatgctctatcacttgatcaac

SEQ ID NO: 7117 - DNA, 589 bp, Gossypium hirsutum
  Clone ID: LIB3828-014-Q1-N6-E7
aaagggcaagcaaagtcacactcattgacacctttcaagtttctatttcatgtaatgtgaaacattttccagttcataaccacattttttttcagaaaaaaaaatgctatttttgacttcatttgatctaactacaccacccaccattcaccttcttacccaccaagtaccttacaagacagcaaagatgaacagggaggaacaaaacttcaagaatgacaaagatatcaaacaaaaaagaccaaatacaagacttcaaggaatggttaaagtgggcttccttttttttttaataaataatatggtaaaagcagaggtgttctaactaccttcaccggtagctttggtaggcaggattgtacatgcagtgctcagcatacttcacaagatccttgggctgaggctgccgagtagccaaacccagttcatatgctttagctgcaacactggctgcaatatgggctgaaatctttctgatatttctaaatggtgggtaaataagtcccttgtcaaagttctcctgtgtcacctgtgcagccaaagcctccgaggctgccagaagcatatcatcatgaacacggattgcacc

SEQ ID NO: 7118 - DNA, 484 bp, Gossypium hirsutum
  Clone ID: LIB3828-014-Q1-N6-E8
gtattggtaacaaccaaacgtaaacatatcagacgagaaagactactttagaagatcctttatgacacacgaatataatgcatgcttatttatataacacacgctatagttgctctgcgggcatgcgaccggatgagaggggcaagataagaacggggcttgaaagtctaacaaagagaggttagcacagttttaaaaagcatgttcataatagaaactgtgcttcctgccgtaaggaagaagggcatatgtgaacccaacacagttcaagagcagactgggctccacagccttttaacttaacacaggttcccaaacgcacatatgttggcattgactgctgaagaagaagaacaaatggaagcactgtatcaccaacagggacaaaaccaagctcataagccatggtcacaatgccatgtcctgcaggaggcacctagcgtaaacccccaacctttataacaagaagtgttctcaaaccaaa

SEQ ID NO: 7119 - DNA, 591 bp, Gossypium hirsutum
  Clone ID: LIB3828-014-Q1-N6-E9
cattgaatatatattataaggtgaagagtatatatttgcattagggacatgcttacattttttaccaaaaaggaaaaggggactaagagcactacactaagaggaaggaaagttttgtgggagtaccagacacattaaggttcacaagttggccggttggctggcttcttccatcttcgagattgaaacggtcgcattgcgagtgacaaaacttactcgagctggcatgtcggtactgacaaaagctggaagagatcgatatagtaaggtggcaagatcaaatttgtgcatctatgaactgaccattctatggcacttgattgaatctttttataagtggtgtcgactcagccacctttttctcgttcgtggtttggtagcagatggttttatagatggcgccatggtggcattcgtcgatcattcttgaagaactagattcagttcttgtgcacatcttgctatcacaccacctctcctttcgagtggtggaagaagtttcagaatcttttgcagctgcgtgaaacactgattgcagcattctcgcctttgctcagcatgtaaatcgacaccaataccacgtgggggttg

SEQ ID NO: 7120 - DNA, 593 bp, Gossypium hirsutum
  Clone ID: LIB3828-014-Q1-N6-F10
tttttttttttttttttttttttttttttttttttttttttttttttttttttttttttttttttttttttttgggtttttttttttttttttttttttttttttttttttttttttttttttttttttttttttttttttaaaaaaaaaggcaaaataaaaaaaatttttttaaaaaaaaaaaaaaaggggtttttaaaaaaaaaaaaaaaaaaaaatgggggaaaaggggaattttaaaaaaatgggggtttgggggggggggaaaaaaaaaaaaaaaaaagggggggcccaaaaaaaaaaaaaaaaaaggggggggggggggggggggggggggaaaggggggcggggggggggggggaacaaaaaaagggggggggaaaaaaaaaccccgggagggggggaaaaaaaggggttatggggggaaaaaagggggggacccggggggccacccggaaaattcggggcgggccccgggggggaaaaaattttttataaaaagggggcaaaaaaaaggggggaaaaaaaaggaaaaaaagggtcccggggaaaaaaagtttccccaaaaaaaacaaacaaaaaaagagggggag

SEQ ID NO: 7121 - DNA, 601 bp, Gossypium hirsutum
  Clone ID: LIB3828-014-Q1-N6-F11
agggaaacaagttatttttgaactagtggaaatagagactgacgtcaaaccttatgggaggggcaatgaataatacataaaataaggaaaagaaaagaatatcagtggagaagaaaacccttaatgcagccccaaaactgatgggagttttgacttagatcttcctaactcagcctccctaagttaaggtgaaatacatcatccatcacaaaagccaagccaagccatctcgatttcaattgatgatcagaaccagcagaaaacaagggatttcttcatcttcccgtcttcgcccgcttcattcccgtactgttgaaaggcgacatacctgggctcatgcttgggctcatgcttgggctctcttcccttaaggtaccatttagcaaagctaactccctaagctgctgtttcttatagctatccaaggattcatccactggcttcagaagattttctagtatcgcaacagcatactccagacgagaatttaccatatcctcgggaaattcagcctccaccaacacatgcagtggctcattaaggtgttcgtatccaggtttatctttcagtttctcttcctttacagaatccttgactgaac

SEQ ID NO: 7122 - DNA, 589 bp, Gossypium hirsutum
  unsure (1)..(589): unsure at all n locations; Clone ID: LIB3828-014-Q1-N6-F12
acacaaacattaattggtattttacattatccaatcatagtacatcatcaaatcaacaagtccaaggtttaatgaaaaacttacaccaccgcaaactatgtttgctttatttaggctaccactgccatacacaatcatacatgccaaacgggcttagtagaaactataacatagaagaaacatggttctgtttgtggaatgccagttcctactgcagaacaacgcattcttgtgtcccacccaccatagcgcggtgggaggttttggtgatggcgctttcttcttcagtggattcagctttagtatcgggctccttaggcagactcttagcagcatgttcaatgccatctttgccactggcaatgacttcaaagatgagtgcattcacttcccggaacctctcatcagagagagaaacctcagccaggagcctccaagcattttcatcagacgcctcatcatagtccttcctcctttttaacaccatatgcccactaatttcccacacagctgggttcacctgggtatccagaagctctggactcacttncccgagagcttgtttctcaacataacactgtggaacgag

SEQ ID NO: 7123 - DNA, 539 bp, Gossypium hirsutum
  Clone ID: LIB3828-014-Q1-N6-F7
aaatcaagcttacttaaaatcttttttattcatgtaataataataaataaataaaaaaacagctggcccatgggaattcaatcatatatcaagcggctgggttattctttattttctttctcttgggataaaacccggagtttctataatctatatataaatctatgaagatttctatgaaaattcgggccccatagctgggatattcagggccttctttttccctaaaagaccatgggcataaagtttcaggggagggcccttaatcgtccgttggagttcatccatataagcaatcccccccccccccccattatggaacctggggtaggggcatccgtaattgcaggcgccgaaaaagctgccgcccatgatatccacatcgtcgcagtcgatacaggaagggcttttttcataacctatacctatcccagcaccgaatccggtaggatcaggatcgatagaggttgaaaaatcaggatcagcttcatgcggaaaaccgtggctgggttgaaacccatcggctccgtcagccatgg

SEQ ID NO: 7124 - DNA, 456 bp, Gossypium hirsutum
  Clone ID: LIB3828-014-Q1-N6-F8
gaagtgtatttttaaaaataattaagtttatgaaaaatattctttataacatagaatataaaaaaaacaaaatttatttgcgagataaatataattataagagttacaacgtcatcaaaaaaaatatacctctgctattgattaagcggtcggggtaggttttgctgggataggggcagaacatgcagctggattttgtttgccactaactttaggcttcacattcgaacattgtgatactgcaggtccagtcggtccactatgcgtaatttcaatgtctgcaagttctacattttcacaaggcaaagtagcactacaaataatcttgacagcttctggacgcgcagaagtgccgtgaatgtttttgaaactaatgttgcttagtttaactttcgattcttcatttattttgcatttgttccatgggcaatatttctgatcaatcggacgcgtggg

SEQ ID NO: 7125 - DNA, 595 bp, Gossypium hirsutum
  Clone ID: LIB3828-014-Q1-N6-F9
aaagcaccaaacttgtatactgcccaccattataagtcacttaaaagcaaggaaaaacaaaatgacttaattcatggaattcacgaatgttaacatcagacatgagtttaaaactttgccttcggaaagatgttcaaaaccagaatccacaatagatcgaagcagctccggtttcagcagaaagtttctgaatcccgaactgtgaattccaacatacccctgaggaagtgctttgacacagctgcgataagtataaagcactgatgccatctccttcccatcctggataagtgtgttctgaactttgcatcattcttaggaattgaaggtatcctagtcagccttctggtagaaacacttcctccaagatttaagtgataatgatatatcttattatcactaatgccttgtttactcctttcagcaaacatatttctcccagtaaaaactgatatagggaatgaaagaattatttggctaatgatgcctttattccatatggtgatagaagtcacaaagatcaacacctcaagcaagccgtatgcaaaacgtaaactctcatacatcaagatttcaacagcatcttgttcagtag

SEQ ID NO: 7126 - DNA, 602 bp, Gossypium hirsutum
  Clone ID: LIB3828-014-Q1-N6-G10
aaaaaacatactctctattcatccgagacaacataggttaaaaaacatattttaaggtggtgaacaaatttatacaaaataaaaataaaaggaaaacaaaaattaaaaaactgcatctgtcaataaattacaacaatgaaaacatctattattcaaaataacattatttttttaaaaaaaagtaaccttcaatatttacaggatatcaagcaagttataatagggcttgcagcaagtagggatttgcataattggccaaaaataaagatcctcatctcccagctgataacgttggcacttatttaaggggttccgatcacagaactgagactccctgtgcagtcaggctgctttccaccaggggtccaaatgaaccctacatctcataacccgaaacttcaatggcaaaagacttttacaacctgttcaatacgcctccggcaaagagggcagctggttaagtgcgaagcgcaggttgtacagcagcacatatggccacattgaataaaaacggcattgtactcttgctcaaggcatattacacatatatttggcatcatgcgatctctcttgggttctgctccgttttcaactttcaaagt

SEQ ID NO: 7127 - DNA, 572 bp, Gossypium hirsutum
  Clone ID: LIB3828-014-Q1-N6-G11
aagaaaaccaaaaattttctttaaaaacttgttataattacataaatactacaatagaagcaaactatgcccccattgctcatgttattggcaattcaacatcgctttaaacaagcttctacttttactcaaataactatcaataatcaaagagctaaatgctttgaattaaagccattgctttaagcattaagtttttaatctaaaatgtacatttttcattcaaaagcttcatgatgaaggactataatcgcaatgccacatcgaaataccttaaagcaattggcactccatggagatgaataccttatttgagaccaaggccgagaacaaatcaatttgtttcgacataaaggggtagagcataatgacttgaagatggaccggggtcatctgattgcatccgtaaccaatcttgtgtgcatatcaaagcctgtcgagtctcgggagtcagtggacatctacaactatcgagcaccctacctccagcgtggaatgctgactcttgtgagacggttgacataggagttccgagaacatctcgtgccatcattgacaagattggatacctt

SEQ ID NO: 7128 - DNA, 470 bp, Gossypium hirsutum
  Clone ID: LIB3828-014-Q1-N6-G12
aaaaaaacaaattccgggggggattggaaatattagtatcccccaaccctagggaaggggggaaaacaaggccaaagcatttccccaaataagcagttaacttggcagcgggctttaaaaggggggaaaaattacatacaacagggggcctttatgggggtttttttagttataaaaaaaaaaggtttttgccgggcatacaaataaaaatcagggttttaatcaaggaattccaattcatcccctttaaaaggggctaaaaacttgacagggccccgcttttaaatctcagggacaaaccccaccttgaaagggagattagcggaaatccttttccctttccacacccccacaaattggtaaaacaccccttccatgccggtaaaatccaccttagggacccgaggcacggggaaaactttgagaggcacttttaccctaacctttgccccaactttagccgcctttgg

SEQ ID NO: 7129 - DNA, 581 bp, Gossypium hirsutum
  Clone ID: LIB3828-014-Q1-N6-G8
gcaaattgaaacatgatatcttcagtccagttttgacattaactaaatcagaatcaggaattcaaattttccaatcaaatgtcttgtaacagcaagtcgaacaagctgcttgaataagaaatagcccagttttttaagaattcagatgagttgaatgagagattccagggactaaagaatgtacaattggaatttgaccagcatttttgattatttaatcaaacatcatctgcatcacttccaccaacatgtgtttcatggctaacccaataatggcttccatcaggaccagacaccttaaaccgttcaagtacggattttccttctttgtacttctggctcttctcatgggcaaattcatatttccatcccacaattgatccacacccaatgcagaagatatctgctacagtgtgcaaccctgtaatcatcagtctatcttctttttccccgacagaaacattcaccaccttactgaagagatatgcttttccatgcctggactggaaggacttggaaagaatatcatcaacaagagcaagatggattttgcagtgcttgcagctataaactttcccttc

SEQ ID NO: 7130 - DNA, 540 bp, Gossypium hirsutum
  unsure (1)..(540): unsure at all n locations; Clone ID: LIB3828-014-Q1-N6-G9
ttnttttttggaaaatcaaagtaaagaattgatttgctagcacgcagaaataccagtctatagtttcataaagacactgagaatggatacagcaatataaaacaagttcatagttgggactgcaatacaacttagaaattattacaagaggtaaatatgcatgagtttaagatcatatcacatccctggaattaaatactcagataaaatgttatcatattatcaccagaaagcaagcttgagagaatttcaggcttcagcaagccccaatccacagtgttattacattctctcttgtaagtttggctgcattggctgcacttggaaggtggaagacatctgtgagttgtagtcccgggctcgctggtatccatgatccatctgctctcttgcactttcataagcgacttgttgttgattcagaatgaaactgagctgcttgtagtcctcctccaggaatttggtatttttccatgtcttatcaaggacatccatctgtttgccacgaacataggtaagcccattttcaagggcatcctc

SEQ ID NO: 7131 - DNA, 484 bp, Gossypium hirsutum
  Clone ID: LIB3828-014-Q1-N6-H10
gaaacccaaaaaaggggggggttttaaaaaaaaaaaaaaaaaaccaacccggggttggggggtaaaaagggaacaaacccgaaaaagaaggaaaccctttttttaaaaggggaaaaacccaaaaaaagaaaaaaaaaaaaacccaaccaatccccccagctttttttttgggttaaaaagggcccccggggaaaaaaaaaaaaaggcccaaaaaaagggcgaaaaaagcaaaaacttggggaaaaaggggggaaggggccctcccaaaaaaaaggggggggggggggggattagcttggaaaccgggttaaaaaaaaattcaaaaagcctttcaaaaaaaaaaaccggggggggcccaagcaaaaccaaaaaaaaaaggggccaaacccccaaaaaggaaaacgattttgcctaaaggggccgggggggcgccccggaaattccggacggggcccggaaggggaaaaaattttccctaaaaggg

SEQ ID NO: 7132 - DNA, 560 bp, Gossypium hirsutum
  Clone ID: LIB3828-014-Q1-N6-H11
atcaaacatgccttttacaaggcattttacaatttcataaacgaggaaataaacaccccccccaaaaaaaaaaaacacaaataataaaatgtgggtcatttagtattgaattattcaagctttggagcctcgcagtgcccaattggcttcgctaccaactcggggcatcctacttgttctcgactgagcatcggccatgaaattggcaccacacatcaccccttcactgtcaattcttggcattgccttcattttgctccttggatgctcaaaactcatcaatccttgctcactgtggaacatacaccctggtggaaatggtgcaaatgatttagcacagctttcttttataagcttcaagttatctgaaacaactactgatccatcagctgctacaccccaatagagattaaccctttcatctgcacccaatgcaggaaatacacttacagctttgttatcttacaccacaaatacatacctgccttcaagatccttaatgaccggcccagccaggtccggaccaccgactgggtgggtccgatctgcttgcatgataa

SEQ ID NO: 7133 - DNA, 581 bp, Gossypium hirsutum
  Clone ID: LIB3828-014-Q1-N6-H12
tttttttttttttttcttttttttttttttttttttttttttttttttttttttgcgagcaaatgggaaaggaaccttttattttttcttaaaaggaaattactggaagcccttttttacaaaaactatgggtggggcttttattattgtttgcattggttttataatttttagccgcttttggtgcctctttaaagaaaattgggttctttggggctttctaaacatcatggggggccactttgcccttttacgcttcctcccgccggcgggttcaggggcaacttctggttttggttctggggaaaccggcttctcttcggcttagcccgaatggggcccctcggtgggttcagtggccgcttctccttttggttctggggaagccgccctcccctcggtttagtcggaagttggcccctcccccctttggggatcctctccaaccgggcttttaaagttttcaacaggtttagcggcccccgggcttaaaactgctttttccgctcccgggggtgccgccccctcttaagggttttcggggggtcccccctccgaattggggtggggggcccccagcc

SEQ ID NO: 7134 - DNA, 486 bp, Gossypium hirsutum
  Clone ID: LIB3828-014-Q1-N6-H8
ggccggcctaaaaaaattttaaaaaaaaaaggaggggaaattttttcttgggccgggggcaaaaaaagaacccccagggggccaaaataattgggtaagggggggtaaaaaacccccaagaggaatttttggggcttggaaaaaaaaaaccaaaaatgggggggttttttttagaaaaacgttggaaggtcccaaaactggtaaaggaacaagttttggaccttttcggggcacccctggggggtttggaaggggccccccccccccggaagaacaaagggtttaatttttgaaagggggaaaacaatttggaaaaggttggcaaaagggttttgggggccccccccaatttggggtaaaaaatttggggccaccgggggctggaaacttttaggggcctgaagggggggaccaacaaaaaaaaacccagggcggttttttgggttcttaaaggggacaagattattattgggaaaccgcccccct

SEQ ID NO: 7135 - DNA, 585 bp, Gossypium hirsutum
  Clone ID: LIB3828-014-Q1-N6-H9
cacttaaattatacacttttcttttgatgttatttaaattacacattatttatgacttttttttgttaaacctcaatgacttttgtagtaggcccaatttgctcgggcccaaaaattaaataaaagctcaaaattaaatagttcaaatttacaaaaaaaatccactgcccaaatattcaaacccaaaataaataaataaaaaatctagcccaaaaattacaagctcaaatgattaaacagtttcagcagaagcaaaaaccctagctcccatgtacgccgctcttcctcggacgcaccgcccgcgcctcgtctcaaggcctgactagaggtactcatgggccgggccgggcccataaaaaatttcagctctgatcctaggcccgggcccggcccaaaatatgggcctaaaattttgcccaagcccggcctggaaaaaaaaatataagcccgggcccggccggccgaaaaatagtgcccgaggccaggcccgttttctaaacgggcctcattttttttgcccaagcccatatttcgggcctatatttttacccaaatcctcccatatttcgggcgggctgtcgggct

SEQ ID NO: 7136 - DNA, 624 bp, Gossypium hirsutum
  unsure (1)..(624): unsure at all n locations; Clone ID: LIB3828-015-Q1-K6-A10
attatgattcactcgccgccgcaatcaatggctgtgctggtgttttccacctcgcttctccatgcagcgtcgatcaagttcacgatcctcagaaggagcttttggatcctgcgattaaaggaacgcttaatgtactgacagctgccaaagagcttggtgttaaacgtgtggtggttacgtcttcaatctcctccatgtggccctgcccaaactggccagctgataaaatcagaacagaggattgctggactgatattgagtattgcaagcaaaatgaattatggtatccaatttccaaaacactagctgagaaggctgcatgggaattttccaaggagaaaggtctggatgtggtggttgtgaatccgggcaccgtgatgggtcctaatattcctccaaaccttaatgctagcatggtaatgttgttacgccttctgcaaggcagcacagagacatatcangactttttcattggatccgtccatttcaaagatgttgcgttagcacacattttggtatatgagaacacatcagcaacaggaaggcacatgtgcgttgaagctctatctcactatggtgacttcgtggccaaagttgctgaactttaccctgaatataatattc

SEQ ID NO: 7137 - DNA, 620 bp, Gossypium hirsutum
  Clone ID: LIB3828-015-Q1-K6-A11
cttgatacacgcccccatttattttatttttcaaacaaattttcccttcaattttcgtataatttcctaggaaaagaatatgagagagtgcatttcagttcacatcggtcaggccggtattcaggtcggaaatgcttgctgggaactttactgtctcgagcatggcattcagcctgatggccaaatgccaagtgataagactgttggtggaggagacgatgctttcaacacctttttcagcgaaactggtgccgggaagcacgtccctcgcgccatctttgttgatctggagcctactgttatcgatgaagtgaggactggtacgtaccgccagttattccaccctgagcaactcatcagtggcaaagaagatgctgccaacaatttcgctcgtggccattatacaattggcaaagagattgttgatctctgcttggatcgtatccgaaagcttgctgataactgtactgggctccaaggcttcttggttttcaatgctgttggtggtggtactggttctggtcttggatctcttctcttggagcgtctctctgttgactatggaaagaagtcgaagcttggtttcaccgtctatccttcacctcaagtttctacatcag

SEQ ID NO: 7138 - DNA, 442 bp, Gossypium hirsutum
  Clone ID: LIB3828-015-Q1-K6-A12
gccatgtcttgtatcgagagcaacaggtgctgtcaaacaaactggagatgaaccattcagtacttttatgaagacggtcaaaagattgaacataaggatggattcacgcaatgataccgatggaaggtcatggctcacagggattcgaactgccaaaaacagactagaagggccaaataagagaggtcccttgagcatatttgcatgattcagaacaccagtatttgagaaaaacatggatgatggatcgctctagaagttgcacaacaccatgaaagagtgtttttagttcctcttaggggggatgtctgtaagaagtttcttagtcaaatatttgtgttcgaaaagaagatttatgtcttagaatttgctgaatgtttttatgagtttatgttgatgatggttatgaatccatcaattcaaacttcaactgttaaggatt

SEQ ID NO: 7139 - DNA, 344 bp, Gossypium hirsutum
  Clone ID: LIB3828-015-Q1-K6-A7
ggcaccgtaggactggacactggttactttgccgagttccaaaataggggacccggtgccaacaccgagggcagggtcacatggagagctatcaagaaaatcgatatggatgaagccatgaaatggactcctcgcgtatttttgcaatctgacgaatggctggcacaaactggcgttccttttgatcccgatatgacccctggagtttaaacttccaaaaccatcgccattaatattcttttatatcattattatttgaaataatgttgttgattattgattaatttgaacaactttttcctacttttataatattaataatatattcaactcttattgaaggc

SEQ ID NO: 7140 - DNA, 612 bp, Gossypium hirsutum
  Clone ID: LIB3828-015-Q1-K6-A8
ggcaaagcatcgaaagctgtccaatcatgcttttcatggggaaagcctagagaacatgaccccagcaataattgctagtgttgaaaccatgctagaaaagtggaaaggcctagaagtcaaagagattgacgtgtataatgaatttagattcttgacttcggaagtgatttccagaatagcttttggtagcaattacttggaaggggagaagatttttgccatgttgaacaagttgaaaatacttgtgagtcaaaatattcacaagactgcgattcctttcatcaacaagttatggaaacctgctgatatgctagaatctgaaaaactcgaaaaaggaatacaagattgtgtgatggagatgattaagaaaagagaagacaaagttgtgagtggagaagctgatagcttcggcactgattttctgggattactagtaaatgcttatcatgatttggacgataaaaacagggtttcattggaagacttggtaggtgaatgcaaaacaatctactatgctggacgggaaaatgttaattcattgcttgcatggatagtcttgcatttggcaatccatggagattggcaagaaaaagcgagaagagagtgattgac

SEQ ID NO: 7141 - DNA, 496 bp, Gossypium hirsutum
  Clone ID: LIB3828-015-Q1-K6-A9
tcgaaatcttcgaaatctctctctaacatcttaacatacgattttggttgtgtgggagagagagatggacgcccttgacaacgtggtagatcctttgagagacttcgccaaggacagcgtccgcctcgtcaagcgttgccacaagcctgatcgtaaagagttcacgaaggtggctttccgtacagcgatcggtttcgtagtgatgggattcgtcggattcttcgtcaagctcatctttattcctattaacaacatcatcgttggctccgcttaggaattgcaggctcgtagaaattggtgggggatatgaccagttggcgtagttgcagattctcatagaaaatgaatgttagaatgcagcagttgggggccaactgctgtccctctttccttttcattttacattttattagttgaaccaaatagtcttgaatctaaactaaactctcttggaatttctttgagcactttgtaatagattatggttaatttttgc

SEQ ID NO: 7142 - DNA, 588 bp, Gossypium hirsutum
  Clone ID: LIB3828-015-Q1-K6-B10
aaggtgtctcctcaataaccacaagggataacttgagtcctactaatggaagcaacaaatttgcaaatagtccaataaacatcactccatcagctgctgcatctgttccctttaggagttcaggcaatagccccaggcttgccactgctgagcgtaatcagactccagtacggatgaccatggagaagagagcaactgctcaagcccaaagtaggaatgacttcttcaaccttttaaagaagaaatctacttcaaattctgcttcctctgtccttgattcaggctctgctgtgtcaccacctgtctcagagaagtctgacgaacttggcactgaagattccagcacttctgttactctgcaggatgggggtgttccatcatcagagatctcaattgctgacttgccagctgacaataggagtgaagtggccttgaatggagatgcttatgctgagtctcagcacggttctagcaatggagatgagcattcaagacctgatgcgtacctttatcctgatgaggaagaggttgcgtttttacgttctcttggttgggaagaggaatgctgagatgatgatggtcttacag

SEQ ID NO: 7143 - DNA, 474 bp, Gossypium hirsutum
  unsure (1)..(474): unsure at all n locations; Clone ID: LIB3828-015-Q1-K6-B11
agcgtgtgctgaggacattgccatctgggtaaagaagtacatctcatttcgaggtaatgagttatcttattaagtgggaggtttcaaatgtangaaaaagatttgcagcagtgcatctttttctgttattcgatcaacaaagagaatgagaactcttattaagtgggaggttaaaatgcagaaaaagatttgcagcagtgcatcattttcagttattcgatcgacaaaagataatgagatgatgcagggttgccgtaaacaggatcgggataatcatatcccatttattcacttattggtaatttatcattctaactcgtacctcgcttttgggtttcccccatatcctgttgtgcttgtgaagatgagattactcctcttgactgctgatgtaacaattttttttttctttccaactgtgaattaaaatgtatcatttctcgtgaatagagagttttgttatgtatttacagt

SEQ ID NO: 7144 - DNA, 618 bp, Gossypium hirsutum
  unsure (1)..(618): unsure at all n locations; Clone ID: LIB3828-015-Q1-K6-B12
gnagttacagcaaccggcatcatcctttacaagaatggcaagggagctgcctcatccgagttgccacccccacctgttggttgggcttggtcactcaatcaattccgtaccttccgttggaacttgacttctaacgctgctaggcctaaccctcagggctcctacaaatatggttccattaacattacccgcaccatcaggcttgccaacactgcacaaagagtagatggcaagctccgatatgctcttaatggagtctcctatgtcgaaccaaccactccactaaaacttggagaatactacggcgtagccgacaaggttttcaagtatgataccattcccgatgagccaccaagtgacaacactagggtaactttggcacctattgtcctcaacatgacacacagaagctttgtggaaatcatcttcgagaatcacgagaccgccattcagtcttaccacttgtctggctactcattctttgccgtgggcatggacattgggaaatggagccctgagaagaggatgaactacaatcttctcgacgccgtgagcagacacaccatacaggtattccccaactcctggtcagcaatcctattgacattcgacaactgc

SEQ ID NO: 7145 - DNA, 403 bp, Gossypium hirsutum
  Clone ID: LIB3828-015-Q1-K6-B7
gcacagatagtggcaagagaatgttgcatgcggtgatagactactttatagtctgaagcctgaatattatttcactcacatgtggcaagaaaaaatgtttatgttggaacttgtgattgtgtacttgtatgttgaatagtaactgacacctttactgtgataaaccagattgacctttcacatgaaccatacacgcaggtaagcagtgaatggaatccgttgttccctaaaagacaaaccggttattcagtgaaaaacaggtgtcaaagagcaacaatgaagaatgtaatatggttaaaaatgaagtaaggggtggggttatatttttatgcaatctatttaacggtaatgttctagtggatattactattttttttttgaaaaaataattgctgtggacggt

SEQ ID NO: 7146 - DNA, 572 bp, Gossypium hirsutum
  unsure (1)..(572): unsure at all n locations; Clone ID: LIB3828-015-Q1-K6-B8
gggaattgttcaacacaaaagatggataaagctgcattatatggaacctaatttctaagggtggatatctttacgtttgccgtgatgccaagggtatggcaagagatgttcatcgcactttgcacactattattcaggagcaggaaactgtggattcatcaaaggcggagtctatggtagtaagaaacatccagnatgtgtaccggaacgcattatcctccattaggatagatgtgcgctgactgggctatatattctctgtgtagacgtctctgttcagccagtctcattctcagtagaaaaaacggctgggtttgatagtgatggcataaagctaaactggtttttcatattgggagaagatctgctagatgttagatctttttttttttctatttaaattttctaacatcttgaaataatactctaaatagaacgatcaattgtttttggactttgccccgccatttaaagtggtaataaggaacagaggatgtatctagcttacagacctgtgaaaaacatatttaaaaaactcctcgtaagttataatattctggattgtcatcatc

SEQ ID NO: 7147 - DNA, 614 bp, Gossypium hirsutum
  Clone ID: LIB3828-015-Q1-K6-B9
ccaactcttatgttcaatcttagcttagtggttggatgttcgattggtagaggttttgagggttgtttgtagatttttttggttttttgcaatgtttttgatactgttcacgtactacacaaatttggctactatttcaagattgttttattgtgttttttgttttgtttgacttagtttgggctatttgacttgatttgggttgttataaaactatgctttcgactttcttgacttttgtgaaatatatttatgaaatacaattattttattgtacctaatatgtgagatggcccaacaagcccatctgacatgtgatggacgacaaccctagttccaaatagtggtgtcccgcccacctccctattatcctagtaggacatgtgatgggagacctttcagagatgagtcaaaccaatatcattttgaggacgtatagaagacctcgtgagaatgggtggagagaatgttatgtgtcgtggatcaaagcccgtgaccattgcacacaaaatgtctcatggaggtcaacttattaaatgtgactcatttgacttacttgaactgacccgactcatggaacatattggaaatctcatctacttgaagccttggtg

SEQ ID NO: 7148 - DNA, 595 bp, Gossypium hirsutum
  Clone ID: LIB3828-015-Q1-K6-C10
cacaaatttgctatgataaggaaactccgggaagagtttctgataggaaaatatcagatgtttatggactaaatgtggcttcagctgcagaaattgattctgctagtggattcaatagtgaaaagattggaagctcgggaagtttatcaccgggattgttgacaaatgaaaacctaagagaaaatcaatgtggaaaggagctgagtgctgattgtggtagtgattctgctaaagcatctattgctagagtcgactcttttaacgagcctatgcacaaaagatgctctcttaaagctaaatattcgcatggacattcacttaaaccactaagttccttagatagttgcctcatggcacaactacatatgcaacatgttaaaatggaggaatatgtacttagcttccttccatcaccaacaacaccgatcttgagaccattgctgataactgacggaagccgaataatcaacagagcaagtggtggtttttctattggatcaaatggaaccggggacagtaagctgcataatctagccacttttgaaaagaacagatacgtacatgcggttcctcctctgccaaaaattgattcctc

SEQ ID NO: 7149 - DNA, 633 bp, Gossypium hirsutum
  Clone ID: LIB3828-015-Q1-K6-C11
cgcaactcaaatcctcttctctgcttttccacttttcctttctttcttcagttgtgatgttattttagctggtgatacaagatggcagatggtgaggatattcaaccacttgtctgcgataatggaactggaatggtcaaggctgggtttgctggcgatgatgctccaaggccgtcttccctagcattgtgggtcggccacgtcacactggtgtgatggttggcatgggacagaaagatgcatatgttggggatgaggctcagtccaagcgtggtattctgactcttaaataccctattgaacatggtattgttaacaactgggacgatatggaaaagatttggcatcataccttctacaatgaactccgtgtggctcctgaagaacacccaattcttctcaccgaggcgcctctcaacccgaaagccaatcgcgagaaaatgacccaaatcatgtttgagaccttcaatgctccagcaatgtatgttgctatccaggctgttctatccctctatgctagtggtcgtacaactggtattgttctggactctggagatggtgtgagccatactgtccctatttatgaaagatatgccctttcacatgccatccttcgtctagacctcgcaggtc

SEQ ID NO: 7150 - DNA, 633 bp, Gossypium hirsutum
  Clone ID: LIB3828-015-Q1-K6-C12
ctcttctttttcctctgcatttctttccctttatttgaagaatgaaatttagagtagccaaaactgacaattacatttccaccccaccaataacatgcaattgaaacctctcaacaccttcaccattacgctcatgttgttcttcactttcttgatcctcttcttttctggtttccttgaattcccttctgtttcctcctctatccaacaaccctttaccactccatccctcaccctttcttccaaccctaacccttttactgatctgctctctgctttcaagacatgggattctcaaatgggttgttcccagttcaagctaaaacgccacgatttgatccgtttgctttctaacagctctgggtctttgcaggaacctgtttctcattcttcctgcaatctgttgaaaatggagcatgttagtgttttggtaaaaggatggacttgggttcctgataatttggataatctgtattcttgtcaatgtgggatgagttgcttgtggactaaatctcccgttcttgctgataaaccggatgcccttttgtttgagaccgctacccctccacttcagaggcacagtggagatccacttcgtgtgtacatggaccttgaggctggcagaaggcgttc

SEQ ID NO: 7151 - DNA, 624 bp, Gossypium hirsutum
  Clone ID: LIB3828-015-Q1-K6-C7
tccgaaaaaaggattttcctttctttcattccatttcggcctgaaatctgaaaatatgattaattttttggttttttaggttatatttacatgtaatttcaatgttaaccagttttgtgtttaaatttcgtctttgaaattttacattttcaatcgatcaactgtacataggatttgattaatgaagctaatagttgtgaattaacaaaagggaaaggttttaatgcctgctgtaatttgattgatttgaacactatatggtgtttaaggcaatcgattattttcattgttaaaatatacctctgtttgtctgttttagctcgttggatagtagctctataaatatttttttttgtcggctatgttgctgctgatgaatgttggatatgggttcgagttttctcatttaagttttacataaatttggaggtaatgttaattggactcaggtgtttttgtcagatatgtgtatgtatgcttcataagtgtgttctattatgtatttgggaatctttggaatatattaatgtcatatccatgccctagaatctgtttaacaattgcttgaaatacaagtttctgataccggtattttttgtaaaaattgaaaatccgagaacacct

SEQ ID NO: 7152 - DNA, 602 bp, Gossypium hirsutum
  Clone ID: LIB3828-015-Q1-K6-C8
ctcaattcttaatctgaaggacagtagctctccccatgccctaattttccacaaataaagcaaaataagcttaatttctcatatttaaaacgagcataagtagtcatagccttcccaaattggatcttcttcttccgtttcaatggtgcatttacatccagacaaaccctaatgcgcatatacgatttttgccccaaaagtgggttattagaatcatactcaataaactttccacagaagttacctaactgcacaaccatcgattcagatatcagtcctggaggtaaatcatggacctgaacccaaaattcagtggagtttaactccattactgccgggttatctccatacgatattctcttcaataaaagcagatggttatcaaaaaaccaaggagttcccacaagcacccgtacaatgtcaacttcatgaaaaaattggaataaataccttttttccccaatatcagtaatacagatcccaccaatagggtgccaaagatctgccatagtattccttaacgaagggaaatgaaccacactgtctgttaaacaacgccccacaagacacaattgcgaaaagttttccacagccggaccatc

SEQ ID NO: 7153 - DNA, 603 bp, Gossypium hirsutum
  unsure (1)..(603): unsure at all n locations; Clone ID: LIB3828-015-Q1-K6-C9
gngccatctaggattgaaagagggctgttgtgaacttctcggctcctcgttgtgatccaaacaacattgcaagggatttgattcgttgtggagaaatgaaaggaattcgtattgatcccccatttgatatattcaatgagatgaaccagaatagacgcctttcacccgtcgttagagttgaaaaaatgtttgaacagatacagtctaaacttcctggagctccgcagttccttctttgtctgcttcctgataggaaaaactctgatctttatgggccatggaagcggaagaatctttctgagtatggcatcgtgactcagtgtatggcaccagctagggtgaatgatcaataccttacaaatcttcttctgaagatcaatgctaagcttggaggtcttaattcaatgctaactattgagcaaacaccttcaatccctatgatttcaaaggttccaactatcatccttggaatggatgtatctcatggctctcctgggcaatctgatgtgccgtcaatagctgcggtggttagctccaggcaatggccattgatttcccgctatagggcatcagtccgtacacagtctccgaagcttgaaatga

SEQ ID NO: 7154 - DNA, 588 bp, Gossypium hirsutum
  Clone ID: LIB3828-015-Q1-K6-D10
ggtaattgctgctgaaattatctccacgactgagttcatcatgctgtcaaactttgtcttgcctcgaatatattctttgtttccctggtcatcttttgtgtttccagtgaagtaacgaataagcagcactgcaagaactagtacagccactgccaatccaatcttcccaattgcagaagtcagcttgttgaggcgagcctgtaatggggtttcttcatctaactcacggtttatggaactcatcatctccccccatgccgtattcatgccaacagaagtaacaagcattgaaccgaacccatttgtgacctttgtaccagaaagaacaaaaggattgttgctgccattgatctcaacatggtcgctttcaccggtcatgctagattcgtccaccttcaaagagtgtccatccaagaacaatccatccgctggaatttgatcaccaattttcaaagacacgacatcacccacgacaacttgaaagactgatataaattggcggcgcccatctctcactacttccacttttatatcactactctcctgtgaaagtttctcgaattgtctgttttgcttaaagtactgaca

SEQ ID NO: 7155 - DNA, 627 bp, Gossypium hirsutum
  unsure (1)..(627): unsure at all n locations; Clone ID: LIB3828-015-Q1-K6-D11
ccatgctcgagttttatatcaccaaagggtgttggcagaatcaaaaaaggtccctgtgaggttaccaaccacgttgacagttgctggcgatgtgatcctgactggngaaaagaataggaagaagttggccaactgtgcccctggatttgctcgaggtactaccggtggaaaggatggtgagttttacgtggtcactgaccctattgataatgctgctgaccccaagcctggaactctgcgtcatgctgtcacccaaactggaccactttggatcactttcaaagggtccatgaccatcaagctgcaacaggagctcattgttacaagtgataagaccattgatgcgaggggagccaatgtggaaatttgtaatggtgctggtatcactatccaatttgtgaagaatatcattatccatggccttcaaatccatcacattattcccgccaagggtggcaagatcaaggatggtgaaaaccaccatgggttacggggtgacagcgacggagacggggtgtctattttcggatcaaccaatgtttggcttgaccatcttgcccttcaccattgcgccgatggccttatcgatgtcgttcaaggatcaactgccgttaccgtttctaactg

SEQ ID NO: 7156 - DNA, 635 bp, Gossypium hirsutum
  unsure (1)..(635): unsure at all n locations; Clone ID: LIB3828-015-Q1-K6-D12
gnaacgttcatcttcgtacgctcggntttgtatccttaccttaaaaaaaatactctcgttattgtgtaagtattgaagatcctcaaatcacaattaattctttcacttttattctcgattaggacggttctaacattaaggtttgttgtgcattcttgaagtgatattcgtgaatcctggatccgtactctatattttggaagcgtgtgttttgggcagccgattaagtaagtatcttactgaatcactaaaataagatatattcaccaaaatatcattattttgatacgatacgaaattttgtcaaaaactaaagatttaaggattgatctcatccctaggagttggattcaaagttgatatcatcggattttgcgaaatcagatgtagggatttattcatcttaaaatgtgtgaaattattgttaatttaataaattttctaatattaaatatttaattaagaaaaaaagaaacgtgaaatgtgcgaatacattatatattcaaatgaaatgataaatctgatagaaaggaggatttcaagtaagtgattttgaactttcgaatgtgataatatgaatgtgtttgtgtgattttctgttaaatgtggtgttatacgatttcttgacactcatg

SEQ ID NO: 7157 - DNA, 467 bp, Gossypium hirsutum
  Clone ID: LIB3828-015-Q1-K6-D7
ctttcgcggtctgattctctttctttagttgggttttctgatgcaaactggggattggattttgatgatcggaggtctacttcggggtactgtgtgttttttgggtctaaccctatttcctggtcatcgaagaaacaacaggtggtgtcacggtctacgactgaggctgaatatcgaagtcttgctgctgttacgagtgatgttatgtggttactttcgttattacgagaattgcaaattgggtctgcttctccaccaaatatctagtgtgatagctctagtgcagtcgcagttgctgctaatcctgtgttacactccaagtttaaacatgtggagttagatctattttttgttcgtgagaaggttgccgatggttcggttctggtccgagaagttcctgcgtccgatcaagttgctgatgtattaactaaaccactgccattttcgtgttttgctcggtttagaaa

SEQ ID NO: 7158 - DNA, 630 bp, Gossypium hirsutum
  unsure (1)..(630): unsure at all n locations; Clone ID: LIB3828-015-Q1-K6-D8
cggccgcgtggggaacgaaagaaaggcaaatattcccataatcgctcttttctgcttcaccatttttgtttcgtcctcactcaatttcgtctatggggctngaaaatatgagctacgtcgtcgtaggccatgtttactgtgacacttgccgtgttgagtttgagaccaaactcagcgaacccatcgctggagcagtagtgaaactggaatgcaggaatcgtacagacaatcaccttaccttccagagccaagaaatagtgactgacgaacgtggagactatcacattgtagtggaaggcgattatgaggaatcagactgcgacgtcgccttggtgaggagtcccaacccggattgcaatgatccctccgaaatgtggaggatatccagggtggttctcaccacacttgacggcgtcagcggtgaacttcggtttgccaacaatcttgggtttaagaagaaggttgctcttcctcagtgtactcaagttcttcaagagataggctattatgagcttagccaagaagctggagacattgccccttggtcagaactataatatgtattttcacttcaactttttctaaaagctcggcattagcctataataaaaattgaatcattattattct

SEQ ID NO: 7159 - DNA, 88 bp, Gossypium hirsutum
  unsure (1)..(88): unsure at all n locations; Clone ID: LIB3828-015-Q1-K6-D9
acttatttanaaaaaaaaaaaaaaaaaaaaaaaaaaaaaaaaaaaaaagggagaacaaatataaaggaaaaaaaaaaaaaaaaaacga

SEQ ID NO: 7160 - DNA, 592 bp, Gossypium hirsutum
  unsure (1)..(592): unsure at all n locations; Clone ID: LIB3828-015-Q1-K6-E10
gnaaaaccgnagtttctgctacacaaaagtttctcatacggttgttacaagcactgtcaagaagccttttggtgcaaagaagactgggaaaactggggggcttggtgcccggaagcttacttcaaagccaagtgaaatcctctatgaccagaagcccgaagaaccagttgcccctgttacttcctcaactaaaaacactgtgcccgttgcctcatcttttccatcgcgttttgagtatgtagaaaatggtcaatcttctgaatttaattctggtggcccacaagtggttagccacattgctcctccaaaatcatcaagcttctttgctgattttggaatggacagggggtttcagaagaattcaatctcaaattccccaaaagtgcaagttcaggaaacagatgaagctagaagaaagttcttgaatgcgaaatctatttcatcaggccaattttttggtgatcagacaagagcagcagacaatgacgctcaagtcactttgcagaaattctcaggatcaacagccatctccagtgctgatctatttggtaaagacgcagatcatgacctcaccgctagtgacctcatcaac

SEQ ID NO: 7161 - DNA, 624 bp, Gossypium hirsutum
  Clone ID: LIB3828-015-Q1-K6-E11
cggccgcgtgggcggcggtcgggatttcccgacatacgaatttgttccgccagaaggacaaaaaacaccatcaacgaagtgatcaatttcccattcttgaaggaaacacacgatcccgttgagaacaatttatacccttttgttttcctttcaactgacggcaacctcttcatttttgccaataatcgttcggttcttttgaacactcagacccacacgattatccacgagttcccaatgctacctggcggtgctcgtaattatccgtcatcgggatgcgcttctctccttccaatcatgcttaaacctaatgaagataggaaatcaatccccgccgaggttttggtgtgcggtggaacgccgcatgatgcatatacaaaggccgatttgcaacgccctaaggtgtttttgccagggaacaccgattgtgctcgcattgacatcaccaaaaggaatggcaagtggaagatccaaaacatgccctcagctcgtttattgggagacatggtggtgcttccgacgggagatgtgttacttgtcaacggtgccaagaccggttcagccggttgggatgacgccagggacccgaatttacacccagttttgtacaaattccaaactgat

SEQ ID NO: 7162 - DNA, 634 bp, Gossypium hirsutum
  unsure (1)..(634): unsure at all n locations; Clone ID: LIB3828-015-Q1-K6-E12
gtcactttgtcttgatccctttcatggctcaagnacacttgatccccatggtagatattggtcgactgttagcgcagcgtgacgtgactgttactatagttacaacaccttacaatgcaggcagagtccaaaatcagtggcccgggccattgaatcagggctccccatacgtttactgcaactccagtttcctggcaaagaagtaggactgccagacggggttgagaatatagacatgttgcattcaatggaggacttgatcaaattcgtcagtgccgcaaacaagatggaagaagcaatgctgaaattatttgagaagctaacaccacgccccaattgtattatttcagacataaacctgttttacacccgcaaaattgctaccaagttccaagttccaagggtatccttccacggattttgttgcttctgtcttctttgtttgcggaatatacagtcctcaaagataaatgagactgtaacctctgattctgaatacttcacggtgcctggtttgaccgacaaggtggaatttactagagtccagttgccacttgactatgatggatcctggaaggaaatttttgaaccgatgtgggaagctgaccgagcatcatacggagttgtcataaat

SEQ ID NO: 7163 - DNA, 603 bp, Gossypium hirsutum
  unsure (1)..(603): unsure at all n locations; Clone ID: LIB3828-015-Q1-K6-E7
ctttctctctctatctttcaattttcccganaaaatctcgcattttctcacccgagagaaagaagccggaaaatcgcatgatgaggtagtttttttaagttttccggagtgaaaagcaactggaaagtaagtttatcctccgtagattactcgttgatcggcttagacaaagtttaaaacagtatctttcttgaatgctacgatactgaaattcgctattagtttgtggaaattttgagatcagctagattagttgggttttgaaaaatgagttggaatccgaacatggaagttcagtacatcaacagtagctacctttataacagtgctggcagctttatggaatattttgaaggtcttacatatcaacatgtcaatttcatttttgacggtgcttcccatcttcaggagagtgcgtacccatcgatgactacaagcttctacaagtttggattatctgattttggcaataatatttcatattatgatcatagtcctagttatgatgggagtaaccatgaaccgtgcgctgaaggatatagaaaggcatcagtgaattccccatcatgagcaatgaaaagactgtagcaatgaatgtggaat

SEQ ID NO: 7164 - DNA, 609 bp, Gossypium hirsutum
  Clone ID: LIB3828-015-Q1-K6-E8
aaaaaaaggcgtctgtaataaaatctgcaatcttaattctgtcggtgtttttatctgtaagcttcagttcgggtgttaggttgctccaggaacagcccaatgatgacctcaaaaacatggacgctattcctcccattgatgcactcaaccctaccgagttcaatggacccggtgttggcattcacgaagatcatgttgtcccaaaagttccgaaattggtactcttggttttggttttgaaggtggtcctgaaaaatgttgttcttctggatgttccggtaattgtaatcctggtggtttcgttctaccatttcctcaaattccagaaatcccaagaattccacagatcccacagatcccacaaatcccacaaattccactaatcccacagatcccacaagtcccacaaatcccactaatgccaggacagtcgggatgtgagagtggggagtgttgccgtcagggttgcggtgggacttgtgctgagtgtggtcagcccaggtgcgcatcaggatgttgccaggctgaaactgtaaagagcaaagggatagaagaagttatggacagtgaacccagtccaccaaagtagggagatgataccatattaag

SEQ ID NO: 7165 - DNA, 627 bp, Gossypium hirsutum
  Clone ID: LIB3828-015-Q1-K6-E9
cgatctcaacctccctcagcccgagaaaaacccaagataagttcctgaaaacatgccatcgcttctactgcaaaagcaaatgcatcaaaattgatttttatcctcagaccattcggagcgacccatctactcgtatgaaaccgtctcgctgggcactccctgaacaaatgctccctcgtttccactccattctgacaccttcggcaagttgcgggttccaacaatcttctataatgtagattatagaaagtaggcaaatagttacaagaaaaccttcacactgtgtttggttcgccgtattacccaatccattacgccccgattacgtgtgtattacattacgcccctattccggcgtttggttcgctgtaataggtattacgcgcgtaatcggttacgcccctaatccccaaattcccgtgttttccaatcccttcccttttcgctgtattagctattacttccggcctccctccccatctccctgttttaccctccctccctacccgaccctctcctcttccgtgcatgaacctcttccctcaccgttaaattccttttatattttagagccccccacaaagtagagtcgccgtcctttctcttcatctggattgaacagctacg

SEQ ID NO: 7166 - DNA, 168 bp, Gossypium hirsutum
  Clone ID: LIB3828-015-Q1-K6-F10
cgcccttttttttttttttttaactctgcctaaacgaagcgggcgttttatgacgaaaccaagatttatccaatggttttgaacatttcaagacttttttattttattttattttcctttctttgaattgaagagagggcacagccctaaaaagacaaactacttctc

SEQ ID NO: 7167 - DNA, 626 bp, Gossypium hirsutum
  unsure (1)..(626): unsure at all n locations; Clone ID: LIB3828-015-Q1-K6-F11
ccccgcgtccgctttatctgaggctaataaacaataaagaaaaaaaatgaaggcctcagtttcaaaatggcttcanatgaggaaaaaattgaaggcctcagtttcaaaatggcttcaatgaggctccttgcaataattgccattctggttcagggcttagttaatggtgattctcacgagttgcctagtttcgatccggaactagccgtagccaaagtttgggaagttgctgaaggcaaggtcggccctgatgttaaagtttttaatgtggtggatttcggtgccaagcccgatggaaccaccattagcaccatcaattttattagggcattcaaagaagcttgcaatcacaatggccgtgcaatgctggtgatccctgagggaaatttcttattaggatcgatgttattgtccggaccttgcacttttcaacctccgttgatggttcaattcaacggaaaccttttgccacaaggttcaacgtccacggccgaaaatgcagactggatcacattcatgaactttaatggcttgttcataagtggaaaaggtaccatcaatggcttangcgagaaggaggcatggaaagctgtatgcgacggttgccgtcgaaagctgctaatttg

SEQ ID NO: 7168 - DNA, 616 bp, Gossypium hirsutum
  unsure (1)..(616): unsure at all n locations; Clone ID: LIB3828-015-Q1-K6-F12
ctgctttgaaggctgagagagaaagacanagctaaatacaggngggaaagatggattctttttcaacaggttcaagcggaacaggatctccccaaatttcaacagatgaattcatggaccagatgaaggctcaacttgcccaggcttatgcccaagagttcctcgagactgtgagggggaagtgctttgaaaagtgtatctcaaagccaggatcaagtcttagtggaagtgaaagtagttgcatctctagatgtgtggatcgttacatcgaggccaccggtattgttggcagagctcttttcacatcgcgctgaaattctgaaacccggactgttgttttcgaagaatatgttagctagctgctaaagtttggaaacggaaatctcaaattcaaggacgagtgagatttgcaacattgttttttgttattacgttttctaaatttgacttgggagattataactttgcataaaatatttctgaatttgtattttcccagaaacctccgtgagatgttacatggttaatgttctttgcttattatatgttccttaagttgttccttttccttatcaatctcttgttttcgtcctgcgaattgtgattattggatctg

SEQ ID NO: 7169 - DNA, 589 bp, Gossypium hirsutum
  unsure (1)..(589): unsure at all n locations; Clone ID: LIB3828-015-Q1-K6-F7
cggnnacgcgtgggcagnaaagnataaccaaccgaatcttccacacatatcagttggtcgggagaattggggagattccaatatggcagatggcagccctaggactgatacgtcaacagacgacactgaagagaagaatcaaggtttggaagaggtcaaacaaatgctatcgtggcttccgattctagtgacagatcaaaagataaaacagaccagaagacattgcgtaggctagctcaaaatcgggaggctgcaagaaaaagccggttaaggaagaaggcgtatgtgcaacagctagagagtagccgactgaaactgactcaacttgagcaagaactgcagcgagctcgtcaacagggtatattcatttcaagcacgggagatcaatctcattcgatgagtggaaatggtgccttggcatttgacgttgagtattcacggtggctagaggagcacaataagcatataaacgagttgagggctgcagtcaattcacatgctggtgacgccgaacttcgcactattgtcgacagcgttacagctcattttgatgacattttgccgttgaaaggattgctgtaaaagctga

SEQ ID NO: 7170 - DNA, 638 bp, Gossypium hirsutum
  unsure (1)..(638): unsure at all n locations; Clone ID: LIB3828-015-Q1-K6-F8
cggccgcgtgggctcgctgccgttgttcccggaatagcatcagaagcttttgtgacttctccctcgctcttgttgtcccnatttactgaaatcgacaccaatgcaggtatcacaccttcttgtaggaccatttgactgcatttctcatctccattacaaagaactagaaggcacgaaacagcttgctcttgctcaatcaattcacctgcatcaaggactgttgccagaccacttatgacaccacaggctgataccatctcgtctcttcctgctggacttgaagctaaatttatcaaaactgcaatggatttctccgtccaggtatggtcgcccaagaccaggagtgactggagggcactaactatgccagctgcaagaagactcggaatgttggactgcacggtagaaaggttataaagagtatgaagggcatcaagcttggattgttgatcggtttcactgcccagtagccggactaagaatggcacagccttgcttgagccaatgacagacttggcttgctcgaggcaagagagattaagatagagagcagctcctggttcatgagcatcagagttggaaatcatattctccagcaatttaatcactccagatgctaacatcgattccttgttcct

SEQ ID NO: 7171 - DNA, 620 bp, Gossypium hirsutum
  Clone ID: LIB3828-015-Q1-K6-F9
gttttcgagtctcgaccggatgcctttgttcagatagcttcactagccattcgaactggtaacgggctacttcttaaaggtggcaaagaagctaggcgatcaaatgcaatcctacacaagatcattacttctgccatcccagacagcgttggagacaaacttatcggactcgtcgcttcaagagaggatatcccagatttgcttaagcttgatgatgtgatagatcttgtgatcccaagaggtagcaatagtcttgtttctcaaattaataattcaacaaaaaaaaaattgttcgggacgcaaagatagactacccagcagcatgtaacacaatggaaacacttctattacaccaggatttgtcaaataatgatttgctcaaggagcttcttgcggaactccgacgtgaaggggttaccctttatggtggaccaagagcaagttccttgttaaaccttcccagggcacaatcgttacattgtgagtacagttcactggcgtgcacagttgaattcgtggatgatgtgggggctgctattgaccatatacatcagcatcgaagttctcacaccgactgtattgtcactgaagatcgcgaagttgctgaaatgtttttgcac

SEQ ID NO: 7172 - DNA, 617 bp, Gossypium hirsutum
  unsure (1)..(617): unsure at all n locations; Clone ID: LIB3828-015-Q1-K6-G10
caacaatatcgtggtcaatgtgttcaataaccttgatgagccattccttgtaacatgggacggcgtgcagcataggaagaactcttggcaagatggtgttctgggaaccaactgtcctatcccccctggngaagaattacacctataaattccaggtgaaggatcagattggcagctacatgtactatccggtgacggctatgcacaaggcggttggtggtttcggtggcctccgtgttaacagccgtctactcatccctgttccctacgctgatccggctgatgactatactctcttagtgggagactttttcaacaagggacacaccagcctcaagaagattcttgatagcggtcgcaaccttgggagatgtgacggtgtccaccttaatgggaaagttgcgaaaggtgatgggaaggatgaacctctgtttacgatggaggcaggcaaaacgtacaagtacaggatttgcaatacgggtatcaagacatctctgaacgtcaggttccagggccacaccatgaaattggttgagaatggaggttcccacacaatgcagaatgactatgactcccttgatgtgcatgttggacagtgcttcagtgtgcttgttact

SEQ ID NO: 7173 - DNA, 633 bp, Gossypium hirsutum
  Clone ID: LIB3828-015-Q1-K6-G12
ctcgttttccgaccacggccgcttccgacaccttggggtggcttaaaagtacagcttccacttccaatgtgcttacaatttcccctcctgtaaatatgatatcttttgcgcggtccttcaattgtatgacaccattagggtgaatgacaccaaggtccttggtcctataccatccatctttaaatgcttcttctgttgcttttggatctttaaggtaccctaacatcaatgtgttccctttaaacatgacttctccgatcgtcttcccgtcatgacgtacgcttgccatcgtttccggttccttcacgtcgacattttcgaccacaatgttatcctttttatgttcattggttgatctccatggcttaacaatagcaggaccaagtacttcggtcattccatatgcatggctaacagtatatcccaatccttcaactttcatcactcgggacatcggtaacacgccggcaacgataagtcgaaccttaaaaggaaccgtaagcgacgcatcggcgatcaagttcaaaatggccggtccgccgcacaagtgagtcacattgtgaagaacaatggagtcgaatatgaactttgctgatacagttcttaagcagatgttggtgccaccgacagccg

SEQ ID NO: 7174 - DNA, 588 bp, Gossypium hirsutum
  Clone ID: LIB3828-015-Q1-K6-G7
gaatggacccggtgttggcattcacgaagacatgttgtcccaaaggtgctgaaattggtactcttggttttggttttgaaggtggtcctgataaatgttgttcttctggatgttccggtaattgtaatcctggtggtttcgttctaccatttcctcaaattccagaaatcccaagaattccagaaatcccacaaatcccacagatcccacaaatcccacaaattccactaatcccacagatcccacaagtcccacagatcccacaagtcccaaaaatcccactaatgccaggacagtcgggatgtgagagtggagagtgttgccgtcagggttgtggtgggacttgtgctgagtgtggtcagcccaggtgcgcatcaggatgttgccaggctgaaactgtaaagagcaaagggatagaagaggttatggacagtgaacccagtccaccaaagtagagagatgataccatattaagatgaaataacgaggaagagttggttgtcgtcttattaattatacaaaataagaagtaatgatgttgcagaaaggtttgctataaaatcctcttggacaaaaagagtattatga

SEQ ID NO: 7175 - DNA, 611 bp, Gossypium hirsutum
  unsure (1)..(611): unsure at all n locations; Clone ID: LIB3828-015-Q1-K6-G8
caattttgctgtcaatttacttctacaactcacctgattttctaacaggagttcgatcttcgatgtgctatcccacttagattttatcatgcagctcttaattttgagatttgtagtggtgttatttttccatgggggagtgggttcttaaacaggactacatccataccagaaagattcttcttaggtggcaatctatctccagtttgtgctttaggggggccaaaagcatcatggggatttaagacaagggcaacgagttcctatgaacctaaaagtcagattgatgatgagatcgctgatgttgctagtagggattctcttggaggaaactttactgttactgctctagcagacctttcatttgaccttccaactaggtggtttagagaaaggggaatccatgcacatgtctttgcttatgctggaaatgttgccatgttaacagagaatgagttccgaagtttctccatgcagaagttcataggctcattaagaagttcagctggaattggcattgtcattcctacaaaccgattttgcatggagcttaattattgctacantactgaaaaaatttgctaatgaccatgcaaaggctggcttttggc

SEQ ID NO: 7176 - DNA, 637 bp, Gossypium hirsutum
  unsure (1)..(637): unsure at all n locations; Clone ID: LIB3828-015-Q1-K6-G9
ngaatttttaatttttttctgggaatgtgcagttcaagataagatagctttacacgtttcccaattcagcaacccatttctgcaaccaaaaacacaagacactccatcaatttataaactcgaagcaatttgaagaaaccccatcactcatttcacctccaatcctcttaaaagcagggcattcaatatgcaggagaccaataattctcgagtcaaccaacgaattgcaacaatctcggctcatctcaacccacccagcttttcccacatggagggtagttcgggtttgggtcgagctgactgccgagccaaaggtgggttaactggtttcaaggtggcgattttgggagcggcaggtgggatagggcaaccgttatcattgttgatgaagatgaatcctttggtttctgttcttcatctttatgatgtggttaacactcctggtgttactgctgatattagccacatggatactggagctgtggtacgtggatttctggggcaacagcaattggaggaggctctaacaggaatggaccttgtaattattccagctggagttcctaggaaacctggaatgacaagggatgatcttttcaacatcaatgctggaattgttaagacactgtgcgaggga

SEQ ID NO: 7177 - DNA, 606 bp, Gossypium hirsutum
  Clone ID: LIB3828-015-Q1-K6-H10
aaataaagcctaaacatgagaattccatttctctctctctttcccgcactttttctgactttctttctcactgcacactcacccccttcttcaatatacgaccacttgaaacacaacggcctccctataggtctcctccctaaggggatttctgatttctcaattgaccccaacaccaaccgtttccacgtcaacctaacccaaccctgcaactccgaattcgagatccagctccattacgatttcaacatctccggtgtcttgtctttcggcaagatcgctaatttgtctggtgtctcccaacaggaactcttcttatggtttcctgtcattaacattcgcgtcgatgatccaacctccggtttgatcaacttcgatgtcggcgttgttgataagcagttctccttgtccttgttcgagatcccccgtgattgcaccgcttttgatcctaagggttccctctccatttctcagaaaccatctgagttacttggtactgaaattgttgaggagcacatgctgaaggccatatcatagactctgggagcagagatattatattaaagtttcaaaggtgttgatacacgtgttttttggaatgatgag

SEQ ID NO: 7178 - DNA, 634 bp, Gossypium hirsutum
  unsure (1)..(634): unsure at all n locations; Clone ID: LIB3828-015-Q1-K6-H11
gaaatccaagcaaaatatcatgggcaagggtcctggtctctacacnntgaaatcggaaagaaagctagagatcttctttacaaggattatcagactgaccaaaagttcactttgaccactagctctcccactggtgtttcaattacctctgccggaacgaagaaggtgatcttttcttggctgatgttaatacccagctgaagtctaggaatgttacaactgatatcaaagtggacaccagctccaatctatttaccaccataacagttgatgaacctgcacccgggctaaaggcaatctttggcttcagagtccctgatcagaggtctggcaagattgaactccagtatttgcatgagtatgctgggattagctcaagcattggattgactgccaacccgattgttaacttctcgggtgtgcttggaacaaatgttcttgcactaggtaccgatatctcattcgacacgaagactgggaatttcaccaaatgcaacgcgggattcagcttcaccaatgcagacctcattgcttctttggctctgaatgaaaagggtgattcagttaacgcatcttactaccatattgtgaatccatcgaccaacactgttgttggtgctgaggtgacccatag

SEQ ID NO: 7179 - DNA, 631 bp, Gossypium hirsutum
  Clone ID: LIB3828-015-Q1-K6-H12
gcgaattgactgctgatccgactactagggtgtttttacagcagccggattttgttaaggcgatgcaagagattcaaagaaatcctagcaaattgaatgagtatttgcaagatcagagggttatgcaagctttgggtgttttgttgaatgttaagtttaaggcacatggtggtggcgatagatatggagattccagaggcggattcacctccagctccgtctccttcacgaccagctaaggaggaggtgaagaagcctgagcccgagcctgaaccagaaccgatggaaattacggaagaagagaaggagaaaaaggagaagaaagagaaagctttaaaggagaaggaggctggcaatgctgcatataagaagaaggattttgagacggctattaagcattacacgacagcaatggagcttgatgaaggagatatttcgtacatcactaatcgggctgctgtttatttggaaatgggcaagtacgaggattgcattaaggattgtgacaaggctgttgaaagaggtagagagctcagatcagactataaaatgatagcaagagctttgactaggaagggaactgctttggcgaagatggcaaaatgctcgaaagatatgaaccagctattgg

SEQ ID NO: 7180 - DNA, 455 bp, Gossypium hirsutum
  Clone ID: LIB3828-015-Q1-K6-H7
ttgtctccctctttaatttcttttctttcttttgccttctttatatctctttcattttttcttttgctcgtttcgttgcatattttttttacaggttgtttattggagaaatgatggctgataggcaccaacatccttctgtcatgctaaagattgctggacaactccatcttggttccagcctttctcaagatgttcgatatcgctatggaggattccaaaggcctgctgtacatcagaagcgttttgcatctgcaagttgcaatgcaacactacagcatcccatgactcagctggcatgccacccagtaagttataatctctcattgtttggatcgagttcatcacctgttattgcccaggctccatcagagaaaggtatttccggtttcgttatcgatttcctcatgggtggagtttctgctgctgtgtccaaaactgctgctgctcctatt

SEQ ID NO: 7181 - DNA, 358 bp, Gossypium hirsutum
  unsure (1)..(358): unsure at all n locations; Clone ID: LIB3828-015-Q1-K6-H8
ngactactacactcaataccttgacagttaagaagatccgagtaggtctcgtatgtccttctcggatcttcttaactgtcaaggtatagagctactacactcaatatagcatcaaagaaactgcaatggcataaatcatagactttcctcatgtcattgtcaacaacatgattagaatgattagtgtctggtgggcttagcttgatgcttgtttttgtcatgctgtctaaattgtcagaacaatatttgatcagtagatagacctttcctctgtattttggcatgttacacataaataaattaataaatgcggccaaacaaatattgttcagaaaaaaaaaattttaaagaatatgtt

SEQ ID NO: 7182 - DNA, 625 bp, Gossypium hirsutum
  Clone ID: LIB3828-015-Q1-K6-H9
gcaatcttaattctgtcggtgtttttatctgtacgcttcagttcgggtgttaggttgctccaggaacagcccaatgatgaccccaaaaacatggacgctattcctcccattgatgcactcaaccctaccgagttgaatggacccggtgttggcattcacgaagatcatgttgtcccaaaagtgctgaaattggtactcttggttttggttttgaaggtggtcctgataaatgttgttcttctggatgttccggtaattgtaatcctggtggtttcgttctaccatttcctcaaattccagaaatcccaagaattccagaaatcccacaaatcccacagatcccacaaatcccacaaattccactaatcccacagatcccacaagtcccacagatcccacaagtcccaaaaatcccactaatgccaggacagtcgggatgtgagagtggagagtgttgccgtcagggttgtggtgggacttgtgctgagtgtgatcagcccaggtgcgcatcaggatgttgccaggctgaaactgtaaagagcaaagggatagaagaggttatggacagtgaacccagtccaccaaagtagagagatgataccatattaagatgaaataacgagga

SEQ ID NO: 7183 - DNA, 563 bp, Gossypium hirsutum
  Clone ID: LIB3828-015-Q1-N6-A10
gagaaatgacaaagaaatttgattagcaataaggagaaacaaacaagtgagtgagttatgaagggggacccttagcttggcagttggcagcaaaaaaaaaaatctaaggggggtcccctctcctttcctcccctgttgaaaaactgtagttttggtcgccgacactatatcaggcacctgcactacatacactacatttcatttatctgacaaatacccattgcatgttcttcccaatttatcttcaaatgccgacttcttaatttggcgttgccttcgcttttagtctgctattttcaacacaaagatgtttttaaactctcaaccgcatctctgattatctgctccatgggaataaattccaaccccaagtccatcagctttttacctccattcttagcccttaacagcccaggttgagtatcccttggcaaactgggaatattatattcagggtaaagttcagcaaccttggccacgaagtcaccatagtgagatagagcttcaacgcacatgtgccttcctgttgctgatgtgttctcatataccaaaatgtgtgctaa

SEQ ID NO: 7184 - DNA, 579 bp, Gossypium hirsutum
  Clone ID: LIB3828-015-Q1-N6-A11
accgtgcactttattcatagaaaataccaaaaactagtacattatccgaggtattcaaccctgaaaacacacatccaaaatcaacaagaaaatacatcacagtagcaaacggataacggtacatccctcaatactcctcctcatccccttcgtctccttcaccagactcagcgccaacttcttcataatctttttccagggcagcgagatcttcacgtgcctcggaaaactctccttcctccatgccctcaccaacataccagtgcacaaatgcacgcttggcatacatgagatcaaatttatgatcaatgcgggaaaacacttccgcaacgctggttgagttggagatcatgcagacagctctctgaaccttggcaaggtcccctcctggaacaacagttggtggctggtagttgataccgcacttgaatccaggggcaccaatccacaaattggattgtgcgtttggtcttgatggtggccacagccgcattcacatctttgggcacaacatctcctcggtacataaggcagcaagccatgtacttcccatggcgtgggtcacatttggccatcatt

SEQ ID NO: 7185 - DNA, 443 bp, Gossypium hirsutum
  Clone ID: LIB3828-015-Q1-N6-A12
aatccttaacagttgaagtttgaattgatggattcataaccatcatcaacataaactcataaaaacattcagcaaattctaagacataaatcttcttttcgaacacaaatatttgactaagaaacttcttacagacatcccccctaagaggaactaaaaacactctttcatggtgttgtgcaacttctagagcgatccatcatccatgtttttctcaaatactggtgttctgaatcatgcaaatatgctcaagggacctctcttatttggcccttctagtctgtttttggcagttcgaatccctgtgagccatgaccttccatcggtatcattgcgtgaatccatccttatgttcaatcttttgaccgtcttcataaaagtactgaatggttcatctccagtttgtttgacagcacctgttgcatctcgatacaagacatggc

SEQ ID NO: 7186 - DNA, 582 bp, Gossypium hirsutum
  unsure (1)..(582): unsure at all n locations; Clone ID: LIB3828-015-Q1-N6-A2
ttttnttttatataacaaagaaaatcatatatattagcatgcacatgcattaattacatatggctacaaaacaagattcaaggaactttaggatattgcaaatcgaatattgttttgagctatttattcttcataattactctttttgtccaagaggattttatagcaaacccttctgcaacatcattacttcttattttgtataattaataagacgacaaccaactcttcctcgttatttcatcttaatatggtatcatctctctactttggtggactgggttcactgtccataacctcttctatccctttgctctttacagtttcagcctggcaacatcctgatgcgcacctgggctgaccacactcagcacaagtcccaccacaaccctgacggcaacactctccactctcacatcccgactgtcctggcattagtgggatttttgggacttgtgggatctgtgggacttgtgggatctgtgggattagtggaatttgtgggatttgtgggatctgtgggatttgtgggatttctggaattcttgggatttctggaatttgaggaaatggtagaacgaa

SEQ ID NO: 7187 - DNA, 503 bp, Gossypium hirsutum
  Clone ID: LIB3828-015-Q1-N6-A3
ggggaggggaaccatctggtaatttctccgttagaagtgcctacaaactattacaatgggctacactggttcctagtaataataatttacaggccaagattaaaactttttacagaaaactatggaacctacatgttccttcaaaactaaaaattacagtctggaaaatttcctggaactacgtccctacttttgctaatattaaaataaaacgagttgctgttgaaactcaatgccccaggtgtcattggaatgaaaaaaacagtatttaaatttttcggcaatgtcatgggctttcaacgggggacaagcgaacagtgtcgtcttttctgctgtggattatggatcatctaaacaagtagaaacaagctcctttatgaaaatagaaacacaacaagctcagatatttccaatcacattaatagttatgtttcggagttaaaaggtttagatgagaaaaacttagctttgattctgatagagatctcaaacatgatgaacaa

SEQ ID NO: 7188 - DNA, 540 bp, Gossypium hirsutum
  Clone ID: LIB3828-015-Q1-N6-A4
aagggaaacatgtaatttttattcatataatatcattacataggataaaacacagataaaatagtttaggtttatttatgaggccttaacagggccagacatcacaatcattcacataaaatccagaaacctcattttcataggagagcttaaaaaccaccccgaagacccaagacaagggggagaggggattccttctgaatattgtaatcagccaaagtccttccatcttccaattgtttcccagcgaaaatcaacctttgctgatctgggggaattccttctttgtcctgaatcttcgccttaacattggcgatcgtatcggaactctccacctccaaagttatggttttcccagtcaacgtcttgacgaaaatctgcatcccaccacgaagcctcaataccaaatggagggtggactccttctggatgttgtaatcggccaaggggcgaccgtcctcgagttgtttcccggcaaatatgaacctttgctggtctggtgggatgccttccttgtcttggatctttgccttgacgttg

SEQ ID NO: 7189 - DNA, 573 bp, Gossypium hirsutum
  Clone ID: LIB3828-015-Q1-N6-A5
ggtgtctactgaaatttagctcaattaccaacttgaatttgtacatatttctctccataagccgctcatcaaaacttcaacgacccataaaaaccaaaactagtaggaaaagatgatttcccacgaagattaattcccatcatctgcagctcgtagcgttttacgctacacctaagccttatttttgttgaccaagaaaactcctttacttacaagacaccatcatttacatagagatcaggaaccctaccaaacatatttacacaatgacaaagggttcctgtcattttttgctactctgttttaaacgtgatatatatttaagcacctttttttggctttatctatttactgttttcaggattgcaatggggtctacgccagtgcagagatgctacaattctgacgatccctgtcgaggcaatcaaacccctccactctcaccgctggtttgctaccaaaattcgccctaacatagcttcctttcctcgatgacgacgagggagaagatgagtacaagcccgatgaaggtggcaccggtgacaatgggctcatattcttctgctccccaaa

SEQ ID NO: 7190 - DNA, 344 bp, Gossypium hirsutum
  Clone ID: LIB3828-015-Q1-N6-A7
gccttcaataagagttgaatatattattaatattataaaagtaggaaaaagttgttcaaattaatcaataatcaacaacattatttcaaataataatgatataaaagaatattaatggcgatggttttggaagtttaaactccaggggtcatatcgggatcaaaaggaacgccagtttgtgccagccattcgtcagattgcaaaaatacccgaggagtccatttcatggcttcatccatatcgattttcttgatagctctccatgtgaccctgccctcggggttggcaccgggtcccctattttggaactcggcaaagtaaccagtgtccagtcctacggggcc

SEQ ID NO: 7191 - DNA, 589 bp, Gossypium hirsutum
  Clone ID: LIB3828-015-Q1-N6-A8
aataaaaacaaacatttttttattggtagcatgtttcgccatcttggaaagtagtagctacttgcatttaattatgtataaagatgggcatagctaggaatagggaaggggctgcaaatgctagaaccttagacatattaaatgtcatccatacacgaactaactatattaagcccctagttcttagcagctatgcagcggctcaagtattatttgaattccatgttgtggttgaatggtgataatagctattggagagtggacataggtaggggaaatggtaatggtgtaacgttgtagaatcatggagagagcaatcttggtttctatggttgcaagggtcataccaacacaagatcgaggtcccaatccaaaggggaaaaatgcagctgcggtgtaattggtagctttggcaatcccttcggcgaatctctccggtttaaaaagatgcacatcatccccccacaagtgagggtcacggtggggtccaatatttagagacagaatatctatatcagcaggcaagataaactttcccaattgtccttctcttgcgacagttctgggcaggccatgtgaaggaccatac

SEQ ID NO: 7192 - DNA, 495 bp, Gossypium hirsutum
  Clone ID: LIB3828-015-Q1-N6-A9
gcaaaattaaccataatctattacaaagtgctcaaagaaattccaagagagtttagtttagattcaagactatttggttcaactaataaaatgtaaaatgaaaaggaaagagggacagcagttggcccccaactgctgcattctaacattcattttctatgagaatctgcaactacgccaactggtcatatcccccaccaatttctacgagcctgcaattcctaagcggagccaacgatgatgttgttaataggaataaagatgagcttgacgaagaatccgacgaatcccatcactacgaaaccgatcgctgtacggaaagccaccttcgtgaactctttacgatcaggcttgtggcaacgcttgacgaggcggacgctgtccttggcgaagtctctcaaaggatctaccacgttgtcaagggcgtccatctctctctcccacacaaccaaaatcgtatgttaagatgttagagagagatttcgaagatttcga

SEQ ID NO: 7193 - DNA, 610 bp, Gossypium hirsutum
  Clone ID: LIB3828-015-Q1-N6-B1
gaatataaacaaatggtccaaagcattttatttctttaaatccatttggaactcaagcttttctcatcctctctctccccatattgtgtatttaaccagccttggatacagatttataagcttatttaaattaactgctgaaaggtggaggccttggcatgccttgcacgatgccgcaagtcaatacaccttccagcaagttgtactcatccttgagggatcggttaggggaaataacactagcataaagctgttgcccaaggtaatgcctgtcccatatctccgacctcaggttccacatcccgcagttgtcgaatgtcaataggattgctgaccaggagttggggaatacctgtatggtgtgtctgctcacggcgtcgagaagattgtagttcatcctcttctcagggctccatttcccaatgtccatgcccacggcaaagaatgagtagccagacaagtggtaagactgaatggcggtctcgtgattctcgaagatgatttccacaaagcttctgtgtgtcatgttgaggacaataggtgccaaagttaccctagtgttgtcacttggtggctcatcgggaatggtatcatacttgaaaaccttgtc

SEQ ID NO: 7194 - DNA, 557 bp, Gossypium hirsutum
  Clone ID: LIB3828-015-Q1-N6-B10
acagaactaatttttctttcctcttttcttcaatttcaaatgataaaataaataaaccataagctatttgttgaattgtgtcccctcaaccaccagttaaaacccagagactgaactatttacccccacatccttacattgcagacataatataaacctattcccaccctctctctctcaatcttgtttttataccttagaaaatcctatgttaaaaacccaggtagaacttgggattggatccgttgtaacttattccaatccactgtcactgatgataacaggcacatcgtattttcatctcaatatataaagcaaaaaaataaacaaactgggtaaaaaagggatagccacttcacccatgcattcaaattttatcaagtggattaaacattttgacgagtccaagctgctccgttggaatccattgagctcgatccggataaggcatcaccatgagtcccattttgagagtttaatggacttaatgactgcattagctgggaaacttttgcggatggtttcaatttcatgtactgctcgaaaaagcactaatc

SEQ ID NO: 7195 - DNA, 472 bp, Gossypium hirsutum
  Clone ID: LIB3828-015-Q1-N6-B11
actgtaaatacataacaaaactctctattcacgagaaatgatacattttaattcacagttggaaagaaaaaaaaattgttacatcagcagtcaagaggagtaatctcatcttcacaagcacaacaggatatgggggaaacccaaaagcgaggtacgagttagaatgataaattaccaataagtgaataaatgggatatgattatcccgatcctgtttacggcaaccctgcatcatctcattatcttttgtcgatcgaataactgaaaatgatgcactgctgcaaatctttttctgcattttaacctcccacttaataagagttctcattctctttgttgatcgaataacagaaaaagatgcactgctgcaaatctttttctacatttgaaacctcccacttaataagataactcattacctcgaaatgagatgtacttctttacccagatggcaatgtcctcagcacacgct

SEQ ID NO: 7196 - DNA, 602 bp, Gossypium hirsutum
  Clone ID: LIB3828-015-Q1-N6-B12
gaatataaacaaatggtccaaagcattttatttctttaaatccatttggaactcaagcttttctcatcctctctctccccatattgtgtatttataccagccttggatacagatttataagcttatttaaattaactgctgaaaggtggaggccttggcatgccttgcacgatgccgcaagtcaatacaccttccagcaagttgtactcatccttgagggatcggttaggggaaataacactagcataaagctgttgcccaaggtaatgcctgtcccatatctccgacctcaggttccacatcccgcagttgtcgaatgtcaataggattgctgaccaggagttggggaatacctgtatggtgtgtctgctcacggcgtcgagaagattgtagttcatcctcttctcagggctccatttcccaatgtccatgcccacggcaaagaatgagtagccagacaagtggtaagactgaatggcggtctcgtgattctcgaagatgatttccacaaagcttctgtgtgtcatgttgaggacaataggtgccaaagttaccctagtgttgtcacttggtggctcatcgggaatggtatcatacttgaa

SEQ ID NO: 7197 - DNA, 600 bp, Gossypium hirsutum
  Clone ID: LIB3828-015-Q1-N6-B2
aaatggaatgtttattctgacagtcaaatgtaatagtatttttcaatttacaacataaagaaggcagaaccagattctgatgatgatacaagatacaaatgaagcgaatatgatttgatataatatggccgacgcgtataacttgcaaaccagttttatgtacagaagaagtggcatctgttgtgttctgccccggtttagtcactttcatagtcctcatcatctccaaagctgaaaacagatgcatcagccgccattgccctgaattcactttctgagctagacacttgaacacctgcagcaggaggagctgcagcagcagcagcagcagcagcttttcttggctcactagtaccatgcatcggttgagagcttgcacttcctaaagaaacttgcccggtagaatgcaccaaacttgcaacttgatctgatttgtcatttgtttcaggtttggaggctgctgaattaagagctattccctctgcagatgttgccttattctgcctgctcttcaatgaaccagattcttctgcctcaccgtctgagaacacataatctttgtcattatgtcctggatctttattttcatttgctggggct

SEQ ID NO: 7198 - DNA, 605 bp, Gossypium hirsutum
  Clone ID: LIB3828-015-Q1-N6-B3
gatacagaacattattgattatgtatgcatttaaatactcctactcggtttgatatccatttagtgtattacaccccatgaagaacagttttattccccttagggaggcggcaaaatcacattatctacaatgcagatagtaactagctgatttcaagtctccaattacagaaatttcagcttcactcttctttacaaccacaaaatatttcgaaatttccagatcattcttctgagacaataccctttgcgttacatgaaatgatttgatggacataagcacgagatgactatataaaacttcaaccatacaacgaggaaactaatccactttaagctgagtctactccttcaatctgctgccgagcaaggtatctttcccttcgctctttccattcatctatcacaagtccttccccaattatccttggacctgcatcctccggaggctttttgcgtgcctcaactgcagcatcggcatcagctaattggcgcttcaatttttccagagcaggacaagggcgcttgggatctagaaaaacacccgcaaaatttgctctattgccacttgattcttttgctcatcaaacagctcgggaacatac

SEQ ID NO: 7199 - DNA, 546 bp, Gossypium hirsutum
  Clone ID: LIB3828-015-Q1-N6-B4
gggtggaatcaaataataacatttcctgataatcattcccaataaatcccaaatgtacaatgcatgggtatcaaaatgttgtacataacaaaagagagaatgtatgcatatcaaaataatgtttttaacaagggcgaccaattctgcagtggagtgttccggcataccttgtgagtttggggactaatcgaccaggttggaaaggcatcattttttcagcaccgaatagcttgctagcattcggatcaccggatgtaataaaataggcaccgttcatgaagtggtcaccctgtgatacccagttccatttattccactgttccagtgataagtagcccctactagtcacttgcttagttacgtagatgcttgacgcgatatacctgttgccctggctgataattgtagggtggctactgccaccaatggcatacatgaaccaatgagtgtagtcattgttgacaacatgaaaaaaacctaatcgacacctaggcatcctgtccaccaatcctttaccgaagcggttcaaagcaacagtgatctgca

SEQ ID NO: 7200 - DNA, 607 bp, Gossypium hirsutum
  Clone ID: LIB3828-015-Q1-N6-B5
cttgaaaaatcttctgttcaatttattgaatcaacaaattcatatgacaataatcgaaatccccagaaggatgaacaccttaaacaacaggtaacatggtggcgactgctccgatgtttaatggcaaaccttgtggttttatttgaagagctggtcggatagtaagcaaaccaatgaaacagtctaagggaactctagttccccacacattgatcgactctagtttacgacatttattgacaagaacaaacagcccactttctgtaacatgacggcaactccatagcacgatgctctttaaatgtggacagctatgggcaattgcggataaggattcatcggtgataaatgtaccaccaatattcaggtgtttcaaggaattggctctggttatcaattgaacaacacctttatcagtgatccctgtcataccccaaagggaaactgatgtcaagttgctaacacactttgctaatgagatttggtatagtccattgtcagttatttggcaaccccaacgactccttgaaatgtcgagttcttcgaggctataagcatgacgaacaagacgagaagtggagtcatcgtccattttacaaccagcaaa

SEQ ID NO: 7201 - DNA, 502 bp, Gossypium hirsutum
  Clone ID: LIB3828-015-Q1-N6-B6
aagataaatcaccactggccacctaagatttttcaatcaagaatcaaacaaatctaaatttagctctcacaaaaacatcagcagctttagctggtaaagggctaagagccttaaaggaaataaaatcaggctcatttgcattcatcagaacacccccctgaacaactctcaaaggatcctatggaaggggaatacttactggggggggcttaagatcggttcactggccaaaagggggggggagagaaaatttactgggttcaaggggctcatgttttcactaacccattttccatacccatttattggagcaactcgctttttgacctcagtattctcgtatacctataaatcaaagttttaagatgcaagtaagcttgaaaaataatgggaaaattacccatgggtcgttgggcactggttttgaattttattttcgggttttggccaattattttgaaaatgataacaaaaaacatgtttggcaaccagttttcctttc

SEQ ID NO: 7202 - DNA, 406 bp, Gossypium hirsutum
  Clone ID: LIB3828-015-Q1-N6-B7
aataattatttatttttttttttttatttttaaaaaaaaaaagcaatagccacggagtaactttaccctaaaaagataacataaaaggtaaccccaaacggacttcatttggaaaaacctgacatgggtttaattgttcgcatgtctggacacacgggagaaaagtgccttgaccggttaagactctttgggaacagcggatgccatcaaagaaataactggggcttggaactgtgaaaagggaaacttgcttcaaaatgaagatcgaaatttttttcggccccatgggtttcaccgggaaatgtccgaagagatgccgcaggcgctccctccttggtgttatggtgatcattactaggatgggaaaaatctagtctgaggtggaatccgtgggaaactggggccc

SEQ ID NO: 7203 - DNA, 520 bp, Gossypium hirsutum
  Clone ID: LIB3828-015-Q1-N6-B8
gatgctgacaatccaaatgttataacctacaagaagtttcttaaatatgtttctcacatgctcgtaaactagctatatcacactggtccttattacaacttccaatggcggggcagagtccaaaaacaattgggtcctgtctactttagcagtattattctcaagcatttacaaagatttaaggcgggcaaaaaaaaggatctaacctctagcagatcttctcccactgtgaaaaaccagtttaccgtctctggcatcactatcaaacccaaccgttttttctttgagatgaactggtgaaagaacgctactatgaaattatacccatcaccacacatatctgaggtttcgtgcgtacatctggagtttattcaccatagactccggctttgatgaatccacattttcctgctcctgcataatagtgtgcagagtgcgaagaacatctattgccatacccttggcttcaccgataacgtaaagatatccacccttgagaaacacgttccatatatatgca

SEQ ID NO: 7204 - DNA, 502 bp, Gossypium hirsutum
  Clone ID: LIB3828-015-Q1-N6-B9
cttggaatagaactcaaattttttttactttgcaggtttacaactgggggaatacaaagggggggaaaaaacttctttttataggggagcccctccaaatccaacgggccataaacgatctaaattagagtctatctacaattgagaggcctaaaaaattaaaaccctatacatttttatctcttaggattaaaactaattaccctgttaactctagttttacgggagggtttctttaggccaccaaggcttcaagtaaatgaaatttccaatatgttccatgagtcgggtcagttcaagtaagtcaaatgagtcacatttaataagtggacccccatgaaacattttgggggcaatggtcacgggctttgatccacaacacataacattttttccacccattctaacgagggcttttatacgtcctaaaaagatattggtttgactcatctctgaaagggctcccatcacatgtcctactaggataatagggaggggggcg

SEQ ID NO: 7205 - DNA, 607 bp, Gossypium hirsutum
  Clone ID: LIB3828-015-Q1-N6-C1
actcccttgaacttacattatttgtccaagcaccccaaaatggatggaaatgttaatgtctattaactttgttaacatacatccacatggcactccacatgtatgctatgttagcaattaattatttttttaatgttaaaaaatatttctttataatttttatatcttttttatatttttttatttttttaaataatcttcataatttttttttttgaatttttaaattttaaaaaatttaattaattgcttacatgcaatccatgtggggattgacgtttattccacgtagcaaagttaacaaactttaattttttcattcattttagggtgatttgacaaacaacgcaaaattaaagactaaaaaaacgataaatttaatgtatggctaaaatgattttttttattaagttggagggtcaaataagtcattatgcataggtcattatgtatgtgtacttgtcacataaaattttgaaaggattagatatattttatcatatcaattcagagtattgcctttatcaatatatatttaatgagtgcaatttttttcacatcaagtatatagtttgatgtttttaatttactcaaaactcaacatgca

SEQ ID NO: 7206 - DNA, 272 bp, Gossypium hirsutum
  Clone ID: LIB3828-015-Q1-N6-C10
gaatccaagtaacacccaaatcactgtaaatagattgcatcaaactatagttggaaaccaagaaccaaaatgatgcactggaaattgctgtagttaagaatgcaagtcttatatgtattaactgcaaaattttcagtttctcaaatttcatccatggaaaacaataatctttgtgcatttagcagtacaggagatcctttcttggttttctccacagtttgttgtgtcagtggcttgtccgttgcgtcgtggtggtgggggcgttgggtggt

SEQ ID NO: 7207 - DNA, 575 bp, Gossypium hirsutum
  Clone ID: LIB3828-015-Q1-N6-C11
tcttttttttttttttcttttttttttcctttttttctttggtggatacaatacctttaaaaatttgttgtagcatgtcatcctgcttcttttcggatatagtgtgagaatatgctttcaagtatcagaatacaagggagtgtgaaagatagagagaattgacaataatcacaaatacgttgaatgatcaaagaactgccaagggaaaataaaaatgaaccaatttgaactctatatgaagggaggatccggaaattttggtcgtttcgccaaaaaacaagacatttctgaagaattagaagcacttcctgtgcacaatagacggtccggattcatcgtactctgccttagcaatccacatctgctggaaagtactgagagatgctaagatggagcctccaatccagacactgtatttcctttcaggtggagccaccaccttaattttcatgctgcttggggccaaggcagtaatttccttgctcattctgtcagcaattcctgggaacatagtagttccaccgctgagaacaatgtttccatacaaatccttcctgatatctacgtcgcacttc

SEQ ID NO: 7208 - DNA, 596 bp, Gossypium hirsutum
  Clone ID: LIB3828-015-Q1-N6-C12
aaatcaagctggtgattaacttttttcatttatagccaaatggcctatagtctatttgtataatgctgggtaatttaataactatagttcaatcattaatttcatttacagcacaagatgtatctttctctttattgcaatcaaagagaaataatttcagtaaagaacatggatctaaattaccatatctccatcttgtaaacatgaatgcaaaagatccaagtacacacctgaagcataaaacaataaacaattcattctgttcttgcatttctcccacctttcttactaactgcctcacacaatcggcatggtaatgtgtcaaggcttgttgcacgggcctttgcatagttacctaatacaccacatcttctccaggcatggtactcagcataagctacaggatcattagcaagggctttcacgtaagaagccaattcctccatggacctaaacttagttccatctataattgaatgtggagggacaaagtccagcacattgggagctccaaaataaataggaaccgcaccagagtccaaagcataaaatagcttctcggtcacgtagctctctgtaactgtattttcaattgc

SEQ ID NO: 7209 - DNA, 599 bp, Gossypium hirsutum
  Clone ID: LIB3828-015-Q1-N6-C2
ctaatattgtagtattgataatgtcattagcgattgtaataccaaaagtaatttaacgtacacacaaaatgtaatgtgattcagaattcaaattcaaaacctggtacttgaaccatgtttgtctcattacctcccgaaacatgcacagtcgaatccttgtctcccctttgagatgaatccttaccggtttctggcaattttgggtggttttccgccaacggcgagcgattttccggcccatcagaaggtgctataagtgttccttgactgtacaaagtgcttaattgatgaaagtaagggcatgtccttgagtcaagggacctcttcttgttgatatctttggtttttctgaagtacttgtttatgttttcccatttctctttgcacctctttgcacttctcttgtaacccaattctaacatcccttgtgagattctttcccatagaggagcttttatggctgttccttccttctcatggtcaccgttgttataaagactgcacctcaggtttatcaatgccaacacttcatctcttggccatctctttccaaggtcttctttctcattggacgtaaggttttggggagctttatttac

SEQ ID NO: 7210 - DNA, 601 bp, Gossypium hirsutum
  Clone ID: LIB3828-015-Q1-N6-C3
cgagcaaatacataacattttcaatatttataattcgttcaacacacaatttgcaaacctgggattaaaatgttttacgtgtatatacagacactatattacaacaaaatatcctttgtggttttcataaaataaaatcaagaatctgccactgattcttgctttccaccatcacaggcatgaagtatggtgcaaacatcggtagtttccaagaagtgctcggcatttgcgaggatcaatggcccatactcgaaaaccaaccgcttacacttttgcacatagttctgcactgaattacatcctttcaaaagaagctcgagtatctccaactttgtatcgggatcttgcaacttcattagtacttcagaaatagcacggtggcacatgccacaactatcttcgcggaattgtgaagatataagtgcaactttttgacaaaggttgaactttgtacagaaatcttgaggttgtactgaagatatttccaagaagaagagaggtgcatagtagtccacaagtgtaatgcactggggctcaaaagctcgtaaacgggagcaacttttgtgaagaatctcaattatctcagtctgcgttttattct

SEQ ID NO: 7211 - DNA, 541 bp, Gossypium hirsutum
  Clone ID: LIB3828-015-Q1-N6-C4
aaaatgtaaaaatattgtttgtatatggtttgaacaaatatttaaataacaaataaatcgtatttgttggcatgcacatagcctggaagcacatatgggctcaagagagcacggggccaggacctggaagatgttgcaaatcgacactagttatgggctagacattcaaacaaaggactgttgcgggccaagaggatttgatcggaatggcaaggtcgcccacggtaaacattgacccatgcctaagaaccgccaaaataaactatatagattctggaagcacataggcgccacgaaggtcatagaagctaacggtgctaaattgaacttcggatacaatatcacacattgcatttatcccatggccaaaattgtaagatcagtgggacctgggaagagacattactcatggtaatagcctcaaaatgaatgtctgatactgacccaccaaattcgcctggccaagtgttgatatgaactccattcaaagcattaaggatggtgcagcttgagattctgattgcctgaactggctcttcat

SEQ ID NO: 7212 - DNA, 597 bp, Gossypium hirsutum
  Clone ID: LIB3828-015-Q1-N6-C6
ggccaagaattgtcaaacctttccaccaggcaccaaccgatcaaagtacagccaatccaattcacttagaattctcttaatgggcatgatacatgaacgagctcttaaattatgtcacttggcttatagtgataccatctgatcaactgtatactcctttattcataattattctctctttaaagacagaaaatcagtaagctcaagcacataatttaaaacgacaaggctaacacgaataaatagttcaatcttgctgagttcggttttactttatcttgcgataacaggaatgtgaacgactgtctatgagcttgcggaatagggctgaactttcttctgcaggaattgcagcatgtgttcacgtttccaattgtcaattcttatggtttccttatattggccctcgtcatccaacatgatcaacttgggaggagaattgaaaagatattgaactttaactgttggaaacttgtccttctcttcttcaatgaaaccaacaatttccggatagaatactagtttcctcatgcaaacttccagtatcgcacctgaataagtaatcttacttgtagaatcatctgagtcttctgtgca

SEQ ID NO: 7213 - DNA, 448 bp, Gossypium hirsutum
  Clone ID: LIB3828-015-Q1-N6-C7
ggaaccggaaatataaaaaattttattcacaaaacactttagagatgggcccacataataaaatgggggcgggataaaaattcaaaggcaaaaaagacatcctgggaaagggggatcccaaaggggcccccaacaccatataagtttaaaaacgaaactggcccacaaagggaaactttttatgaaaaaaaacaaacaaatggggccactggaagggaacaacccgggcccgggaaaaacattccggggggggggacaaaaaatctttaaagccccgggcccaggttatgagctacccacagaaacacagttcggggggaaaaagggggccaaataacctttgggatctttttttggaaccacagggacaaggggcattacgggtcatttctccactctttaccaaataaaactgggcaagacccaagggggttaaacccattagctt

SEQ ID NO: 7214 - DNA, 600 bp, Gossypium hirsutum
  Clone ID: LIB3828-015-Q1-N6-C8
gtgttgtcggggtatagtgctatattttgcgttgacagggtacagtgtggggtcttgattccttttgctgatcagtttctcgggtgccgtgttttataatggaagatgtgttggccaatctgaggctagttgatgatgaggaagaagcaatccatgaggatggtacggctgtggaaaacttttcgcaattgtgtcttgtggggcgttgtttaacagacagtgtggttcatttcccttcgttaaggaatactatggcagatctttggcaccctattggtgggatctgtattactgatattggggaaaaaagtatttattccaattttttcatgaagttgacattgtacgggtgcttgtgggaactccttggttttttgataaccatctgcttttattgaagagaatatcgtatggagataacccggcagtaatggagttaaactccactgaattttgggttcaggtccatgatttacctccaggactgatatctgaatcgatggttgtgcagttaggtaacttctgtggaaagtttattgagtatgattctaataacccacttttggggcaaaaatcgtatatgcgcattaaggtttgtct

SEQ ID NO: 7215 - DNA, 604 bp, Gossypium hirsutum
  Clone ID: LIB3828-015-Q1-N6-C9
aaaagtaatcaaagagcaaaccataaccatatttatcaaagtgtaaaaccaaacaggtaaaagccacaaaagccactgcagaagtgagctttagctagacaaccgttcataagttcagataacatacgaaacacctaggagtgttgcaacccaaaagtctgagactactttgaaaaagcagcataaacagtttttggtagccaaaatccaaaagccctatacaaaaagatggttcaacggttttcagcagaagaacatggagctgctgacattatccttcaacctgggaagctgaggaacagaaattgctcccggagcagtcaccccaccatggctcgatgatgtctctgaagcatcctcaaacttcataaattgccccaactgtgaagctgccaaatgagcgtagcaaataggggccacaacagatatggctgtggtgctcctttgatacacgtaggatagagaatgaacaagctcctgcagatcatcagctgaaaacccaacctggtctaagagaacatgatagtgggtcggccttgtggtccctatcattccagcatgagcacaaaggtaaaaatcattgttcttcggatggcatactttg

SEQ ID NO: 7216 - DNA, 612 bp, Gossypium hirsutum
  Clone ID: LIB3828-015-Q1-N6-D1
gtataatctgtttttattaattcttgctctatttattgcagccatatgtttgatcatcttttaagtcgcaaaaattttgaaagcacaaaataatgtgcaaactgccgtttctcgaccatcatagatgaatgtatcttttcttagcagaataagattccatgtatttttccaacttatggctaaccatagcaactagttaaatgcttctctctgttttgtggggagctccagatttggctcagattcactgagaggtgcaaagtactgatccaccatatcgtccgacactttttctaagcttggaggttcccactttggagcaaagtctttgtgcaccactcgtgctctgacaccctcgcagaagtcattggagattcgcttagatatcccttgaagggacatccgatactcacgaaccaagcactggtcaagggtttgaaatctgccttctcgtaccgatctcaaagacaccttcaagctcaatggtgaagcttctttaagtttctttaatgtggaattgcaccatgcatcatttgttgcagatgcctcactttccacagcatcgataatttcctcaactgtgtcatggccaaaacatttattgagcacttc

SEQ ID NO: 7217 - DNA, 528 bp, Gossypium hirsutum
  Clone ID: LIB3828-015-Q1-N6-D10
agggaaaggccagccccgaagggggggttcggtttttgcagccatatattcggccaggatttttgtttttttggccaaaaaaattatcaacaagaaacagattttggggagtctttcctacattgcccttgatgtccaagaaagggacccgggggaagaacgcttaccttttctggggggggaacaaaaaacactcactggggggggaagggaaaaaaaccttgaaaccctaagaaaacttgggggggggaaaaaaattggtgcaagtcttgaaactgaaaaaaaaaaagggatcagggctaaagaaactgatcttgcacatcgggtcgatgtattcggggccaacaggtttcaaaaaccacctaaaaaaagcttttttagctttgtttaaaaagctttcaaaaataccaccattatcaaaccctggggttgggccggtctctctctgggctttggcatcaaacagcatggcataacggatggagggtacaaaggggggagaattggcattgctggctttctaagggg

SEQ ID NO: 7218 - DNA, 607 bp, Gossypium hirsutum
  Clone ID: LIB3828-015-Q1-N6-D11
caaaccacacatttcattattcattatatgttattttcaaacaaacatttatgttctaaatttatgatttccacagtcacgcgtgcgaaaaaaattgtgattatctattactaggagagaagaagagaatagggtgggatcgcataaaagaaaatttactgacaatcattcagaaaagataccaaatgtactatgcttgggtatcaaatattgtacgtaaaaaagggaggacaaatgcatataaaaatagcatttttagcaaggacggccgattgtgcagcttagtggtccggcatactttgtgagctcggggaccatttgaccaggtttgaaaggcatcattttgtcggcgccaaattgcttgctggcacttggattacctgatggtgtaaaaaaggcaccgttctcgaagtggtcaccttgtgatacccaattccaattcttccactgtcccggctttaagaggcccctacaggtcacctctttagccccaaagcctggcgctgaatacctatttccctggctgataattgtagggttgctggtgccgccaatggcatacaggaaccagtgattgtagtcattgttgacgacatgaataaaacca

SEQ ID NO: 7219 - DNA, 597 bp, Gossypium hirsutum
  Clone ID: LIB3828-015-Q1-N6-D12
caatagaataacaaatcacatatacagaatcatataatcttagagtcacttttatctgtatgcatatcaatgatgtcgatgcaaacattttcaaaaaacaatgcagattttcaggaaacatttcctacccatcttcgctacagtccataatgagtttctcaaaactcgtctatccaaaaacacaccaattaagtcatcccgggttacttgggaaccatgactcgccaccccgggttgcctggcaaagatagcttatcaaaacgcaattaaactgctagatcaagtatatgtgggatcaagctactatattgcagtcgagatgctagataacgtggttaaatcactagaatgtgtaggttattaaaatgctagaatcttcctcctttcaatcatatcttaaccctatgcatatgatatgacatacagaacaaaattttcagtaagcatgctttacatgcaaataagaatcagtgtaatggcatgcttaacatgtagatcaaaatcggtgtaatggcatgcttaacatgcgaatcagaatcaatgtaatggcatgcttaacatgcaaatcagaatattgacagaaacagtggcatgttt

SEQ ID NO: 7220 - DNA, 604 bp, Gossypium hirsutum
  Clone ID: LIB3828-015-Q1-N6-D2
aatgcattatggcaaggaaaataacatgcatagatttgcaagcacatgtaacttagaatacttactgtaacagacgaggctttgcactagaaagaacatctattcgctacagcgattagaggagattttttccgtatggtaaggccgccggtttcggtcatgtctaaatccttctcttttgctccaccaggcaatgaccaatcaaacttgtgcacaagatttgctaagagaagctcatttattgcgattgcaaacaagattcccggacaaatcctccttccagagccgaatggaatcagctcgaaatgttgtcctttgaaatctatggaattatccaagaacctgtctggaagaaactcttccggattctcccatgacgcaaggtctcttccgattgcccaagcattgatgataacttgagttccttggataatgtcatagcccttgagcttgacgtcttttgtagatattgttggaagcagcaagggaatcggaggatgtaaacgaagagtctctttgatcactgcttttaggtagcgcatgttatcgagatcatccactgatatgcttgaattttcagcagaaacattcctgacctcgtttt

SEQ ID NO: 7221 - DNA, 587 bp, Gossypium hirsutum
  Clone ID: LIB3828-015-Q1-N6-D3
agtaaaaatattgcctacttttttttatttctggagaaataagaaagagaacaaattccgagcatagccctatttcagtctgatgtttgccaggccggatggttttgactgtgcattttaacatttcaaataaaagagaacaatttcacatggcccgctaacagccgtaaagattttcaaaaatcaagcacaactatggggcatgcaaatgcatgtcttacccacgacccctccccacatatccataccctcttccataatacccaccacgataacgaccaccacgtccacgtccagttccacgcccacgtccacctcgatgtcttgaaaaatcaccaaaagtctctgtgtctaacttcatttgctcagagaatctcggccttccgttttgcgagtcattatcaagtgcattgcaggagagagtatcaaaaaagtcatccttattgtaaacaggcttcgtttgaatcttaggtatttcagcatcatcttcatcttgagaaccatattcatcaacggcatctgcttctttatccttagtatgagatttgctactgttaccaagatgaccccatacttcatctttcttg

SEQ ID NO: 7222 - DNA, 607 bp, Gossypium hirsutum
  Clone ID: LIB3828-015-Q1-N6-D4
atgaattcgtagaaatttttttttccttgagcttggaatgttcctagctaattaattacattttgtttggtgttatctaggaaaaagctgtgcagtagatcaacaaaaatggagctatcggcaaacatcgtgcttataccggccgacgattacaggggagaagctagaacaatattttaggggctgaatgaaattttaattgtttatagtttatatttttataatttttaaagtattaaattaaatttttataattttaagaaggttaaagtgtaattttatctttactaatttaaaattttaaaaaatttagaggacctaaatggtacatattcctgcgaagcaacaggtccgatggcggccccgggtccgacggcggccccggttccgatggcagccccgccataaaatcgcctctgccggtaaacctgaggagcttgaacagaacatcacttacatggatgcttcgttgtataaggcagcagcagaaggaaaaattgaagtattcaataattaccaggagcttgaccttgaatcgcaaaagaccccaaaccatgacaacgtgctccatgttaacttggcaacccacgagcttgctgcctggttt

SEQ ID NO: 7223 - DNA, 524 bp, Gossypium hirsutum
  Clone ID: LIB3828-015-Q1-N6-D6
actaagtaaaagatatatgaattgcacaaagcacacaatatctgagttcgagcttttacagtataaatcttcagatgagtttcatttcctatgacaataccaacaatatgacatccacaagatagtaaaagaccattgagttccttattacctttcacaaatacatatcgcaagccaataccaatgaaaaacacaagactttaaaacagaatataaagatataaaccaaacccttctttcaaaatttttgtcgcttccttcttgactgatctatattggctgtgaagttctgatctgtggcttgatgttgtcagtcggaagttgcgtgggtgcatctggcaagactactgcagtcatggtttggtactgaggaggcatgttgggtgccataggctgagtgtaatacatttgagcatgagttggatcagtgaattcatatgcatatggggcagccgtgctggaggtaggtgcaacagattgtgatgcatgatgaatctgagcccacgcgtccgcccacgcgtccg

SEQ ID NO: 7224 - DNA, 614 bp, Gossypium hirsutum
  Clone ID: LIB3828-015-Q1-N6-D7
gaacaaactattttcaaaaatgaacttagactgtttacttatctcaatacaaagccagacgatagtatttataacttgctatctttaacaaactagctaacttttcagccttcactaactacctctctaaccgttttattatctttaacatgcatccatcttccctattgataagactcgaagaaaatttctaaaccgagcaaaacacgaaaatggcagtggtttagttaatacatcagcaacttgatcggacgcaggaacttctcggaccagaaccgaaccatcggcaaccttctcacgaacaaaaaatagatctaactccacatgtttaaacttggagtgtaacacaggattagcagcaactgcgactgcactagagctatcacactagatatttggtggagaagcagacccaatttgcaattctcgtaataacgaaagtaaccacataacatcactcgtaacagcagcaagacttcgatattcagcctcagtcgtagaccgtgacaccacctgttgtttcttcgatgaccaggaaatagggttagacccaaaaacacacagtaccccgaagtagacctccgatcatcaaaatccaatccccagtttgcatc

SEQ ID NO: 7225 - DNA, 346 bp, Gossypium hirsutum
  Clone ID: LIB3828-015-Q1-N6-D8
aaaataataatgattcaatttttattataggctaatgccgagcttttaaaaaaaggggaagggaaaatacctttttttgttctgaccaaggggcaatgtctccagctttttggctaaactcataaaaacctatctcttgaaaaacttgagtacactggggaagagcaaccttttttttaaacccaaaattgtgggcaaaccgaagttcaccggtgacgccgtcaaggggggggagaaccaccctggatttcccccacatttcggagggatcattgcaatccgggttgggacccctcaccaaggggaagtagtagtctgattcctaataatcgccttccactacaat

SEQ ID NO: 7226 - DNA, 433 bp, Gossypium hirsutum
  Clone ID: LIB3828-015-Q1-N6-D9
gtgggtggttttatagaggggggggaacagggggagagggggggcctgggggaaaggggggtggggggagaaaggcacacaatataggaggcggaaaaataaagggaaaggccggggggccaaaagagagagcgaaaaaaaataaaagggggggggggaaaagggaggggtgaagaggggaaaaaaggggggcaaaaggggtgaaagaaaagggcaaaacacggggagagggggggtgggaaaagggcgccaggggggggattgttaaaaccagagagaaagggaaaaaaggatagggccccaccgcccgggcctgagagagatgcaaaaagcgggcaacactgggttgccccaacacgcgaaaaacctgtttgaggggggggaacggggggaaataaaaagagaagagttgaggataggggaatcccgctat

SEQ ID NO: 7227 - DNA, 375 bp, Gossypium hirsutum
  Clone ID: LIB3828-015-Q1-N6-E1
gaaattgagtatcgaatgtgtaaatttaacaatggttaagtgacctaattaattttaacttccaaaacaaaagaaaaaattatttcaaataatcctaaattaattacaagaaacaaactaaaggtatcaaaacttgattccccacatttatttttctcctatattatcatctgatttaatagacaaattagctaatttttcagtttcaaacccgatcagtggcaacttgttcatcatttggcaacgatcaccatcatctatcttttgcatttgcaaacgatgcgcattttgggttctacaaatagcgatggtataataaatctggtcgatctcggcttgcgtacactctatttgatgttgaagctcttgaatgac

SEQ ID NO: 7228 - DNA, 537 bp, Gossypium hirsutum
  Clone ID: LIB3828-015-Q1-N6-E10
tttttttttttttttttttttttttttttttttttttttttttttttgtttttttttttttttttttttttttttttttttttttttttttttttttttttttttttttttttttttttttttttttttttttttttttttttttttttttttttttaaaaaaaaaaaaaaaatttaaaaaaaaaaaaaaaaaaataaaaaccaaggtaaaaaaaaacggtttggaaaagaattttttattatattttaattgagaaagagcaaaaaaaaaaaaaaaaatttttttggggggggggggggtaaaaaaaaattttttttgaataggaaaaaaaagaagaaaaaaaaaaatttttttttttttaaaaaaaaaaaaaatttttttttaaggaaaaaaaaaaaattttaaaaattttttaatttgcggggggaaaaaaaaaaaggggagaaaaaaaaaaaattttttttacaaaaccccccaaaaaaaaaaaaagagaaaaaaaacagggtaggtcaccaaaaaaaaaaaagaagagaggg

SEQ ID NO: 7229 - DNA, 554 bp, Gossypium hirsutum
  unsure (1)..(554): unsure at all n locations; Clone ID: LIB3828-015-Q1-N6-E12
gaaatctaaaatttcaacattnaaaaaagaattaaaattttcgacaatcaaataaataaatacaatatgacaacttttaaatgcatattctagtttttagagctttcactttaacacttaatttttaaaaaatttcgtagtttttcactttaatttgatgttttgatgcattattctagtttttacagttttacatcaaaagggaaataaatactcagttgtggccatccgatcaggtttgaaccaaatcctaacgcatttcctgagatttttggaggatatcttgtattaacagtgtaatattcatgtaagaagatccccccacttcaactgctttattcgcctcatctcctaattctttggctcgttttctcatctctgttccttcatttccttgctccatcagtttgtctattgcatttttaacatgttccttgttcaaaatgaacccagatttctcatctcccagcatcgtaggcttgttagccccaaggttgactccaattttcagtatttgtactacaagtttctcgttgcagaactggtctcccatg

SEQ ID NO: 7230 - DNA, 598 bp, Gossypium hirsutum
  Clone ID: LIB3828-015-Q1-N6-E2
aaacaataaattccttctaatacaaaaaagagtgtcctcaaaaggtaaaaaataataataatgtctcaaagaatacaatataatggtaaagtaatgtaggctctcatatacgtatagtagaaaagtcccatatgagacatcagcccataaaatacgagaaaaacaaggccgaaataagcaattgaatgaaacattacagagctatggcatcaaatgtgaggcacacggttgttttaaaccatcagattgagcagagcccatcccatggctaagcttcccatcatcttttgtacggtccacatttgatttgctccgctcgtgtctgttccagctggacctggcgtagcagccccgagggtaggtgctggggcctcggtcggcggagctggtggcgaggtcaatggtgtttgtactggagagatagctgggactgtggctggaggagaagccaatggagctggtggtggggtagcaggaggagttgcaggtggggggggttgcgccggcgtagacgtaggaggattactaggagcttgacccaaaactcctgcaatagcaatgcaaagcaatgctgatagaaacaaatttttattacaaa

SEQ ID NO: 7231 - DNA, 438 bp, Gossypium hirsutum
  Clone ID: LIB3828-015-Q1-N6-E3
ggggaaacccaacaaatttgggttttttcttaaaatccccaaaaatttagaaaacaaaaagggaaaccaaataaaaaaaaaggggaattaccccccccggaaaatgccccaaaaaaccaggaaagagggaaaaggtttggaaggggggacccaaaaaaaaaggggggggtggcccctagggcaaatttatttatttgggcctaggggtaaaaatttaaaaaagaaaaaaaaaaccagcccttttgggacaagcctggctaaaacttttcgggatttgggaaaaaaacccccttcgattaaaggggttttccaaaaaaattggttttaccctttagaacaatctttttgggggggccccaagcccttgggcctttgatatttgcctttttggccacccccttgggttaaaaaacccctggggggaaaggtccctttggc

SEQ ID NO: 7232 - DNA, 601 bp, Gossypium hirsutum
  Clone ID: LIB3828-015-Q1-N6-E4
gaccatgatcgggtctgtgtttccacaccatgaaaactaaaatatcaatacataaaagctttatgaagagattgattttatcaaacaatgcatggatcttacaaattaatacccaacaaagctaaatgcaagttcatattttcgaaagacttgttaaatcaaaacacccttggctttgcaacaatggttgaatgcttcagaatatgcagactgaactgtccacctttctccgatgtatcaagcttagactgcccctttggaggcaatagctcaaaattctgcaccaaacgtcccaatgtgatccctaggattggcagtgccaaaataatccctggacagctcctccttccaacaccaaatggaagatacctgaagtcattcccattggcttctaccttcgattcctcctcaaaaaacctttcgggccggaactcttctgggttcttccagtgagccgggttattggctaaccaccatgcattcacaaggatcttactctctgcagggatgtcatacccaccaagctttgcatcatggaggttcatgtgtgggactagtagagggatggccattcggagcctgagagtctccttgatcactg

SEQ ID NO: 7233 - DNA, 598 bp, Gossypium hirsutum
  Clone ID: LIB3828-015-Q1-N6-E5
ccaccaaaaaaagaaaacatatctgtttaaccttttcaggcaatataatgttacaggttaccaaaagggaatataccagagatgtagttgtcacctgtgggtaaaggagagcgaggaatttgtcctaaaaattaaggggtaagcttataagcttttatccttctctccctgatttctgagatctaaacagagggtagcttaccttgaaaccgagcaggagcccgaaatccaaagaaagcagtgacttagtccttgtaggagctttgagttcgtttggacaaaactcatcttgaatggatttttatttattctacaagtgaaatacaaagggcaacaaccatgccagatgctagtgatagtaactgcactgcagtatttttcaatgttgttttgccattgttattcatttctgcaagcactccagcaacagcaatgtatataaatccaccagctgtaaacccctcaatcaaagatgactgtccaggatcttgtccccaaagcaaagccattgcagttcctgctagagccaccagtgctgaaaggaagttgaagaacagagctttggaaacactgaacccagatcttaccagtataccga

SEQ ID NO: 7234 - DNA, 573 bp, Gossypium hirsutum
  unsure (1)..(573): unsure at all n locations; Clone ID: LIB3828-015-Q1-N6-E6
aaaaaaactaaaaattaataaaactgcattaatcccatataaaattctcaaacacttgngaattcagaattcatagcagaacaggtaaatccatcaatcactgtaaacttggaacttcatgactaaccacattgaaatatgtcttacatagtagcttctacttcagggtctgtctcaaccggcacacttggtgaattgtttccacctctcaaacgcgaggatacattgtcaattgcagaattgagttggcggatttttgcattcagtgtctgcctcgttttctctagacctccatcatagtaaattggtcgctttgccttccggaatccatattcatcttcatttaacagggatcttctaatctgcggtgcaaaaatatatcccagagttccaaataaagcacctcctaaaagaaaaccagcagcaaaatcgtttcctccacccttagtgccatcacggtactctgcacaaacagaaaaccgatgattagatgcctttggtttcctctgaactgccaaacttggtattttgccaaaggtgctggacttagcgaaacaaatttcacttgcctga

SEQ ID NO: 7235 - DNA, 563 bp, Gossypium hirsutum
  Clone ID: LIB3828-015-Q1-N6-E7
aaaaaaaaaactctaattctctatacaatctccacatattctagttaaaacatcccatatttttttctacagggttcatacctttcatttattgcaaaacctaattcaactcttacttctgttccaagaaagtaaaaaaaaaaaaaaaaaaaaaccgaaataaagcattttcatcctagaggaaaaatacccaaacccaagcgaaaatttaatgaagaaaccatgattagttcgtcatcaatgttttgatgcatccccgaacacctcggggtaacatatggggcaagccttgttgatactaagccatcgattgccacatccggcatggtagacgtgtttgcacggcaaagtaatctgtctctcacctcgtttatattccatttggcaattcacgcatctctcattccttgatttcttccttgagaataagctgcacttgtattttgaaaccggaagcaaagaaataagttcttgggagaggcctcgactttgagttccaacagtctcccctaattcaagtaattcctcataagtcatgttgtcaggatccacaccatcttgcc

SEQ ID NO: 7236 - DNA, 575 bp, Gossypium hirsutum
  Clone ID: LIB3828-015-Q1-N6-E8
atatagcaaagaaaatcatatatattagcatgtacatgcattaattacatatggctacaaaacaagattcaaggaactttaggatattgtaaatcaaatattgttttgagctatttattcttcataattactctttttatccaacaggattttatagcaagcccttctgcaacatcattacttcttattttgtataattaatacgacgacaaccaactcttcctcattatttcatcttaatatggtatcatctccctactttggtggactgggttcactgtccataacctcttctatccctttgctctttacagtttcagcctggcaacatcctgatgcgcacctgggctgaccacactcagcacaagtcccaccgcaaccctgacggcaacactccccactctcacatcccgactgtcctggcattagtgggatttgtgggacttgtgggatctgtgggattagtggaatttgtgggatttgtgggatctgtgggatctgtggaattcttgggatttctggaatttgaggaaatggtagaacgaaaccaccaggattacaattaccggaacatc

SEQ ID NO: 7237 - DNA, 576 bp, Gossypium hirsutum
  Clone ID: LIB3828-015-Q1-N6-E9
cattaaattactttcaaaatttcattaaattactttcaaagttaaggatcaacatttaactacaaattttgagtttgctagtttacaaaattgaattattttgggaatttgtttcgacttgaacatcctcgtcgagtaacaatctgaacttgagaatcttctgaagtcgagcgaccggttttacttgctttctcggagcttgatttggatctagtatatatttgcctgagaagagatttgcctctgatggacctgtctcttcatgtactacaggtgaagcttctccatgtcattgacaaaaccttcaactgaacgatagggtgcataaacaatgagatcaaattccagactctgagacactatcatctcgtaattgagaatcatttgatgatcctgtgaaatccccttaccaagctcctctgctgacacatgattttcttctatcttataggccgcatacacacaggttaacattatatgttttggatgatgttccatgaccgaccattgcaggtaaaacctcttgaaataaattagagcagttgcctgcaaaactgaattttattaggaaagtag

SEQ ID NO: 7238 - DNA, 470 bp, Gossypium hirsutum
  Clone ID: LIB3828-015-Q1-N6-F1
gggaaaaaccaattcagtttcgaataaaacccaaaaaaagggacagaatttttaaaggacaaaaaaaggagggaaagaaaaaaaaaggacccagacttcaaccaagaaaaaaaaaaaaaaaagttaaaaaaaaaaaaagggcaaaaaaaaaagaaaaaaaaaaaaaaagggggggatgaaaagaaaaagaagccaggggggcgggggccccaccaacgggggggggggggggggcaaaaggcccaaaaaacgggaaggggtggggaaggggggggtaaaaaggcgggggggacccgaggaaggggaaaacccgggggggggccaatacgagaagaaacccgggtaccgggggggggggaaaggggtccagggggcaaacggggggaaagagagtcccccccagcataattttttgggggccggggggagcattggcaaggggggggggcaaagccccaaagggaattggc

SEQ ID NO: 7239 - DNA, 154 bp, Gossypium hirsutum
  Clone ID: LIB3828-015-Q1-N6-F10
tttttttgagaagtagtttgtctttttagggctgtgccctctcttcaattcaaagaaaggaaaataaaataaaataaaaaagtcttgaaatgttcaaaaccattggataaatcttggtttcgtcataaaacgcccgcttcgtttaggcagagtt

SEQ ID NO: 7240 - DNA, 407 bp, Gossypium hirsutum
  Clone ID: LIB3828-015-Q1-N6-F11
aaaaaaaaaaaaaaagggaaaaaaaaaaaaaattttgttttttcccccccggggaaaaaaaaaaaaaaaaaaaaaaaaaaaaaaaaaaaatttttttaaaaaaaaaaaaagggaaaaaaaaaaaaaaaaggaaggggggggtaaaaaaaaggggggggggaaaaaaaaaaaaaaaaaaaaaggggggggggggggggcccgaaaaaaaaaaaaaaaaaaagggggggggggggggggggggggcggggaagaaaaaaaattgaaggggggggaaaaaaaaaaaagggggggggttttaaaaaaaggggggaaacggggaaaaaaaaaaaaaaaagcccggggggaaaaccccttggaaaaaaaaaaaggggggaaaaaaaaaaaaaaaaaaaaatttttttaggggg

SEQ ID NO: 7241 - DNA, 588 bp, Gossypium hirsutum
  Clone ID: LIB3828-015-Q1-N6-F12
gatcatatcatcacataggctctatattgctaacagatccaataatcacaattcgcaggacgaaaacaagagatgataaggaaaaggaacaacttaaggaacatataataagcaaagaacattaaccatgtaacatctcacggaggtttctgggaaaatacaaattcagaaatattttatgcaaagttataatctcccaagtcaaatttagaaaacgtaataacaaaaaacaatgttgcaaatctcactcgtccttgaatttgagatttccgtttccaaactttagcagctagctaacatattcttcgaaaacaacagtccgggtttcagaatttcagcgcgatgtgaaaagagctctgccaacaataccggtggcctcgatgtaacgatccacacatctagagatgcaactactttcacttccactaagacttgatcctggctttgagatacacttttcaaagcacttccccctcacagtctcgaggaactcttgggcataagcctgggcaagttgagccttcatctggtccatgaattcatctgttgaaatttggggagatcctgttccgcttgaacctgttgaaa

SEQ ID NO: 7242 - DNA, 578 bp, Gossypium hirsutum
  Clone ID: LIB3828-015-Q1-N6-F2
gagattccaaacttaaacatattttaccagtagataggaagagttgagtaacatttcggagtagcaagcaacacttgctgcttgtcatttgaaccgatttgccggttctttcttataaaagacaaattccaataccattactctaccttctccattatattacattggcttctatattaaaatattacatcatatcatccaaaattatcccgacactaatatatatataaaagaatcgcaacacttcttaactttgatacaaaataaattcaattccacccatttaacccttctcgcaagtttctttttgaccgccgtatatttttataaagtttctttcatcgtaatcatcaccatacatcgcgtaggtacctgccgctcatttgcagatttttcaccatgctctcagcctttgagctgtctagtgatccctgctcttggaaaatagtgtgaagagctcgatgaacatctctagccatgcccttggcatcaccacacacatacaggtaacctccctgagaaacatgtcccatatgtccttggccttctccatcattttatgttgcacatattccttg

SEQ ID NO: 7243 - DNA, 585 bp, Gossypium hirsutum
  Clone ID: LIB3828-015-Q1-N6-F3
gcaaatcgaatattgttttgagctatttattcttcataattactctttttgtccaagaggattttatagcaaacccttctgcaacatcattacttcttattttgtataattaataagacgacaaccaactcttcctcgttatttcatcttaatatggtatcatctctctactttggtggactgggttcactgtccataacctcttctatccctttgctctttacagtttcagcctggcaacatcctgatgcgcacctgggctgaccacactcagcacaagtcccaccacaaccctgacggcaacactctccactctcacatcccgactgtcctggcattagtgggatttttgggacttgtgggatctgtgggacttgtgggatctgtgggattagtggaatttgtgggatttgtgggatctgtgggatttgtgggatttctggaattcttgggatttctggaatttgaggaaatggtagaacgaaaccaccaggattacaattaccggaacatccagaagaacaacatttatcaggaccaccttcaaaaccaaaaccaagagtaccaatttcagcaccttttggg

SEQ ID NO: 7244 - DNA, 256 bp, Gossypium hirsutum
  Clone ID: LIB3828-015-Q1-N6-F4
gacttcaatcagtagaagtcaaaataagggaatggaatgggagaatttgaattccttcttatattttgcaattaaaaattatggttttgcttaaaaaaaaaaaaaaaaaaaaaaaaaaaaaaaaaaaaaaagggcggcccaaaaaaaaagaaaaaaaccaaaaaaatcccagaccggaacctgggagggcccaccaccttttgcctatagggaagccgttttagcggcctggcccaaaacaaggaacaataggtgt

SEQ ID NO: 7245 - DNA, 239 bp, Gossypium hirsutum
  Clone ID: LIB3828-015-Q1-N6-F5
aaaaacgaagtaacggtatctgtgtatatatatatatagcaaatcaaaagcctcgctgattagagaattatctctcagtatcaatagatgtaccataagaagagtatggaaaagttctttgtgaagactaaccaattctacagagaaacaaggcatgaatatttaaataaaatccctccaacacaaaaatcattcaacaatatgcgccattttttaaaaacgaagtaacggtatctgtg

SEQ ID NO: 7246 - DNA, 301 bp, Gossypium hirsutum
  Clone ID: LIB3828-015-Q1-N6-F6
aaaagaaagagataaaaagtattaattatgttgccttaatatgcagagctttctacatttatatacgaaagataccgtcacatattatcaaaatatacattaatttcgacacctagtgtgtcttgagcagccacgattccaaggattaacagcttcttggagaaggcgacggtaggaaacaagaccggagacctcaggatggtggattgtcattactgcatcaatttggaccacttcctccatcaccactatgccaattagagccaaacaaattaaccatgttttcatgtttgagactccc

SEQ ID NO: 7247 - DNA, 601 bp, Gossypium hirsutum
  Clone ID: LIB3828-015-Q1-N6-F7
acaaaaacacaagtaaattgttcatatataaatattcatcatgctatcatgaatacacattcacaactattttttttttaacctttgttacatataccactccctatcttcattttgtttcttaattctaaagcatcaaactaaatcacattattatttttgccctaaatgtttttacaacattttaagtaattaacatacaacaactttttgccaacatttataaatgtcatgttattgttaccaaaaaaacattaagacacaatgtatccatgtttctcgggaagatttcgatgcttgatgttgaggaagagcagcggcagcggctgcggtgcgggcaatcagtttgttcataggagatggattttattatcttgcttctcactcgcgaggtctagccagccagagagaactcagagctcggagccgagagaaatagtcgtttattgcaagaagggcacgagctgattgccgagtcgtcaagatccggtgcatctgttgaagtgtctgctggcgtagattatcggcctgacgaaggaacccttcgagggttcctagctttcccatggccattgccatttggcccatataatttgccaca

SEQ ID NO: 7248 - DNA, 588 bp, Gossypium hirsutum
  Clone ID: LIB3828-015-Q1-N6-F9
gatcttaaaagtttttccatttacaagagaatcatacggcgttccgcatgttccggacagaaaatttctgggaacataactataaggccaaaaaccgtaaacaaaatgcgcagtcatacaagcagttccgcagtaccatgctacaagatacagaaactaatggagaggatgaacaaggaaaagaagacgaatcatttccttccatctcttaatttcggagctgattatatttgtgtttgcaggggaagatccttgtgactgtaagtaacccctttgtcaccatccactacctgtccactccctctcaaaatccatcgagttgttaacaatccttcaactccgactggacctcgggcatgaaccctgcttgtacttacaccaacctcggcaccaagtccgaatcgtgctccatcacaaaaccgtgtgtttgcattatgaaatactgcagcactgtctactctgtgcaaaaacatttcagcaacttcgcgatcttcagtgacaatacagtcggtgtgagaacttccatgctgatgtatatggtcaatagcagcccccaatcatccacgaattcaactgtgcacgccagtg

SEQ ID NO: 7249 - DNA, 388 bp, Gossypium hirsutum
  Clone ID: LIB3828-015-Q1-N6-G1
gagaaaaaaagagcatagcataaaccatcatacaaccgttacaatctgtgacaacagtaaccacagcttttatgaaaacgacagagaaagggaaaatggtcctaaagttctaagaaccaaagctttgttccacttttctctcaactttttcacttgtattccaaaatcatgttgttttcaggagccaagccaatgctggcccttagtatgttctccagcattgcacgctgcttggacagtgcgttcaccaccggtgtgcctggtggaacaagaggggctttggtgaggtaactgaggattgtagccacaggatggaaagtgtggaacttgccctctccatcagccttgaactggatcctggtgctaagttcagcaaggagaaccaaat

SEQ ID NO: 7250 - DNA, 608 bp, Gossypium hirsutum
  Clone ID: LIB3828-015-Q1-N6-G10
ggtccaaaatattttatttcattaaatacatttggaactcaagctttctcaccctctctctccccatacaccagaattggatacagatttataagcttgtttaaattaactgctgaaaggtggaggccttggcatgccttgcacgatgccgcaagtcaatacaccttccggcaagttgtactcatccttgagggatcggttaggggaaataacactagcataaagctgttgcccaaggtaatgcctgtcccatatctccgacctcaggttccacatcccgcagttgtcgaatgtcaataggattgctgaccaggagttggggaatacctgtatggtgtgtctgctcacggcgtcgagaagattgtagttcatcctcttctcagggctccatttcccaatgtccatgcccacggcaaagaatgagtagccagacaagtggtaagactgaatggcggtctcgggattctcgaagatgatttccacaaagtttctgtgtgtcatgttgaggacaataggtgccaaagttaccttagtgttgtcacttggtggctcatcgggaatggtatcatacttgaaaaccttgtcggctacgccgtagtattctgcaa

SEQ ID NO: 7251 - DNA, 555 bp, Gossypium hirsutum
  Clone ID: LIB3828-015-Q1-N6-G11
ttttctttctcgtccttgttggcatctttggctttttcttcttccgtcttcggtgtctccgcctctagtttcactatcaccgccgtcttcccggttcttctgtagacgtactccaccagttttggcggttcaaacactcctttcactgtcacctctgagctctttagatccggttcagctgattccacccctttcattctttgaatacgtttcctgatttccattgcacaagcttcacaatgcatgtaaaccttcaacactaccgtgacaaccgccgccggaggctcttctttcttgtcttcaggcttagacttctctttatcctctgttttctcttcctccggtgccggaggcttaggtatcggcgagagaagttcaactttccggtgactcttcctttgaaccctttcaagaactttcaaaggatccgctttctcccctttcaccaccactttgtgagtcctgcaatccgtcattacatcttcaacccctggaaatccactgagacatctacggactttacgagcacagccttcgcaatgcatgtaaaccttc

SEQ ID NO: 7252 - DNA, 529 bp, Gossypium hirsutum
  Clone ID: LIB3828-015-Q1-N6-G2
gggacagtaccccttatattgaaaataaatctccaataaacagaaattcttttttttaaatgtcaaccaacctcagatagaaaccaataccttacaacccaaattctctttgccccaaataaagagaactgaaaaacaccccaatcgtagttggggggcctttaaaggctacggatcctcaagaaaatgtatgggttaaagaaaccactcttttcaccttctcccctatgcggggccagcttgtgggggaggtttgggagccttttcagctgttggtctacttggaccaaagccgaccttaactggttttttaaccttttttcctggtccatcactagccttaccgggggctttccctcctgggcctttaaaatctaaacttgggggagggaaccgcaactggaacccatgggtgatgggtttgaccttttcccatgaactttggtgggatttcttcaacaaaaaaaaggggtttgagaccaactggaacaatgatgggttctcttcgttggaccggtttccttcacaa

SEQ ID NO: 7253 - DNA, 569 bp, Gossypium hirsutum
  Clone ID: LIB3828-015-Q1-N6-G3
ctgcaaaattacccctacttgtattatgaaatcggctaactgtgccaagccttaaaccgaagaaaaacaggcaaaaaatgttgttacgaaaaagacgaaaaccatgaaactcgctcgctctgatcaaaaggactgacaaattatcccttcgagggtaccaatcgttttatgtcatcaacacaaagttttctaaactagccatacaatcttgcaaaacttaatctctcaacaactactaacacgggaacttaaaagaacgatggctggtatcagaagcaagcggcggtttctttggtcaggttttcatgcaacagctccctcgtggagaagcatttgatcaaagtgccacaccccatgtcctttgccaactcttctcagctgagccacgtattccgatattttcttgatggattcaacctgctcagctaaaaactcgccttcaatgaaatcagtcaactgcgaatcgtggtttcgctcagccacgttgtgcaagttcaagagcttttcgtttgttagtttctcgagagacaggcaagctccattgcatataaagcatcccctttctctgc

SEQ ID NO: 7254 - DNA, 580 bp, Gossypium hirsutum
  Clone ID: LIB3828-015-Q1-N6-G5
aacgaaccttgttttatattaaaagtcatataaatgaaacataacatagaacactgtaattgagacaaaatctccaagaaaaacataactcaagacaacatttgactaaaacatgctttgaaataaaaaaccatccaacacatcttaacgtcaaaaacttcaaaaataatgtatgaaatccaaagaccagaaatcactacattaactgacttgataaagtttcaaactttgttcactcaagaagaagcttgggacttcttggacttgcttgctgccaattgagtctcaggctcttttttgacaggttcttccttctcggacaaaatcaactcaatgtggcaaggagaggacatgtaagggttgattcttccatgagctcggtaagtacgacgcctttgtttttgggcctggttaacctggatgtgagaaatatggagtgcatcgacgtctaaacccttaacctcggcattactctcagcattcttcagcaaatctagaatgaacttagccgattttacaggccagcgaccttgtccattagaatgcctgttctttgcttgtgccgtacgtccaacaccac

SEQ ID NO: 7255 - DNA, 586 bp, Gossypium hirsutum
  Clone ID: LIB3828-015-Q1-N6-G6
aaaataagattcatcaacttgattaattcgaaatttttttactttgattcaactcaactcaatcgaatactcaccaccctaaataaaggttagtatgatagtataggtaggtatggataagatcgaatggaaaggcatgcaagattgttttttaaagtagaattgaaactaaaagatgcatcaattgatacgcacacatcacatcaagcttgaatttcagataacgcaagcggcagaagtaggaaaaatgagcagtgataaggcaggggatgtgcttaggaaacataagcagttggtgcgaggcgtggacgaaccatggcagaaagaggcacggtcttttgcaaagcaagcccaaaggactcatccatgtttaattccccagtaccgggaggaagcatccagtcgaaagagtgcaacaaagtgcctaagatgtactcaaccagcacgatccccatcctggttccagcacagattcttcgcccagcaccaaatggaatcaactcaaagtcgttccctcttgggtcgattttggcaaatctcccactcagaaacctttcaggggtgaaatccagtgggttgccccaca

SEQ ID NO: 7256 - DNA, 581 bp, Gossypium hirsutum
  Clone ID: LIB3828-015-Q1-N6-G7
attgcaaatcgaaattgttttgagctatttattcttcataattactctttttgtccaagaggattttatagcaaacccttctgcaacatcattacttcttattttgtataattaataagacgacaaccaactcttcctcgttatttcatcttaatatggtatcatctctctactttggtggactgggttcactgtccataacctcttctatccctttgctctttacagtttcagcctggcaacatcctgatgcgcacctgggctgaccacactcagcacaagtcccaccacaaccctgacggcaacactctccactctcacatcccgactgtcctggcattagtgggatttttgggacttgtgggatctgtgggacttgtgggatctgtgggattagtggaatttgtgggatttgtgggatctgtgggatttgtgggatttctggaattcttgggatttctggaatttgaggaaatggtagaacgaaaccaccaggattacaattaccggaacatccagaagaacaacatttatcaggaccaccttcaaaaccaaaaccaagagtaccaatttcagcacct

SEQ ID NO: 7257 - DNA, 572 bp, Gossypium hirsutum
  Clone ID: LIB3828-015-Q1-N6-G8
cagcaaaaacaatagggattctttctatttattcctttgttttcagctcaacaacataaaatcattatccaaagccgtacaaaccggccatcgaaacgtcagataacacaatgataaacaagatatctggacaaatgaggaaagaaaagagtaatgctcccaaaagaaaaccatgtcatcagtaaccaaagcaaacctatcagttctatcactgaaatgcagttataatccctcccattattgaggaaaaaaagggaaacacgagtaactgttgaagaagcagaactgccaaggtctccaaataacttaactgcttcaaatggcaggcttcagtgtaataccgtgtgcaaccaatgttaccagatgccaacctagcagaaaagttcaacgttctacgatggccgagagaaggttagccaaaagccagcctttgcatggtcattagcaaatttcttcagtatgtagcaataattaagctccatgcaaaatcggtttgtaggaatgacaatgccaattccagctgaacttcttaatgagcctatgaacttctgcatggagaaacttcggaactc

SEQ ID NO: 7258 - DNA, 559 bp, Gossypium hirsutum
  Clone ID: LIB3828-015-Q1-N6-G9
acaaaccatttcctctatttattacatgaatcttttaccatggtccatatttgccatattgggtcacatctaggaacccgatggctaagggtttatgtagaacaaaagaggagagttaccccttattcttacaaactttggttatcagagaaaagtagatttgggggtattggagtacctattcatttcttgacaaaggcaacccccttctcaatgctagtttctagttctttctttgccttctccaagccaaccctctcatactcatttagtgggccaagagggtatatttcctcaactccgcaacgaccgagtcttaccttggatgcgaagaagggcaattcagtcacatgagaagccacaaatgcacatcgaacaatgtcagcatcacctcttaagccccgaagaatgcatcggcaaattgaaccgcagcatatgccatcgataatgttgcagacccagcaccagcctttgcctcaacgacttctgtaccaccattctgaatgcggtttgtcagatactcgatttctttttgggtgaaagacatggaggcttaacc

SEQ ID NO: 7259 - DNA, 615 bp, Gossypium hirsutum
  Clone ID: LIB3828-015-Q1-N6-H1
aaaagaaaaataatattcacataaaagaacttgccacaaattatacagattgcatccactaacaacataatataatagtctacacattttgatttttaaagaagaaaccgtattctctaaacatagtttgatatttaaataaagtagaaacaaagctctctaaaaaaacattaccagctttaaagcagttcacaaaaactgaacaaaccatttatataaccagaacttttattcagctacactatcttcattttccgccccctccgttgtagtatctggcaatgtactcaaatctatttcagtacctttctcttcttgtgaaaccgaattgtcggaagtatcaatggggtcgttatgatttccatccacagtctcattagaggaagaagtgtcttcgttttcatcttttccatttgattcattgtcaccttgtttctcattatcagtagtctccttagtcgtggaagattcaaaacctttaccttcggttgttacatttactacgttctcgatcttgcttgcatctactacggtctcattggctttttctttatatatttcttcaataaccctaccacctcctgttgtatctaaagcagaagtcccgttttgcag

SEQ ID NO: 7260 - DNA, 609 bp, Gossypium hirsutum
  Clone ID: LIB3828-015-Q1-N6-H10
agaggaactaaaccaatattaattagatagaatgaacatttataaattacaatcttcatttcattgattaaccaattccaattatttggatcagtttaaattaaagggaaagataatcttacaaaaatataaattcacctatttcctctttgctcaaccaaaatatcccaatcatacggatataaaaacttaaataatattaatttcattccaagataaattgaagcaaattttgatgaattagtagctcctcgcctacacatagcaagcttgaagttagaagtagcacccagttgagagaagtgaaaatagagagttgaggatggagtccaaatgattgtgacttaattattaggatgggactgctgttgctagaaggatgtcactcatcattccaaaaaacacgtgtatcaacaaccttgaaactttaatataatatctctgcctccagagtctatgatatggccctcagcatgtgctcctcaacaatttcagtaccaagtaactcagatggtttctgagaaatggagagggaacccttaggatcaaaagcggtgcaatcacgggggatctcgaacaaggacaaggagaactgcttatcaacaacgc

SEQ ID NO: 7261 - DNA, 566 bp, Gossypium hirsutum
  Clone ID: LIB3828-015-Q1-N6-H11
aaatgaaaaaccattgacatgaaaggtaagatggcaacaccatgaatgtcaacaacagactaaaacttcagaactcttttaaagtctaccataccctttccaaaatgagcttcttctttcttttttttttaggctctcaaggcttgagtgccaaagcaagtccgaccttggggctcttatcgatggacttggtatccacctctccagaaatggtaaagagcgattttgggcgccactcgtgctggatgagtgcgcttaccttgccggcattgttcacccgtgccttgattgtggttgatggatccaatgcatgttgtgtacccacggtgatggtgttcacattggtagagaagctatgggtcacctcagcaccaacaacagtgttggtcgatggattcacaatatggtagtaagatgcgttaactgaatcacccttttcattcagagccaaagaagcaatgaggtctgcattggtgaagctgaatcccgcgttgcatttggtgaaattcccagtcttcgtgtcgaatgagatatcggtacctagtgcaagaacatttgttccaagc

SEQ ID NO: 7262 - DNA, 576 bp, Gossypium hirsutum
  Clone ID: LIB3828-015-Q1-N6-H12
aactgaaactagtttttttatggattaatccactcaaattcggacaattgcaagtacaaatttactattgaagggaaaaaaaagcaattaagttaaaattgatcactttcacaatttatctcatttgcacaattccagcagagaccagcttttggatcttgttcatcaccatagggttcttcatgtgttcttgtgctgcctttggattttcctggaaatcaatcaaaacctgtctcattacaggatctgagagaatgttctgaatttctggatcttgcattgccttagcctgtctttccttcagttcttcggggctcaaatcacctcgattggctttgttgatctgttctacgcatcttcgaacaccatcgagcagctcctggttattggcatcgtgtttcaacccttcctggtatgtttctaaagctttgtcatactctttcatgaagaactgaacagcaccttttcttgtgtaacctttggaaaaggttgggtcaagctcaatgcacttttcagcatcttttagcccctcgggcaatgcacccaattttgtgtagcatgcggctctgttgctgt

SEQ ID NO: 7263 - DNA, 562 bp, Gossypium hirsutum
  Clone ID: LIB3828-015-Q1-N6-H2
ccataaatatggataattcccaatataaaagaatcaattcatttcagaaataaaatagcaaatgactttgtacaatcaaataatactcgtcgtttctctaaacaaaattaggcttagctcatgaaattctcaaagcaggtttagaactacgctttaaaagcacatttggcttggatggccaatgtcttcttcatttcggggcatgcttcatttttattgtgcaaatccggggtgtccagagggatattgcagcttggttttcccaagcaaaacttttcaacaacttgctttgctacgggagatgtgcagtttccttcgacgtagtgcccacaggcaccaaaaggatcaccaaagctggcaaactccacggcaacaatttgtttctggcttggacatgtaagttcaacccttggtttcaaatctttctccaaggctacaagtttgccacctttgccttcgaataacctcactgacggtaggtgtttttcagttataaaaccgcaaatggtatctctgtcaaccagaactatctcaatatctttagggtcacctttctcgtcct

SEQ ID NO: 7264 - DNA, 581 bp, Gossypium hirsutum
  Clone ID: LIB3828-015-Q1-N6-H3
agagcaataaaaaagtgaactgtgctcagcttgcattacagatccccaaataaatagtataaagtagcaccaagaaatgttacaaacacaacctaaaaaccagcctcataatgcaaatgcagtaccatgcatcatagtaacaactaataaagaatttaaatgaaactgcgccatattattgttattgcattttactaaagttcccctaacagagtaaatgagctcaatataacacatgtaatatatgatcaagtaatgtaaaaggtccaattctttcctcccctgcctctcgggttaccgatttacctcttcaatccagctttacggaagagaacaagtaatgcacgaaccagaaagatgaaaggaacccgatcgtgccagtggccaacatgattgcgaggaccatgaagagagaataccccaagtagagagttgcagagaccggtccactcaaactcttgagatcgaatatgaggtagtttacggagtataagaagatgtagatggcgactgaaccagaagcgaagaatgatttccaccaccatttccagtcttctacgcagagatgcatgtaagttaac

SEQ ID NO: 7265 - DNA, 383 bp, Gossypium hirsutum
  Clone ID: LIB3828-015-Q1-N6-H4
gatataaaaaagagcatttacttattttatatctgcaacatgaagggacatttggataatcatttccttagtcccaaccaaaatataacctaattattacatccaaaataaaaaagttaataacttaattttttcgttaaacaaggaacatttggataaacatttccttcatcccaactctgaacaacactcaaacaatgagatttggggtgcccatcatatattttaccatttattccgtaatccaattgtatgtctttcatgcggatatttttgcatggaactgactcactgcataaaagttccaccgcaatttcaccacttgttgtcccttttaaatcattatacaagatattgctaacctccacagctgtactataatt

SEQ ID NO: 7266 - DNA, 568 bp, Gossypium hirsutum
  Clone ID: LIB3828-015-Q1-N6-H5
gacaaatgaaaatggttcagtttattcaagttaatattgagcaattcactcttttgcatatgattgcataaccaaacaagaacagaggaaaaagaagaaaaaacttgggaggtagaaaaaagatcatggagaaagttcttgtatagaagttaaactgggttcccaacctgattcccgcaacaatcctgtccttgggagtggaggtacaaaaggcttctttacccttctactccttcgcagtgaatgtttcgacaccctctcctttggaactttaggtaccttggaaggcttggtaacatagaattcttgtgcagaattaacagattcctccaagttttctccagatatatcccaagtgatccttgcatctgacatatcttctctaccttcagcagcttgtttgaatttaagcttcttcctgtgtctatatttcagtttttccactgtagaggatgggataatgtaatacttttggccaggcaacaggctatcttcaggccataaaagggactcatcaggattcgtaaaaacttccggacgtgcaatacacatccctggatatttattc

SEQ ID NO: 7267 - DNA, 605 bp, Gossypium hirsutum
  unsure (1)..(605): unsure at all n locations; Clone ID: LIB3828-015-Q1-N6-H7
ttttntttttaataattaagtatatatccttggaatttcctaagatataaaggacaataaataatttcaaaaagtagtatagtgtacggttgcaatcagggtaaaaatattcctcccatgagaggactaatgttcttctaggacacgagacaacctctctaaactaagttattcaaaaagagaataaaaataatatttgcggtaagcaaggcaaaatctggaatgtaataaataacattgcaaatgaatttgatgacccatctgtagttgccatatgattatgccccaccagaaccatacttctttccgaaaacaatcatttggagcttatcatagcctgcaagcacacccgcaccagcaaccgcacgcaggatgttggcaccagctcccttaaacagtgacttaaagccctccttcttaagaatttgagagaacgcatccatcgagctcctgtacttcacggcttcacccgatgtcatcatcattcttctgcggacagtgtcgatgggataggaggcaagacctgctccatttgtaataacccaaccaagagcaaagctagcaaagaagctatcctgcaactttccaacaggataaccggcttt

SEQ ID NO: 7268 - DNA, 329 bp, Gossypium hirsutum
  Clone ID: LIB3828-015-Q1-N6-H8
gaacaatatttgtttggccgcatttattaatttatttatgtgtaacatgccaaaatacagaggaaaggtctatctactgatcaaatattgttctgacaatttagacagcatgacaaaaacaagcatcaagctaagcccaccagacactaatcattctaatcatgttgttgacaatgacatgaggaaagtctatgatttatgccattgcagtttctttgatgctatattgagtgtagtagctctataccttgacagttaagaagatccgagaaggacatacgagacctactcggatcttcttaactgtcaaggtattgagtgtagtagct

SEQ ID NO: 7269 - DNA, 579 bp, Gossypium hirsutum
  Clone ID: LIB3828-015-Q1-N6-H9
gcaaatcgaatattgttttgagctatttattcttcataattactctttttgtccaagaggattttatagcaaacccttctgcaacatcattacttcttattttgtataattaataagacgacaaccaactcttcctcgttatttcatcttaatatggtatcatctctctactttggtggactgggttcactgtccataacctcttctatccctttgctctttacagtttcagcctggcaacatcctgatgcgcacctgggctgaccacactcagcacaagtcccaccacaaccctgacggcaacactctccactctcacatcccgactgtcctggcattagtgggatttttgggacttgtgggatctgtgggacttgtgggatctgtgggattagtggaatttgtgggatttgtgggatctgtgggatttgtgggatttctggaattcttgggatttctggaatttgaggaaatggtagaacgaaaccaccaggattacaattaccggaacatccagaagaacaacatttatcaggaccaccttcaaaaccaaaaccaagagtaccaatttcagcacct

SEQ ID NO: 7270 - DNA, 527 bp, Gossypium hirsutum
  unsure (1)..(527): unsure at all n locations; Clone ID: LIB3828-016-Q1-K6-A10
ctttcctatcttcatttcttcacactctccgacgaaagaaccaganaaaaatgaccaagtgttacccaaccgttagcgaggactaccaaaacgccgttcaaaaggctaagaggaagctaagaggtctcatcgctgagaagaactgtgctccactcatgctccgtctagcgtggcactcagctggaacttttgatgtcaagaccaagaccggaggtccattcggaaccatgaagcaacctgctgagctcgctcatgctgctaacaacggtctcgatattgcagtcaggcttctcgagccgatcaaggagcagcttcctatcctttcatacgctgacttctatcagcttgctggtgttgttgctgttgagatcaccggtgggccggaaattccattccatcctggaagagaggacaagcctcacccaccacctgagggtcgtcttcccaatgctactgagggagctgatcacttgaggcaggtgtttagtaatcaaatgggtcttagcgaccaggacattgttgctctt

SEQ ID NO: 7271 - DNA, 625 bp, Gossypium hirsutum
  unsure (1)..(625): unsure at all n locations; Clone ID: LIB3828-016-Q1-K6-A11
cggacgcgtgggtgagctgctgcctngaaagtgttatggcagtgatggttacacgaaacaaccttgccccatagattctataagtttgaggatagccaggttacaaaaaatcctgaggacatttataggtgatagaaacaatgaaaagcagtttttaggttctcttaatgtgaaaattaaagcatcacctatcgttcatttccagttagagttggaaaaggaaattgggaacaatgagagtgttcgcagtatgttagctgaatggaggacaaagccaactgttgagagactatggtttgatgtaatgacaagagttgaaggagacaaattgaatccccttacgttaaagaaggtccggccttttgttagtgtagatacagtctcatggagtaatttattgtcaaacatttcttttacaaagttcccatccattcttgtccctcctgaggctctgacattgggtgtcaaatggtaatggaaaaccttgtaagatgtttttgttttcggtgatatttacagatcaatgctatacgccattatctgtctgttgaatcttcggttgatttgtgtaacatatgcatgtcacttatgtcgaacccaccttggattggatttgtaaataata

SEQ ID NO: 7272 - DNA, 602 bp, Gossypium hirsutum
  unsure (1)..(602): unsure at all n locations; Clone ID: LIB3828-016-Q1-K6-A12
tgggnagggtagccaanatacttngactgaggagaaggtgattgggagtttgatgaacttgaagggaactgagagctggtgatactgcgccaggcaaataggtcagggggcctccattgcttttcaacggaacctagtgggatgggagagattgagaaatttccaacccccactatttcttccaaaagttcttttctagcaactgtgctgttttctattttttactctgctttttgctggtgccagtgttggccggataactggcaaacgatgcccctcttccggtccactttgaaggaaaaaaaaaggttaaaaagccgaatatattatgtcaaacgcatatccatatccaggaactcagataataggatacgaaattgtttttaacttttggtttatggttgctttatttaggtctagtaacccattgccttgttaaagacacaaggtgttgagcaaggtcgggttttatcataattatgccccgtttcatcttagcagttcccttcttgttgcttgttgtggacagccgttgtttcttttcccccgtagtgactgaaattgttcgggttacaatggtttttttccttgcgtattccttg

SEQ ID NO: 7273 - DNA, 612 bp, Gossypium hirsutum
  Clone ID: LIB3828-016-Q1-K6-A7
cttgtctatgataggaataatgaaatagtagttcaatgagacgctcggggtttatccacgggatgcagtgtatctccgtctatgattcgccggaggagaaaagagatgataggttgcggttgctttcgacggaggaagaggaggaagagagagacgatgatgagtcggggtcttgcagttcgtcgtcgatatgaaggaacagcgatgattccggtggatcaccatcggatgatgatgactcaccggaacctgaagtacaaagccagcttaaaggacctttggatacaatggatgctctacaggagattttgcctttgagaaaaggcatatccaagttttataatggcaaatcaaagtcctttacaagtttagccgatgcggctgctgtttcctctgttaaagattttgcaaagcctgaagatccctacaataggaaacgcaagaacttattagctcgcagttcttcattggacaagaaacccaacaatcttttgggaaacattggaactaaaatatcaatggcatcatcgccgtctaactgcctttcacctctgcatccacagtgtaaaaaatcaactaccatcatcaaaccattatcatcatcattaactg

SEQ ID NO: 7274 - DNA, 601 bp, Gossypium hirsutum
  Clone ID: LIB3828-016-Q1-K6-A8
ccaaaaccaacacgccttctttgcctcgtgtttcatcacctggcgttaactgctttctttaaaccagcaaaatgggtgccggtggtaggatgccaattgacggtataaaggaggaaaatcgaggctcggtcaatcgagttccgatcgagaagcctccgtttacgctcggtcagatcaagcaagccattccgccccactgttttcgccgctccctccttcgatccttctcctacgtggtccatgacctatgcttagcctctctcttttactacattgcaacatcatattttcactttctcccacaacccttttcctacattgcttggcctgtctattgggttctccaaggttgcatcctcaccggtgtttgggtcatcgcacacgaatgcggtcaccacgctttcagtgactaccaatgggttgacgacaccgtcgggttgatccttcactccgcccttttagtcccgtacttctcgtggaaaatcagtcaccgccgtcaccactcgaacaccggttccatggagcgtgacgaagtattcgtgcccaaacccaagtctaaattatcatgctttgggaaatacttcaacaatccacccggtcg

SEQ ID NO: 7275 - DNA, 566 bp, Gossypium hirsutum
  Clone ID: LIB3828-016-Q1-K6-A9
aaatctttgaggttgagttctcaaaagggatttttttgatctgattatcagcctcctcaataggtagtgtcggttcatgactgggaaagtttagaacagataatatagagagaggttacattttcgtattttctcacacttttggtctgcaaaaaagcagatgatttatattttgatggtctgatctataatgttaatgtgttttgctattataccatcaaaattaaacttggatacaaggaaagagtatggatataattttggttctgtaatattattattaatttggaaaaaggatggtatgaaaaaaaaaaaaaaaaaaaaaaaaaaaaaaaaaaaaaaaaaaaaaaaaaaaaaaaaaaaaaaaaaaaaaaaaaattttggggggctttcccccttgggggtttattaaaaaacaacccccctttttttttgggggttttggaaggggaatttgggaaaaaaatgggaaaaaccccccccggggggaaaccccccccttcccctggaaattttcttatttgggccgaaacttctaaaccggttttccattttttgggggaagc

SEQ ID NO: 7276 - DNA, 619 bp, Gossypium hirsutum
  Clone ID: LIB3828-016-Q1-K6-B10
ccaaaattcactctcgatctcgtgctcgtcgcatgaaggaagccaagagaaaggacgtcactctggatatggtaagcgcaagggtacaagggaggcaaggttgcccacaaagatcttatggatgagaaggatgcgtgtacttagacgcctactccgcaagtacagggaatcaaagaagattgacaagcacatgtaccatgacatgtacatgaaagtcaagggtaatgtgtttaagaacaagagagtcctcatggagagcatccacaaatccaaggctgagaaggccagagaaaagacattggctgaccagtttgaagctaagagggctaagaataaggcaagcagggaaaggaaacatgctaggagggaggagcgattggcccagggacctggaggagtagagaagccagttgcagcaccacctgccgccactgctcaaccagctggtggttccaagaagtccaagaaataaggaggccatctggcgaagaagtgtgagccatgaatttagaaacatgtccaagtggtttttttgtcgagccagtctgctgttttggtcattatgaacttgttttaagttggattaaagtttcatgattttgttctcaatttccatgct

SEQ ID NO: 7277 - DNA, 537 bp, Gossypium hirsutum
  Clone ID: LIB3828-016-Q1-K6-B11
ttgatgatgaatacataaacgatttcagaagcaagaatgatgatgatgaatctatcgtatacactgagaatgtggtaaacagtagcgaggaaactgttgcagcgattaggaaattagacaactaccatgatttgctcattgttgggagaggacatggcgtgatgtcgccattaacaaccggccttaccgattggagtgagtgcccggggctcggtgcgatcggagatattctagcggagtcggatttttcgtccaccgtatctgtgctagtaattcaacagtatattgggtcatcccaacatgaattgactggatcaccgcatagcacatctcaatccgacgacgagcttatccatcgccggacatggtcaccaaagaaaactgattatatttgacttttaaatctagaattccactccatccaaattccaattagccttttgtatgtctaagtagaatcagtgttggattatagcattactgatttttttttaaaggtgaactttttattcttaattgatttggaagtagaatttc

SEQ ID NO: 7278 - DNA, 305 bp, Gossypium hirsutum
  unsure (1)..(305): unsure at all n locations; Clone ID: LIB3828-016-Q1-K6-B12
ctctttccgagnaagtcacgtaattcccttcgtgctcatcttgacatttcctgtttttgtcgtgggagattctctctttttttgaataggtccgcatgttaatggagtctgagatgttgtcgtagcctgtgttggtcgtaggttttttaaattatcctccactgcaaacattgttctgctttagcttacattggtgtttattatgggagctcggatctcctgttttcttgagtattaaatctagatgttgcttttggaacttgaaactccatagttccagcccgtgtttaattagcaatgtcctt

SEQ ID NO: 7279 - DNA, 580 bp, Gossypium hirsutum
  unsure (1)..(580): unsure at all n locations; Clone ID: LIB3828-016-Q1-K6-B7
gggnaaatccaaggtattcttcgacatgacgattggcagccaaccagctggccggatcgtaatggagctcttcgccgattgcactccacgcacggcggagaacttccgtgccctttgcaccggggagaaaggtgtcggacgcagcgggaaaccactccactaccaaggctcaaccttccaccgcgtgatccccaacttcatgtgccagggaggcgatttcaccgccggaaatggcaccggaggtgaatcgatatacggagccaagttcgaggacgagaacttcatcaagaaacacaccggaccggggatcctctcgatggcgaacgccggaccgggaaccaacgggtcgcagttcttcatttgcacgactaagactgagtggctcgatgggaagcacgtggtgtttggacaagttgttgaaggaatggatgtggttcgagacactgagaaagttgggtctagtggtggaagaacttctaagccagttgttattgccgattgcggacaactctaaaattaaaaagacagccacggtggttcatgtctgaagttttaagcttcattttatttttgttttaaa

SEQ ID NO: 7280 - DNA, 613 bp, Gossypium hirsutum
  Clone ID: LIB3828-016-Q1-K6-B8
gtaaaatatagtaccactgcttttgagttagaatttgtggttttgtgtgctctgtttatacatgtttagatgcggttatgtatttttctttgttcttgcattgtggtacaggctgttgaatttgggcaaaagcttgccagtgagcactttttccgacatgttcttgagtgagtccaaccttcccagtttattttgtttttgtgaccctgtaatctgtcgtagaaaatccttattttttttctgtgatgctttataatagtgagaatctttttgaggatggtgaccacttgtatcggttcttggaccatgatcctactgtgtcatctcaatgtcacaacattccaaggggtataattgaactgaagccaaagcccattgctgaaattgcatcaaggctgaggtttttgtcctatgctatttttgaagcgtatgcatcagaagatggaagacatgttgattacagaagtattcatggaagtgaggaatttgcaaggtttgatgcctcttagtgtatgacattgctcactccattaacttcaaaattttatgcatttctttcaaatgctcaagtctccattgtgaatggaaaaaaattaggtacttaagatagttc

SEQ ID NO: 7281 - DNA, 612 bp, Gossypium hirsutum
  Clone ID: LIB3828-016-Q1-K6-B9
cggccgcgtgggctccgattcaataattttgaaggttgtttaccacatgagctcttcgaaaggatctggatgcattgtttttgaacgataatcgcttcacttgcaacatccctgaaacaatcggcaaatcgtctgtctctgttgtgacattcgccaacaacaagttcaaaggatgtatcccacgtagcattggcaagatgtcgaacttggacgagatcattttctcaaacaataacctcggtggttgtttccctcaagaaattggattgcttcgcaatgttactattctcgatgttagcaagaactcgttcgtgggtagcttgccagcaaacttttcgagcttggagaaggttgacgttttggatatttctgggaacaagttgacggggagtatgccggaggatatttgcaagttgccaagcttgtctagtttcaagttttcttacaactatttcagtgaggagcatatggcttgtacaaaacctgaaaggaagaacattgaggtggatgatactggtaattgtgtggctggtcggatgaagcagaagacagataaagagtgcaaacaggtggtgagtaacccggttgattgtagcaaggacaaatgtactg

SEQ ID NO: 7282 - DNA, 576 bp, Gossypium hirsutum
  Clone ID: LIB3828-016-Q1-K6-C10
aatctccctttttcttctccctaatcgcttcgccccataacccatctaacaatggtggcctcaaaattctgttttgctttttctcttgctattctttcaatcttggccgttgatgctgcccaacaccatgctctggcgccctctccttcttcccccgtggactgctcctctctgattctcaacatggcggattgtttgtcctttgtgtcgagcgggagcaaaacgtcgaagccggaaggaacctgttgttctggcttgaaaactgtgttgaaagctggaccccaatgcttgtgtgaggcttttaagagcagtgcttctctgggtgtcactttgaatgtcaccaaggccatgactttgcctgctgcttgcaaagtctctgctccttctgccactcaatgtgcattgtctctcagtcctactggtgcaccaggtatggcaccgtcagcaatagcaggtgcgccggcagcattctcaggaggagcaaatgaggcagcaccggcaccatctcccggcagctctagctctcaagttgtttctgctttaatgggatctctgatcttaggcttcataattatg

SEQ ID NO: 7283 - DNA, 629 bp, Gossypium hirsutum
  unsure (1)..(629): unsure at all n locations; Clone ID: LIB3828-016-Q1-K6-C11
gnaaagaatatttatttcggccaactcggcttttcatcgtataccgaacagcgccctcttccagactcgtctctcttcgccctaccgtatccctgtcagctcatttctgctcacgtctctcctcctcttcctccgatctctgacccaagccctctcttccactcaagtttccgacgaacccaaccaaagacccggatattaaataaagactatgttgtcttcggatggctcagacaaccatccacagtccgttgctggtgtaggctggtatatacttggtgaagatcaacaaaatgttggcccttatgcaatttctgagttacgtgagcatttcttaaacggatacctcactgaaagtacacttgcatggtctgaagggagaagtcagtggcaaccattgtcctcaattcccgagtttgtttctgtaatttctcatcaggccaacaatttttctgctacagtgtcctcaggcgatgatgatgctttcttgaacagtatgaaggagggcgataattcaaatgcagagccttccaatgatggtgatggtagtgatgaatttgagaaatggcagagagagattagagaggctngagctgagacagaatgtttgaaaactggatctgtttcta

SEQ ID NO: 7284 - DNA, 368 bp, Gossypium hirsutum
  Clone ID: LIB3828-016-Q1-K6-C12
aaatactctttttattaaaaggaaagaaggaggaggaggaaatggatggaaaaagaatcgagggcaatgaagtttatgctctagcaatgtgtgtaagtattctcctctttgctccgattgttgtgtcacaaccaataccggcagataaatcccaagtggaagcttggtttaatggcattatcaagccggtgaaggaaaggggtacaaccttagaccctgaattggttcaagccgagacagaacctagaatcataaaggtgatgcaaggtgggggtggagaattcaataccatatccaaagccatcgagagcgctccatcagggaacgccaaacgcgtgattatatccctcaggacctggattttacaa

SEQ ID NO: 7285 - DNA, 611 bp, Gossypium hirsutum
  unsure (1)..(611): unsure at all n locations; Clone ID: LIB3828-016-Q1-K6-C7
agaaacccggttcgtaaaccggnttgtgtcgtcgatgttcaatacggtgtcgggngaaaaagatcgcggtgctgggattcgcattcaagaaggacactggggacacgagggaaaccccggcgatcgatgtgtgcaaagggctgataggggacaaggccaaactgagcatatacgacccacaagtgaaccaagaccagattcagagggatctttcgatgaagaaattcgactgggaccatccggtccatcttcagccgatgagccctacttcggtgaaggacgtaagtgtggtttgggatgcatatactgcaaccaaggatgctcatgggatttgcattctcaccgagtgggacgagtttaaaaacctggattaccagaagattttcaatgacatgcagaagccggccttcgtgttcgatggccggaacgtcgtcgacgcagagaagctgcggaaaattggattcatcgtctattccattgggaagccattggatgattggcttaaggacatgccagctgtggcttagagatattctgaaccaaacttgtttcaaggttgggctactctaaatatatgttttttctattgcatttatttgcatctagtttta

SEQ ID NO: 7286 - DNA, 625 bp, Gossypium hirsutum
  Clone ID: LIB3828-016-Q1-K6-C8
gtttttggccacaatacctcttgatgcccatcgtgcgcatcgtcaaaattgattttaacgatatcactagcatttctatctccccaaatgtcccatagtgcacaacagaatagtcgacagtggtaatggggtaatgatcaaaaacccaggtaagccattgtataaaatccatattagtagctattaaaatatttgggaatgataatgctgtccagacttcaactaaaacaaggcatttgcggaatagatgatcacttgtttcagctcctcctctacaccggggacaaattgtgttattaactagcttcctatgctgcatgttaactagtgtaggcaagtagttccatgatatcctccagattgtgattttgatttttgtagggagattttcgagccagagttatttgtaaaagttcctatagtcgatttgtaaagcataagctctaggattataaccataattttgtaatagtttgtaggcgctacgaaccgaaaattttcccgaagattcaccactccatacaagaaaatcatcatggggttcttgtgccaacgggatacaaagaatcttttcagcatctccctccaaaaagtattagcccaatacaatctttgaacccatgcc

SEQ ID NO: 7287 - DNA, 623 bp, Gossypium hirsutum
  Clone ID: LIB3828-016-Q1-K6-C9
ccccgcgtccggttacagctactaagagaatagtccaggcaaaatatatggatcaaaagaagatgacgaagatgctctgaagtcactttcagaaatacatttagcagagaaccaatctaaagattcacttgcaaccatgatagtgaagtttcttggaaaattgtcggatcaagaatcatccaaaataagaaaccagttacttagcaatttcatccctgatgatggatgtccatgtggaactaatctgttcatggagacgcctgcacaaacatatgaatctggatcagcagataaccaatctcctgaaaggttgagcctccattattcacagtagatgatgatacaatcaaaggtcaaacaggtgccgaaacatatttggcacctgaaactcaaaatctcctgagtgttcatgaacttcttgatgctctttcagagacagctcatcaagttggaagacagtctgtgtcagctccccctgacatgccttatagtgaaatggcagggaactgcgaggcacttctggtgggaaagcagcagaagatgtctgctgtaatgagtgctcaacagaatcgagaaggtttagtgagcatttccacaaaggaggggcaacctcgttcacatgc

SEQ ID NO: 7288 - DNA, 277 bp, Gossypium hirsutum
  Clone ID: LIB3828-016-Q1-K6-D10
taaattgcttgatataacggtgttgtcgttgctacgcaaagagggcatccctcggtgtatggatttggagggtcaacaggattggattgtagccattggtgtttagctggtgttccagatacttggaacgaaattcttttcaatcttattttttgagtacattgttaatttgttaaatttagctaataattttcggggaaagagataataatgttataatgatcaatgcttgatttgattattatcgagacttaaatggtggttgtagtttcatgtc

SEQ ID NO: 7289 - DNA, 472 bp, Gossypium hirsutum
  unsure (1)..(472): unsure at all n locations; Clone ID: LIB3828-016-Q1-K6-D11
cttgatttaagctgagaaagggnagaatgtaatataagtacaaaatagcggtcgtaagctccttttctgtcgtatttaattcatcatggctgtggatgtaatggatactattacagtcaaatgcagtacacattggtagcagtgagagccgaaacccgtaaaacacgaacgtactggagcctcatgctttgtatgttttaaccctatccccttttattggcttggagagtgttagggttgagtgtttaattgtttgaaacatacattatacaggagattgttctcatttgcttggtttgcagtaaccccacctttcttggtgttcgtatgtttggcgtatttccgtttttgctaccatttttactgctgcttctctagcaaagtccgatgatttctttggaaagcattcttgctgccgaagcaatctttctgtaactcgatatttggattaagagggtataatattttccct

SEQ ID NO: 7290 - DNA, 379 bp, Gossypium hirsutum
  unsure (1)..(379): unsure at all n locations; Clone ID: LIB3828-016-Q1-K6-D12
gngttaaacccctaaaacactttcttcttccatctctcttctcccttaaacaacaagcttaaccctagcaacaatggcatccatgctgcaaccccaaatcattcttttgaaagaagggacggacacatcacaggggaaggcgcagctcgtcagcaacataaacgcttgcaccgcagtggctgatgtggttagaacgaccctgggtcccaggggcatggacaagctcatccacgatgacaaaggaaatgtcaccatttccaacgatggcgccaccatcatgaagctcctcgatatagtccatcctgccgccaagatccttggcgatatcgccaagtctcaggactcagaggttggtgatggtactacatctggcgaactg

SEQ ID NO: 7291 - DNA, 612 bp, Gossypium hirsutum
  Clone ID: LIB3828-016-Q1-K6-D7
acaagcttaggtccagggcggagatcccaccctttttttcgaatggaacgtcacctatggcaccattgctcccttgggagtgccagtaaagggtattcttattaacgggcaattcccgggaccaaatcttaactctaccaccaacaacaatatcgtggtcaatgtgttcaataaccttgatgagccattccttgtaacatgggacggcgtgcagcataggaagaactcttggcaagatggtgttctgggaaccaactgtcctatcccccctgggaagaattacacctataaattccaggtgaaggatcagattggcagctacatgtactatccggtgacggctatgcacaaggcggttggtggtttcggtggcctccgtgttaacagccgtctactcatccctgttccctacgctgatccggctgatgactatactctcttagtgggagactttttcaacaagggacacaccagcctcaagaagattcttgatagcggtcgcaaccttgggagatgtgacggtgtccaccttaaggggaaagttgcgaaaggtgatgggaaggatgaacctctgtttacgatggaagcaggcaaaacgtacaagtacaggat

SEQ ID NO: 7292 - DNA, 577 bp, Gossypium hirsutum
  unsure (1)..(577): unsure at all n locations; Clone ID: LIB3828-016-Q1-K6-D8
cggccgcgtgggcggccgcgtgggtttcggcccactttgcggctcagacatcttccaatcccatagatcagtctctttggaggttacctgctcttcctatacaaactttccagctgcaacaatggtaaactgcgcacgcattccatgacacacattcatgnagtgatagcctttgaatgatataaagcacataagtgcacatagtaggattagacgctcatcattctaaaatgagtgcgacaaggataatcatttttcgttaggcatgtgatagggctactggaaaaaactacagtgggcaaaactctctcccatgtactctggtattcattctgagacagtgacatattaatagagcaggacgcgaatggaatgtctgtatgctgaaatatttaagcttcatggggagagtttcttctacaaaaaaagagactgaggtattacagatgctctcttcaaagaaacaacttgccgtatctactgctggaggagcagccgtactggatgtaaactgggactatatgcatgaaaaggggattaggagcagctcagatgtacctttggaagccttggcaca

SEQ ID NO: 7293 - DNA, 605 bp, Gossypium hirsutum
  Clone ID: LIB3828-016-Q1-K6-D9
atttttcatttctggagaacatagattctgaggaagagatggccgccgcgaactcgctgcaaaagtaacgagccaacttcgagtggctcggagcacgttgggttcgttctcgagagccttctcttcagatgcattggttgaggttaaaccaggcgaggttggaatggtttccggaatccctgaagaacatcttcgtaggagggttgtgatttattcgcctgcaagaactgcaactcaacaaggatctgggaaagttggaaagtggaagatcaatttcgtgtcgacacaaaagtgggagaacccattgatgggttggacatcaactggtgacccttatgctaatgttggtgattccgcactcggttttgatagtgaagaagctgcaaagtcttttgccgagagacatgggtgggattatgtggttaaaaagcgccagacaccagtgctgaagccaaagtcctatgccgataacttcaagtggaaaggacctgctgtatctgaaaagtgatactatactattgcagatcctgttgcttttgattttcaaccataaatcaagttgcgagacgggggctcaggttttctttgttgcacattttctgctg

SEQ ID NO: 7294 - DNA, 219 bp, Gossypium hirsutum
  Clone ID: LIB3828-016-Q1-K6-E10
aaaaattggcttcaaaaatttctcaaggttgaagatattgatacttttaatgtggtgtaatattagttatgcacttggacaatattgttgttatcatgtggtgtaatattagttatcatatggtgtaatattagttatgcacttggataatgttgttgttatcatgtggtgtaatactaattatgtatttggaagctaatttataattatttaatcctt

SEQ ID NO: 7295 - DNA, 625 bp, Gossypium hirsutum
  unsure (1)..(625): unsure at all n locations; Clone ID: LIB3828-016-Q1-K6-E11
cagaaagtgcttgcctccttccgatcatgctcaagcctaatgaagatcgtagagtgatccccgccgaggttttgatatgcggtggcgcatcacatgatgcgtacgccaaggccgatttgcaacgtcctaaagtgtttttgccagggaacaccgactgtgctcgccttgatatcaccaaaaggaacggcaaatggaagatcataaacatgccatcagctcgtctgttgggagacatggccgttttaccaacaggagatgtgcttattgttaacggtgccaagactggttcagctggttgggatgacgctagggagccgaatttgaaccctgttttgtacaaatatcaaaccgatggaactggttccaaattcactgtgcttaacccatccaacatcccccgcatgtaccactcctcatttgcactccttcctgacgcaaaaatcctcattgctggaagcaacacgaaccccggttacctcgatgatgcattgttccccactgaagtccgggtcgagaaattctcaccacattacttggacccgaacttggccatgttccgacaagagatcattgatgagaagtccaataaccaagtgaagtacggncagaaactcacagtacagat

SEQ ID NO: 7296 - DNA, 445 bp, Gossypium hirsutum
  unsure (1)..(445): unsure at all n locations; Clone ID: LIB3828-016-Q1-K6-E12
aagccagtanaacgaagcagaggggagttcaaatcaaatctcttattctttaaaatttctgggaggaattgtatctctctctctctctctctcctctcagctggacgagaaagaggaaatttcggttggtataaaaatgcaggtgtttgatagaatgactattccaattcgcagagtttggaccggtgtcgccacccgcttcggcgttcgtaaaagtgctcatatgaagcttcgaaaagatataagcacttgcgaatacgaggatgtgcgagtgatgtgggaaatgctgagcagaaacgaagcagaaaccattcgatccccaacagcaagtaaaggaagatgcagaaagagaccaatgtggaattgctttgaatgggcaaagcgagctccttttctttgtcgaagcttctgaataactgtcagagagcgtgtcttgatgccactc

SEQ ID NO: 7297 - DNA, 617 bp, Gossypium hirsutum
  Clone ID: LIB3828-016-Q1-K6-E7
caatatcccattctctttgtcttttagatcccagcgactccaaagcatatctgggcaatgaatccttccaggtcctgtacaccaccgtggctaacgaaatctggaggattctacccacatcagctttagtaaagttcgcagttcctaaaacccgcgcatcatctgtcactgagattttctcccttttacccactctctagcacaaccctttctgcaagtcctttcgttgccgatatactctgccaggtataagaagatcaagaactaaagaaatcaaatttagatcggggaaaaatgaaagtggtcgactagttgccctgttccattttacatcgtccgagattttagattcaagtttcaagctcggggatcgtcagcaaagtctatcacactattgaccgcttttggtatttataaagttgcattttggaactatggcatgtgtaggctgcaatatatttttggaaatgttgaatttggttatgtaattaaagccatgctaatatagcttgctatttttgtttggatttagttttatgggtgcttagttataaggtttagtaagtttggtttagaaatttggttatgcttgataatggtttaaattcgtttagtta

SEQ ID NO: 7298 - DNA, 480 bp, Gossypium hirsutum
  unsure (1)..(480): unsure at all n locations; Clone ID: LIB3828-016-Q1-K6-E8
tggntgcacaacggcttgtgaaacgggcttcgtacatggnaattcaacgatgttcntgaaatctacaagaacacaattagaacgagagctctcactggaagatgtctccagtgtgaaagatttaccggcctacaatctcctgagaaggtgaccacagtcttgccttcgaaaaatggatgtgtttcatcattcaaacaatatttgtcatacataattgcttggtagatgagtaataaagcgaagaaaattatacattcattgtagaaatggaatatagttcatggaaagtgtgagaattctgcttttagatatacataatgttgacttaggaagggagatttgtatatcagaaatcaagcttcaagcttcaagcttcaaccaaaatacttatggccattacctgcgtcaccccaaccctaaaaatgttgattttctgtttatttagtctaatttcttcatgatatggattttctagctctt

SEQ ID NO: 7299 - DNA, 306 bp, Gossypium hirsutum
  unsure (1)..(306): unsure at all n locations; Clone ID: LIB3828-016-Q1-K6-E9
cccagcgtccngacattgagacgatcatcattctcctcctccctatctgtcgacgaaagccatactaacaatggagccaacagcattgagcccagacgtgacgagagaaagcgccaatgctgtcttgtttgaagcaaatccggcaaactgaactattgtcgggctgtaatacataacggtattgatgcccgaaaactgctgagcaacttgaaccgtcaccccagcatagagtccccttcgcacaacaacattgcgtaaagcccctttcatttttgctatgaaattatccccaatggcttgttcatc

SEQ ID NO: 7300 - DNA, 635 bp, Gossypium hirsutum
  unsure (1)..(635): unsure at all n locations; Clone ID: LIB3828-016-Q1-K6-F10
cggacgcgtgggttacaagcttcctaactctcatgatgccagaatgttctacttcttcttcgaatcacgcaatagcaaaaaggaccctgttgtaatctggttgactggagggccaggttgtagcagtgaattggctttgttttatgaaaatggccctttcacaattgctgataacatgtctcttgtttggaatgagtatggttgggacaaggcttataaccttctgtatgtggaccaacctattggtactggctttagttacagttctgaccgaagggacattcgtcataatgaagatgaagttagcaatgacctatatgatttcttgcaggcattctttgcggagcaccctgagtttgcaaagaacgacttttttataactggagaatcatatgctgggcattacattccagcttttgctgctcgagtccaccgtggaaacaaagccaaggaaggaattcatataaatctaaagggatttgctattggtaatggcctgactgaccctgcaatccagtataaagcttacacagattatgctttggacatgggggtaagtaaaaagtctgactatgatcgtatcaacaagctgggtccagttttgctaaatggcaataaagctttgcggnactgat

SEQ ID NO: 7301 - DNA, 534 bp, Gossypium hirsutum
  unsure (1)..(534): unsure at all n locations; Clone ID: LIB3828-016-Q1-K6-F11
caaaatgattggaatatttgggtttagcagcaattgattgttgtcgtcaatgaccttggactcagtagggttgagtgttgagagaattcacaacaagggctgcttgatataccaacttgaagatgctaacaaacacacacacatatatacgtatgtatgtatataatttcttttactattagtgtatttttcatgattaattctagtgtctcggtgaggctgccgtagtagcacctatgtaaatgatattttagcgcttggcttggtttggctttagctttttgggaatgatttatggccgtcgaactcttgttgaaagaggcttgccatttgtaaattatacaaatactgtattcttttgttgtactgataataagttttatgtttctgaaaaaaaaaaaaaaaaaaaaaaaaaaaaaaaaaaaaaaaaaaaaaaaaaaaaaaaaaaaaaaaaaaaaaaaaaaaaaaaaaanaaaaaaaaaaaaaaaaaaaaaaaaaaaaaaaaaaaaaaannangggggggggcccttttaa

SEQ ID NO: 7302 - DNA, 340 bp, Gossypium hirsutum
  unsure (1)..(340): unsure at all n locations; Clone ID: LIB3828-016-Q1-K6-F12
cgtcgtccgcaattactacngaacgaacgaatttattgttttgttgaagaggttngagaaaaaaaaaaaaaaaaagagcaaagttttcggttatggcgtttgttgcaggaatggcaactacgtcgtcgtttggtatggtgaagcttcacagcatcccctcggtttctgccaaagggaaaactggtttgaaacttatgagcgtgaaagtgagagctgattcttttaagaccggtggtgctggtgtattggaacgacctagtttcgatcaatctcagtttgacccttcttcccaagctcttgatagtggcgatattgggcgatcgaaggataagaatggtac

SEQ ID NO: 7303 - DNA, 627 bp, Gossypium hirsutum
  Clone ID: LIB3828-016-Q1-K6-F7
gcacctttctatacccttggtcctttgacaactgatattgctcctggatacgatcatatcacttctgcaattggtgcagccaatattggggctcttggcacagcacttctgtgttatgtaactccaaaggagcaccttgggttgccaaacagagatgatgtaaaggctggtgtaatagcttataagatagccgcccatgctgctgatttagccaagggtcatcctcatgctcaggcgtgggatgatacattaagcaaggctagatttgagttccgatggatggaccagtttgcattgtcactggaccccatgactgccatgtccttccatgacgaaaccctgccatccgaaggtgccaaagtggctcacttttgctccatgtgtggaccgaagttttgctcaatgaagataacagaggatgttcgaaagtacgctgaggagcatggttacgggaaccccgaggaagctatgcaacatgggatggatgctatgagtgctgaattcctggctgctaagaaaacagttagcggtgaacaacatggtgaagttggtggggaaatctacctgcccgccagttatgtgaactcttctgacaggtgaaagtaaagcttacatgaataaagagaa

SEQ ID NO: 7304 - DNA, 629 bp, Gossypium hirsutum
  unsure (1)..(629): unsure at all n locations; Clone ID: LIB3828-016-Q1-K6-F8
caaagccatcgcaacaccatcctcgtctctgtntcacttgaccacctgaaagnagaagctagaaatagagaggagaaatgatgcaatctcgctttacctctgttgttcgtgccatatcatccgccgcaaaggcaaggcccttctcatccaccatcgattcacctacccccaccaaacccgattttcctcccacccttgctggcctccgggcccgccttgccgccgaatctcccaccctctccgattttgtgggtctccaaaccaataacctctattcggtcgaagtcggcaccaagaaaaaaccgctccctaagcccaaatggatgagagaatccattcccggcggcgaaaaatacgttcagattaaagccaaattaagggaattaaaactccacactgtctgcgaagaagctcgatgccccaatcttggcgagtgctggtccggtggcgagactgggaccgcaactgccaccataatgatcctgggtgatacttgtactcgcggttgcaggttttgcaacgtgaagacgtcgcgaacgccgcctccaccagatcccgatgaaccgaggaatgttgcggaggcaattgcatcgtggggtttggattacgtggtgattacgagcgtggac

SEQ ID NO: 7305 - DNA, 630 bp, Gossypium hirsutum
  Clone ID: LIB3828-016-Q1-K6-F9
tctttcggccgatctcaacagccgtctggacctgattccggcagcgattccgataatcctcaggagtactacaccggcggcgagaaagtggcatgcttgttcaagatccttcgaagaataatgaagtagatgggattttcaatcaagctaggcaactgggagccgtagaacggccaattgaacagcttaatccatcgtcaagttcaacaagttttactggaaccggtagattactttcaggggaaactgtatcttctgtacctcagcagcctcagactgttattcacaacattgttttctggactaatggcttcactgtaaatgatggtcctctgagaaggttggatgatcccgaaaatgcacatttcttagagagcatcagaaagtccgagtgtcctaaagaacttgagagtgctgataaaaggtctcctgttcatgtcaatctgataaagagaaacgagaagtaccctgaaccaaagaagaagcaccaggcagcatttcagggtgtcggaagaactctcggtagcggcagtacttccgcaactcctgaagaaaccagcagtaccagtcctctcaacactgctccaaatccttctcccggcctggttgttgacgaaagtttaccatcaa

SEQ ID NO: 7306 - DNA, 625 bp, Gossypium hirsutum
  Clone ID: LIB3828-016-Q1-K6-G10
gcgacattggtggctccagcggttaactactggtggtccggttttcctacaaacttatcgaaccaagcatatcagcaaatgttaccacaagaccaatgggtgcttcgtgtgtctcactatgctccatggctcacctactggtggaacactcaaaatggttccctagttctagtgttattgccaacagtatcgatattttttctagtgaggaccgaaaactcttgatgaagatctcgtctactaggaaccaggcggcacaagtaagacagcaaggggaatacgagtccctgcatcgtgacctgatagtcggatttggagcatgggaattctctcccttggaactggacaacccatttcctaacaatgaaggctcggtgcatgtgtggcatggagatgaggataggtttgtaccgattacgttgcagcgctacattgctgaacaactcccgtggattcgctaccacgaactacctggtgccggacatttgtttatggttgcagatgggatgtgggataatatagtgaagacacttttggtgggagaaaagtagtcttctgttcatttatggattttgccgtttgtcccattatcccccattacaaccgaacttgatgcccgcaatat

SEQ ID NO: 7307 - DNA, 616 bp, Gossypium hirsutum
  Clone ID: LIB3828-016-Q1-K6-G11
aaaaataggccacttaggttgaattatgacacttggtgttcatcgggtgctcttgatatcaatggtcgattggtaagcactggcggttataacaatggctccgacaccgtcagaatccttgacttatgcgatacttgtgggtgggaagaatatcctggtgcacttggaaatggaagatggtacgcaacacaagtaaccttaggcgatggtagattcatggtgttcggcggtcgagatttcccaacatacgaatttgttcctccacaaggccagaaaaacacccttaaggatgtggtcgattttaatttcttggtggaaacacacgatcccgtggaaaataatttgtaccctttcgtttacctttcgactgatggaaatgtcttcatcttcgctaacaatcgttcggttcttttgaaccctaacccaaacgatcatccacgagttcccagtgctccccaatggtgctcgtaattatcctgcgtcaggaagtgcttgcctccttccgatcatgctcaagcctaatgaagatcgtagaatgatccccgccgaggttttgatatgcggtggtgcatcacatgatgcgtacgccaaggccgatttgcagcgtcctaaagtg

SEQ ID NO: 7308 - DNA, 440 bp, Gossypium hirsutum
  Clone ID: LIB3828-016-Q1-K6-G12
cggccgcgtgggttgctgctttctttgggcttcctcagcaacctacttccctgatctattgtttttctaatgaaacatgcccgcgagaaaaggatggcttatagaccagatggattactcagcccaaagtcatgaaacagtcctaaactgagacactgttcatatcctgtgactacaggattagcgagggtcttatgtctaccttgagcaagatgactctgctgttcattgcgaaacgatgtatccctgactcacggtataattttgctgtgctgctgccccctatcccataccaagtttatatgtgtgaaggaaggggaacaattcttttatgaccttttctgcaaactctgaaagctttttctgaattgtgtaatcagaaatatatacattctaggcaaaaatgggtgctttttgctgatgctcatgtggtgaggact

SEQ ID NO: 7309 - DNA, 622 bp, Gossypium hirsutum
  Clone ID: LIB3828-016-Q1-K6-G7
actggagccaccgatagctttatagttttagttaatgagaaatattattgtagtagttggtgcattgaactaataaatatcggtggattcggtttctacgacaaaagcaaaaatttatcaaactatttttaccccaactgacatgccattaagcagttgatcgttcctttgattgggttgtcccgcctaatttatccgactattttctaccgtaacatgccattaagtacttgattgttcctttggttggttgccgtgcactttattttaaatctccttctggtcattcctaatcttttcttcttatgcttgggtatctcatgacaatatcactatcaatttggacagtcatctggttatagaaacatcgcaagagatcaacaatgtgccgtatggagattatttcattgtagaggggctctggtctgtagaaagagacattaatggccagcgagaagactgcattttgagggtctatgtgaatttggcttttagcaagagaactgtttggaaagcttgctgtgttggaaggagaacgctattcttttgtgtgaaaggtgaatttctttcggctagattgttgcctgtttcgttgcataagttgtctatactttggcgtgga

SEQ ID NO: 7310 - DNA, 617 bp, Gossypium hirsutum
  unsure (1)..(617): unsure at all n locations; Clone ID: LIB3828-016-Q1-K6-G8
gggaaaccagagggacaaagggtatccggccaatggaatgactgttcttcaacaacatgttgcctttttcgatcaaaacaacgatggagttgtttatccttgggagactttcaaaggtattcgagatcatgggttcgatccattttcctcttttgtcataacttttgtaattaatgcagcatttagttatcgcactctcccggggtgggtgccaaatccgttacttccgatatacatagagagaatacacagagataagcatgggagtgattcagcaacatatgatactgaaggaaggttcatgccagtgaacctggagaacatgttcaccaagtatgcactcacaaagcccgacaatttatcactcaaggagttgtggcagatgactgagggaaatcgggccgctttcgactatcttggatggttggcatccaagttggaatggttgttgttgtattatgtagccaaggacaagcagggttttctgtccaaagaagctgttagagggtgttttgatgggagcttgttcaagaccatttccaaaatgtacanagactcagatagaaagagtaaataaaaacactacccatcacctttcatttcctacttatatccca

SEQ ID NO: 7311 - DNA, 613 bp, Gossypium hirsutum
  Clone ID: LIB3828-016-Q1-K6-G9
gttcgtttctctttgcgcctttcttctctcaccgcagttgctcttcttctttaatctcatttctttcaatttttgttttcatttttgattgttataattatttgatatttttcccttttaagcactgatattgcaggtaagtcatggttaagcataacaatgtcgtgccaaatgggcacttcaagaaacactggcagaactatgtgaagacttggttcaatcagccagcacgaaaggctagaagacgaattggcaaaagaaggctgtgaggatctttccaaggccaactgctggaccccttcgccctattgtccatggccagactttgaagtataacatgaagttgagagctggaaagggtttcaccctcgaagagcttaaggctgctggtatttcaaagaaacttgcaccgaccattggtatcgctgttgatcaccgccgtaagaacaaatcacttgaaggtcttcaagccaatgttcagaggcttaagacctacaaggccaaacttgttgtcttcccaaggcgtgctcgcaagttcaaggctggtgattcacctgccgaggagctcgcaactgcaacccaagtccaaggaccatacatgcctatttctcgt

SEQ ID NO: 7312 - DNA, 646 bp, Gossypium hirsutum
  Clone ID: LIB3828-016-Q1-K6-H10
ctcgctctctcttttatcctcactttctcagccatcaaagacacccttttcttctcttaaggttgtaaaagatggcagatggtgaggatattcagccacttgtttgcgacaatggaactggaatggtgaaggccggatttgccggtgacgatgctccgagagccgtgttccctagcattgttggccggcctcgtcacaccggtgtgatggttggtatgggccaaaaagatgcatatgttggtgatgaggctcaatctaaaagaggtattttgacattgaaatacccaattgagcacggtattgtgaacaattgggatgatatggaaaagatttggcatcatacattttacaacgagcttcgtgttgccccagaagagcacccggttttacttaccgaagctccccttaacccgaaagctaaccgtgagaagatgactcaaatcatgttcgagacctttaattcacctgctatgtatgttgccatccaggctgtgctctctctgtatgctagtggtcgtacaaccggtattgtgttggattcgggagatggtgttagccacacagtccctatttacgagggttatgcccttccgcatgctattctttgtctcgatttggcttgggcgtgatcttaccgttaacttga

SEQ ID NO: 7313 - DNA, 639 bp, Gossypium hirsutum
  Clone ID: LIB3828-016-Q1-K6-H11
tttccattttcatcttcaatttcttcccacttttttgtctcaaagttctgtcaatcaatttctttccatttttctcttcttttgtctgctcatacgagagcaaggcagcaaacagctgcaaattttcaaggtatggtttgcaaacacccatttcatatcacttcatttttttgtattaaattttgataaaagagaagctaaacccccttttcttggttgatttttaagaaaacccagttcaaaatgttgggaaaatttcttttgaattagaatgaatttgcagtgaattcgatttaaaattgactgcaaagaaaatctatttctcccttgttttgggttcattttgatgaagatgataacccattccatgttttttaccttattgttgggaattcatttttttcctccattgattgattcttaaggtgtgaaggaaagttccagatagcaaagatgaatgatctgatgaccaaatcgtttatgaactatgttgacctcaagaaagaggcaatgaaagatcttgaagctggtccagactatgatctcgaaatgtcttccactacaaacaccatggaccaaaaccttggcctgttccttgaagaagctgagaaagtgaagcaaggaatggcagtaatccga

SEQ ID NO: 7314 - DNA, 578 bp, Gossypium hirsutum
  Clone ID: LIB3828-016-Q1-K6-H12
gcttaacccatccaacatcccccgcatgtaccactcctcatttgcactccttcctgacgcaaaaatcctcattgctggaagcaacacgaaccccggttacctcgatgatgcattgttccccactgaagtccgggtcgagaaattctcaccacattacttggacccataacttggccatgttccgacaagagatcattgtcgagaagtccaataaccaagtgaagtacggccagaaactcacagtacagatccgtggaaatggcgaaatcgaccaacaaaaacttcaagtgacggtttactcaccaccatttgtgacccatgggatctccatgaatcagagattgattcaattgggaattgtggaatttaacaaaaatgttgctccaaatacaaacaacattgttcttcaagctcccatgaatggcaacattgcgccacctggttattacatgctcttcgtaaactataatggggtgccttgccgccaatcaatgtgggttatatttttgccatagatatttcactgaaagcattggaatcgccgaagtcggttataggtaaattattatattttttat

SEQ ID NO: 7315 - DNA, 555 bp, Gossypium hirsutum
  unsure (1)..(555): unsure at all n locations; Clone ID: LIB3828-016-Q1-K6-H7
tccgcagaaacaacaacccaataaattaatcaatcatgnnagggctnnttcccagcgctnnttttcttgcatttctcttgcnntttagtgnnttgggcgccntnnctcgtgcnntgatcctgnacnnttgcttcaggnnatgtatnngtgttgccccgatctnnttcttctnnggaataaaatnntgaatgggtnntcccctgcaagnncacccctcaactgattaggagccannaatgacttctctttctttgccgnngtctggccccaatccaaaacnnttccctaacaacccactttnngggatcgnncttgttacgnnngcagctanatggtgnngaaaaannaatcccaggntnnttgaaccacncnncttgggnagtcttccattgtnnctcgtatttcgacttacccgccgnntcgggtggggttcaaacccttccnnccacatcccacccacgaatgcatcagagaattgcatttcgttgttgtgaagggagaattagaggggttggcttctttcactacaatccaatgtgtttgatatcaaaagcg

SEQ ID NO: 7316 - DNA, 264 bp, Gossypium hirsutum
  Clone ID: LIB3828-016-Q1-K6-H8
aaaattgggatgtaataatggtgccaattacttaaagtgtgtactgtgaagagaaatgggaaagtttcatttatcttattcatgtttcaagaagaattaataatacaaatgttcatttgtttctaaaaaaaaaaaaaaaaaaaaaaaaaaaaaaaaaaaaaaaaaaaaaaaaaaaaaaagaaaaaaaaaaaaaaaaaaaacaaaaataacaaaaaccaaaaaaagcaaaaaaaataaactaacaaatagggacaccaaaaataa

SEQ ID NO: 7317 - DNA, 395 bp, Gossypium hirsutum
  Clone ID: LIB3828-016-Q1-K6-H9
atcatgctcagttcctctgccaggcaagcaaaggaggttgaaggaagatgaagctagaaagtttttcagcatcttattaatgctgtggattactgccacagcagggatgtttaccatcgagacctcaagaatacggaaaccagcagcaaaccaacaggcagaccagcatccaagctgaaccagagaagcaacagcattttgtttattttgttcatttgtaacttgatttagttcctttgtaatttatacttaaagttagtaggagtagttgttgatttatatttaatgttatagctggtatgtcagctacattttgtgtgcaattctaactaagctttagtcatgtattagtgggagcagttatacattagagaactgccatatttcattgtaac

SEQ ID NO: 7318 - DNA, 520 bp, Gossypium hirsutum
  Clone ID: LIB3828-016-Q1-N6-A1
aaaccaaaatgcaatctcagattgatcctcttgagatagcatggaagttcgcattacggagcaaaatgttatcagtaacacctaagacatgaaaaaagaaaaaaaaaatacatcatattcctcatcaaaagagtaatttaatagtataggaacatcatcgaatactttttgaccataaagaaaagaaacttcatcatatcatatggttctggaactaaagcatcttgttccatgatttgactttcagttaacaccaatttctcgagcaagcactcagaagcaggatttaaaccaccatccatataaaattgactaaaggactagtgaatccgaggtcaaggcaatgcatcagaatgcacaaaacccaaaacaacgtgctcccaaatctgaaaataataggcttacatctccagtcctcagacatctacaaaacttggtatctgccgggttgagtcccaccaggaagttgtaaggactggtgtgagatgtcttccagcacacgtttcagttctgccttagc

SEQ ID NO: 7319 - DNA, 601 bp, Gossypium hirsutum
  unsure (1)..(601): unsure at all n locations; Clone ID: LIB3828-016-Q1-N6-A10
catcaatggtgtatcatttaatttatactccgcaaataattccaacaacggataacaagtttcaacacaacgtctacttcaaggaatgcattcaccaaacatatctatggagcatccactaagaaagaaaatgcaacagctacgaacaagaagatggggaatgtgagtttagaataaaattatcgaaaaaagcttgtctcggaaacctccccaaattcattccttaagccaactttagagagaaaacaaaacctaaaacatctgtgtcgttggcttcttcctatttttgcaatcatcatcagcttatgcatcagcaaatcctagctcagagagcttcaggtgagcttcagtgtaatcagcaaagaaagcatcctcatcagctgcatatttgtcaaccaatggacggaaaacagggtcggaaaggagaactttgtcagttggcaactgtaacaggccagccttctctccagtcaagagctccttgaagtaagagttgtcgaagataagagggttggtagtccatggtccctcaaatccagacctctccttgtggcaccttcccaggtatggccaccagaaagagcacaatgtcctgntcgct

SEQ ID NO: 7320 - DNA, 599 bp, Gossypium hirsutum
  Clone ID: LIB3828-016-Q1-N6-A11
gtaaatattatttacaaatccatccaagtgggttcgacataagtgacatgcatatgttacacaaatcaaccgaagattcaacagacagataatggcgtatagcattgatctgtaaatatcaccgaaaacaaaaacatcttacaaggttttccactaccatttgacacccaatgtcagagcctcaggagggacaagaatggatgggaactttgtaaaagaaatgtttgacaataaattactccatgagactgtatctacactaacaaaaggccggaccttctttaacgtaaggggattcaatttgtctccttcaactcttgtcattacatcaaaccatagtctctcaacagttggctttgtcctccattcagctaacatactgcgaacactctcattgttcccaatttccttttccaactctaactggaaatgaacgataggtgatgctttaattttcacattaagagaacctaaaaactgcttttcattgtttctatcacctataaatgtcctcaggattttttgtaacctggctatcctcaaacttatagaatctatggggcaaggttgttttcgtgtaaccatcactgccataacac

SEQ ID NO: 7321 - DNA, 526 bp, Gossypium hirsutum
  Clone ID: LIB3828-016-Q1-N6-A12
attattgaaaccattttcccctatcattttcccccttacgggggtaaaaaaaaaatgtgtgtccaaaacaagcaacaagaagggaattgctaagttgatttggggcataattatgataaaccctaccttgctaaacaccttgggtctttaacaaggcaaggggttactagacctaattaaagcacccataaaccaaaagttaaaaacaatttcgtatcctattatctgagttcctggatatggatatgcgtttgacataatatattcggcttttaaaccttttttttttccttcaaaggggaccggaagaggggcatcgtttgccatttttccggccaacactggccccagcaaaaagcagagtaaaaaacaaaaaacagcacagttgctaaaaaaaaaccttttggaaaaaatagggggggtgggaaatttctaaatctctcccatcccactaggttccgttgaaaagcatggaggccccctgacctatttgcctggcgcagtatcaccagctctaagttccctt

SEQ ID NO: 7322 - DNA, 610 bp, Gossypium hirsutum
  unsure (1)..(610): unsure at all n locations; Clone ID: LIB3828-016-Q1-N6-A2
cgatccaaatttattcgattttcattttataaaaggaatagttaaaagagaattggtgtatgtactgtaaacatttgcttagctatgtctttgcagtgctcagtcaaatggaacaatctttttttttccaatccaatatcttctgacttctggtaccttacaaggatgctatctacacataattgtcctctctacttaagctgattgcatgtggatgctcagatttgaccttgtatgtacagaatctgtggcggtggtggtgccttctttagtaggcagattgcctgaatgcggttcaggttggttcagtttccggacaaactcaatgaacaaaggaaaatgctccggtgcgaagaattgagctccaatcctctggaaaatgaatgagtcattaagattctcactcaacatgttcttcttgatctgcttaagaccatcaggagctccgacagtcgagttctggccggaaattctgaccccgtgcttattgcaagctgttccaatttcagcaagtaataattcagggcttgagagagattccttaagctggtacttatctgactggtccatcccaggcaagatgattntgcatgaattccttgcaaacatc

SEQ ID NO: 7323 - DNA, 474 bp, Gossypium hirsutum
  Clone ID: LIB3828-016-Q1-N6-A3
agcaaagaaaatcatatatattagcatgtacatgcattaattacatatggctacaaaacaagattcaaggaactttaggatattgtaaatcaaatattgttttgagctatttattcttcataattactctttttatccaacaggattttatagcaagcccttctgcaacatcattacttcttattttgtataattaatacgacgacaaccaactcttcctcattatttcatcttaatatggtatcatctccctactttggtggactgggttcactgtccataacctcttctatccctttgctctttacagtttcagcctggcaacatcctgatgcgcacctgggctgaccacactcagcacaagtcccaccgcaaccctgacggcaacactccccactctcacatcccgactgtcctggcattagtgggatttgtgggacttgtgggatctgtgggattagtggaatttgtggg

SEQ ID NO: 7324 - DNA, 602 bp, Gossypium hirsutum
  Clone ID: LIB3828-016-Q1-N6-A4
aagattccttttatctcttataactttgacttcgtaggctcaatatatatattgtgatgaacataggataaaagacctgttttttaatcataatttaaggcaaattatttcgaagatcataaaaacataactctccatctctggttcataaaggaaaaataaaataaaatcacacagaatattgacgaaaacgaaagcaaataagccaataaacaatagcactgcctctcccctagcacataattccaacaacggctcccaacaaggctaccataaaaccataattcacggtgctcggagctccgctaggtgttgacgggggagaagttgttgtaccaccactcgggggagtcccggaaggagtggtggaaccagacggagtagagggggtggagggtgagttgccactagctgctacaacattgatggctagcttcatgccaccagcacagtgacctatggtggggcaaatgaaatacattgcccctgggttggacagtgtgatgacagtgttcccatcgctgtaggatttaatagcattgccggtgttgcaattatcgtagtcgctcttggatacttcctccaccgagtggctgccaccg

SEQ ID NO: 7325 - DNA, 613 bp, Gossypium hirsutum
  Clone ID: LIB3828-016-Q1-N6-A5
ggcgaaaaaagaaatatattccatttccatcatgactattgatataatccaacatttgctgctgcttaatctcaatcaaccgtctgatctaaaacaaaaggaccaaataatagtatgccacagcaaaggaaatcatatagcggaaaatcttaaggctaacagcatcggatgttagggaaccatttttgaccggagccggctccggagcaggtggaagcatttcaacattgacagcaactttcatcccatggtagcagtagccaccgctgctgagaaagtaatacggcctcgcctgtgtcagctcaaccacatcacggccaccgcgagtgatgttctttacgaaaccttgatcattgcagttatcgtaacttgtctcgttcacttccagaacattgaagtagcgcttgtcgaagttgaagagaagccaatcgccgacataaaatcgctcatggtcggaccattctgaataattaacgttagggttccaacctagcttgcctccaacacgatgtaatgccgccatggaagattccattgaaaccatcaaaatcgccattaacatcaactcaaacttaacaaagaatctcctttcagctcccatgtttttccttcg

SEQ ID NO: 7326 - DNA, 561 bp, Gossypium hirsutum
  Clone ID: LIB3828-016-Q1-N6-A6
acctaaaatttcatgattccaggatagtttcaatagcatcatgcgttacgaaaactacattttcttggttttagctactctttagacaagagatgacaaaagatatctgtaagtgtagcacagatatggttcatatggacgtcataaagatccatcacagacgagctattttacatgggaaagtataccattgatgtaaatgtagctcgaaaatgcatgagaccctcctttattgcaaagatatctcctttacttagcaccttctaggatgaatggttcagtttggtctactggagttgattcaatttgctgattttgttcaacttgtttgagtggggaaggttggtcggtttctaataaaggttcaagctttagctttggttcaatctgctcagatgcaggcgcctttagctgcgggtatttgggtttgttttttttgaggagaaggtaagtggtactataccaaaacaacaaaattctactttgtgctataactgtatctctcatacatgttcctcccaaggagtatcgatagagtgcctgttctcctgtctgaacgtc

SEQ ID NO: 7327 - DNA, 609 bp, Gossypium hirsutum
  Clone ID: LIB3828-016-Q1-N6-A7
acttctaaatggcatgtccatggtatacctaccacttcaaaccacaagcattagatcaaagcagaacacaagtgatcatctcaatgactaaaactacaagccttttggaaattataaatttccagttctgtaattctaaaagcgaaattgtagttaatttcaacgcagtttgttgcctttattaccactgtgaacagccaaaccggccatgttaggagttgtagcagcaacaaactgtagatcagacaaggaataagaccggcaaggaggctttggtcgagcagttaatgatgatgatgatggtttgatgatggtagttgattttttacactgtggatgcagaggtggaaggcagttagacggcgatgatgccattgatattttagttccaatgtttcccaaaagattgttgggtttcttgtccaatgaagaactgcgagctaataagttcttgcgtttcctattgtagggatcttcaggctttgcaaaatctttaacagaggaaacagcagccgcatcggctaaacttgtaaaggactttgatttgccattataaaacttggatatgccttttctcaaaggcaaaatctcctgtagagcatccattgt

SEQ ID NO: 7328 - DNA, 637 bp, Gossypium hirsutum
  unsure (1)..(637): unsure at all n locations; Clone ID: LIB3828-016-Q1-N6-A8
tcggccgcnnccttttttttttttntttctaccatatagtttattaatataacacttaatacataaaactactaggcagctattccacattttcctaccattattaacttccctagttaacactagtctaataagtacgttttacgtcgattttgccggccagctatcaggcagttggtctgtctttagaacttgttacgataccaaaaaacacctttgctaccaccaccaccaacgtcagcctcgacgtaaaggcactcttttgcctccctccacattgccttataaatcggtgtcccgtcgaaaggataatacttgccgagtatcggtttgattgctttagtggcctccattgcatgataatgtggcatcgttgagaagaggtgatgagccacatgcgtatcggtgatgttatggaacactttgttcaacaccccgtaatctcgatcaatcgtcgacaatgctcctcgaaaccaatcccattcagacgagtcgtaatgcggcaatgccgagtgagtatgttgcaagtaggtgatcaacacaaggaaggcattcacaataagtagaggtaccccataagtgcataaaagccaagccagcccttttgttgcagcaatcttataaagtacataaatta

SEQ ID NO: 7329 - DNA, 583 bp, Gossypium hirsutum
  unsure (1)..(583): unsure at all n locations; Clone ID: LIB3828-016-Q1-N6-A9
atgaaacaagtaattagcatataggttcataggtcaagttgacatgttaaacctaaaacataattcccagaacccataatcacacacccccactgaagataacagaaaaacacggtaatcggagacggtgttagacctatgaagttaaaccaaagcaatggtgctttccccaccagggggtttgcgtccgctactgactcgagactctaccttcccttcagcaaagatgttgctaccgctcatctcccgcagtttcgctacactgagtggtttttcagcagaacctggaggaacatcacccttaaatatgtcgtttccggatagctctgcgaatttctggttatgtattttctttgctgtcttaaccacggtctcctcacttggcgtgctacctccagcaggtttatgtgtatcaggttctcccatgtcaaaattgtccttcaaagccaaagcgcgtacagtagttggcctcggcacaatttcaggtgggggtgcaaagatgtcatgtccaccaagctcctttgacttggcatcggagagctgcttcttcaactttgcctnctcactttgtagtgttccactc

SEQ ID NO: 7330 - DNA, 611 bp, Gossypium hirsutum
  Clone ID: LIB3828-016-Q1-N6-B1
aaccaaataatgaatacattaacatatatatgtaatattaaaaataattttttttctatacatccgataataaaaaaaaccatcaatttaagcactaatccgactttttttagagcatccaacgcccactatattattccattgaagtagctccttcaattacatttggctcagacacaataaaaaataataaaccggagtttgttggaccgccatgaagagataagagttaagcgcagggcggtggcagctgctcgccgatgtagttaactttgacgttggtgcagttagaactgaagggagtgtcttcattatgatcgggatcaccggtatactctaagtgaatgtccttgagggtaatgcctttgcatggaaatgattggctgcaagctaggactacagcaattttgcttattgttgttcctctgatgtttgagaattcaacgtcggagatgagcacttttgagtccacactgcctggaatcgttgcatattcttgatcgatgagaatagggttcttaacatggtccatagtgagatcttggaaaataatgcccgaagctttagatggactttcatttctgtatgttttgattcttgcaccattttct

SEQ ID NO: 7331 - DNA, 609 bp, Gossypium hirsutum
  unsure (1)..(609): unsure at all n locations; Clone ID: LIB3828-016-Q1-N6-B10
ttttnttttagaaaatcaatgaaaccatagcaaaaataaataaatgtgcagaaaaaagtaaacaaaacagcatggaaactgagaacaaaatcatgaaaccttaatccaacttaaaacaagttcataatgaccaaaacagcagactggctcgacaaaaaaaccacttggacatgtttctaaattcatggctcacacttcttcgccagatggcctccttatttcttggacttcttggaaccaccagctggttgagcagtggcggcaggtggtgctgcaactggcttctctactcctccaggtccctgggccaatcgctcctccctcctagcatgtttcctttccctgcttgccttattcttagccctcttagcttcaaactggtcagccaatgtcttttctctggccttctcagccttggatttgtggatgctctccatgaggactctcttgttcttaaacacattacccttgactttcatgtacatgtcatggtacatgtgcttgtcaatcttctttgattccctgtacttgcggagtaggcgtctaagtacacgcatccttctcatccataagatctttgtgggcaaccttgcctcccttgtacccttg

SEQ ID NO: 7332 - DNA, 537 bp, Gossypium hirsutum
  Clone ID: LIB3828-016-Q1-N6-B11
gaaattctacttccaaatcaattaagaataaaaagttcacctttaaaaaaaaatcagtaatgctataatccaacactgattctacttagacatacaaaaggctaattggaatttggatggagtggaattctagatttaaaagtcaaatataatcagttttctttggtgaccatgtccggcgatggataagctcgtcgtcggattgagatgtgctatgcggtgatccagtcaattcatgttgggatgacccaatatactgttgaattactagcacagatacggtggacgaaaaatccgactccgctagaatatctccgatcgcaccgagccccgggcactcactccaatcggtaaggccggttgttaatggcgacatcacgccatgtcctctcccaacaatgagcaaatcatggtagttgtctaatttcctaatcgctgcaacagtttcctcgctactgtttaccacattctcagtgtatacgatagattcatcatcatcattcttgcttctgaaatcgtttatgtattcatcatcaa

SEQ ID NO: 7333 - DNA, 462 bp, Gossypium hirsutum
  Clone ID: LIB3828-016-Q1-N6-B12
acattccaattgcgatggaaactgtaagcttcagaagcattcgtatttccatccaagtaaaaatttgatgttcattagattccaagtagaaccttttgttgtggctaacataatctccaattaggagagaaatattaaatatgggttgtgcccccacaaattccaaggacattgctaattaaatactggctgggactattggagtttcaagttccaaaagcaacatctagatttaaaactcaagaaaacaggagatccgagctcccataataaacaccaatgtagcttaaagcagaacaatgtttgcagtggaggataatttaaaaaacctacgaccaacacaggctacgacaacatctcagactccattaacatgcggacctattcaaaaaaagagagaatctaaaacgacaaaaacaggaaatgtcaagatgagcacgaagggaattacgtgaccttctt

SEQ ID NO: 7334 - DNA, 606 bp, Gossypium hirsutum
  Clone ID: LIB3828-016-Q1-N6-B2
atggttattatcaaattttcatatatctgtatcattttattgaatttcaaaacttatcaagtgagaccaatctattgtacacatatattgtcatgaaccgccccccaacaaatgcaatatcttgcaatgttttttaacttttctcctgattttccaaaacactctttctcataagggatataactgtagctggctctggagctccaaatactgaactccctgccactatgcaatttgctccagccgatgcagccacatcaatagttgaaggccctaatccgccatcgacctctatatcgagagatggatacttgttccttagcacgcgcaccttatccatcatttctggcatgaacttttgtccaccaaatccaggttccacagtcatcacaagaaccatttccacgggattttcgctgttgatcagaggataaacctcctcaatcggtgttccaggctttaacgccacaccaggcctcatgcctttcaacttaattttttggataagttcttgccagttttctttcgatacctcaacatgaaaagtgaaaccggatgcaccagctttacccaaaagttcaacgtaatcaatcggattagtgacca

SEQ ID NO: 7335 - DNA, 567 bp, Gossypium hirsutum
  Clone ID: LIB3828-016-Q1-N6-B3
cattatatagcagtatagttttaataactgtagcaaaaataaacttagtttttacacaaatcatcaccaagaagcttcccaatggaagtttcaagtttgatttacttgggacttagggtttatttatgcttggagtactagatgaaatatgctgcccaaggaacagcgttcattttcttaacacaaacaacatattaaagacaaagtagtttgcaacacatttgcggggttcaatgttatttagacacgacattggactatttttgacgttccatagaaaccaaaccaaacgttgagctatcaatcagcagtccaactatgcttgacagtctcacatgctctcctaatgtatccacgctttgttctgactatggaaatccaacatgagagatcaatcagcagtccaactctgctcgactatctcacgtactctcctattgtattcgcgcttgttctcactaaacatccgagcagcttcagaatttgcaggggaattaggatttggatcacaaagcaatgactgaatagatgtcagtattgcagctacatcataaattggactccact

SEQ ID NO: 7336 - DNA, 521 bp, Gossypium hirsutum
  Clone ID: LIB3828-016-Q1-N6-B5
aatcaccaccgggaaattcggagccaattcactaaaaggccgattaattaccattacaaataaaacattttcttaagccaaatcaagaactgacacgattaagcaagttttactcgcaaaaaaaaaaaaaaaaaaaaaaaaaaaaaaaaaaaaaaaaaaaaaaaaaaaaaaaaaaaaaaaaaaaaaaaaaaaaaaaaaaaaaaaaaaaaaaaaaaaaaaaaaaaaaaaaggggggggcgcccccctttttttttttttttaaaaaaaaaaaaaccccttttttcccgtttttttggaaaaaacccggccaaaaaaggttttgggggattaaagggggcctttccaaaaaattggcccaaaatttgggccgggtaacttttttttaaaaatttccggggatttggtaaaaaaaagggggaaagggggttttaaaacccccaaaaaaaaaaccgggggaaagaaaaattttttggggtaaaaaaaaaaagggggtttagggccccccaaattaatccgggggg

SEQ ID NO: 7337 - DNA, 580 bp, Gossypium hirsutum
  Clone ID: LIB3828-016-Q1-N6-B6
gattaaataaaaatgctttaaattaaaaaaaaagaaaaaagaaagaatgcaagaaaccagttattgctactaggatcttcctcacatctggttaaaacatgagtgaagtttaaacatgaaaagcagaagaagcgagcatgaatacttgtcatctaagtaaaaacacgaaacaaaatcacctgatgctttcacagaaagtccatagaaagtcaggttaagacttgatgctaaacatgatggcttgctgttttccttgaactagaaaaaaaaataagagaggaaaattgatatagagatacgagcagcgagaagctggcagttggttccatctttttcagacttgaagaatcttcatctgatcataatattgagcaaccacctgactttttcttcttatttttattcggaggctgcagcactaccttaatggctgcatcaaacactgccttcacattctgctgtgtttttgagctacactcaatgtatgcaggagccgcaatctgtttctttaattcctctccctgagctgtagaaatgggcactgcgttaggatggtctgtcaagaattgttgatcatctc

SEQ ID NO: 7338 - DNA, 611 bp, Gossypium hirsutum
  Clone ID: LIB3828-016-Q1-N6-B7
gccttaaactgaaatttcagttcattaatggacggaaactatatgaaaaagcctatcttattccatggttagttcttaaagaaccaccaaaaccactaaccatttaaaacaaaaataaaatgaagcttaaaacttcagacatgaaccaccgtggctgtctttttaattttagagttgtccgcaatcggcaataacaactggcttagaagttcttccaccactagacccaactttctcaatgtctcgaaccacatccattccttcaacaacttgtccaaacaccacgtgcttcccatcgagccactcagtcttagtcgtgcaaatgaagaactgcgacccgttggttcccggtccggcgttcgccatcgagaggatccccggtccggtgtgtttcttgatgaagttctcgtcctcgaacttggctccgtatatcgattcacctccggtgccatttccggcggtgaaatcgcctccctggcacatgaagttggggatcacgcggtggaaggttgagccttggtagtggagtggtttcccgctgcgtccgacacctttctccccggtgcaaagggcacgggaagttctccgccgtgcgtggagggcaatcggcg

SEQ ID NO: 7339 - DNA, 471 bp, Gossypium hirsutum
  Clone ID: LIB3828-016-Q1-N6-B9
aaaaaaaaagtttaaacggaaaaaaagggggaaaaaaaaagggttttttttaaaaaaaaaaaaaaaacagtttggggtttaaagggtttccccgggaaaaaaaaaaaaaaagggggaaaggtaattctttttttggttgggggggggaaaaaaaatcccccgggaaaaaaaaaaaaaaaaaaaaaaaaaggggggggggcccctttttttttttttttggggggaaaaaaaatttataaaaaaaaaaaaaacctccaaaagggggggaaaaatttaaaaaaaattgggaaaggcaaaaaaaagggaaaaaaaaaaggggaggaaaaaaaggggtttttggggcccttttttttttttttttttccccggggggggaaaaaacaaaaaaaaagggggggggggggggggctattttaaaacccgaaaaaaggggggggggggggggggggggtcaaaaacccaagggggggg

SEQ ID NO: 7340 - DNA, 593 bp, Gossypium hirsutum
  unsure (1)..(593): unsure at all n locations; Clone ID: LIB3828-016-Q1-N6-C10
agaaaaatcgacatacattatggtatattagtatagaatacgagttgcaaatatcagactaatatataatctaatatgctcacaaggatggtccaaagctcacaaaatcaatgccacctactccaccttcatcatcaatacaaaaggggaagtaaatcaacacgagagggtagcctagtacatagaggttaacataattatgaagcctaagataagagatcccattgaagcagaaacaacttgagagcctgagctgccgggagatggtgccggtgctgcctcatttgctcctcctgagaatgctgccggcgcacctgctattgctgacggtgccatacctggtgcaccagtaggactgagagacaatgcacattgagtggcagaaggagcagagactttgcaagcagcaggcaaagtcatggccttggtgacattcaaagtgacacccagagaagcactgctcttaaaagcctcacacaagcattggggtccagctttcaacacagttttcaagccagaacaacaggttccttccggcttcgacgttttgctcccgctcgacacaaaggacaaacaatccgncatgttgagaa

SEQ ID NO: 7341 - DNA, 570 bp, Gossypium hirsutum
  Clone ID: LIB3828-016-Q1-N6-C11
ggccaaaggaactcaacgatggatatggaatctgaatctaaatactctaaattttcttttgatacaaaggcagagctactagatgcacaaaacaaaaaagtctgatcaagtttcaagcatcctcaagttcagtacgatgactcaactcactcggcttcaagttctgcaccaaattgttccagtcgagcagcatcctcatccagatcccgaaccaaagcatgattaaccactccatcatcttcacttgcatggatctgtctcccgccgaaccatcgtccattcatcaactctatgcacttctgagcgtccttcctgtccttatatttgaccaaaacaacaccttggggattgttcgaacaaaccttgactgagtccagaagaccaagctttaagcattcctctttaacatcctcctccagctctgaacacaaattttcatccgccctcatttcagcaggcgtgaacatgttacgaaggacaacagtggctggaattgtcacctttgcatcatcacggccaccccagctgagcatcctctcctcaactttcttcagtttctttttcttcctg

SEQ ID NO: 7342 - DNA, 583 bp, Gossypium hirsutum
  Clone ID: LIB3828-016-Q1-N6-C12
attgaatcaatgaacttggatatatgatggatattattacataattttaacttgatatgatggaaattttctacataatggcaaatatcaacatcctaactattaataaaaataagactaaattctgcttcttattgacatttggctatttgttaaaatacaagccatgggaagggaaaataaaataaataaaataaaatggatggctagttatttccacccagcaaagaggtagacgagagtctgcttgaattagcaatactgtgaggatatgttgccggcatgaaaaagttgggaatgaatgaattatttaggtactgtcggagggggaagcaaccatttggtaccttcaacgtagtcaagaaccaagaatggtttagcttccgcatccgatagttgtttgacgaatttctctcgtgtagcaggagtcgcgcctttccccgtgcatttgtattctccgtagtacacagtgtcggctcgttcaggttggcgattactagaccatccaccaggatggacgatttcgtccatttcagtataagaataaacaaccctcggactgctcttccaggccctgcccaaa

SEQ ID NO: 7343 - DNA, 591 bp, Gossypium hirsutum
  Clone ID: LIB3828-016-Q1-N6-C2
aaaccataatcacaatatcaaagtaaagcagttgaccaccaaaacccagtactagcatctttgaaagagttgcatgatcacagaaacaggggatcatgttactattaagggaatagtttattggtaaacacctaagtttaccagcaaattgaactgggtatgaaatacaaggccttcttgttgatcacaccacctactacagttattttattgcttcttggcatgcctttggcaaaaggcttttacccttgccaatccttcttggagaagagaaggctcgatagcaaacgtaacgcgaagccagttcttcaattccattgctatccctggtagaatgatgactgattcttctttagctaacttgaggcagaaatcaacatcatcattaatgtcttccaacattgataggttcagcttcaacattacaaacattgatccttccggtttctttggacaagttaaggaaggtatctcttcaattctattgtagcatatatcagcacattccctcagggtgctgataatctttgagaaaaaatcctcctttgtattctcaaggatttgaggaatcgctgcctggataaatgtagc

SEQ ID NO: 7344 - DNA, 573 bp, Gossypium hirsutum
  Clone ID: LIB3828-016-Q1-N6-C3
aacaaaaatattgattccatttaaaactttacattttacaataagtgcaattatttatataaccaccactttgttaaataaccaatctatgtttcaaaaaaaacaaaaacaaaacaatcgtaaacgaaattgaaaaaaaatgtaaaataaacaattttacacagtacaaaatgctctcccttcatgatgataaatatataatttaaaaaaaagaagaagaagaagaactaaaattcccttcttccttttttgttcaaaaaccaaaatcaataaaacaagattttgattttaaacaagggggggaaagaaaaagaaaaagaaaacagatccagatttggggaaaaaaaaagaatgaaagggttacaacataatattagagaatattatgttgaattattaatgatgaaaatcaaggttatttgattttggatgggtaaaaaatgaggaaaaaaaaaaggaaaaagaaaacatatttagaggaaaacgcagtcacgaaccctgtctctctttcgacgctttgctttgcgtttctttttctccaactttggactgctgggcttgtgactatgcaac

SEQ ID NO: 7345 - DNA, 554 bp, Gossypium hirsutum
  Clone ID: LIB3828-016-Q1-N6-C4
gaatacaaacaaatggtccaaaatattttatttcattaaatacatttggaactcaagctttctcaccctctctctccccatacaccagaattggatacagatttataagcttatttaaattaactgctgaaaggtggaggccttggcatgccttgcacgatgccgcaagtcaatacaccttccggcaagttgtactcatccttgagggatcggttaggggaaataacactagcataaagctgttgcccaaggtaatgcctgtcccatatctccgacctcaggttccacatcccgcagttgtcgaatgtcaataggattgctgaccaggagttggggaatacctgtatggtgtgtctgctcacggcgtcgagaagattgtagttcatcctcttctcagggctccatttcccaatgtccatgcccacggcaaagaatgagtagccagacaagtggtaagactgaatggcggtctcgggattctcgaagatgatttccacaaagtttctgtgtgtcatgttgaggacaataggtgccaaagttaccttagtgttgtc

SEQ ID NO: 7346 - DNA, 544 bp, Gossypium hirsutum
  Clone ID: LIB3828-016-Q1-N6-C5
aaaattaaataccattaactggttcccaaataataccgcaatggacgttataacaaacttatcacaaccaaaattaccaaattagtacctacaaatccacatttactcctattagctcgaccatactttatgcccccaaaacaagggattatatgcttacttaaatcacaaaaagcagagctaattgatgactgatacatgaacactaacaaaaattatcattgtcaaggactatcttcattgaaggaagcccatttgcagacaccggattaccctacaatcctacgccttcgtcaatgatcaatctaagaccttctatgtcaagttccccatggtgaccactcaccaaaattgctacagttagctgctcggggatgctccaaacatactttctaccactgagatctgagaccttgggcacacaagcatccttggctttaaaaaattccaactgttctcggacattttggactctctctaaaccatcatgtacagcaattaatttacgatgcttaactccttgctgtgtctgactacagacata

SEQ ID NO: 7347 - DNA, 603 bp, Gossypium hirsutum
  unsure (1)..(603): unsure at all n locations; Clone ID: LIB3828-016-Q1-N6-C6
tttnttttgcagggnaaaatttgtagagtacattgaggaaattaatgcgatagatagtatatctcatcaacatttcgacattattcccgttttatctagaataactttgatgatgagctagtactttttgactaatagcagtttctcctttttttgggtaaacaggaaaggaaaaatcttacatcaacataaattacatttataagtcctctcatacatgacccctagtgcatccctcattagaatattccgcatcccatggttggggggcagcgagggttgaacatttgtaaccccggtggttcatcttttgaaagcattctcttaaaatatttacttttataaataattggaatttggaagcatgggcatcccatcttcaaacattaaaagatggtggaagatcatttttggccaattggtctttccatctctctgttaacattagttattttctgtagcatctgtaaggtttacttcagttcgtgcagcagccttgcatgcctctggtcttgcagctcgtaaagcagcattacggggaatgaatggcaagtcttgtttcatccagactggttgtcagttttcagaccagtgcacaattaa

SEQ ID NO: 7348 - DNA, 582 bp, Gossypium hirsutum
  Clone ID: LIB3828-016-Q1-N6-C7
gaaaaactgctgagtggtaaatattttattacattaaagccaatacaaatcagagattctaccggctaaaaagcaatcccagagacaacacagtctcaggtaacagaatcttaaaactagatgcaaataaatgcaataggaaaaacatatatttagagtagcccaaccttgaaacaagtttggttcagaatatctctaagccacagctggcatgtccttaagccaatcatccaatggcttcccaatggaatagacgatgaatccaattttccgcagcttctctgcgtcgacgacgttccggccatcgaacacgaaggccggcttctgcatgtcattgaaaatcttctggtaatccaggtttttaaactcgtcccactcggtgagaatgcaaatcccatgagcatccttggttgcagtatatgcatcccaaaccacacttacgtccttcaccgaagtagggctcatcggctgaagatggaccggatggtcccagtcgaatttcttcatcgaaagatccctctgaatctggtcttggttcacttgtgggtcgtatatgctcagtttggccttgtcccctatcag

SEQ ID NO: 7349 - DNA, 577 bp, Gossypium hirsutum
  unsure (1)..(577): unsure at all n locations; Clone ID: LIB3828-016-Q1-N6-C8
gagaagcaatagataatgtattttattgatcaatgggatgattacaatgcttcttcaaagtctccatttataggcattagagttactttaggaggagtaattagatctaaaattaatggagttttttatcgcctcagaatctaattagatgtgtagaaacccattcgcagaggtatcttagtctcaaatgatactcaacggaaattggggatttcctttagatatgaaaatttgctgactttctgctttggatgtagatgaatggggcatgggttcaaagattgtattgggctaatacctttttggagggagatgctgaaaagattctttgtatcccgttggcacaagaaccccatgatgattttcttgtatggagtggtgaatcttcgggaaaattttcggttcgtagcgcctacaaactattacaaaattatggttataatcctagagcttatgctttacaaatcgactataggaacttttacaaataactctggctcgaaaatctccctacaaaaatcaaaatcacaatctggaggatatcatggnaactacttgcctacactagttaacatgc

SEQ ID NO: 7350 - DNA, 560 bp, Gossypium hirsutum
  Clone ID: LIB3828-016-Q1-N6-C9
gcaattaacaatctttacataaccttgatctgtcaaaaggaagatggaaataactctacaactgcaagcaagaacgaaccttccttggtttcaaatgaaacacaagtaaaagtacaattctcatgaaggggcagttaaagtcaaccctggtgtggcatcaaaatcacaaaattagttggtccctggccaaacagaggtgcatccatatcttgagcctaagtttcacttctttctctaggttatcagcaaccagcagccttcaggaaattgtcatatgggattgaggcaggaagctgaaagcagggctgatgttggtgctcgtttgcacaaagcatcagattagcgccagcaggttgatttaaagagacagcaccaatgttatcgtcaagaaatggattttcagccttcaaaaaaccagaaccagcatgtgaacgaggttgcccctcctttgtggaaatgctcactaaaccttctcgattctgttgagcactcattacagcagacatcttctgctgctttcccaccagaagtgcctcgcagttccctgccatttcactata

SEQ ID NO: 7351 - DNA, 571 bp, Gossypium hirsutum
  Clone ID: LIB3828-016-Q1-N6-D1
atcacaacaagacttataaaagtttgaaaggaagatccaactttcaaggatcatacataccctaacgaaaataaaaggagaacaacgatcctgcagaagaggctaccctactaaaacacgagttgggtattcgctgggaaaataagctcagcaatgaattctacaattattaaaacctaaagctgcatagctgaaaaatttttgtaaactatctattcttcttggccaacttcaaaattcttcattttaaattccagttcatcctcattagcttcacccccaccggatttttctccatcatcatcatcatcatcatcatcatcatctcctccttcaggatcattctcatcaaaggaaccaagcacaccaggatattttttgaatacttccttcacctcgtcaacaccatcatcagagatgatattcccattgatgtttaacagcctaaagccaggtttctgaacaactacctgagccaaatgccaagccccagcccttcttatgaaattggtgctcatatcaacttcctttaaaaggtatgcccttcctccaaagccttacttatttggat

SEQ ID NO: 7352 - DNA, 599 bp, Gossypium hirsutum
  Clone ID: LIB3828-016-Q1-N6-D10
tttttttttttttttttttttttttttttttttttttttttttttttttttttttggacaagaaaccacaaccaaaaaccaaaacccaaaaaaaaaaaaaacaaacaatgaaaaaaaaaacaccaaaaaccccgcccccaaaaaaaaaaaacaaaaaaaaaaaaaaaaaaaaaaaaaaaaaaaaaaaaaaaggaaaagaaccccgggccaaggaacaggaacaccacccaaaccccaacgggccaaacccaaaacccccgaaacccaaaaaacaaaaggggggggaagcccaaccaggaccgaaaacaaaaaaaacccaagaaaaagaaagccacgggcgcggggcgggacccgggaaacccggaccgggacccgcagggggaccaactaaaacgaaagggaggagaaccaaaggcaggcgggaacaagggcaaaaccggggcccaagggaaaacggccccccgtcccaaatccaaaaaaaaaacaaaccaaaaagggaaaaggcaaaggcgggggggcccaaagagggagccaaccaaaagcaatggcctgacgcccacgggccaattggcaaaacgaaaacccgccggggcagaggg

SEQ ID NO: 7353 - DNA, 471 bp, Gossypium hirsutum
  Clone ID: LIB3828-016-Q1-N6-D11
agggaaaatttataccctcttaatccaaatatcgagttacagaaagattgcttcggcagcaagaatgctttccaaagaaatcatcggactttgctagagaagcagcagtaaaaatggtagcaaaaacggaaatacgccaaacatacgaacaccaagaaaggtggggttactgcaaaccaagcaaatgagaacaatctcctgtataatgtatgtttcaaacaattaaacactcaaccctaacactctccaagccaataaaaggggatagggttaaaacatacaaagcatgaggctccagtacgttcgtgttttacgggtttcggctctcactgctaccaatgtgtactgcatttgactgtaatagtatccattacatccacagccatgatgaattaaatacgacagaaaaggagcttacgaccgctatttttgtacttatattacattctccctgtctcagcttaaatcaag

SEQ ID NO: 7354 - DNA, 581 bp, Gossypium hirsutum
  unsure (1)..(581): unsure at all n locations; Clone ID: LIB3828-016-Q1-N6-D12
ccttcactcacaaacaaaaattcctttngaaaaataaatttaaggaacaagtgtaattttctacagcaaacgaaagcaccagccacggttcacaaaaaatccaacattcaatcccagattttggtcattcggatgccacatctaaataggcaccttcacattttggcccttaaaatggtagttcatctacgacgtacaaggaaataaaatttgataacaaaaaaatgaaacagctatctcaacgcctcctcattcctcgtccacggccagggaaaccacctccacgacctctgccacccatggcacttgcagcagcttctccctgtgcactctccgacttgggattcttaacagtctcatcgacacttagaataagacatgcagcctcagttgcagcattgattgcattgatctttacaactgatggctcccacacaaagtttgcaaatgaatctgctattccgccagtgttgatgtccactccgtaaggtgcaccctcaccagatggaagtgcatgcttgtgccttaatttgttcaacacatcagttgcatcaaatccagcattgtcacaaagctgccgt

SEQ ID NO: 7355 - DNA, 301 bp, Gossypium hirsutum
  Clone ID: LIB3828-016-Q1-N6-D2
aagagaaaaaactttcttaattaaaaaaccttttttaacggcttgtttgtggcgacgataacccttgtctgttccatatagataatcacaatatgtaaatatagatgcaaaattgctttggcattgtctcccaacaaaatgatgaaaatcatgatactctggtcctccataaaatggtatcaatttggtgggactccaaggaaaattatacccgctgtgggtctcgatggcttcaacttggcgtagagatgaccatagccacaatgtggtcatatggcatggaaccatagctggaccaagg

SEQ ID NO: 7356 - DNA, 588 bp, Gossypium hirsutum
  Clone ID: LIB3828-016-Q1-N6-D3
gaacaaaaatgatttatctatggcagctataactagtaacaaacatttatttacaagttacctctcaagttatttcaggttttgctacaatgaatacacaccctatggagctattcggtccgttttcccttggcgaaaatttgatatacaaaattatagcaaaaaaataatcagtatgaataaggctgcccgattccaaataatggagcttcttccactataaagctgagcatacgattcctctttgtccctttgactaaatttccttttatgcttcaaaaacctgtcacaaaactcacacaaaagccgcctaaaaactcacacttaggagaagaatggccgctactcgcttttaatcttcaatatcttgaacccacgtcaaatcttggagtacagtttcaactgctgcattccgaacaagaagaccaacaattcgccagttatctgcagtgggttctagccctacaacacaaagtcgcctatggctgacacgggcctgctcagaaagggctttctcaattgtgccccaaaccggaacgatgaggccacccaaaacattaacttcctggattcttgtgccgactgtac

SEQ ID NO: 7357 - DNA, 445 bp, Gossypium hirsutum
  Clone ID: LIB3828-016-Q1-N6-D4
aaaaaaaaaatttttttttaaaaaaaaaaaaaaaaaaaaaaaaaaaataaaaaaaaaaaaaaaaaaaaaaaggggggggggggtttaaataaaaaattaaaaaaaaaaaaaaaaaaatttttaaaaaaaaaaaaaattttaaaaaaaaaaaaaaaaaaaaaatgggggaaaaaatttttttttttaacccccaaaaaaatttaaagggggcttttttttggggggggggggggggggggaaaaaaaaaaaaaaaattgggaaatgggggaaaaaaaaaaaaaaaaaaaccccccaaaaaaaagggggcccgcccaaaaaaaaaggaaaaaacccctttttggaaaaaaaatttttttttaaaaaaaaaaaaaaaaaaaaaaagggggggggttcttttccaaccccccaaaaaaaaaaaaaaaaacgaggggggcctcttttttt

SEQ ID NO: 7358 - DNA, 587 bp, Gossypium hirsutum
  Clone ID: LIB3828-016-Q1-N6-D5
ctactagaaattaataatattatccaaatgcataattagtagcacactacataataacaacaatattgttcaagtgtataattaaaatattgttcaagtgtataattaagaggaaaggatgaagcctgcctctaaaacagatcatgaggatggagctttctcttttagggattctttaactgcatttaacagtaatggcattaacttctggttagtaacaatgatgcctgtgtccacatcaagatgctttcccttagaaaaatccaggggctgccctgcagcatctgtgaccacacccccagcttcagttacaacaatacacccagtagcatgatcccatattttctctcgataccctttgtgaggaaaacgcagatatatggctccatctcctctggacagggcaccatattttgcctgactgtcaattctaaccggcagtgctttgacaccaagtttttgggcaatcaaactagataaatcatgcatggagtgtgctgcttcatatgactcaaagaatgatgcttcttcaggattttcaacagcacttacttgcaccttcactgccgaagaatatcaagtggctg

SEQ ID NO: 7359 - DNA, 594 bp, Gossypium hirsutum
  Clone ID: LIB3828-016-Q1-N6-D6
agaattaaaacatggcagcaatgaaattgttgaaagcttgcggatgacttgaatacaaacaaatggtccaaaatattttatttcattaaatacatttggaactcaagctttctcaccctctctctccccatacaccagaattggatacagatttataagcttatttaaattaactgctgaaaggtggaggccttggcatgccttgcacgatgccgcaagtcaatacaccttccggcaagttgtactcatccttgagggatcggttaggggaaataacactagcataaagctgttgcccaaggtaatgcctgtcccatatctccgacctcaggttccacatcccgcagttgtcgaatgtcaataggattgctgaccaggagttggggaatacctgtatggtgtgtctgctcacggcgtcgagaagattgtagttcatcctcttctcagggctccatttcccaatgtccatgcccacggcaaagaatgagtagccagacaagtggtaagactgaatggcggtctcgggattctcgaagagatttccacaaagtttctgtgtgtcatgttgaggacaataggtgccaaagttacctt

SEQ ID NO: 7360 - DNA, 607 bp, Gossypium hirsutum
  Clone ID: LIB3828-016-Q1-N6-D7
gttgaaagcttgcggatgacttgaatacaaacaaatggtccaaaatattttatttcattaaatacatttggaactcaagcttttctcaccctctctctccccatacaccagaattggatacagatttataagcttatttaaattaactgctgaaaggtggaggccttggcatgccttgcacgatgccgcaagtcaatacaccttccggcaagttgtactcatccttgagggatcggttaggggaaataacactagcataaagctgttgcccaaggtaatgcctgtcccatatctccgacctcaggttccacatcccgcagttgtcgaatgtcaataggattgctgaccaggagttggggaatacctgtatggtgtgtctgctcacggcgtcgagaagattgtagttcatcctcttctcaggactccatttcccaatgtccatgcccacggcaaagaatgagtagccagacaagtggtaagactgaatggcggtctcgggattctcgaagatgatttccacaaagtttctgtgtgtcatgttgaggacaataggtgccaaagttaccttagtgttgtcacttggtggctcatcgggaatggtatcata

SEQ ID NO: 7361 - DNA, 573 bp, Gossypium hirsutum
  Clone ID: LIB3828-016-Q1-N6-D8
gcatcaaattcatgatctttagtcacaatacgtggggagtttcacaacttatttgcgtaaacaaactacaccgtggctgggataaaataaaaatcaaatcaaaagtgaggcaattttgacatgctatgcttcaaataaaaccaaatcaaatcaccatatttaagctttttcaaaactataatcctgcaatggccatgccatcttcctcctttagatacactccaatttgtcccaatgcctcgattgcgatctctgttggagtaagatctgatacatctctataacctagtttgccagcaatttcttacaatgaaaccctggcatttgctttagcataatttttacccctctgctccaaaaggtaagacagacgttttaaagcctttgtatatggatcaccatcttcataatgcaaaaggggacgagaatgagtacctactgcagcaatcctttgtgccaaggcttccaaaggtacatctaaccaaacaacaatccccttcttctgcatatagtcccagttcacatccagtacaactgcacctccaccagtagaaacaacaagttgtttctttg

SEQ ID NO: 7362 - DNA, 600 bp, Gossypium hirsutum
  Clone ID: LIB3828-016-Q1-N6-D9
ggtcgcacccatctggtcactgttgatcacatttattttaatccaaattgtcacaagatacagcagaaaatgtgcaacaaagaaaacctgagcccccgtctcgcaacttgatttatggttgaaaatcaaaagcaacaggatctgcaatagtatagtatcacttttcagatacagcaggtcctttccacttgaagttatcggcataggactttggcttcagcactggtgtctggcgctttttaaccacataatcccacccatgtctctcggcaaaagactttgcagcttcttcactatcaaaaccgagtgcggaatcaccaacattagcataagggtcaccagttgatgtccaacccatcaatgggttctcccacttttgtgtcgacacgaaattgatcttccactttccaactttcccagatccttgttgagttgcagttcttgcaggcgaataaatcacaaccctcctacgaagatgttcttcagggattccggaaaccattccaacctcgcctggtttaacctcaaccaatgcatctgaagagaaggctctcgagaacgaacccaacgtgctccgagccactcgaagttggctcgttt

SEQ ID NO: 7363 - DNA, 154 bp, Gossypium hirsutum
  Clone ID: LIB3828-016-Q1-N6-E1
atgggggcgacgatgcgtgacacccaagcagacgtgccctcggcctaatgggttggggcgcaacttgcgttcaaagactcgatggttcacgggattctgcaattcacaccaagtatcgcatttcgctacgttcttcatcgatgcgaaagccgag

SEQ ID NO: 7364 - DNA, 596 bp, Gossypium hirsutum
  Clone ID: LIB3828-016-Q1-N6-E11
gaccaaggtgattcaaatatttttatttataaaaaatataataattacatataacgacttcgacgattcaatgctttcagtgaaatatctatggcaaaaattgaacccacattgattggcggcaaggcaccccattatagtttacgaagagcatgtaataaccaggtggcgcaatgttgccattcatgggagcttgaagaacaatgttgtttgtatttggagcaacatttttgttaaattccacaattcccaattgaatcaatctctgattcatggagatcccatgggtcacaaatggtggtgagtaaaccgtcacttgaagtttttgttggtcgatttcgccatttccacggatctgtactgtgagtttctggccgtacttcacttggttattggacttctcgacaatgatctcttgtcggaacatggccaagttcgggtccaagtaatgtggtgagaatttctcgacccggacttcagtggggaacaatgcatcatcgaggtaaccggggttcgtgttgcttccagcaatgaggatttttgcgtcaggaaggagtgcaaatgaggagtggtacatgcgggggatgttggatggg

SEQ ID NO: 7365 - DNA, 583 bp, Gossypium hirsutum
  Clone ID: LIB3828-016-Q1-N6-E12
gaaagagaccatctttttataaacctcatcaatgtaccacccacaagattaaagagcctggaggagaacatggacatatatatagtagcttattacatagaaccagagataaaagcatggacatgacagacggttgatatctacagataactgagacatacataacagaaaaaaacaccaaagggaagaagaggggcaatctcacaaacaaatccctccattctctccctttttttatttttttttcttttattatcaatggatcgatgatatccataacaaacaaaggtcttagataggatgataaactgaaaaccgtgagtggcaacaagacacactctctgacagttattcagaagcttcgacaaagaaaaggagctcgctttgcccattcaaagcaattccacattggtctctttctgcatcttcctttacttgttgttggggatcgaatggtttctgcttcgtttctgctcagcatttcccacatcactcgcacatcctcgtattcgcaagtgcttatatcttttcgaagcttcatatgagcacttttacgaacgccgaagcgggtggcgacaccggt

SEQ ID NO: 7366 - DNA, 550 bp, Gossypium hirsutum
  Clone ID: LIB3828-016-Q1-N6-E2
aaagagtataatatataatatatagtttaactctgagagcaacctatgacccgatagagtcacatgatgaatccaggataaggataatgttatttaggtaaatgcttatacattaaacatagatatcaagtagattaattagataaatcgccaaatatcttctaggactttgattgagttgggaccttcagaggctgaaatccatgcttgagacatgcttcccaaactttgtcaatgttagacatggggtaaccacattcgtgctcttcccatccttccaaagcatgcagtatcccagctatgcgccatacgctcatcactctccttggcaaccagttctcgcaagaatccacattctcaagggccgtcggagtctgcatcgctggtgttgtgtgataaaagcagtccttgcgcaatttttttggtggaagttgcgaaaagggaataaatagggttcctttatttgcctttctttgctcttcttcggtcaagtcatctccaactaaccataccttgcaagagctataactcttagaggtaaccaatttac

SEQ ID NO: 7367 - DNA, 191 bp, Gossypium hirsutum
  Clone ID: LIB3828-016-Q1-N6-E3
gggaaaaaaaaaaaaagggaggcaaaagaaaaggggggaaattaaaaaggggggaaccgggcgcggggggggacccgggaatgcgggacggggaccggggggggaaccaggggccccaaaagggagggggataaaaggggggggaaaaaaagggcaaagcgggtcccggggggaaatgggaaaccggtaaa

SEQ ID NO: 7368 - DNA, 541 bp, Gossypium hirsutum
  Clone ID: LIB3828-016-Q1-N6-E4
aacagtaatatcttagctaaatcataaaattcccagaaaatgtcaataaatcgttaaaaattaccacatccatactctacctaatgaggcaaatccagaacccataattgcccacttaccaaaatcatattattgcaaataagggtcattcatttaagctaaaacaacacttcttcgaaaaatccacaacaccttttattctcttaaaaaacacacctcatccaagtgcaaaaccaacacaaatttgcatcacagtcagcagaaagaaagggcaaaacttggtattgattgaataagacttagttcttctatttttttattttagtttcagcataaagcaagagtgaagcctcactttgggtcagtgaaaaagctgttgatactgggcatgatttctggcgtcttgttgcggacatattttctcaagaaatgttcaaaatatttttctccctcagcaaagttgtccaaaaccccagcagccctgttctccttggttaccctgacttcagggttgatgcagatatttcgcaccaactgaaac

SEQ ID NO: 7369 - DNA, 517 bp, Gossypium hirsutum
  Clone ID: LIB3828-016-Q1-N6-E6
caaatgagggaaaaatttaaaaaaggggggacccaaaaaaaaggttgagaacaaaagggaatttttggaaaaaagcacccagggaaagggggccccaagggggggccggggaaaaggaaaccccaaaaggggggggttttgaaaaacgggggggggggaggggcgcggggggggccacggggaaaaaaagggacgcggggggggacccggaaaagccggaccgggaccggggggggaaaaaggtttcccaaaaggggggaaaaaaaaagcggggggaaaaaagggaaaaaggggtgcccggggaaaaatagggacccgcgcaaaatgccacaaaaaaaagaagcccaaaaaaaaaaaggaaaaacccggggggccaaaagggggagcgaacccaaataaaagggggaaaccccaaagccccctttccaaagggaaaaaccgaatcgccagcaaaaaaaaaaaaagggccaacccccgggaagaggcgggttggcaaatggggaccaggggggaattt

SEQ ID NO: 7370 - DNA, 580 bp, Gossypium hirsutum
  Clone ID: LIB3828-016-Q1-N6-E7
aagattaaagccattttcaattcatgaaatacttaccacaaacatcatccattcatagtactactcactttaactaaacgaatttaaaccattatcaagcataaccaaatttctaaaccaaacttactaaaccttataactaagcacccataaaactaaatccaaacaaaaatagcaagctatattagcatggctttaattacataaccaaattcaacatttccaaaaatatattgcagcctacacatgccatagttccaaaatgcaactttataaataccaaaagcggtcaatagtgtgatagactttgctgacgatccccgagcttgaaacttgaatctaaaatctcggacgatgtaaaatggaacagggcaactagtcgaccactttcatttttccccgatctaaatttgatttctttagttcttgatcttcttatacctggcagagtatatcggcaacgaaaggacttgcagaaagggttgtgctagagagtgggtaaaagggagaaaatctcagtgacagatgatgcgcgggttttaggaactgcgaactttactaaagctgatgtgggtagaat

SEQ ID NO: 7371 - DNA, 493 bp, Gossypium hirsutum
  unsure (1)..(493): unsure at all n locations; Clone ID: LIB3828-016-Q1-N6-E8
tttttnttaaggagctagnaaaatccatatcactgaagtaatattagactaatataaaccagaaaatcaacatttttagggttggggtgacgcaggtaatggccataagtattttggttgaagcttgaagcttgaagcttgatttctgatatacaaatctcccttcctaagtcaacattatgtatatctaaaagcagaattctcacactttccatgaactatattccatttctacaatgaatgtataattttcttcgctttattactcatctaccaagcaattatgtatgacaaatattgtttgaatgatgaaacacatccatttttcgaaggcaagactgtggtcaccttctcaggagattgtaggccggtaaatctttcacactggagacatcttccagtgagagctctcgttctaattgtgttcttgtagatttcagaacatcgttgaattccatgtacgaagcccgtttcacaagccgttgtgcatcca

SEQ ID NO: 7372 - DNA, 294 bp, Gossypium hirsutum
  Clone ID: LIB3828-016-Q1-N6-E9
ggggataatttaaaaaaaaaaaggaaagggggaaaaagaaaggggggggggggagggggggggggggggggggggaggggagagggggggggggggggggggggggtgaagaccggggtggataacaggccgacaaaagggaatggcgccggataagataaaaaaaaaaaagggtgggggcaatataagggaaagggggggctcaagggtggggggtaaaggggaagggggggtttcggggaaagaagggggaggaggagaaagaagaacggcaaaagggggggaaacgggggg

SEQ ID NO: 7373 - DNA, 584 bp, Gossypium hirsutum
  Clone ID: LIB3828-016-Q1-N6-F1
gaaatgcttgtgaacatcaaattcatttataacaaataaaagaattagaagacaatgaaacccctcgctttctctcaatgttcaagacgacaaaacaaatagatgaaataagaacggtagaacaaagcagagctgcactaatagcagtcattgctttctctttttgattattttctcccattgaactgtttagaaacatttgcggtgaacgattgacggaccggattcgtcgtactctgccttggcaatccacatttgttggaaggtgcttagggaagccaagatcgagccaccgatccagacactgtacttcctctcaggtggtgcaacaaccttgatcttcatgctgctgggtgctaatgaggagatctccttggtcatcctatcggagataccgggaaacatggttgtaccaccactgaggacgatgttaccgtacaagtctttcctaatatccacgtcgcacttcattatggagttgtatgttgtctcatgaatgcctgcagcttccataccgatcaaagatggttggaaaagcacttcagggcatctaaaacgttcagcaccgatggtaataatctgac

SEQ ID NO: 7374 - DNA, 545 bp, Gossypium hirsutum
  Clone ID: LIB3828-016-Q1-N6-F10
attatcaacaaaagttctttgattcatatcagtaggtaatgttcttttcaaggtaaaaaaataacaacaacaacatgaacatgaagacaaggattctattgcatccccatggaaatatttacaggtactcaaagaaactatgcagaaagtccagatattttacactatgcttattcccattataaaggctaacaagatttgattctggcactgaagtaatggaactcacatctcggcaaccagtttctctgaatcactggcgtcggatagtgtacccttggtccaccttttcagcatctccaatgctgccttgggctggtccataggaaccatatgacccgcgtcatgaaccttaaggaaaccaagagctccatgagttttcaagactccggcttctgcaccgtctactatgaaaggaacctcaggagatgctacaaactccttctgaccagaccattccattgcatgaacccatcttgaattgccaagccagttgcagataagatcatattccccagcatacacgagaagcttgattccgtcct

SEQ ID NO: 7375 - DNA, 593 bp, Gossypium hirsutum
  Clone ID: LIB3828-016-Q1-N6-F11
tttttttttttttttttttttttttttttttttttttttttttttttttttttttttttttttttttttttttttttttttatttttttttattatttattttttttttttatttttttaaaaaaaaaaaaattttgtgtcgaggaaaaaaaaaaacaagggttggggaaaaaaaaaaaggggggggcctttaaaaaaagggggggggggggaaaaaacagccccaaaaagggaaagccaaaaaagggcaagggggaaaaataaaataaaaagggggggaaaaggggggcccccccgggaaaccggaaataaagagaaaaaaacccccaggggaaaaaaaaaataacacaccaccccgtttttggggggggggggggggaacaccctaaaaggggaaaaaaaaaaaaccccgggggggaaattcttaaaaaaccaaccccccgggaaacaaggggtttgaaaaaaaaaaaaaaaggggggaaaaaccaaaaataaaaatctttttggggaccggggggggcgccccgaaaattccgaacgggaccgggaaggggaaaaaattccccaaaaagggggccaaaaaagagtggggg

SEQ ID NO: 7376 - DNA, 595 bp, Gossypium hirsutum
  Clone ID: LIB3828-016-Q1-N6-F12
gacgttccaaaattcaggtaaaattcataaaaccataaatgagaaaatttataaaaccaaagcaaaacaaacttcaaactctcatttcttagttagctggaacaaggaaaatggaatgtctctttttatttttatttttatcatactcctaaaggatgcaaaatctgtaatctcacattcccatctaatatctgcctatcctaacttcaaaattcaaaattgccacactgcaaaatctttgcttgttgcaccttccacaaaaattgcaaccactttacaccacatctgaatcaggcacgattgttgatcgcagtccacctcgtaccatcatttgggaatagaattcagcatgctccttaactgtgacaatcacaaccgccaatccgtgttctcgcgatacatggaagagttttcttgcatcattgggtgtaacagatggaacaacttgaggcaaaacctttgcaactaatttttcagaatgacgagcatcatcaaccagcaaaactttataactgtctccactgccagtaccattcttatccttcgatcgcccaatatcaccaccttcaagagcttgggaagaagggtcaaactg

SEQ ID NO: 7377 - DNA, 597 bp, Gossypium hirsutum
  Clone ID: LIB3828-016-Q1-N6-F2
ctgaatggccaaggctttgatatataacactagcacataaaaccagaatataagctaatccggaacaaggttacacgctttagtttccaacaagcttccatgtgaaaggttagctcagatgtcaaattcttcctcgtcctcgtcttccacttcccattcatatccatattccacctcaccttcatttccctgcagtaaattcagaatttgctccaagtctctcacacgcatctgcaaactggttatagagctcatctgctcaggtaaagttggcagtgaataactctgtacctctagcacgaatttttctgggggttcaagtatctgaataccaaaagcaggagataatgggcgtcccacaacttgaacatgtgacacacagatatagaacaagccatctatttcctgtctctggaccctactcaacagctcaatctgtaatattccaccaatgcaaagaataggctctggaagcttgaaagtctgtaagcggttttcctgagccatttcaaactcttgtgaggtgtaagtccatgcaaacttgtcagtaccagaatcctggcatgactcatccgcatccttgatatgacccatgcg

SEQ ID NO: 7378 - DNA, 583 bp, Gossypium hirsutum
  Clone ID: LIB3828-016-Q1-N6-F3
attctcgaatcggagaaggatatataataataataataataataataataataataataataataataataataataaaagactaatggcgatggttttgaaagtttacactacagggaccatgtcagtataataaggaatgccggcttgtggaacccattggtcagatccaagaaagacgccaggggtccatttcttggcttcatttgtatcaattttcttgatagctggccatgtgaccctaccttcagttttggcaccaggtcccttgttttcaaactcagcaaagtaggcagtgtccaatcctttggtgccgtccatgggggcataaccctctggtgtaatgatgtcttcgattgtagattgcattatgatggctctcgccaagggtttccagggacgaccaaggtacgtcttactcttgtccttcaccggaaggtaatcaggggcacccgtgatggtacagttttgaagtacaagggctgagtcagtgtctatatattgccttccaggtgctgtaatcatgttgtgttggttctcacctggcttcctcacaatgatcaaacaattctggaacacgctc

SEQ ID NO: 7379 - DNA, 559 bp, Gossypium hirsutum
  Clone ID: LIB3828-016-Q1-N6-F5
aagccaaataaaaaataataatataaaaaattaaattattaacagtccaaattacaaaccaagtagattaagcccaaacccgattacaaaatccaaagtcccaagcctaaactgttaacccaataccagcctgacccactaaacccaatggcccaaatcacctaagcccaaagccataagcgaaaccctagcagctagggtgagcctccagcgccgcaacagagccagccttccccctcgcacgtgttatgcccgcgcgcatgtagtgcctccgcgccaaagccacgcctccgagccgagccacgccgccaccagggaccacgccttcacgcgttgcaccgcgccacgtcaccgtacggtctccgtacctgtacctgcacagaaaacaaacaaagacggacaaaaaacgcagcaacaacagagaagacacgagaatagcagagaataacagcaaaaaaaggacgaaaatatgaaaaaaagggagatttttgttttatttttcttttttatttcggctatatgaggccgattctaatattgtaaggggatccccttcttt

SEQ ID NO: 7380 - DNA, 585 bp, Gossypium hirsutum
  unsure (1)..(585): unsure at all n locations; Clone ID: LIB3828-016-Q1-N6-F6
ataaaaaattcgttaattattttcaacaactaaaacaaaatacatattgngaaatctggtttgattacaataactaccgggatgaacacatcatcatcagctataaaagaacctataaatccataggctcactatgctccaatattttccttccatgcatcaacaatggagcagtgaacgatcagagtgcaaattaaggcagtatggagaacaatcattcctcttggtttaattcatttataaataataaatagaccactacacaaaattgggaagaagtaaagaaaaaggaaaaaaaaattcaggttcagctgttataccatggcccgcaagaacactactacttaatctccttaacctcaaaggacatcaatcatcatctgaaccactatcttcagacatcattccaacatcatcaactattgccgagtccgccattttatcccagtccttcaatttaggatttgttagcatgtaattatcacgcaatggggcccaagcaggtccttcatcattcctagaatcagatgtattacccttactggaagaatcgcgtgcgggcaatgatgtcttgcctagctctga

SEQ ID NO: 7381 - DNA, 598 bp, Gossypium hirsutum
  unsure (1)..(598): unsure at all n locations; Clone ID: LIB3828-016-Q1-N6-F7
ttttntttggaaaataaacaaactttattatcattttagacttaataatattataaagataagggatcaaattatgtcaaattaaaatataacattaaatcttcgatttactaaaaccatgatcgataaggcaaataccggagtgagttaggccatagagcggccttatctgccctggaggatgaggtagcccaaaccatcgattggacatgggagctccatccctgttcaagcaacagcaacaaaaatgcacactccctacgcaggaattatcctgatcaggttcaaagggactttctcagcctcattctgccaaaatgccaaagagctaaatggcagatacaggcacccctaaagcattatagtaaacagactgcatgtatagctattattatagagctagtgatgcatcaggggtccgagaaattctgaagcatttcctcttattcatgtaagctttactttcacctgtcagaagagttcacataactggcgggcaggtagatttccccaccaacttcaccatgttgttcaccgctaactgttttcttagcagccaggaattcagcactcatagcatccatcccatgttgcatag

SEQ ID NO: 7382 - DNA, 589 bp, Gossypium hirsutum
  Clone ID: LIB3828-016-Q1-N6-F8
acaattaaaacctaaaccttgatcataatatttcataaagcaccaaaagtgtagcttacgtataattacaacatcaacaaatacgacacaaatctcaattagaaattggtgccaatatactgcaacaattggagtaccgaatcattggctgtcagcctccaaaccaatttattagccaagctgtgtagtatcagaagcaagttaatgatatctaaagaaaaagaataacatagggaatgaagagaaaaggaactatgaagaagcagcagaacgatcagattctatcatagatttgatgtagaattctcctgccttgtaggatgatctgaccatgggaccagatgccacatatcgaaatcccatttccatgccaagggctcgatatttttcaaaagcttcaggtgtaatatattctgatacgggcatgtgacgctttgatggtctcatgtactgaccgaatgtcattacatcaatacctgctgctctgaccttctccattgttttcacaacttgatcaggcgtttctccacatcctaacataattgaagtcttggtaagtgttccagcaggagcatactctttggccatc

SEQ ID NO: 7383 - DNA, 591 bp, Gossypium hirsutum
  Clone ID: LIB3828-016-Q1-N6-F9
ccaaaaaaatttatctatgtggagaatcaaacaatttgatcccatttaaccagactcaagacatcaaaacctgcttcttgtacatagtagcggttcataatcgttcaaaattatggaaaatcttcactcggtacaataagcagttatagtaatgagtagatggacgagttccatgcagcccaagctagaatttctgtattaccacagaattggccaggcctgcctgctcgatggtttgggttggatcaacaagaagtttaggagggaatcccatcatctgcagttgataaattgttgcactctcaggtctagatgcatcaatgaatgaacggatgtctccaactgtattgtgcaaattgaagcaagcgaccatgcgagtcccgtcagccaacctaagctgaatcgaggttgatggtaaactttcgtcaacaaccaggccgggagaaggatttggagcagtgttgagaggactggtactgctggtttcttcaggagttgcggaagtactgccgctaccgagagttcttccgacaccctgaaatgctgcctggtgcttcttctttggttcagggtacttctcgtttctcttta

SEQ ID NO: 7384 - DNA, 566 bp, Gossypium hirsutum
  Clone ID: LIB3828-016-Q1-N6-G1
gttgaaagcttgcgcatgatttgagtataaacatatggtccaaaacattttatttcattaaatacatttggaactcaagcttttctcaccctctctctcctcatataccataattggatacagatttataagcttaattaaattaactgctgaaaggtggaggccttggcatgccttgcacgatgccgcaagtcaatacaccttccggcaagttgtactcatccttgagggatcggttaggggaaataacactagcataaagctgttgcccaaggtaatgcctgtcccatatctccgacctcaggttccacatcccgcagttgtcgaatgtcaataggattgctgaccaggagttggggaatacctgtatggtgtgtctgctcacggcgtcaagaagattgtagttcatcctcttctcggggctccatttcccaacgtccatgcccacagcaaagaatgagtagccagacaagtggtaagactgaatggcgctctcgtgattctcgaagattatttccacaaagtttctgtgtgtcatgttcagcacaataggtgccaaagttacc

SEQ ID NO: 7385 - DNA, 621 bp, Gossypium hirsutum
  Clone ID: LIB3828-016-Q1-N6-G10
gtaaattgatctaaattcatggaactgagtctaacagatgtgtttaagtctcagtcaaccatcagcaagcatgctaaacacaaatatattgaagggtaactaccattgtttaagatctcaactattgaataagccctcctctttaaaactcaatgactacaaccccagcatttctcatctaaatattgcgggcatcaagttcggttgtaatgggggataatgggacaaacggcaaaatccataaatgaacagaagactacttttctcccaccaaaagtgtcttcactatattatcccacatcccatctgcaaccataaacaaatgtccggcaccaggtagttcgtggtagcgaatccacgggagttgttcagcaatgtagcgctgcaacgtaatcggtacaaacctatcctcatctccatgccacacatgcaccgagccttcattgttaggaaatgggttgtccagttccaagggagagaattcccatgctccaaatccgactatcaggtcacgatgcagggactcgtattccccttgctgtcttacttgtgccgcctggttcctagtagacgagatcttcatcaagagttttcggtcctcactagaaaaaattcgatact

SEQ ID NO: 7386 - DNA, 601 bp, Gossypium hirsutum
  Clone ID: LIB3828-016-Q1-N6-G11
aaataaatccaatagtccacattttgtattgtatatgatctttaaaagaataatgtgtgcaacaaaacgtgaacaaagtgattcattaatttttctttataagagaatataataatttcatataacgactttgcgattcaatgcttccagtgaaatatctatggcaaaaattgaacccacatcgattggcggcaaggcaccccattgtagtttacgaagagcatgtaataaccaggtggcgcaatgttgccattcatgggagcttgaagaataatgttgtttgtatttgaggtaacatttttgttaaattccacaattcccaattgaatcaatctctgattcatggagatcccatgggtcacaaacggaggtgagtaaatcgtcacttgaagcttttgttggtcaatttcgccatttccacggatttgtactgtgaattttttgccgtacttcacttggctattggacttgtcaacaatgatatcttgtcggaacatggccaagtttgggtccaagtaatgtggtgagaatttctcaacccggacttcagtggggaacaatgcatcatcgaggtaaccagggtttgtgttgcttccggcga

SEQ ID NO: 7387 - DNA, 607 bp, Gossypium hirsutum
  Clone ID: LIB3828-016-Q1-N6-G2
agtagaataataatgattcaatttttattataggctaatgccgagcttttagaaaagttgaagtgaaaatacatattatagttctgaccaaggggcaatgtctccagcttcttggctaagctcataatagcctatctcttgaagaacttgagtacactgaggaagagcaaccttcctcttaaacccaagattgttggcaaaccgaagttcaccgctgacgccgtcaagtgtggtgagaaccaccctggatatcctccacatttcggagggatcattgcaatccgggttgggactcctcaccaaggcgacgtcgcagtctgattcctcataatcgccttccactacaatgtgatagtctccacgttcgtcagtcactatttcttggctctggaaggtaaggtgattgtctgtacgattcctgcattccagtttcactactgctccagcgatgggttcgctgagtttggtctcaaactcaacacggcaagtgtcacagtaaacatggcctacgacgacgtagctcatattttcagccccatagacgaaattgagtgaggacgaaacaaaaatggtgaagcagaaaagacgattatgggaatatttgcca

SEQ ID NO: 7388 - DNA, 382 bp, Gossypium hirsutum
  Clone ID: LIB3828-016-Q1-N6-G3
aaattcgaaatgtagatataattcatgtaagagatttattgctatcaatgttgtaaacaggccaatttgctcggcccctttgaaacccaaaataaatacaaaataaataaatataaaacccaagtcttataacagtccaagttacatgattaaagacccaagacccaaatacaggcccgataggcccaaaaaattacaactttagaccattagggttctctctctttgcgccacagctctcagccgccgtacagccccaacgccgctcgtgcctccacgtcaacaacccttgtacgccagtacagcctcgtacacaagccacgcacctgtacctgcgaaaggaaacaaaaaacagcagcgagaatggcagccaataggaaat

SEQ ID NO: 7389 - DNA, 613 bp, Gossypium hirsutum
  Clone ID: LIB3828-016-Q1-N6-G4
agcaaagaaaatcatatatattagcatgtacatgcattaattacatatggctacaaaacaagattcaaggaactttaggatattgtaaatcaaatattgttttgagctatttattcttcataattactctttttatccaacaggattttatagcaagcccttctgcaacatcattacttcttattttgtataattaatacgacgacaaccaactcttcctcattatttcatcttaatatggtatcatctccctactttggtggactgggttcactgtccataacctcttctatccctttgctctttacagtttcagcctggcaacatcctgatgcgcacctgggctgaccacactcagcacaagtcccaccgcaaccctgacggcaacactccccactctcacatcccgactgtcctggcattagtgggatttgtgggacttgtgggatctgtgggattagtggaatttgtgggatttgtgggatctgtgggatctgtggaattcttgggatttctggaatttgaggaaatggtagaacgaaaccaccaggattacaattaccggaacatccagaagaacaacatttttcaagaccaccttcaaaaccaaaac

SEQ ID NO: 7390 - DNA, 613 bp, Gossypium hirsutum
  unsure (1)..(613): unsure at all n locations; Clone ID: LIB3828-016-Q1-N6-G5
gagggaaaataatatggatataagctgagaaaaacaacaaaagaaagtcattcatatatgtatacattcgactataactcttgtatggcaatgacataactttcaggttggataattgcagatggttatttgcatctgagaactatcaggcacgtcagcgtactgtctaatgaaggctcttctccaccaaacttcaaatgctctctggatattgggatagtcatcccctttattcagaaaccgatggaaccagttgagcagaataacctgctgttgtcgcaacgaaagggtaagaattgtctgactgagtccttcttcaattagttttttatctacagatctagaagcccttctcatccatctaaaatcttcgtaaagagcgtccaaccatgttgacagcagagagaatcggctgtctttgggcaccaagatgtttcctctaccaattgcgatacatagttgagcagtgatcctgctgatttcatgtcggtacatggtggnggatcttggaatggagttctgcaagttccttttgatctgcccacaatttcacgaagtcatttgccatccttttatcgattagaatatcaactagccactgcaagttgtcagc

SEQ ID NO: 7391 - DNA, 574 bp, Gossypium hirsutum
  Clone ID: LIB3828-016-Q1-N6-G6
ttttttttttttttttttttttttttttttttttttttttttttttttttttttttttttttttttttttttttttttttttttttttttttttttttttttttttttttttttttttttttttttttttttttttttttttttaaaaaaaagggaaaaggggaaaaaaaaaggggaaaaaggggggaaaaaagggggggggggggggggggggggaaaaggggggggggggggggggggggaaaaaatttttttaaaagggggggaaaaaaaggggggggaaaaaaagggaaaaaggggggccggggggaaaaaagggttcgggaaaaaaaaaaaaaaaaaaaaaagggggaaaaaaaaaagggaaaagggggggggggaaaggggggggggaaaaaaaaaaaggggggggggggcaaaggggggggttaaaaggggaaaaactggggggcacgggttttaaaaaaaaaagaaaaaggggggggaaaggggggtttggttttggggaaaaagggggttttttttttcccccggggagggggaaaaacggggggggccttaaacaccgggcccc

SEQ ID NO: 7392 - DNA, 618 bp, Gossypium hirsutum
  Clone ID: LIB3828-016-Q1-N6-G7
agcacataaacatagtccacctgcttaaaactatttggggatttgcataatacatgtaaaaattgcctacatgcaatggctatatcagtacctcgaaaagcaacacacataactgacgctgatacattacaacagaagaatgaagcatttaccttccacgccaaagtatagacaacttatgcaacgaaacaggcaacaatctagcccgaagaaattcacctttcacaccaaagaatagcgttctccttccaacacagcaagctttccaaacagttctcttgctaaaagccaaattcacatagaccctcaaaatgcagtcttctcgctggccattaatgtctctttctacagaccagagcccctctacaatgaaataatctccatacggcacattgttgatctcttgcgatgtttctataaccagatgactgtccaaattgatagtgatattgtcatgagatacccaagcataagaagaaaagattaggaatgaccagaaggagatttaaaataaagtgcacggcaaccaaccaaaggaacaatcaagtacttaatggcatgttacggtagaaaatagtcggataaattaggcgggacaacccaatcaaaggaacgatc

SEQ ID NO: 7393 - DNA, 587 bp, Gossypium hirsutum
  unsure (1)..(587): unsure at all n locations; Clone ID: LIB3828-016-Q1-N6-G8
ggtatcaaatacatacttttatttgggggatataaaaatagaaacaatgaattacgcagtattggttaaagtttaatgtatgaacgtaagcataaatatggtatcaaatacaaatcctttattttgggatataagtaggaaatgaaaggtgatgggtagtgtttttatttactctttctatctgagtccttgtacattttggaaatggtcttgaacaagctcccatcaaaacaccctctaacagcttctttggacagaaaaccctgcttgtccttggctacataatacaacaacaaccattccaacttggatgccaaccatccaagatagtcgaaagcggcccgatttccctcagtcatctgccacaactccttgagtgataaattgtcgggctttgtgagtgcatacttggtgaacatgttctccaggttcactggcatgaaccttccttcagtatcatatgttgctgaatcactcccatgcttatctctgngtattctctctatgtatatcggaagtaacggatttggcacccaccccgggagagtgcgataactaaatgctgcattaattacaaaagttatgac

SEQ ID NO: 7394 - DNA, 603 bp, Gossypium hirsutum
  Clone ID: LIB3828-016-Q1-N6-G9
aataaaatgctcaacaaaatggattactgtcataataccaaagttttctaaagctgtctcagttcacttgacaaaatgaatacaaaatttaaggtctttttagcaagccaaataacaaaacactgtccccaaaagggtaaccttacttcttgtcttccttctcggcctcggcagccttcttcaacctagcaccaatatgacgtttgttcgtacgttcaacacggagcttgttgtatgccttgaatgatttcatgtcgtcggtgaccttcacgagctcaacggaaggcttctcacgagaaataggcatgtatggtccttggacttgggttgcagttgcgagctcctcggcaggtgaatcaccagccttgaacttgcgagcacgccttgggaagacaacaagtttggccttgtaggtcttaagcctctgaacattggcttgaagaccttcaagtgatttgttcttacggcggtgatcaacagcgataccaatggtcggtgcaagtttctttgaaataccagcagccttaagctcttcgagggtgaaaccctttccagctctcaacttcatgttatacttcaaagtctggccatggacaatagggc

SEQ ID NO: 7395 - DNA, 583 bp, Gossypium hirsutum
  Clone ID: LIB3828-016-Q1-N6-H1
aggcaaaatcgagatgaatttataaaataaatttcaatgcattggctaaatgatacaacatagacaccatttgtgatcttgatgctatagcattccatcttacataataaagcacaatgcattaaaattcactcttattctacagaaacacagactatattgcaatcagaattctaaataatccagcatcataaaatgagactcttacttgacatacttcaaaagccattccagcatatcttgatgcgcttcgttagcacgtgccacagcagttgaattattaatatcatatctgagcgtccatccatgagaacaattaggaaataccttgacaaacctatcaaccttattcgcacttaagatgtcatcaaactgttttaaaactgctggggaagccaaatggtcaagctcagctcccaatatcgcaatgggcagcttcacactcttgatatcatccatagtcatatatgaaggatgtaatatcacagcagcttgaataagtttagcctttgtcagttcaaccacagctttagcaccccaacaaaacccagcagctccaattgatgaaaaccctttacttttc

SEQ ID NO: 7396 - DNA, 604 bp, Gossypium hirsutum; identical to SEQ ID NO: 6065
  Clone ID: LIB3828-016-Q1-N6-H10

SEQ ID NO: 7397 - DNA, 590 bp, Gossypium hirsutum
  Clone ID: LIB3828-016-Q1-N6-H11
aaatcaataagcaataactgtcattacttttcatattgaatttcaagaatctcaacaataaaagaactctgcaaaaacatacaattcaagaactactaaagctagtagcaattgggataataatcacaagaacaatcaacaacaaaagaatgatcccaatacacatccatttcctgctactcctttggtaccttttcgcattattgagctctttagaaccatctttcacataatggctggcattcatcacatggtgttcaatatcatccatttgttccccttgtgcctccaccatcaccgccatgtccaaaaacacttggtgcaactctagcaagctcttttcgatctctttagcagcatcatgcctatcttgaatctcaactaccgtctccaacaccttccctcgcccatgttcttgaaccgcccttgttaagaacccctcaccgccactgccatcagaaatgattttctcgattgtttcctcatctgggttttctccagtcacggtaaaataacttctccccacagtttccttatactcagccatcattttttgccttaaaccttgaaaatccatcatcagctccttc

SEQ ID NO: 7398 - DNA, 576 bp, Gossypium hirsutum
  Clone ID: LIB3828-016-Q1-N6-H12
gattcaaatatttttatttataaaaaattaataattacatataacgacttcgacgattcaatgctttcagtgaaatatctatggcaaaaattgaacccacattgattggcggcaaggcaccccattatagtttacgaagagcatgtaataaccaggtggcgcaatgttgccattcatgggagcttgaagaacaatgttgtttgtatttggagcaacatttttgttaaattccacaattcccaattgaatcaatctctgattcatggagatcccatgggtcacaaatggtggtgagtaaaccgtcacttgaagtttttgttggtcgatttcgccatttccacggatctgtactgtgagtttctggccgtacttcacttggttattggacttctcgacaatgatctcttgtcggaacatggccaagttcgggtccaagtaatgtggtgagaatttctcgacccggacttcagtggggaacaatgcatcatcgaggtaaccggggttcgtgttgcttccagcaatgaggatttttgcgtcaggaaggagtgcaaatgaggagtggtacatgcgggggat

SEQ ID NO: 7399 - DNA, 581 bp, Gossypium hirsutum
  Clone ID: LIB3828-016-Q1-N6-H2
caactccaaaaccaaaacaagttgtattatctaatataacattcggaacgatttaaaaatgtcacagtgcatcaatcaaaatttgatcaacataaaatatctcttcatacaaacaccaaataaagtatccaaagttgcaaggataagacttcattttagaggaatgaacctggaagaatgggtagcaccaatacctggtctaccgtgcttgactggcttgtacgaaatagaaaactcagcaaggtaatggctaatcatttcaggcttgatttcaacttggttgaatgtcttgccattgtacacaccgataatgcttccaatcatttcgggtacaatgatcatgttacgcaggtgggttctaactggttctggcttctcaccaggtggagcctcccttttcgccttgcgaagcttcttaattagagccatgggctttctcttcaaacccctctggaaccttctgcgagctcgagcagggaagagcttgacaagctcatcagtggacatatcaaggagagcatccaaatcgacacctcggaagctaaacttcttgaatgttctcttcttgggcacaccggccg

SEQ ID NO: 7400 - DNA, 413 bp, Gossypium hirsutum
  Clone ID: LIB3828-016-Q1-N6-H3
gagaaaaaaaaccctaggaaatttattaaaaacggaaaccgaagggggggggggaaaaaaaaaaagaagggggggggttaaaaaatttaaaaaaaaaaaaaggggcaaaaaaaaaaaagagggggggggggttcccaaccaaattaatttggggaaaaggggttttatttggggcctggggggatccccccaaaaaaggaataaaaaactggtggaacggggtggggggggggagcccaaatgggggggaaaagccccaaaaaactttgggtttggggggcccaaaaaaccccccggaaataaaacccatgggaaaaagccctcactttaaaaaaatggggggggggggggtccccaaaggtcaaaaaaaaaaattttttggggccccaattaaaaatttcaaaagtttaaac

SEQ ID NO: 7401 - DNA, 517 bp, Gossypium hirsutum
  Clone ID: LIB3828-016-Q1-N6-H4
aaaagccacaaaagccactgcagaagtgagcttagctagacaaccgttcataagttcagataacatacggaacacctaagagtgttgcaacccaaaagtctaaagacatgaaaaagcagcataaatagtttttggtagccaaaatccaaaagccctatacaaaaacatggttcaacggttttcagcagaagaacatggagctgctgacattatccttcaacctgggaagctgaggtacagaaatggctcccggagcagtcaccccaccatggctcgatgatgtctctgaagcatcctcaaacttcataaattgccccaactgtgaagctgccaaatgagcgtagcaaataggggccacaacagatatggctgtggtgctcctttgatacacgtaggatagagaatgaacaagctcctgcagatcatcagctgaaaacccaacctggtctaagagaacatgatagtgggtcggccttgtggtccctatcattccagcatgagcacaaaggtaaaaatc

SEQ ID NO: 7402 - DNA, 587 bp, Gossypium hirsutum
  Clone ID: LIB3828-016-Q1-N6-H5
agtatatgaaactatcaagacttgaatcatgttaaacaataagttgggcattttactacgagacacgttgttgacagaatatgtttgatcatatgtaaaagaatttagaacgcttaaatggatggatgtgggaaagaaaaaaataaaagaaaatgaagatggatatatatatatatatatcatttccaggcaacagcatcaatctcatctctggctgctttgtaaagctccagccttttagcaatctgtgttctcttttccatgagttgagggtcctcatccaacattgcactcagtcgttccttctctttcctccctacttgggcataaaagtgggtcaacagtgacctcttggcctctctcacttggcaataaaccacagctttaggaatagtattcttcaatgtatcagaaaccatggctatataagcgctaacatttgatccaatccttgcgagagaagtatcatggaaatggtcattatttgggccaggtgggttcccattcttctctggtttcttctctggtgctgcatgaagcttccggaaaaaatcaaccgtcaagtaactagactccatctctactag

SEQ ID NO: 7403 - DNA, 574 bp, Gossypium hirsutum
  Clone ID: LIB3828-016-Q1-N6-H6
aaaagcatgatgatctggaaaatatcatattagaacctcaattgcctcccagtgacctcaacttcctcaatactaccaaaaataatctccacccattggacaagaaccattgacaaaatttatgccatggcaattcagcaacagctcctgatacaatttgaacacatcacacctacactaaagcaatgcctaatatgcagggtttctataccaaaatccttacagcagatgctatagcctcgacctctgtttccccaacttccttccagaccccatccatcataaggtgcctgcaggtacctgatgaagaaacaccttcactactctgttcatgtttgttctcgaccgtttcctttagcttcttagggcttgagaaattcattaactggatatcatcgctaccttctctcttgccatttcgtcggttaagttcccgctcgttcttcccttccattacttctgtatccttttggcagtcactaccgcagtcaagcaatggaatacgaccagaagacccaagagtacgaggcaacataccaagtggacatgggttccatgattttgccacaaccca

SEQ ID NO: 7404 - DNA, 572 bp, Gossypium hirsutum
  Clone ID: LIB3828-016-Q1-N6-H7
aatcataactctttgcttcttctttttttatttcttattattaagaacacaacatattaaacttgatttaatctattttttaggtgtcaatttgaccttgattctctcaacctctctaggatgaatctggaatgccttgctcaatacatcatttggaattgctggtgaggctgcaaatagggtggtagcaatggactgtgttcctgaaaactggctatcgaacgcggtaatagcagatgcacgtgtcttcccaatgttcttttggaaatgcagcaatcctttagggaacacaaatatttctcccttcttgatacgctttgatatcaacacattggatgtagtgaaaaagccaacctctaattctccttccaacacgaatgcaatctctgatgctcgtgggtgggtgtggggagggttgaccccaccgacggcgtagtcgatacgagacatggagactccaagggtgttcaaacctgggattttttccacattagctgccgtaacaagcgatcccaaagtgttgttagggaagtttggattggccagaccggcaaagaagaatcatttgctcc

SEQ ID NO: 7405 - DNA, 141 bp, Gossypium hirsutum
  Clone ID: LIB3828-016-Q1-N6-H8
aaaaaaatgaacttttgttttttttatattctcctggaaacaggaaaaaaaaaaaaggaaactttccaatttttttttaaaaggaaaaacttaaggaaagggggacaaaaaaaaaaaccaaaaatttgggggggggggggg

SEQ ID NO: 7406 - DNA, 396 bp, Gossypium hirsutum
  Clone ID: LIB3828-016-Q1-N6-H9
gttacaatgaaatatggcagttctctaatgtataactgctcccactaatacatgactaaagcttagttagaattgcacacaaaatgtagctgacataccagctataacattaaatataaatcaacaactactcctactaactttaagtataaattacaaaggaactaaatcaagttacaaatgaacaaaataaacaaaatgctgttgcttctctggttcagcttggatgctggtctgcctgttggtttgctgctggtttccgtatcttgaggtctcgatggtaaacatccctgctgtggcagtaatccacagcattaataagatgctgaaaatactttctagcttcatcttccttcaacctccctttgcttgcctggcagaggaactgagcctgat

SEQ ID NO: 7407 - DNA, 615 bp, Gossypium hirsutum
  Clone ID: LIB3828-017-Q1-K6-A10
gaaaaaggttctgctagagaactttgggatgatgtagtggccggtcctcaaccggaacgtggccttggccggctgaggaagatcaccaccaccccacccttgtccaccaaagatgaggcttcatcaatggcgatgccgacgagtccgacgacacctgggacaccatcgacgccggtgtcggctcgtagggacaacgtgtggaggagcgtgttcaatccaggtagcaaccttgcaaccaaaggtattggcgctgaagttttcgacaagcctcaacctaactctcctactgtttatgactgcaaccaaacggaggctcagagacagatcatgccggaaaacttggctctttgtttggtagctgcgtggaaataacagctttacagcggggagacccggagcaagcatcaccgttgattaggcggtggctgacggcggcggatggtagcaaaaccactagcagaaggttgcagctactgaaggagcaggatttgcatgtaaatatatatatcgtcctttttaaaagttcttcaatgggtcaattaagtagtagtagtaagtaagatgtttaaaagagtaagcggcagcgcagggtggtcgatgaccttatgtcattca

SEQ ID NO: 7408 - DNA, 640 bp, Gossypium hirsutum
  unsure (1)..(640): unsure at all n locations; Clone ID: LIB3828-017-Q1-K6-A11
gtatctattgagagaacagtgttctattagananaaagcagcaggattgtacgctccaacttcttatgctgcagcccagggccttgtggagcttccatacattgttgctcaaacaattttgtttggggtcatcacatatttcatgattaattttgaaaggacagctactgtcgtctcttctgccttttactctttctggaatctcctctctggttttcttgtcccaaagccaagaattccaggatggtggatctggttctactacatttgtccagttgcatggactttaaagggtattatcagctctcagcttggcgatgtcgaaaccatgattgttgaaccgacatttaaaggcaccgtgaaagagtatgtatcaacagtctttggcattgattccgatgtaacaggactcgcggtggctgtactaatcggcttttgcatcttattttttggtgtctttactttgtctgtaaaatttctcaacttccaaaaaagatagaaggatgaaattgagagctatggtctcattntgttgatggtttcctcttaagtgggaaaaaccaaacaaattcatgaaaagctagtatgttgccgaccttcttcgatgatatctacttaaatttggtggtcattaagctac

SEQ ID NO: 7409 - DNA, 591 bp, Gossypium hirsutum
  Clone ID: LIB3828-017-Q1-K6-A12
atcctaaagccccttttcttcccctctcattcggctgaatcaagaggcgcccttggactgccgtttggcctccatgtttagccgccggtcatcacgctaaagcctaatcaggctccgtccaatcacgaatccaaggctacgctcaaagatctcagaatcaacacccaaactccgattgcaacggagccagtgaggattcgagggaaccaaaaacgaaggtaagccccttttttttctttcgaatatatgaacacaaaacccaggcgaacgaaactaaaagaaatccgagattttaatcggaaaatcaccttgatcgattttatatatttgattgttctttttttgttgaatctattcgtagtctcaatacaatgatttttttaggcctttataggcgaaaaaggaagaaaataagagaaaaataatacaatattccctatttgctactgccccgctgttttttttgttcgtattttttgttttgccttgtctgtttgcaagtacggagtgcgtgcgtggcgtacgagggctgtgctggcgtacgggagccagggttggcgtatacggaagcgcttgggggctcggactgct

SEQ ID NO: 7410 - DNA, 502 bp, Gossypium hirsutum
  Clone ID: LIB3828-017-Q1-K6-A7
cccagcgtccggaacgtgcagctgctgttaaggcctctggcaagaagaaagaatctggcaagtcctctgtgttgttggatattaaaccatgggacgatgagactgacatgaagaaacttgaagaagcggtaagaagtgttcagatggaaggactgctttggggagcatctaagcttgtgcccgttggttatggaattaagaaattgcaaattatgatgaccattgtggatgatttggtgtcagttgacactctcatcgaggaacatctgacggttgaaccaatcaatgagtatgttcagagttgtgacattgttgcattcaacaaaatataatttgctatttgggatgcctgcagtaggatttccttgaagaggccttcaaagttatgtttgagattttcatgttttttgttttgctagaacttaatttaagttgtcgttattcttgtgttggacaatggatcgtttatcatgaatatggagcatcaaacacctgatggttt

SEQ ID NO: 7411 - DNA, 146 bp, Gossypium hirsutum
  Clone ID: LIB3828-017-Q1-K6-A8
ttctgttagtttttagtgtgttttttttttccaaataaaagggttttagtgactattgaattggattattagtgataataaatgtttttcttcatttggtatatgtcaatggatgatatgaatatcaatgaattaggtgtttaagt

SEQ ID NO: 7412 - DNA, 614 bp, Gossypium hirsutum
  unsure (1)..(614): unsure at all n locations; Clone ID: LIB3828-017-Q1-K6-A9
gnaatcgaccacttgcattgtcaactataatatatgaggtggtatttccacttttaaaattcagttacgataatttgcctaatgccacaatgaaatattgcttcctatattgttgtctgtatcctaaagattattgtatacctaaaaagagattagtggagtattggttttgtgaagggctattgaatgaatttgatagagttagtgacgctcaaatgcaaagtgacgacattatcagctctcttctgaatgcttgtttattggaaaatggtggtgaaatacatggagaagaatgtgtaaagatgcatgatatgatgcatgacatggctttatggattacaagcgaatccgaagcaacagagaataatttttttgtaaaagcaggggctcggttatgtaaagaaccaaatgttgtggcatgggaaagtgtaaaaagaatgtcaatgatggaaaataagattgaagatctcaaaggaactcccaaatgccctaaccttcgaaccttgtttcttagccagaatgagttgcaagtgatcagcgatggtttcttccaatttatgcctcgtctgactgttttggatttgtcaagaaatcttcgattacgagcgctacct

SEQ ID NO: 7413 - DNA, 655 bp, Gossypium hirsutum
  unsure (1)..(655): unsure at all n locations; Clone ID: LIB3828-017-Q1-K6-B10
gggacacaccagcctcaanaagattcttgatagcggtcgcaaccttgggagatgtgacggtgtccaccttaatgggaaagttgcgaaaggtgatgggaaggatgaacctctgtttacgatggaggcaggcaaaacgtacaagtacaggatttgcaatacgggtatcaagacatctctgaacgtcaggttccagggccacaccatgaaattggttgagatggagggttcccacacaatgcagaatgactatgactcccttgatgtgcatgttggacagtgcttcagtgtgcttgttactgccaaccaggaaccaagggattactatgtggtggcctctacccgttttaccagacgtgaggttacagcaaccggcatcatccgttacaagaatggcaagggagctgcctcatccgagttgccaccgccacctgttggttgggcttggtcactcaatcaattccgtaccttccgttggaacttgacttctaacgctgctaggcctaaccctcagggctcctacaaatatggatccattaacattacccgcaccatcaagctngccaacactgcacaaagagtagatggcaagctccgatatgctcttaatggagcctcctatgtcgaaccaaccacttcactaaaacttgcagaatac

SEQ ID NO: 7414 - DNA, 582 bp, Gossypium hirsutum
  Clone ID: LIB3828-017-Q1-K6-B11
cagtacttcttaaagcatgtcactggtcaacatgtactggaatgctagactgtttgttcattactggtatccattgaaagctcagcacggttttaaacaatccaacgttgcatatcaatgcacatatatgtacaagatctacattgaagggtatgcatggtctgttactgaaaaatacattctggcctgtgattctgttacattgattgtacagcctgagttctatgatttcttcatgataagcatgcagactgtggagcattactgtgcctataaggaatgatgacaaatgcagatcccttaagtttgctgtggactggggcaacaatcacaaaaagaaggcacatgaaatatgaaaagcactcagtagctttatgcaggagcagctaaaaatggactacatttatgattacatgtatcatttgttaaatgagtatgccaagttgttgaaatttaagccaaaaatacctgaaggagccattgatttgtactaagaggtaatggcttgtcaagcagaagggctacgaaggcgaaaaaagaattcatgatggaatcattggtgaaaggtccttcactcacaaa

SEQ ID NO: 7415 - DNA, 378 bp, Gossypium hirsutum
  unsure (1)..(378): unsure at all n locations; Clone ID: LIB3828-017-Q1-K6-B12
nganacatcgtagctaactgcggtgattcccgcgctgtcttgtgccaaaacggcgtcgctcttcccctctccgacgatcacaagccggatcgacccgatgaactgctccgaatcgaagaagctggtggccgaggaatttactgggatggagctcgagttcttggtgttttagccatgtctagagcaataggtgataattatttaaagcccttcgttataccagaaccagaggtaacaattacagagagaagcagcaaagatgaatgtttaatattaggaagcgatggattatgggacgtggtgacaaatgagacagcttgtggggtggcgcgtatgtgttgacgcgctcataagccagcatggccacctatggtaccg

SEQ ID NO: 7416 - DNA, 626 bp, Gossypium hirsutum
  unsure (1)..(626): unsure at all n locations; Clone ID: LIB3828-017-Q1-K6-B7
ataatattggtagttaaagttgtagacattntgaaacttttacacatggctatactttatctactataataatttcattttaactttgccctactacaagtttgagattttaaatatttcatttcaaatgtttatttcaattatatcaaattccaggcgattactactgcaaggatgaaaggagagtttccggaaagagtaggacaaccagaatgtcaggcatgtatttcttccttggtttctcaaatgacaataatgtttctgcttttacttgtgctttacaacttgcaacgtatgacattctgattaacatgaagtatattacttttatccatctaaaagaggaaatttattttattgttgtaccttggggattttactcatcaaaatgatgagctaaacattttaatacttangtgaatgcgattattctagattgatagagatatttctttacaaatttaaatggatttgactgttagatcagttcttttgctgctcggaatttgtttggatctatatggttgatgcactagaatcaaacaagtgttccttcttattttgaagttgtccataatgaatcaaggattactttcaagtctagaatgaaatcccactgaatgttg

SEQ ID NO: 7417 - DNA, 502 bp, Gossypium hirsutum
  Clone ID: LIB3828-017-Q1-K6-B8
atcgccgtctcgagaagcatggccaccaagcaccaaatcaggcctttttgtaggactaaacaagggccatgttgtaaccaagaaggaattggctccacgtccatctaacagaaaaggaaaaactagcaaaagagtccattttgtgaggaacttgataagggaagttgctggttttgcaccgtatgagaagaggattacggagcttttgaaggttggtaaggacaagcgagctctcaaggtagctaaaagaaaattgggaactcacaagagagccaagaagaagcgtgaagagatgtcgagtgttctccgcaagatgagggctcatcatcctggaggtggagacaagaagaagtgaagcttttatttttgttgatttatggacaagcttgaaggtttgatttagtagctgttagagattttgtttagcactttgtttgagactgaaaatcatgcactcaaatttgctgctttacatgaattactgcaagtttttttttttttt

SEQ ID NO: 7418 - DNA, 609 bp, Gossypium hirsutum
  unsure (1)..(609): unsure at all n locations; Clone ID: LIB3828-017-Q1-K6-B9
cgagcagccccacacttcaaaagttttttttctttcttttcctatctctatttgaaatctgtttcaagggaagaagaaggaaaattttatgattttttgagggtttgctaagaataaatagaaaacaatggcgaacaatgttgctgttattggtatctgttcggtgttcttggtggcagcagtggtggcagcagtggtgggtgttacgcatttaaaaaacaatggtgattcgaaaagcggtgaaatatcgagttcgacgaaagcggtgcaaactgtttgtcaacccacacagttcaaagaggcatgcgagaagagcctggagtcatctaattccaccgaccctaaggagctgataaggacgagtttccaagcagcgatagaggaaataaggaaagtgttggcgaattcagcgatgatacaagacttgaataaagatgacaacaacaaagcagcccttaaggtttgtaaagaagtattggatttatcaattgctgacctgcaactttcatttgataagctggggggatacgagatgagtaagatcggtgattacttactaanacctgaggtgtggttaagcggtgccttaactaccttacaaacatgtgt

SEQ ID NO: 7419 - DNA, 402 bp, Gossypium hirsutum
  Clone ID: LIB3828-017-Q1-K6-C10
aaattttgattcaatctattaaaaatataaaaatataaactattaagatggtctgattccgaccatgctaggtaactgcacaattcacactttacaagagattccaaacagtaaatcagaaatacaaagaaaagttcaggtcaaagtaacatataccatctgaattacacttcaaatgattgttttcacgcgattggtaattctcctccacctgacacgaatagcaaagccaccgacgcatcctcgttcttttcttcaaaaacagaccgtcgagattttctagttgcacaaagtagccagggggaggaggtatatgtgcctgcataattccacaccacttttattcttaaacacactgtacacataagtacaaccatcattatgaaaacaaatccctatgct

SEQ ID NO: 7420 - DNA, 574 bp, Gossypium hirsutum
  unsure (1)..(574): unsure at all n locations; Clone ID: LIB3828-017-Q1-K6-C11
caaaatccaacatatcttaagttgtaatggcaagtggaaagtcgaagaagtgcagaaaccagtatcatcatatttacattatgcgngaagttacattatttgttatcattatgaaatagtgcaagtgcccaagaaggaaatgtcaggagaaaagtaaggagaaacagaaattgcacgtacatgaacgtcgaaagttggccagagtggtcaaaacttttggattcagagaagaagcctttcaaacaaaagatgaccacagagaaagtagaatacgaaaaaaaaagagttagaatgtgaagaacaaggtggaaagaataaggtataatataggttctagttatacatgagcagtatgcaaacaaagttagttttccatattctactttctctagtgtaggtcttgtttacacggtatagtcatatatactttacgaaataatataattatataatccaaaatacttgcatacatacatatgtattgcatacttacttaaaaatagttggttaaaatcaaagattaatcctaagatttaggatttaaatattcnnnanaaaaaaaaaaaaanaaaaa

SEQ ID NO: 7421 - DNA, 518 bp, Gossypium hirsutum
  unsure (1)..(518): unsure at all n locations; Clone ID: LIB3828-017-Q1-K6-C12
tgaaaccaagatgagatgataaagcagaaagataaaattattagaagaaaaatctgacaccatggcatcgttgcactctgaattatcatctcttcagaaaaaaggaaccccagatgctgaggaacgggtggngaaaagctcatgcgaaagctcttgaattgcagaaacaggttgatagacttaaaactgaactagaagcaaaattgaaggaaaaagattatttagaatcccgtgcaactaaagctgagaacaagttgaatgaattgaatttgcagctagagaatgtaagtttcttcatctctttttcctctttgttttgagtataagcgtgagaaactccaattgttttgttgttttgctctgccatcattttacagcttcaaaagatcaataaggaacaggagaacaaactagcaaaaactgagcgagctctaaatattgcagaggaagaactggtaaaggcaaagtttgatgccacttcaaagggcaaatgagttgatggaggttcacagcgcatg

SEQ ID NO: 7422 - DNA, 527 bp, Gossypium hirsutum
  Clone ID: LIB3828-017-Q1-K6-C7
gtcgtgttgagtttgagaccaaactcatgaacccatcggtggagcagtagtgaaattggaatgcaggaatcgtacagacaatcagcttaccttccagagccaagaaatagtgactgacgaacatggagactatcacattgcagtggaaggcgattatgaggaatcagactgcgacgtcgccttggtgaggagtcccaacccggattgcaatgatccctcagaaatatggaggatatctagggtagttctcaccacacttgacggcgttagcggtgagcttcggtttgccaacaatcttgggtttaagaagagaggttgctcttcctcaatgtactcaagttcttcaagagataggctattatgagcttaaccaagaagctggaggctataatgagcttagccaagaagctgaagacatttccccttcgtcagaactataatatgtattttcacttccaactttttctgaaagctcggcattagcctatattaaaaattgaatcattattattctactaaaaagaaaa

SEQ ID NO: 7423 - DNA, 623 bp, Gossypium hirsutum
  unsure (1)..(623): unsure at all n locations; Clone ID: LIB3828-017-Q1-K6-C8
gnaaaatccttggcaagaggtgtgcttggaaccaactgtcctatcccccccgggacgaattacacctataaattccaggtgaaggaccaaattggcagctacatgtattatccagtgacgggtatgcataaggcggttggcggtttcggtggccttcgtattaacagtcgtttactcattcctgtcccctatgctgatccagctgatgactatactatcatagcaggagattttttcaacaagggacacaccaccctcaagaaaattcttgagagcggtcgtaaccttggtagatgtgatggtgtccacattaatggaaaagttgctaaaggtgatggtagcgatgaacctctcttcaccatggaagcaggcaaaacctacaagtataggatttgcaatgcgggtctcaagacatctctgaacgtcaggttccaaggccacaacatgaaattggttgagatggagggttcccacacagtgcaaaatgactatgaatcccttgatgttcatgttggacagtgcttcagtgtgcttgttacagccgaccaagaaccaaaggattactttgttgtggcctctacccgttttaccaaacaagaggttacagcaactggtgtcatccg

SEQ ID NO: 7424 - DNA, 636 bp, Gossypium hirsutum
  unsure (1)..(636): unsure at all n locations; Clone ID: LIB3828-017-Q1-K6-C9
ngattggtactcttggttttggttttgaagtggtcctgataaatgttgttcttctggatgttccggtaattgtaatcctggtggtttcgttctaccatttcctcaaattccagaaatcccaagaattccagataatcccacaaatcccacagatcccacaaatcccacaaattccactaatcccacagatcccacaagtcccacagatcccacaagtcccaaaaatcccactaatgccaggacagtcgggatgtgagagtggagagtgttgccgtcagggttgtggtgggacttgtgctgagtgtggtcagcccaggtgcgcatcaggatgttgccaggctgaaactgtaaagagcaaagggatagaagaggttatggacagtgaacccagtccaccaaagtagagagatgataccatattaagatgaaataacgaggaagagttggttgtcgtcttattaattatacaaaataagaagtaatgatgttgcagaagggtttgctataaaatcctcttggacaaaaagagtaattatgaagaataaatagctcaaaacaatattcgatttgcaatatcctaaagttccttgaatcttgttttgtagccatatgtaattaatgcatgtgcatgctaat

SEQ ID NO: 7425 - DNA, 617 bp, Gossypium hirsutum
  unsure (1)..(617): unsure at all n locations; Clone ID: LIB3828-017-Q1-K6-D10
cgccgcttcgcctcccgnaaaacctaaattcgatcaaaactcagaaacctaccgtcgaggagcccgacgcacagggctgagctcttgctattcttcatcctcaccctcccgcaagtcaagcgtaagcggcagcccatgaagaagggaaaaaagagagagaggcgtcagattatagggcggtcgccggtcgaggaacctgcatttagtgagccgagaagaaatgagattgcttttctactggctactggcttgattgagccttggtgagctcattatttcttgaaggaattgttcttgaaacttcaggcagtcaatgaaaacatcaaccaagtggatccttcctcaaatgctccattatttctgctactcttttaagcatgagtttagttcaaatatttgctttttgttgggtaaattttaaatactgatattgaatgactgatgggttttataatctcactttgtcctacctgcacaagaagatctctattttcactgttgcttatttttgctttcattttttgtggaattttttgtatcattatttttgggttaatataaattttggtccctgaacttggcaatcaagtccactttggtacctaattgcctagttc

SEQ ID NO: 7426 - DNA, 638 bp, Gossypium hirsutum
  unsure (1)..(638): unsure at all n locations; Clone ID: LIB3828-017-Q1-K6-D11
ggcattcgatttagaatacggacaagtcaaanaacaattgcaagaggtggaggatgcaatcaaggagttgtgcaacgtcaatggtgaattgaccaaggatgtcgaagggagttcatctttagacggaacaaactcaatggaattggaaggacctggaaagggcaacttgaaaaacgtacgtgagcaggcacaaaagggtctgaaaagatcggaaggttgcagttcgaggtgcagagcattgagtacgttatgctgaaactagaagatgaaaggaagaacaaagggaaaacccgaaccggtgtcctcttaagggactttatctacaatggtggaagacggggtggaagacgaaagaagggttgtttttgtgggtgtgcaagaccttcttccagtatagactgaggctaagcatatacagaaaaaaaaagccctgttgttgcttgataagattcaaagcatgcctaattttcaaggaatttatatgcttagaaactgtttttagagcaaattatcacttctagaattaggccctgatgtaatcagttaacaagctgtatacagcactctatctagtaattttgaataaacaatgtcaaactagtagaacttgttatatatccagttccattttaaccagt

SEQ ID NO: 7427 - DNA, 455 bp, Gossypium hirsutum
  Clone ID: LIB3828-017-Q1-K6-D7
cccagcgtccggcagaagtggaggcggtggcggaggatttggaggaggaaacggtggttacagccgcggtggaggcggcggcggatatggtggtcgccaaggaggatatggtggcggacgccgtgaaggtggatacggaaacggtggggggtatggtggaggtggatacggaggtggacgccgtgaaggaggatacggtgacggcggatctcgttactcaagaggcggcggtgcatctgaaggcaactggaggtcttaaatttagggtttcaaagtgggcttgggcctatattgttatgggtttggtttgggtttggtagttggtaattctaaagttactctgttactgtttggtttgggttctctcgtttttgatcgatgttgttactgttctcttaaaagcataaaaatggaatgaagtatcttcttttcaaaaataaaaaaaaaaaaacaat

SEQ ID NO: 7428 - DNA, 298 bp, Gossypium hirsutum
  unsure (1)..(298): unsure at all n locations; Clone ID: LIB3828-017-Q1-K6-D8
gnaatactttgtatgactaccttctcaaccctaagaagtcatccctggaacaaaatggttttccctggattgaagaagccacaggaacgtgctgatctcattgcatatttgaaggaatctacggcttcctaaatgggtttacaaaattcccattccattttgcagcctttagagaaatgattcttataataaagtagacatgcatgctctttctacaatgagcattccttcccttcctgccaaattgttacccttgagaagagtttgccatttctggcaaatctaaggctttttcatt

SEQ ID NO: 7429 - DNA, 637 bp, Gossypium hirsutum
  Clone ID: LIB3828-017-Q1-K6-E10
gtcccttacagggcagtattctacatgatcatgcaatgccttggtgctatctgtggagctggtgtagtgaaaggattcgaaggagacagtagatatgagatgttgggtggtggagccaatgttgtgaaccatggctacaccaaaggtgatggtcttggtgctgaaatcattggcacttttgttcttgtctacactgttttctctgctactgatgccaagagaaatgccagagactctcacgttcctattttggctcccctacctatagggtttgcagtgttcttggttcatttggccaccattcccatcactggaactggtattaacccagcaaggagtcttggagctgccattatatataacaaagaccatgcatgggatgatcattggattttctgggttggacccttcattggagctgctcttgctgcaatttaccaccagataatcatcagggccattcctttcaagaccagagcttgaaaatgatctaatcattattttgcatcttttcatagtttccttctacatgttgtccttttgtggatctacttcactgatgtgtctctcaactctttgtttcacttaatttggattatgttttatggtggttaattaatgtgtgtaaattatccta

SEQ ID NO: 7430 - DNA, 499 bp, Gossypium hirsutum
  Clone ID: LIB3828-017-Q1-K6-E11
cggccgcgtgggcggacgcgtgggcgccgcctgcgtctctctcttcatctctctgacctaaagtctttagcttttcgcttcgagagagaccatgttggtttaccaggatctcatctccggtgacgagcttctttctgactcattcccctacaaggaaatcgagaatgggatgctgtgggaagttgagggaaagtgggttgtgcaaggagctattgatgttgacattggtgccaatccttcagccgaagatgctgatgaggatgaaggtgttgatgaccaatctgtgaaggttgttgacattgttgacactttcaggcttcaggagcaaccccctttcgacaagaagcagtttgtcgtgttcatgaagaagttcatcgagaacttgacaaggaaactggatgcggaaaagcaagagtccttctagaaaacattgagggagcaaccaagtttttgctttcaaaattgaaggaccttcaatttttcatcgagagagagcatg

SEQ ID NO: 7431 - DNA, 440 bp, Gossypium hirsutum
  Clone ID: LIB3828-017-Q1-K6-E12
ccccgcgtccgcatagccactcttccttgtttttcctttgtgttgatagcagctagtcatgtcgggttattattattacgatggtcaggcggatcagtacgaggcgcactatctcgatgcctgctctctttgtcgcaaatcgcttcgcgattccgatattttcatgtacagagggaatacgccgttttgcagcaaagagtgtagacaagaacagatggagatggatgaagcaagagaaaagaactggaaatcgggtagatctcttagaaaatcagatgcccagaactccactcctaacaaagctgtacggaccggcacggttgctgtggcctaatcccatcatcttgctttttttagcagactgatgtatcaattttgagttagacaaaaagaagaagaaaacttcgacggagttttgtattttcaggcctactttttct

SEQ ID NO: 7432 - DNA, 644 bp, Gossypium hirsutum
  unsure (1)..(644): unsure at all n locations; Clone ID: LIB3828-017-Q1-K6-E7
gtgaatcagcacttgagattgaagagtgtagaccccataataactggcctgaagttggaactatttgctttgnaaacttggagatccgttatgctgagcatcttccatctgtcctaaaaaatattagctgcacatttccaggaagaaaaaaaattggtgttgtgggaaggacaggaagtgggaaatcaacacttatacaggctatttttaggattgttgagcctagagaagggagcattataattgacaatgtggacatttgtaagataggccttcatgacttaagatcaagacttagtattataccacaggaccctacaatgtttgagggaaccgttcgagggaaccttgatcctctcgtgcaatattcggataatgaagtatgggaggctctggataaatgccaacttggtgagatagtgcgtgcaaaggaagaaaagttggatgctacagtgattgaaaatggggaaaactggagtgtaggccaaaggcaattattctgtcttggaagggcattgttaaagaaaagcagcattcttgtactggatgaagcaacagcatcagttgattctgcaactgatggagtgatacagaagattattgatcaagagatcaaagatcggacagttgtgacaatagcacac

SEQ ID NO: 7433 - DNA, 630 bp, Gossypium hirsutum
  unsure (1)..(630): unsure at all n locations; Clone ID: LIB3828-017-Q1-K6-E8
cttaaatcaaaaccatgggnaaacagtcaatattcattttctcttcacaactttcagctccttcaggaaagctagttcagatcgagcacgccttgacggcagtaggatcgggtcaaacatctcttggaatcaaagctgctaatggggtagtaattgctactgagaagaaattgccttcaatcttggttgatgaaacctctgttcagaaaatacagtgtctgacaccaaatattggagttgtttacagtggtatgggccctgattttcgagttttggttcggaaaagtagaaagcaggcagaacagtatcatagattgtataaggaaccaattccagtaacacagcttgtaagggaaactgcagctgtgatgcaggagttcactcagtctggtggtgtaaggccttttggtgtatctctactggttgctggatatgatgacaatggtccacaattgtatcaggtggatccatctggttcctatttctcatggaaagcctcagcaatggggaaaaatgtctcaaatgcaaaaacatttcttgagaaaagatacactgatgatatggagcttgatgatgctgtgcatactgctattttgactctcaaanagggatttgaaggacaaatctcag

SEQ ID NO: 7434 - DNA, 613 bp, Gossypium hirsutum
  Clone ID: LIB3828-017-Q1-K6-E9
caccacccatttctctttctctccccgctcaaaagtctcttcaccatttgctctttcccattctaatactcgcattctccactgcttcttcattagctgccactgcaaaagaccaaactttaaacactcatcaagctgagttctttaaccccaagcttccacccagaatcctttcctcttccaaaaagttcgaaggctcatcggacattgtcgacctccgttacccatgggtcccgtcctttcctcgtcgccaatcaatatctacctcatttggtacggtcgttggtctgtttcccaaaaactcctcatcaaagacttcataaactcaatttccccttccgcgacgccgtcgtttccgccgtctccttccgtatccgactggtggaaaaccgtctctctttacactgaccagactggagccaacgtttcgcggaccgtcgtcattgctaaagaacactccgatacgggttactcccacggttctcacctcacgcgcctttcagtccaacaagttatcgccaccgccgtcgaagccgctcctttccccgtcgaccaccgtaatgggatctacttaatccttacctcccacgacgttaccggtgaagatttttgc

SEQ ID NO: 7435 - DNA, 463 bp, Gossypium hirsutum
  Clone ID: LIB3828-017-Q1-K6-F11
atcggctccaaaaaagtcatcccaccagctgacatatcaggccttgttgaaatgacccaccctggccatgatattaccaattaaggagaggctgcacgtccatctaacataaatggaaaaaccagctcatgatccatttagcgacgatcttgttattggtatgagctgcgtctaggccacctgagaagaggatttcacgagctttgagagaggttgatgtaggaactaagcgaagcatatcaaggattatttatattaaaagcgtgaactcacaagagagccaaattaaacatgcattagatggagagtgcactacgcaagatatggctcatcatcctgttggtggatacaagaataatataatctgatatttatggtgattcattgacaagcttgatagttggatttagtgactgccatacattaaccatactactgatcctgagactgataatatgcactc

SEQ ID NO: 7436 - DNA, 659 bp, Gossypium hirsutum
  unsure (1)..(659): unsure at all n locations; Clone ID: LIB3828-017-Q1-K6-F7
ggnaaaaccttagatgtttaccccttttcgatctgccattcaaccaccaccattccaccattataatcggtggatgatagcaggcgatgaaatcattccattcccccattctaaatcttgcctcaaaaggtcagattttagcctcgagaacctatctcaagtttcgatttcaacaaagaagatacggcctccaatggctcatttgaaggtaagcttttttttttaccttttttatgcagaaacccacatgaaaaataaaaaatatggaccaaaattagggaaagcaaatatgaggcattcgaaatcaccttttaataatttctagtttctttttactcaatatgcctaaccttttcagagtacaaatgatggacttttatagccagatttataaaataaataaaaaataaaaatcatattttccttctgtcatttggctatgtattttattggttgtttctcgtgtattctgttgcaagcatggttatatggaggagaagacccttgtgacgtgaaagccaagcgtgaaaaattgctcgtgggatcccgaccctctggcgctgctctagcgcattcccgaaacttcctttgaaatcggatggctaggggccaagtccattgttgcggcgctaatcaacagactagggtttccccttctg

SEQ ID NO: 7437 - DNA, 642 bp, Gossypium hirsutum
  Clone ID: LIB3828-017-Q1-K6-F8
ctttgcactgttcgcaataccaatgttgacagttgtgtttactggagctggatccatcatcgccattgctggttacatcacttacatcgacttgatgaacaacatggggcattgcaacttcgagctcatccccaactgggtcttctccattttccctcctctcaagtacctaatgtacactccatcgtttcactcgctgcatcacacacagttcagaaccaactactcattattcatgccattctacgattatatctatgatacaatggataaatcttcggataccttgtacgaaaattcactcaaaagaaaagaggaaacgcccaacgtggtgcatctaacgcacttaaccacaccagaatccatctatcatctccgctttggatttgcctccttggcctctaaaccttactcgtcagcttggtacttgtggttgctctggcctgttacattgtggtccatggtgcttaccaggatttatcgtcgaacttttgttgttgaaaggaaccgcttccatcagctcagattacaaacatgggccattcccaagtacggaatacagtaccgcttgaaatggcaaaaggaatccgtcaataacatgattgaggaagctgtattagaggctgaagaaaaagtgctagt

SEQ ID NO: 7438 - DNA, 132 bp, Gossypium hirsutum
  Clone ID: LIB3828-017-Q1-K6-F9
ggtggggggggggagaaaaaacatattcctcatctgcctccacggttggagtgggaagctgacagaagctcaaaaaaaccggcgggccttgttttttttgtctccccccccccccttggtttcaacaaccac

SEQ ID NO: 7439 - DNA, 465 bp, Gossypium hirsutum
  unsure (1)..(465): unsure at all n locations; Clone ID: LIB3828-017-Q1-K6-G10
gagaaaacgaatttgagcaagtatatccccgatgcctcaaatgccgtttacaatgttttgcaagaaatggcaaagtcacatgcatcngaaaaagaaacgttacgaggaaggagatgcagatattcttcaaaaagtatccgatcatttgattaccaaagaaacactatatgaaaagctcactcaacatgttgaaaaggtggattacgagatggcattagaatacgcaacgcaaaccggagtacgagaagaaccgagagaagatatatatttacagtctctagatggtaaaggtaacttttttgatttccatagtcccatatttgtctttaaactctttctatagtgagtttgctctacacttaataacactatttctaatttgcaacctagatacctcatttttttactccatttttactgtatttgtatccctacaaataaaactagataattgtgttgagtgtg

SEQ ID NO: 7440 - DNA, 511 bp, Gossypium hirsutum
  unsure (1)..(511): unsure at all n locations; Clone ID: LIB3828-017-Q1-K6-G11
gaaagatgggtgcttacgagaacgtcaagnacatcatagacagagaatcgntgtcatcggaaaatgcagtaagatgaccagaagaccatttgagagaaacagagccaataaacatggaccagaaagcaagcaggagaattgcagccaagacccagaatttgtacccacttttacccaagaatccagcagttacggagctatctttcttcacaacactcggcgttgctagttgctgtgaagtgattggtattggcggtgttgtgggtgaatcttgctccttcattttcagttctcaaacacagctttcaagggcgtcccctggtttggctaaaatgtaaaaggcagtgaagtagaagagagtaaagagaagcagtcgctttttttttttttggggggggggggggggagagaagcaatcgctactattaggtcggngaagtgtcgaagtagtgggtcaaagtaggccgttagtccctgtatctttacagaaaatgaaatttagtttgaagtt

SEQ ID NO: 7441 - DNA, 393 bp, Gossypium hirsutum
  unsure (1)..(393): unsure at all n locations; Clone ID: LIB3828-017-Q1-K6-G12
aaaacaagataaagagacataaattttntcacacaaaataaaaaatcacctttaaaacgagtattctgttttttgattagtttttgcttgtaaaatgtacgtaaaaaaaattacaagagagtagatccgggcttttaaagccatttacaatcgattcctttttagtttttttgttttttgctctttatttctctgcgctcgcatgcttttttctttgctattgtgcttgtttcagatgtcagacgacgcgtggagggcgactgatggagcagcgtgcgagcagacgaagaggcgcggggcggtggctgaacgttcctagggttctgctgattttttttgcattagattgatagtttgggctgtatttgttattgggctgattgtggtttaaag

SEQ ID NO: 7442 - DNA, 622 bp, Gossypium hirsutum
  Clone ID: LIB3828-017-Q1-K6-G7
cgaagatatccccgccttctctctctctctctctctctctctttctctctgcctcgcgtgaattgaatgacgctttcatagactcgtaatcttcttcactttctcgcttctcagcacaaaatctgttcatttcccccctccgaaatcctcgatattattagttgaaatgtttcttcggagaaaacattcacagaaggatgattccgatcaacgagattcaaaggtcagtgaactcaggactgctataggacccttgtctggtcgcagtgcaaagtactgcactgatgcatgtttgaggagatatttggaagctcggaattggaatgttgacaaagcaaagaaaatgttggaagagacgttaaagtggcgattgacttataagcctgaagaaatccgttggcacgaagtggcacatgaaggtgagaccggaaaagtttccagggcaaattttcatgatcatcaaggaaggaccgtgcttataatgaggcctggaatgcagaacacgaaatcagctgaaaacaatatccgacatttggtctatcttttagaaaatgctatcatgaatcttgctgagggccaggaacaaatgtcctggttgatagacttcaccgggtttttcgtg

SEQ ID NO: 7443 - DNA, 609 bp, Gossypium hirsutum
  Clone ID: LIB3828-017-Q1-K6-G8
cttggtgatgtctgcaccagaacctcgaggcgccttgaaatagtctcttttaattttgcgaggagccgaaatccaaagcccaaagcaaaaagtgcttaacatggatgccgccggcaatcgaagttgtaagttactattatttttctttgctgccataatcccagccctgcaaggtcacatcggagaatatgatgagtattggaaacaacgtgaattggaagctaaagaaaacaccgagcaggcatataaccccaatcctgaggaagttacccagcatgtcaaccaccttgtttccaggtcgctgatgaggctaaatagcacaagacgacatttgagggcaagaaaaaaggcggtccctgcgatccaaccagccccattgaccagtgctggcgctgtgatcgtaactgggagaaaaacaggcagagactggctgattgcgccattggattcgcacgtggtactattggtggaaagtacggtagaatttacgtagtgaccgatccttcagatgatgatttgttaaatcctaaacctggaaccctacgtcatgctgtgattcagaaggaacctctttggatcatctttgcacgagctatgatcatcaggcta

SEQ ID NO: 7444 - DNA, 520 bp, Gossypium hirsutum
  unsure (1)..(520): unsure at all n locations; Clone ID: LIB3828-017-Q1-K6-G9
gttccccaccgaagttcgggttgagaagttctcgccacattacttggacccgaacttgggtatgttccaacaagagatcattgttgaaaattccaataaccaggtgaaatacggtcangaaatttacagtgcaaatccgtggaaatgtcgaaattgaccaacaaaagcttcaagtgacgatttactcaccgccatttgtgacgcacggggttgctatgaatcaaagattgattcaattgggaattgtggaatttaacaaaaatgttgccataaatacaaacaacattgttcttcaagctcccgttaatagcaacattgcaccacctggttattacatgctctttgtgaactacaatggagtaccttgccgtcgatcaatgtgggttcgaattttaccttagatctttcacaacaagcattgaattgtcagagccactatatgtaatacgaatcattgttcacgttttgtttcacaagttgttatttgaagatcttatataaaatgtggataattagattt

SEQ ID NO: 7445 - DNA, 245 bp, Gossypium hirsutum
  Clone ID: LIB3828-017-Q1-K6-H11
gtcactttgtcttgatcctttctggctcaagacacttgtccccaggtagtaattggatgactgttagcgcagcgtgacgtgactgttactataggtacagcaccttacaatgcaggcattagtccaaaaatcagtggcccgggccattgaatcagggctccccatacgttaactgcaactccagtttcctggcacagagtccggctcgacagacggggttgagaatataaacatgtagcattcaa

SEQ ID NO: 7446 - DNA, 277 bp, Gossypium hirsutum
  unsure (1)..(277): unsure at all n locations; Clone ID: LIB3828-017-Q1-K6-H12
aagnagttacgaatatagagaaagaggacatacttagtatagggatgcttcaactgctcagaagcttgtattatactgctcctcattactagcaatcgtttgtggctgttaccagtaggagtaaattatcacatgaacacgaactacacatagatacttgtaatggaaaaataccatcattgttcaaaaaaaaaaaaaaaaaaaaaaaaaaaaaaaaaaaaaaaaaaaaaaaaaaaaaaaaaaaaaaaaaaaaggaaaaaaaaaataaaaaaaacca

SEQ ID NO: 7447 - DNA, 74 bp, Gossypium hirsutum
  unsure (1)..(74): unsure at all n locations; Clone ID: LIB3828-017-Q1-K6-H9
naaaaaaaaaaaaaaaaaaaaaaaaaaaaaaaaaaaaaaaaaaaaaaaaaaaaaaaaaaaaaaaaaaaaaaaaa

SEQ ID NO: 7448 - DNA, 606 bp, Gossypium hirsutum
  Clone ID: LIB3828-017-Q1-N6-A1
gaccaaaatcatctattattcgcttttctaacactgaatttacgaaaaagaatggattacattttaagtaaatataatttcttttccttacttttacattaataaaaaataataaaatttgatcactcacaagccacccaccgaattcaaagtatgtggtttttctgactcaatggacacacgggcagccccaataagtccacaactgcccaggatctccaaacctgcccgcttagctgtatctctcgttcatttcccactttttcaacaaaagaagaacaataaattattaataaaacccaaggaaaggaagaaaaaacaagcatcttcaacgtgttttccatgtgattggatcttatcaatcgtatgtgcaagatttcttgagcgaaataggaacattgagtttcttgggatcgaaagttatgtcgcattctattttcttgtagaactttggcttcaccaatttgcccaacacataagctcttgatcggacaacgaaactcagtttaagtgaaaccggaagcgatgtcgtgcctgttgaactgctcaaactggctccactcccgtacaaaggaaccttgtttcccataaccattacagttacag

SEQ ID NO: 7449 - DNA, 475 bp, Gossypium hirsutum
  Clone ID: LIB3828-017-Q1-N6-A10
aaaaaaaaagaaaaaaaaaaaaagggaggggaaaaaaaaaggggggaggggaaaagggggggggggaggggggaggggaaggggggggggggaagggggggaaaaaaaaaaggggggggggggggggggggggggaaaaggaaaaggggggaaaggggggggggaaaaaaaaaacccaaacccaaaaaaaaaaaggaggggaaaaaaaaaaaaaaaggcaaaaaaaaaaaaaaaaaaacaaaaacctttttttaaaaaaaaaaaaaaaaaaaaaaaaaaggggggggggggggccggggccgggaggggaaaaggggaaagggaaaccccggggggggggggacgctggtaaaaaaaaaaaatacaacccccccgcattcggggcggggaggaagaagaaaaaggggggaggaaaaaatggggggggaaaggctgtttataaaaaaacgggaaccaacaggtaagggggggggcc

SEQ ID NO: 7450 - DNA, 578 bp, Gossypium hirsutum
  Clone ID: LIB3828-017-Q1-N6-A11
tttttttttttttttttttttttttttttttttttttttttttttttttttttttttttttttttttttttttttttttttttttttttttttttttttttttttttttttttttttttttttttttttttttgggttttttttttttttttttttttttttttttaaaaaaaattaaaaaatttttgggaaagggggttggggaaatttaaaggggggagggaaaaaaaaggggggggggggtttttttggaaaaaaaaaaaaaaaaattggggggggtttatggggaaaaaaaaaaaaaaaaaacttttgggggtttttaaaaaaaaaaaaaaaaaaaaaaatgggggttttttttttttgggggaaagggggggggggatttttgggagctttggggccccaaaatttaaggggtttttttaaaaaaggggggggaaaaaaaaaaccttaaaaaaaaagggggggggttccccccttgggggggaacccccaaaaaaaggggaacaaaggcccaaaaaaaaaaccttttttttttttggggggggggaaaatttttccccggggggggggccccc

SEQ ID NO: 7451 - DNA, 510 bp, Gossypium hirsutum
  Clone ID: LIB3828-017-Q1-N6-A12
gtaactaccaattttggcccgggcccgtttattcaaaccccaaacctattttttaatttaaataataataataataacacgggccaattacagaaaccaatagcccaaactaacagccccaaaccagctacataacccctagcccaacacttaaacctaacccacacttacaaggcccgataggcccaaaatattaaaattagacagagccctagctgtctacttgcgccgcagcagtccgagccccccagcgcctccgtacacgccaaccctggcctccgcacgccagcacagccctcgtacgccacgcacgcaccccgaacctgcaaaccgccccggcccaacaaagcctccacccaaaaaaacagcggggcagcagcaaatagggaatatgggatgaaacggcgcttattttctacctttttcgcctataaaggcctaaaaaaacattgggttgagactaccaatagattcccccgacagagaacccccggtatataaaatcgatca

SEQ ID NO: 7452 - DNA, 610 bp, Gossypium hirsutum
  Clone ID: LIB3828-017-Q1-N6-A2
aggggcaaaaactggggaaactggatttcatcacgcaagcacatatttacagcttaagaaaaaacaaagaacacagagaaaaaagttccgcttgcaagcagtttctcttagtaacactaagatgatgtacattgcaaaacaaggtgagcaaatattagagttacaaacacaaagaagagcagtgcacctttcgttttttcccttcgctagctaagccaacaccgaatgcatttgatctgaaacagaagccagaccctgcatcaacctacagatttccaccgtatcgtccaggtagtacttagccttacttggttttttacccacagtacatgcaaacacttctgctctgggatcgatcaacggccccaatactgaacttatgattacctcgaacatgtcttcatcagatctatcgtctcctatgcagagaacaaagtccggcaacatacccctctcttgcattgtggagagtaggcgctttgcaactagacccttgcttacaccctgtggcttaacctcgacaaaattctgcccactctttaccgtaacaggttcattggccagcacactttcgagatgatcaagaagttctttagcttggcatgatcca

SEQ ID NO: 7453 - DNA, 587 bp, Gossypium hirsutum
  Clone ID: LIB3828-017-Q1-N6-A3
cttaggcaattatctttcactaccaaagagaaaaacagatgataactgaaaatataaatattccaacaatcatcaaatgtttcaagattattgtccaaacgacaaaatgatggaacaaaaaaaaagcagataatgaaaccaaaatatgaaattgcaagaaaccttagacagagcagttcttgaggcttagcctatctcttctttgcttgtgctttaaaaacatttcctatgcacaattgaagggccagattcatcatattcagcttttgcaatccacatctgttggaaagtgctgagggaagctaatatggagccaccaatccacacactatacttcctctcaggtggtgcaactaccttaatcttcatgctactaggagccaatgctgtgatctctttgctcattcgatctgcaataccggggaacatagtagtgccaccactaagcactatgttaccgtataaatcctttctgatatcgacatcgcacttcattatggagttgtaagttgtttcgtggataccagcagcttccataccgatcatggatggttggaaaagaacttcagggcatcggaaccgttcgc

SEQ ID NO: 7454 - DNA, 599 bp, Gossypium hirsutum
  Clone ID: LIB3828-017-Q1-N6-A4
aaccaaccaaacatcgtaatatctattccattcagcaaaccaaacatgctgttacatttatagttcatttgtaaaaagttcagtcccaaacacttctatgctcatctaaatgcgtacaaaaggagaaaattgaattctaaatgttgaaatatagtgagaaaagaaatttatatatctcaaaatcacaatacatgcctgtgctggaaaacacagtttgcacttggggatatgcatatattctctctttgtcttcaacatggagaatcctgtcctgcattagcagtccaaagtagagccttggagtgggtgtggaaaattacattacttgtccccaccacctccaaacatccccatcatgtctttggtagaacccatttgcttcatcaagttctgcaacccacccatacccccaatttgctttaacatctgcggaggcaggaccttgctcatgtgctgtgcattcatgttccgagacaacgcactcatttcacccttctttggaattttcagccccttcatcttgctccatatctttgctagccgcttgtactcctccatcatttccattacctctcgaatatgacgtcccgaccccctcg

SEQ ID NO: 7455 - DNA, 600 bp, Gossypium hirsutum
  Clone ID: LIB3828-017-Q1-N6-A5
gagcattatatgttctttcatattattcatcggtcaaaaacaactgttatcaacaacctttggaaacaccacaaagctgaaaaaatctaccattaaccataccatagctttatgattttcacatattttatttcatactactgcttgtacaactatatatatatatatatatataaactgagattaaaaatcccattaaaattatggcattatagaaaattaatactgaaacgtgttatcagcagaggccatgataggttgattcaagaaagccaaatggaaaggattaaggaaggcagtatcagctacagcaggctgagtgaagtcaatgcttgttttatcatcatcgtcgtcgtcatcgccatgatcatcattcaagaagctgatgatttcattcaaggactgtaacctatgagtgagttcattgagttgagctctaagcaccgagttctctgactcaacattcaagaggtgttgtgtggtgaagtttatgtttgtgatgatctcatggttttgtttctgcaactgagtcaactgagtcattagatcatctaaatgcttttgtttcctcatccttgatctccttgctgattccctgtt

SEQ ID NO: 7456 - DNA, 418 bp, Gossypium hirsutum
  Clone ID: LIB3828-017-Q1-N6-A6
cttgggggtttttgtttttttttggaatttttttggacgcgtggaaaggccccgggaaattcgggcccggggccggcggggggacaaggggcccccgggggggggggggggggaccgggggggcgggggggggaccccgggggggggggggaaatcgctatggggggacaattcaaaacgggggggagcggggaaaaaaagggtcccggggggggggcctaaggggggaacaaaccaaaaaaaatggagggggggggaaagaagggaaaagccggggggacccaggggggggggcaacaaaaaaaaatggggcaaggcccaaggacgggcggccagggggaaaaacgggaggggggccttcttttaaaaaagggaaaacggcaaggggaggggggcttgcattttggggcccaggggg

SEQ ID NO: 7457 - DNA, 503 bp, Gossypium hirsutum
  Clone ID: LIB3828-017-Q1-N6-A7
aaaccatcaggtgtttgatgctccatattcatgataaacgatccattgtccaacacaagaataacgacaacttaaattaagttctagcaaaacaaaaaacatgaaaatctcaaacataactttgaaggcctcttcaaggaactcctactgcaggcatcccaaatagcaaattatattttgttgaatgcaacaatgtcacaactctgaacatactcattgattggttcaaccgtcagatgttcctcgatgagagtgtcaactgacaccaaatcatccacaatggtcatcataatttgcaatttcttaattccataaccaacgggcacaagcttagatgctccccaaagcagtccttccatctgaacacttcttaccgcttcttcaagtttcttcatgtcagtctcatcgtcccatggtttaatatccaacaacacagaggacttgccagattctttcttcttgccagaggccttaacagcagctgcacgttccggacgcgtggg

SEQ ID NO: 7458 - DNA, 152 bp, Gossypium hirsutum
  Clone ID: LIB3828-017-Q1-N6-A8
acttaaacacctaattcattggttttcatatcatccattggcatataccaaatgaaaaaaaacatttattatcactaataatccaattcaataggcactaaaacccattttatttggaaaaaaaaacaccctaaaaactaacagaacgggcc

SEQ ID NO: 7459 - DNA, 566 bp, Gossypium hirsutum
  Clone ID: LIB3828-017-Q1-N6-A9
aattacaagcattgtactcacttaaatgggtaaaccccaaaatcacaaagcataaaacattaaacgttttcgattctctaaaatcacaaaagttataatacttgggtctaacatcgaaacaaattaaagcttaggaatatttctagacgaaacgtgctttcttatgtatcgttagtatattcaaatattgcaaaccgttcaactcctccataagcttttcattactcccgtacaaaacattgtcttcattaggataacctccgcatcccgaccaccacattctaaatatttgcaactgcgaaaaactagataccaaatgttgtgggatttttttgagattgtgcatgtaactaaagtccaacatttttagttttgtcaacaatttcaaccctattggcaactctgatataccagtaaatgataggtcaagacattctagacaaaccaattgtgaaattcccttaggtagcgctcgtaatcgaagatttcttgacaaatccaaaacagtcagacgaggcataaattggaagaaaccatcgctgatcacttgcaactcattctggcta

SEQ ID NO: 7460 - DNA, 614 bp, Gossypium hirsutum
  Clone ID: LIB3828-017-Q1-N6-B10
aaccaacttgcaggcatgcagaaatacaccttttatttcattaaatacatttggaactcaagcttttctcaccctctctctccccatacaccagaattggctacagatttataagcttatttaaattaactgctgaaaggtggaggccttggcatgccttgcacgatgccacaagtcaatacaccttccggcaagttgtactcatccttgagggatcggttaggggaaataacactagcataaagctgttgcccaaggtaatgcctgtcccatatctccgacctcaggttccacatcccgcagttgtcgaatgtcaataggattgctgaccaggagttggggaatacctgtatggtgtgtctgctcacggcgtcgagaagattgtagttcatcctcttctcagggctccatttcccaatgtccatgcccacggcaaagaatgagtagccagataagtggtaagactgaatggcggtctcgggattctcgaagatgatttccacaaagtttctgtgtgtcatgttgaggacaataggtgccaaagttaccttagtgttgtcacttggtggctcatcgggaatggtatcatacttgaaaaccttgtcggctacgcc

SEQ ID NO: 7461 - DNA, 523 bp, Gossypium hirsutum
  Clone ID: LIB3828-017-Q1-N6-B11
gatccaaaacaccagaaacaggccatttcttgggaggtagtaatcaacatagttacaaatacccaataatacccctacaggctgcaagaacccaatggtgcaaccgtgcaagctttttacatctattttaggcctatttctgttttttttacttctccattcccatttgatggactagctgaaggtaccattatttaaggattctacaactgatccaccttaatctgtctgaatgatccggacgattcaatggaatccacacctgtctgaaatcaccactttatttatctatagtcccctttataaattgatggatcttggtcttaatctttgttccaatcgaaccatagttgactcgacaaattcactcaatccaactttatttgattgatcgggggtattattccatgttgctagaaacggttcagccatgtattctttaaattcggacataaaccaaaatctagatgtctaaatacatcatgacaaacttaaaacgataaataaccatgcataaactact

SEQ ID NO: 7462 - DNA, 564 bp, Gossypium hirsutum
  Clone ID: LIB3828-017-Q1-N6-B12
aatattcccttaaaatggcaaaaaatacaatattttctttcattaatactttttcttcttctcttagttaaatattagtaatctctaaaattctaattttatttataactattgattttccttcaaatcaacaacgacaacactaacgttatcggtactatgtctagccaaagccaatttggttaataaaattgaagcatcccaacaagccttatccgaactctcgactccagcaccgcgaaccaccgcgtcactgtccggtgacataggtggtgatgctggcttttgagcgcgtaaacacatacgcgccaccccacaagctgtctcatttgtcaccacgtcccataatccatcgcttcctaatattaaacattcatctttgctgcttctctctgtaattgttacctctggttctggtataacgaagggctttaaataattatcacctattgctctagacatggctaaaacaccaagaactcgagctccatcccagtaaattactcggccaccagcttcttcgattcggagcagttcatcgggtcgatccggcttgtgatcgtc

SEQ ID NO: 7463 - DNA, 527 bp, Gossypium hirsutum
  Clone ID: LIB3828-017-Q1-N6-B2
ccaaaaccaggcattaaatataattcccatacaagtttgaccgcaaactgactaatttttcaaaaaaaaatctcgtacaataatagctattaacattaatgttctcaaaacccttgaatattaaataataataagcaccacaatacagtctccagctccaaacatcctcttaagcaaaatgcttaaaagatggaaggtaagcaagtagggaattaagcaccaattgtccgcccaccgccagccccatagggcccgtcatcttaatggtggcgatacggtgaaaggctaaaataatagtacattaatatcaagtagaccatcgtacaatgatccctaacttccccgacataaaccagacttttgagttcacttaacacggcacaccaaaaaaagccaactaaatgcaaaatgtagaccaccatcaaaagcaattacaaaacttagaagcacttcctgtggacaatggatggaccggattcatcatactcacccttggaaatccacatctgttggaacggacgcgtggg

SEQ ID NO: 7464 - DNA, 591 bp, Gossypium hirsutum
  Clone ID: LIB3828-017-Q1-N6-B3
acattatagaaaacttaggtttcatgataataaaaatccaagaaattattacaaatggagctttaccccaagcatcgaccaccctttttaataattaaatacagccaatttctgctatttgtttcatcactatagagaagagattatacatgtatttatttgattattaaaatgttttaaaactattaaagcatccaatcagggatgaatccacttggtgctgaagttgtagtagcaatgttttcatgtgtcagatcagctggaacattgtaactaatctgcatagaagtggtgcattgtaaaggctcaagaaatcgaggatgctggaggttgcatggaacactttgctccccagtttcccatgttgatcttagtgttgaagcattttcatccaacttccttctcaggtttctgttggtttccagtagcatttcttcctttctttcaagtttagaaagctgctcaaccatatgctccatctttaatgacctgattttcttcaaagagaagtccaactgacgctcaagctgctcaagttcctcagagcccaagtctcctaaatcttcccccagaaaagtctttgtgaatgtt

SEQ ID NO: 7465 - DNA, 506 bp, Gossypium hirsutum
  Clone ID: LIB3828-017-Q1-N6-B4
aaaaaaaaaaaaaaataaaaaaaaattaagtttaaattaaaagggggggggggggaacttataaaaaaagaaaaaaggaaaaggggggggcaaaaaaaaaagccgaaaagccacaagccaaaaaacaagggcccaagcgaaacgggaagcaaggaaaaaggccccaaaaccaaaaaaaaggaacgggagaaaaaaacaaaaagggcaagagggaaaaggaggggaaaggagaaaggagggggggggcgaggggggaaaaggggaccgggaccaggagggggagaagggaacccgggagggggggggataaaaggtggggggaggggggggaaaaggggggcgcggggggaaaggggaaaccgctcacaggtcccggaggctaccggcgggaagcctaaaagggaaaacctggggggcccaatgagaggggcaaacaaaaagggcgggggggggggcacgggcaaactccaagggggaaaaccggggggcccactctcattaaggaa

SEQ ID NO: 7466 - DNA, 521 bp, Gossypium hirsutum
  Clone ID: LIB3828-017-Q1-N6-B6
ggataattgggcctctgtttccttcaaaattaaacaggaataattatacaaaattgcgaaagggtgaaaaacctaacgagacggaaaaaaaaagaacaacgaaacgaaccgggcgagcgaactcaatcttgatttggtttccgggcaagggggctccttggaaagcgtccttcgccgccttcgcattttccatgcgcttaaattatgtccaaacttgatatttattcccacagttttttgggactatgatcctaatttcatggctgccagtttggatgaagcttaccttgatattactaagggttgcaaaaaaaaaacattactggggcaaaaaatgctaaaaaactcaaatctaaagtatatgaaaaaactggtttgacatgtagggctggagtggctccaaatcgcttacttgctaaggcattgcaaagtggaaactgatgtgggggattggggctgcatatacaaaaaagtttagcaggtttcttcaagtattaatgccgattatattcttgggctag

SEQ ID NO: 7467 - DNA, 551 bp, Gossypium hirsutum
  Clone ID: LIB3828-017-Q1-N6-B7
gcaaaaaaaatgccttgtataacatactgtggaaagaaacataacacagctttgggacagatgaattgttcacattgggtttaccaaatgtgacatcagtttcagatttatacaaatgcaggaatatgaaattcagaagatgcaactgtcgactgaattgcatatattttaaaagaacagaatcaacttgacatgaactctgtacatccccaacaatgggaaatgaatttacagatgactcttcctcatccaccaaaagattgtcaactataatcagcgcatcttgtttccgtgtttatccctctgtatcaatactgtcatcactggaagacaattgtctgttctctgacagtgaaagtcgtctgggctttgtagagcctgcttcaacaagcccttctgatgaaaggtttatcccaccacttcctgacgaagaccccaacaaacggtgaactggggcttcaaatggagaagatgcagagtaattgaatgtgaaaactcccataggatggttaaacttgcaacttggaccaaacttgcaaattccatatcta

SEQ ID NO: 7468 - DNA, 504 bp, Gossypium hirsutum
  Clone ID: LIB3828-017-Q1-N6-B8
aaaaaaaaaaaaaacttgcagtaattcatgtaaagcagcaaatttgagtgcatgattttcagtctcaaacaaagtgctaaacaaaatctctaacagctactaaatcaaaccttcaagcttgtccataaatcaacaaaaataaaagcttcacttcttcttgtctccacctccaggatgatgagccctcatcttgcggagaacactcgacatctcttcacgcttcttcttggctctcttgtgagttcccaattttcttttagctaccttgagagctcgcttgtccttaccaaccttcaaaagctccgtaatcctcttctcatacggtgcaaaaccagcaacttcccttatcaagttcctcacaaaatggactcttttgctagtttttccttttctgttagatggacgtggagccaattccttcttggttacaacatggcccttgtttagtcctacaaaaaggcctgtatttggctgcttggtggccatgcctctcgagacggcgat

SEQ ID NO: 7469 - DNA, 585 bp, Gossypium hirsutum
  unsure (1)..(585): unsure at all n locations; Clone ID: LIB3828-017-Q1-N6-B9
ccataataaagaatatcttattaatataaataaaacataggaaaaaaattgtttaacttaatcaataattgacaacatgattactaataatgataataaaagaatactaatggcgatggttttggaagtttacactccagggaccatgtcaggataacaaggagtgccggtttgcgaaatccatttgtcagtttcagtttcaagaaagacgccaggagtccatttcttggcttcatttatatcgattgtcttgatagctggccatttgaccctgccttcggttttagcccctggtcccctattttggaactctacaaagtaaccggtgtctagtcctacggttccttccatgggggagtaaccctctggtgtaatgatgtcatcaatattgctttgcattatgatggtcctcgccaaagctttccaaggacgaccaagatacgtcttgctcttgtccttcaccgggaggtagtcaggggcgcctgagatggtacaattttgaagcacaatagctgagtgagtgtatgggaatttccttccgtgggccgnaatcatgttgttctggttttcacctggcttcctcgc

SEQ ID NO: 7470 - DNA, 622 bp, Gossypium hirsutum
  Clone ID: LIB3828-017-Q1-N6-C1
acatcaaatagaacttctatttaattatatcaaataatatcaaaataactcgaaaaaatttttatgcgtattacataaaataaacttctatttcattatataaaataataaattttaatacagtaatcaatgtctatgcccgggggattcggttccacatggcggccgtcgacggttatgcgctggattcttccttcctctagcttcaggcggcggttgttcttcctccagtgctgattgttgttcttccggttcggcatctggttgtcggacttgggacgatgatccaccttcaaagaatagtgtatgtggaggtgtttgcatcatgaacggcgacggtgtttgaaagccatgcgttgctggcgattggtaaaaaggagagcttcacgacggccccccttgcgacccctcctgtgccgctggcctagttatcggtggtccgctcggcataacaagaaatggagctgatccgggcatttggctttaacctgccataggattcgaaaaagatacatgtacgggttaaggtacatataagggctaggaaacacacctagcatcatagggaaaggcgattgcgtgggtatcatctgttgaattgctgcgtcaggtgactgcgtcg

SEQ ID NO: 7471 - DNA, 405 bp, Gossypium hirsutum
  Clone ID: LIB3828-017-Q1-N6-C10
agcatagggatttgttttcataatgatggttgtacttatgtgtacagtgtgtttaagaataaaagtggtgtggaattatgcaggcacatatacctcctccccctggctactttgtgcaactagaaaatctcgacggtctgtttttgaagaaaaaaacgaggatgcgtcggtggctttgctattcgtgtcaggtggaggagaattaccaatcgcgtgaaaacaatcatttgaagtgtaattcaaatggtatatgttactttgacctgaactttttctttgtatttctgatttactgtttggaatctcttgtaaagtgtgaattgtgcagttacctagcatggtcggaatcagaccatcttaatagtttatatttttataatttttaatagattgaatcaaaatttt

SEQ ID NO: 7472 - DNA, 526 bp, Gossypium hirsutum
  Clone ID: LIB3828-017-Q1-N6-C11
aaatcctaaatcttaggattaatctttgattttaaccaactttttttaagtaagtttgcaatacatatgtttgtttgcaagtttttgggattatataattattttatttcggaaaggatttttgactttcccgggtaaacaagacctaccctagagaaaggagaatttggaaaactaactttggttgcatacgggtcatgtttaactagaacctattttataccttattctttccaccttggtcttaacattctaactctttttttttcgaattctactttctctgggggcatcttttgtttgaaaggctttttttttgaatccaaaagttttgaccactctggccaactttcgacgttcatgtacgggcaatttcgggttctccttacttttctccggacatttcctttttgggcacttgcactttttcataatgataacaaataatgtaacttccgcataagggaaaaatgaagatactgggttttgcacttttttggaatttccacttgccattacaacttaa

SEQ ID NO: 7473 - DNA, 584 bp, Gossypium hirsutum
  Clone ID: LIB3828-017-Q1-N6-C12
agataaagagtataaaaccccttggatgtctcaaaaagttatgatgatttctgaaacagagactgatttgtttcgtttgtgaatccagtagaaagaaaaacaaaataaaataaaattacactaacataaataaaatacacaactcctacaactaggaatctcaagatttcaaccttgtagcgtcactagggttcttaactttttctaattccacaccctccccaaaaaataataataatattaaaaccagggaccttgagaggtaagagaagattaaatacttccaattgcgacaccacagctccatacccaacatgatcacctagagcccctcaaaagtaaaaacacacgtccagttagcctctaatatttcccaacattaagagaccaaaacctaaatacacgcagtctacttgtctgtgtgcccccttttgcccttacgacgaccatggtgggttgcgttagtatgtcgaacacgcttctttgtctttttgctgcaaaaattaaagtttttgacatggtgaagacaaggttatttacggcaaactacatcaatcttattagaacaatagaaaatgcaccaa

SEQ ID NO: 7474 - DNA, 602 bp, Gossypium hirsutum
  Clone ID: LIB3828-017-Q1-N6-C3
aacatggttattaacttattatattaacatgatgctttagcacaaaaagcaacaaactttcatgtctccaaggcaaggttagatgggtaaagctcctcagctattgctttgtgatttagtctctccttttcttctttttctcgctcttctcagctgaatttttcaacataattatcagaatgcggacaaatacagcaacaaaatcagtgaaaagagtcagggcatgcttcacgtagtccaggtcacccaagtgtgctttctcgattatgtcctgcgtgtcgactatcatatatcccacaaacaccaaaagccctaagtagatctcagtcataaagagggctgtggaaccaccaaagatggaggaagcaaaatgcaaccagagaagcacggacacaccatatgagagcaagccaccaaggtaaaggtactctcgtcgccttgctaacatagcagctcctgaaaaacatgcaaaggccaatgctgttcccacaaatgaagctaccaatacactcgggtcgatttgaatagccaagtcaattagaggaccgattgaagctccttcaaacactgccgatgccattagaagagaaaccctcttttgc

SEQ ID NO: 7475 - DNA, 484 bp, Gossypium hirsutum
  Clone ID: LIB3828-017-Q1-N6-C4
attgaatcaataaaataattttatttggaaaagtcagcattagacactacaaaggccgtttcctgacgttttgaagcggaactggcaccaggtccatataatgccttaaattacgcgcacggctgcaggaggccttggcatgttttccacaacaccgcaaactagggcaccctccagcatgccgggtgcgaccctgaaagatcctgctaggggaaagagcactctcataaagctgacgcccaaggcaaacgcccgtcccatttcttaaacccgaaggcccacattccacaagggaccaatgacaataggatagctgcccagaacttggcgaaaacctgagtggcgtgtctgctcacagtatcaacaagattgaaccccttactctattcaaggctccatagaccaggcttgacgggcacctccaccaaggcatagccacacaagtggtgagactggatggctgtttcgggattgttaaatatga

SEQ ID NO: 7476 - DNA, 532 bp, Gossypium hirsutum
  Clone ID: LIB3828-017-Q1-N6-C5
gcaaaacccttagagcaagggcaacaaataatatccattagggatactgatcaagcaacacagcttttgagaatgaaaatttgcaacaatagatactagagttaggacaacagtttaaatctaaccataggacttgcagtataaaccataggtaaaacatgtatcgggtttatacaagctaataattgcttatcatctggaaataagtacttggtaatacggttttccctcacattctaaaaaccaacggccttttcatgttggatccgccttcattttttgctgcctttaaccgctgatgttgttgtctttctttggccagcatgatgactctatgtacttcatcaaagggaggacttggggcatttcttgggttctaaatccattgctgcactttcttgggcggacccaataacctagtgcgatccttttcatccaaaacctcaagttgcattaactcgcaaacaaggctaaaatctgctatggatgggtggttcctgcctagcaaaaaacgcccattacccttgagcca

SEQ ID NO: 7477 - DNA, 599 bp, Gossypium hirsutum
  Clone ID: LIB3828-017-Q1-N6-C6
aaaaaactattaataaaactagattacacataaataagtagaacataaattcaatatccaaaaaccaaacataaataactattgataaaactagtttagcattgtcagctagtcacgtaatagatatctttgaaccctagaagatcaaaaaaatttcaactatcctccatttttgtcttaagccacaaagctctaatcttgggattaattgataaaaacataattcgcttgtccttattgagcagtaatttaagtgcgaaaaagtaaagcggactagcttctggaacttcttccgacatgctgtcaagcactttgactgcttatggaataccatatggatccataacaggagtcaaactagatgtggcttgactcatattgtcagctgcactgcataatttttctatttgactagataatcttgcagcccctccaatttgctttgaggatttctttcttccagttttaaaacgtgaacttgatatctcaatgttttttcttttttaaccgtttccgtccatttgaacatcatttgagatgtgaacatcatttgaaatgtgaacatcatttaaaatgtgaacatcatttctcatattttc

SEQ ID NO: 7478 - DNA, 598 bp, Gossypium hirsutum
  Clone ID: LIB3828-017-Q1-N6-C8
attgaatcaagaaattaatttattggaaaagtcagcattagtcactacaaaggccgttttatgtgtatttgaagcggaactggttccaggtttatataagctttaaattaggtgtaagctggtggtggccttggcatgttttccacaacaccgcaaactagtgcaccctcaggcatgttgtattcgtccctgagtgatttgttaggggaaagaacactaacataaagctgttgcccaaggtaacgcctgtcccatatctctgacctgatgttccacattccacagttgtcgaatgacaataggatagctgcccaggacttggggaaaacctgtatggtgtgtctgctcacggcatcaagaagattgtagttcttcctcttctcagggctccattgcccagtctcgacagccacagcaaagaaggcatagccacacaagtgataagactggatggctgtttcgcgattctcgaagatgatttccataaagtttctgtgtgtcaggttgaggacaataggttccatggttattttagtgatctcagctggtgggtcatcaggaatggtatcgtacttgaaaaccttgtcagctacgccgt

SEQ ID NO: 7479 - DNA, 407 bp, Gossypium hirsutum
  Clone ID: LIB3828-017-Q1-N6-C9
aaaaaaaaaaaaaaaaatttttaaaaaaaggcaaagggaaaaaaaaaaagggggaaaaaaaaaaaaaaaagggaatttggggatttggaaaaaaaaattggggggggggaaataaatttaaaaaaaaaacctttttggcaaaaaggggttttaaaaaaaacccttgggaaaaaaaaaaatttttttttggggtaaaaaaaaaaaaaaaaacccaaccccccccgggttttaaaataaaaagggggaaaacccttttcttggggggggggggggaaaaggaaaaaaaacctttaaaacccttgggttttaaaagggaaaggggggaaaaatttggggggccacgggggggaaccaacttaaaaaaaaggcccaccaaaaccgggggggaaaaactttcaatttaaaaa

SEQ ID NO: 7480 - DNA, 583 bp, Gossypium hirsutum
  Clone ID: LIB3828-017-Q1-N6-D1
aaaactataatgcatcacattatgtaatatgttatattactgaaaagctgttgacatgaaaacttgaaatttcaattacagtactccatgcctatagtaggggtttaatttaatggtgaattaatccaacatgcacttgctaggagcgaaacccacctttttgtttgcgagatcaaattcccacaaatgattttgcattaagaggttgcccattatgttcatttcaggccaagctaccctaacaaacccaaggcatttcactcctttagaatcgtcgaagatataaccgtcgaccgccggctcgagcttagctcccccctcgaaatggatggccactcggggaatgatactctcatcaaaaatttcagctggtggagcattgaagcaataatccaaattacctttcgtcttgttatacatgcttaaagaaggttcgaaagcagcaatgactttatcgaacgcctgttccaccagatgcgttacggtagtacctgagtccacaatcatcccaccggctcctttgtcagtcatatcccatacatatgatggaatatccagcatcgtgccattaattgagataccg

SEQ ID NO: 7481 - DNA, 505 bp, Gossypium hirsutum
  Clone ID: LIB3828-017-Q1-N6-D10
ggaaaaaacaacagggcccggaactgggcaattggggcccaaaggggcccggatggccaagttcagggaccaaaatttattttaacccaaaaataaggatccaaaaaatcccacaaaaaaggaaagcaaaaataagcaacagggaaaatagagatcttttggggcgggggggacaaagggggattataaaacccatcagccattcaatatcaggtttaaaaattcccccaacaaaaagcaaatttttgaacaaaacccatgcttaaaaaagtagcaaaaataagggagcattggaggaaggacccactggggggaggttttaattgacggccggaagtttaaaaaacaattccttaaaaaaaaaagagcccaccaagggtaaataaagccaggagccagaaaaaaacaatctcattttttctcggctaaaaaagcaggttcctggaccggggaccgccctaaaatttgacccctttctcttttttttccctttttaaagggctgc

SEQ ID NO: 7482 - DNA, 514 bp, Gossypium hirsutum
  Clone ID: LIB3828-017-Q1-N6-D11
actggttaaaatggaactggatatataacaagttctactagtttgacattgtttattcaaaattactagatagagtgctgtatacagcttgttaactgattacatcagggcctaattctaaaagggataatttgctctaaaaacagtttctaagcatataaattccttgaaaattaggcatgctttgaatcttatcaagcaacaacagggcctttttttttctgtatatgcttagcctcagtctatactggaaaaaggtcttgcacacccacaaaaacaaccctttttttgttttccaccccgttttccaccattgtaaataaagtcccttaaaaggacaccggttcgggttttccctttggtcttcctttcatcttctagtttcaacataacgtactcaatgctctgcaccttgaactgcaaccttccgatcttttaaaaccctttttgtgcctgctcacgtacgtttttaaagttgccctttccaggtccttccaattccattgagtttgtt

SEQ ID NO: 7483 - DNA, 557 bp, Gossypium hirsutum
  Clone ID: LIB3828-017-Q1-N6-D12
aaaaaaactgtttaattaattagtaaacaatgacataattagaacaatgatatgataataagcatactaatggcgttggtattgataataagctgcttaaactccagagaccatgtcgggactatagggaacgccggaacttggaatccaagtctcagattcgagaaagacgcgaggagtccatttgttggcttcatttatatctatctttttgatacctttccatgctaccctacggctggtatcggcaccgggtcccctgtttccaaactcggcaatgaaagaagtgtctattcctatggtgcctgtcatgggggcataaccctctggttgaatgatgtcgtcgatcctagattgcattatgatggacctagcgaattgtttccaaggacgccccaagtatgccttgttcgtatccttcactgggatgtaatcaggggcgcccgagatggtgcagttttgaagcacaattgctgagtttgttccaagatcattccttccttgtgcagtaaccatgcagttttgtcctggccctggcttcctcacgacgagcatac

SEQ ID NO: 7484 - DNA, 601 bp, Gossypium hirsutum
  Clone ID: LIB3828-017-Q1-N6-D2
gaaccgatccaaaactttaaatgcgtaaaaaagtaaaaactactattcccaactgcagcgataaattctcatcacacgcaactatttcattatcattatgataacaggttatttgcatctctaccaaatcactatctcacaacaaaacaatgcctcacaacgtttaccaaaaaaaaacacaaactcaacatgccctccctagattttactccatcgttttggctttgcctactcagtttcaaggttcaatcacaaatagaggcatatcaacgctgactgctttgccatcttctgcaaggatctcaactatggttcccgactgatcagcctctatttcattcatcaacttcattgcctcaatgatgcataaaacttgacccttctgcaccttgtctccaaccttcacaaatggtggttcaccaggagccggacttctgtagaatgtaccggccattggacatttaaaaggcggaagtgatgatttggctgacttagaagcagctagggaaggtgctggagttggggcagcagatgcttgaccaggaggaagtgcagggacagatgggacaggaggcattactggtggttgagagggtgactg

SEQ ID NO: 7485 - DNA, 604 bp, Gossypium hirsutum
  Clone ID: LIB3828-017-Q1-N6-D3
aaactaacacttaaaaggtttttagccatgaaaaggtgtcatacatgttccaatcagaaaatggatttaggatacaaagctttgtaagtatcttgcagcagtatatgttaaaaaaagaaaagaaaagaaaaggtgggagcttatttggctgcctgttctaacacagtaattttcttctgatcatccaatgcacgattttgcaaaggcggcagtgagaacacgctcacggttgagcttccgctccggatctctttcaagacgtgtagtgctgacaaagtttgcttcatatacatgttctccatatccttgatttctgcaagttcttttggaactttgagcaagttttcattatttctgctagaagtatcaggtttgtggtctttctcgttggttacatcaggtaatgccgatggttcatttgtggagaaaagacgatcaagtaccatctcacactccttcacaagctcattaagaacatcggtccggtagaacggttgttgcaagaccttttgaatgaagggcaagcgaacaagagcaccgcttcgcttgtcgtatttctttattatcttcactagtcctgtatagttaagggcactgtaattct

SEQ ID NO: 7486 - DNA, 595 bp, Gossypium hirsutum
  unsure (1)..(595): unsure at all n locations; Clone ID: LIB3828-017-Q1-N6-D5
caaaataaaaatatttaaaaaataaataaaacccaaaaactcagactatgttacaattttcgacctcttttatgaagaactcaaaacaaaacgttgngaaaaggccaagttcttagagtagcagaaaaccaattggaacttggctgtctaatttagttcgatctatctaagaattaaaatgcatctaccgtagcttgaattgcggttgttacaagtcagtgtttcgggagaatgatggcagaggcacggcgtcctgcggacgaaggatgacaagcacaccaaacataccaagcattgggatgacgagaagccacttcagtagtttatagtaatacaaatggaatgtaagggaaaagtcatcagagaaatagagtccattcctgtccaccatttccacaataacggtccctgtagtccttaccgctactgttggaagttttatcttatattttcctggacgctcaaagatctgcctttgcgttatccttctttctccttggtagttaccagggactaacaatgttgttgtgacattgtaaggtgcttggaaccctgatggatatctatgcttatccacaatctcaatctccagcca

SEQ ID NO: 7487 - DNA, 589 bp, Gossypium hirsutum
  Clone ID: LIB3828-017-Q1-N6-D6
aatccaatagtccacattttatattgtatatgatcttcaaaccaataatgtgtgcaacaaaatgtgaccaaagtgattcatatatttttatttataaaaaatataataattacatataacggcttcgacgattcaatgcttccggtgaaatatctatggcaaaaattgaacccacatcgattggcggcaaggcaccccattgtagttcacgaagagcatgtaataaccaggtggcgcaatgttgccattcatgggagcttgaagaacaatgttgtttgtatctggagcaacatttttgttaaattccacaattcctaattgaatcaatctctgattcatggagatcccgtgggttacaaatggcggcgagtaaaccgtcacttgaagtttctgttggtcgatttcgccatttccacggatctgtactgtaaatttctggccgtacttcacttggttattggacttctcgacaatgatctcttgtcggaacatggccaagttcgggtccaagtaatgtggtgagaatttctcgacccgaacttcggtgggaaacaatgcatcatcgaggtaaccagggttcgtgttgctt

SEQ ID NO: 7488 - DNA, 432 bp, Gossypium hirsutum
  Clone ID: LIB3828-017-Q1-N6-D7
gaaaaaaaaatacttattccatttttatgcttttaagagaacagtaacaacatcgatcaaaaacgagagaacccaaaccaaacagtaacagagtaactttagaattaccaactaccaaacccaaaccaaacccataacaatataggcccaagcccactttgaaaccctaaatttaagacctccagttgccttcagatgcaccgccgcctcttgagtaacgagatccgccgtcaccgtatcctccttcacggggtccacctccgtatccacctccaccataccccccaccgtttccgtatccaccttcacggggtccgccaccatatcctccttggcgaccaccatatccgccgccgcctccaccggggctgtaaccaccgtttcctcctccaaatcctccgccaccgcctccacttttgccggacgcgtggg

SEQ ID NO: 7489 - DNA, 298 bp, Gossypium hirsutum
  Clone ID: LIB3828-017-Q1-N6-D8
aatgaaaaaccttagatttgccagaaatggcaaactcttctcaagggtaacaatttggcaggaagggaaggaatgctcattgtagaaagagcatgcatgtctactttattataagaatcatttctctaaaggctgcaaaatggaatgggaattttgtaaacccatttaggaagccgtagattccttcaaatatgcaatgagatcagcacgttcctgtggcttcttcaatccagggaaaaccatttttgttccagggatgtacttcttagggttgagaaggtagtcatacaaagtattc

SEQ ID NO: 7490 - DNA, 439 bp, Gossypium hirsutum
  Clone ID: LIB3828-017-Q1-N6-E1
aataataatagaaatctgctcaaatttctccctaattttatctttactttacatcgaagggactaaattgcaaatctcttacaaacttttttcacaacggagcagaaaagcatttttcccatctcaacattttaaaactcaaccctcgcccactattcccctaatattacatatcaacccccttgatttttcttttttccttaaagaaaccccacttgtttaacgcataaactgataagcagggaatattatctaatcgcccctaaaattttccagattttcaaatccgtccaccgtcttcaaaaaatatcacggagggcatcggatcttgaaaattccggagatatctaaatagagacgaaacgtatcaagagagagatggagataaaaagagacgcaggcttatttggatccaaatctaaatattcgggtatcagag

SEQ ID NO: 7491 - DNA, 599 bp, Gossypium hirsutum
  Clone ID: LIB3828-017-Q1-N6-E10
ggagataaaaaagaatccttcattgataactaaatacaagcatatatctctaggataatttacacacattaattaacaccataaaacataatccaaattaagtgaaacaaagagttgagagacacatcagtgaagtagatccacaaaaggacaacatgtagaaggaaactatgaaaagatgcaaaataatgattagatcattttcaagctctggtcttgaaaggaatggccctgatgattatctggtggtaaattgcagcaagagcagctccaatgaagggtccaacccagaaaatccaatgatcatcccatgcatggtctttgttatatataatggcagctccaagactccttgctgggttaataccagttccagtgatgggaatggtggccaaatgaaccaagaacactgcaaaccctataggtaggggagccaaaataggaacgtgagagtctctggcatttctcttggcatcagtagcagagaaaacagtgtagacaagaacaaaagtgccaatgatttcagcaccaagaccatcacctttggtgtagccatggttcacaacattggctccaccacccaacatctcatatctact

SEQ ID NO: 7492 - DNA, 550 bp, Gossypium hirsutum
  Clone ID: LIB3828-017-Q1-N6-E11
ggcccaaaaacctccttccaataaaattaagtagtaatagaacaaagagttaaattcttgtttagtcaacccataaaaatagaaaccattccatgataaaacaacaaacaattaaatcaaaaacatcaaaaaccataaataatttatgtctttagcagagtactgaaaataagagacaaaagcaataataaaaaggactaaattcttcagcaaccactttttttttctttgcttcaaacctcagcacttgacctccttcaatgcatacgcaaagtacaaaaatgtcgggtcaacagcaccatccttgtagtaagcaaataccaaacatccatcatcgtgcatgctctctccgatgaaaaattgaaggtccttcaattttgaaagcaaaaacttggttgctccctcaatgtttttcttgaaggactcttgcttttccgcatccagtttcggtgtcaagttcttgatgaacttcttcatgaacacgacaaactgcttcttgtcgaagggggttgctcctgaagcctgaaagtgtcaacaatgtcaacaacct

SEQ ID NO: 7493 - DNA, 558 bp, Gossypium hirsutum
  unsure (1)..(558): unsure at all n locations; Clone ID: LIB3828-017-Q1-N6-E12
tttttntttaacacaaatgataaatcttttaacaccttttttttttccattaaactgcacaatccgataacccatctcctttataaacatccaggcctcaaccatcaaccccagaaaagaaaaagtaaaactgaaaatacaaaactccgtcgaagttttcttcttctttttgtctaactcaaaattgatacatcagtctgctaaaaaaagcaagatgatgggattaggccacagcaaccgtgccggtccgtacagctttgttaggagtggagttctgggcatctgattttctaagagatctacccgatttccagttcttttctcttgcttcatccatctccatctgttcttgtctacactctttgctgcaaaacggcgtattccctctgtacatgaaaatatcggaatcgcgaagcgatttgcgacaaagagagcaggcatcgagatagtgcgcctcgtactgatccgcctgaccatcgtaataataataacccgacatgactagctgctatcaacacaaaggaaaaacaaggaagagtggctatgcggacgcgtggg

SEQ ID NO: 7494 - DNA, 592 bp, Gossypium hirsutum
  Clone ID: LIB3828-017-Q1-N6-E2
cattatccccatttctcattcattgataaattaaggcaaaaaaaaattaaaacctccatttccttcaaattacaattacatgcgaaggaggaaggatgagagtgtcattgatcaaacacgatatattacaaaaatgtctcccatccatcctttcctctcaccaaatacagtaattaataattaaagaaagcaaaaaaagaaaaaggaaccctaacaagagtgggggcaatcaaccttgtttttgctcccctctagttcttttatgcaaggaaaatcccatcccaaaatcatcaaagacccaacaatttaacacccatcatctcattttaatcttctatttacaaatccaacactacccacactattccaagttgttacttaattttatcatctccctctctcctctcacatttttgttctcatatcttggttttttttaagccacggcggaaatgctgcgatggcggccatctctggtgaggcaatcaaatccctcgattcgtacagcagctggcatctgcccgaatttcaccctcacgcatcctccccttgaggaggttgctggggatgttagtggaggtagcaccggctg

SEQ ID NO: 7495 - DNA, 602 bp, Gossypium hirsutum
  Clone ID: LIB3828-017-Q1-N6-E3
aagcaaataacattaaccatgtaacatctcacggaggtttctgggcaagtacaaattcagaaaatattttatgcaaagttataatgttccaagtcaaatttagaaaacgtcataacaaaaaacaatgttgcaattctcactcatccttgaatttgagatttccgtttccaaactttagcagctagctaacatattcttcaaaaacaacagtctgggtttaagaatttcagcgcgatgtgaaaagagctctgccaacaataccggtggcctcgatgtaacgatccacacatctagagatgcaactactttcacttccactaagacttgttcctggctttgagatacacttttcaaagcacttccccctcacagtctgtatgaccagaaagaatatatgcatttagccccaaataatgcttagaaagcatgatgaaaatcatgtgatgctgtaatcaaataaccaacatcgcattcttattctcagaaagctgacattttatagcaacagccaagattgcattatgttaatatgaagaaactaaagaatctgaattgggtacaaatatctaagcttagagataaacatacaaacaagctatgat

SEQ ID NO: 7496 - DNA, 612 bp, Gossypium hirsutum
  Clone ID: LIB3828-017-Q1-N6-E4
aaatactaacattttcctataataatctattcaatgtaaataacatttcttacaagtatgttcactagtcctcttcagggtgaaaggaatgtatgataaaatgtacatacgcctcatttgattcgtatactatcaaaacccaaaattttgtttttaacattttactggtgggtgtttagtgttgagcatcagaagcagaagaagaaacctgttgttgactagcttgagcagtaaaaccaacaaaccaagcaaccctcatgagttgcataccaagaaccagtatccaccaacagaccaggcctctgattgagtgcatcacccatgctggtgcatcgatttcagccccgagtttcaatcccctcatcagttgcaacacacggtagccctcgtacacaatcggagtcaccaaccaaaccggtgacttccaatgccaggtcaaaatctcagttagcacctgaaccgacaaaagcagcatgtagggacccaatagaactgcaaatgggaggaaaggcaggtgaggttgcatgaaacccctttgggaagcaagaagtaacatcagagggatcaaaaatccagccaaagttgcaccctagttacataactggtaattgg

SEQ ID NO: 7497 - DNA, 562 bp, Gossypium hirsutum
  Clone ID: LIB3828-017-Q1-N6-E6
aaccaaataatgaatacattaacatatatatgtaatattaataataaatttttttttctatacatccgataataaaaaaaaccatcaatttaagcactaatccgactttttttagaacacccaacgcccgctatattattccattgaagtagctccttcaattacatttggctcagacacaataaaaaataataaaccggagttgttggaccgccatgaagagataagagttaagcgcagggcggtggcagctgctcgccgatgtagttaactttgacgttggtgcagttagaactgaagggagtgtcttcattatgatcgggatcaccggtatactctaagtgaatgtccttgagggtaatgcctttgcatggaaatgattggctgcaagctaggactacagcaattttgcttattgttgttcctctgatgtttgagaattcaacgtcggagatgagcacttttgagtccacactgcctggaatcgttgcatattcttgatcgatgagaatagggttcttaacatggtccatagtgagatcttggaaaaaatgcccgaact

SEQ ID NO: 7498 - DNA, 589 bp, Gossypium hirsutum
  Clone ID: LIB3828-017-Q1-N6-E8
attccctataaccaacaggagcatgtgagcatgcccttaaaattgaggtgcaacaaagctaaaaacatgagtataccagaaacgtaaagtaaatcatttttgactgaaatgtacggtctcaaaacaaatgttgcataaaaaggaacacttcttgatagtctcgagaaagaagaaagctactcgacttcagccaaataatcatcaatttcagccggggttagtaccctgaatttcttgtcagttccaataatcccaatttcaatgtttttccctgagatttgtccttcaaatccctctttgagagtcaaaatagcagtatgcacagcatcatcaagctccatatcatcagtgtatcttttctcaagaaatgtttttgcatttgagacatttttccccattgctgaggctttccatgagaaataggaaccagatggatccacctgatacaattgtggaccattgtcatcatatccagcaaccagtagagatacaccaaaaggccttacaccaccagactgagtgaactcctgcatcacagctgcagtttcccttacaagctgtgttactggaattggttccttatacaatc

SEQ ID NO: 7499 - DNA, 569 bp, Gossypium hirsutum
  Clone ID: LIB3828-017-Q1-N6-E9
ctaaaacccaaagcattaaatttgcactttatcatcaacctgtttatacaactctacaatacatataactatctcaaaccctaaattgacatgcaaaaatcaagattccatggaaaatgaatctgatgatttcaatggaaaaaaaacccaaaaaaataatattaaatttaatccaaagcattgggaccagcacaagctttcaaaacagggctccaaatccattgcaccatgaatttccttcctttgttgccgttcatgttatacgttttccctttctggtctctcatgacttgaccgatgtaccctccgccgccgccggtaccgtacaacccttcacagaggtctcctatctccgtcggtgcggtggggtcctctccggcgtaccatgcgttcaccagtgggtttgtggagagctcggctaactcgtgggcgatcacactgatcatgccgtccaacccgacgtctccgttcggtggggccaacgaacccggaccgccgccgcccatgtagcccgggacggcgaaggggtaagcgcagacctcggggcattgtttacccgagttgccgat

SEQ ID NO: 7500 - DNA, 574 bp, Gossypium hirsutum
  Clone ID: LIB3828-017-Q1-N6-F1
gaaacataacgtcataaatattatttcatgcatgtatatatcattgtcgttatgttttatgcaaggtgattctacaaacacaattctgcaattcataaaactgatggctgcttcatcacctcgaaagttacagtttacgatcaagaagagcaggcttaaatcggatataatccatcctctttatgacaagaaaattgaagttctggctctcacaatagcctttgatcttcatttaagcaacccagttgtcttacaaataggacacaggttttttagcattaaccactgtttgatgcagttagtatggaagtcatgcccacaattgaggatcccggtattgtccccatcctcgtattcttcctgacagatacaacatggttccggttcttgtgtggattcagttgtagtagatgaatacttccgctgtttcatcaactccagaatggtttcctcattcagtcccgtgctcacgtctccaatccgttcttctaatgccaacaattcctcgtatgacatgttatcaacatcaaggcgcatatctctatgtctgtcatgtgtttcaaccataccatga

SEQ ID NO: 7501 - DNA, 606 bp, Gossypium hirsutum
  Clone ID: LIB3828-017-Q1-N6-F12
gagagagaatagaagacaatgacacattcagtaatcttaaagcatggtgttgatgaatacaaaggaattttaatgaatatgaaatctcagcattggtgcgtgtagcctacgactatggaacaatttcatcatttactgtgttcaaatcaaaatgcaagggatcattatttccaatttcaactcaataaacctgatttttcattcctaaaaccagctttgaacctaaactttaccatcccttgcctatgagccataaccagtcaagtgtgacccctgcaaagatacctcctaggagaaacaaaacaagcaaattccccaatgcattctgctcaggtcccttgtatcccttgggtgcagatgtaaggacgcatacggtgaggtaaccattacttaagcctaagatgctagttagcatgatcatccagccttgatcaccgtatttggacatgaaataaaatgccgggacaagtaaaacacgagaaattatcaccgttgtcagagctttccttgattccagcttcaaaggttttatgagtggaatgtatctcccaataagatcccaaacattatacattgatatcaaaacaagcgcataccagcttccta

SEQ ID NO: 7502 - DNA, 598 bp, Gossypium hirsutum
  Clone ID: LIB3828-017-Q1-N6-F2
acttcaaacccacgtctccattggaattagtcatttaagtgttcttataaagggaaacaccaactgctatagcgtgtaatacaattaacatggaattaaatagtaatgatgtcgtccacaaagggcaattgagattttacaacttaaaatgacaatacctccattatatctcacacagatgggaaatatttgtttaggttgaaggggagggaataaaattcttcactcctcgaatcacccttgaaggatcggaacttgtcccaccagtgcttacccctgtccttcctaatcccactgtccttgcggtgcaatgtgttatcgaggaaatatgccaagcatcccgctacgaacgcttccgatgagaatggcacatttacaatgtcattgaaccatcttgcgcttgtgtgaacaggaccatagccattaattgcggtatactcattgaagtactgtggcacagataagcccataaaaacagagaagcctaatataaattttgtacggaagctgttgaggttgcaaaactgaagaaaactaagacccccagcaccaacatgtgcaaagaataggcagtacaatgcagcaataataggtgctg

SEQ ID NO: 7503 - DNA, 420 bp, Gossypium hirsutum
  Clone ID: LIB3828-017-Q1-N6-F3
ggggggaaattcgggggccttgggaaaaaaaaaaaggggaaaaaaccccttgggggggggatttttgttaaaacggggacagggaaaaaagggggggccccattaaaggggaaaaagcccccctttttttgcttgggggggggaaaagggggaaagggcccccaaaaaagcaaaaaaaaaattccttccaaaaagtgggggcaaaaaaaattttttaaattcctttagccgggacccccaaaaaaaattttttttttggggggggggaccccgggggggatttaaaagcccaaaggggttaaaaactttaaaaaaaaaggggggaaaaaccaaaagcttttgctttaaaaaccatttaaaaaaaattttaaaaaaaaccgggggggttaaatctccccttaaaagaaaagggtccctttg

SEQ ID NO: 7504 - DNA, 568 bp, Gossypium hirsutum
  Clone ID: LIB3828-017-Q1-N6-F4
caaaaaacataaaagcagtttcagatttcgaattaatatatataatacaagatcaggggaaccaatcaatctagaaaaccaaaaaaactgtccagaggcgtgtacataatacaagtagagaagcatagatttgaaacaaaaaaagactgaaagggccaaaacagaggaaaactaaagattcatacctgaaatgactctccaatgaagaagaggatttaacgattcatacctgaaatcactgatattacggtctgttccaatttgacctatctccaaacagcccaattcaaggataggaatttcccaaaacagaggcctactagcccaagctgattgactacggccctcagcacaaggccccagcggcaacgacaaaagaacacaaaaacgaaccaaaaacccgcaaacccacagagctatatatgccagacaacaaagcagagatgaaaaatgaagacaattgttgaaattaacattcaaagctgaaatcagtgatgaagcagtggttacgaaaatttaaataaataaataaaaacaggaacgtcagacttcgggtttcccattcccc

SEQ ID NO: 7505 - DNA, 599 bp, Gossypium hirsutum
  Clone ID: LIB3828-017-Q1-N6-F6
accaacaaaaatcattttattatttgcatttaaaaaaccaatgtaactacaaaatgtatatacagattttataagtagaacaacaaatctcacatctctgacaaaaggttactgatcttccgaagctctttcagagctgtcattgctgtaacttgtcctttgccaactaaattgcttttacccaagttgtccactgatcccacttgaactcgatcttgctggaaaacagactcaagaacctgaatgtgttcaagcatagactgccccagattcttcaatgttcccattacattctggtccacatctctttggctggcgagagatgaattacgagaagcaccagcaatagatgagtctgctgtattgctcttgctatcacgatttagagattttggtgtctcattggtacctcctcctttatccgatgcctcctgactgacattgtttcgtccaaacctcaaaagccattgaaatctacctgagagatgtcttctttccctcatggctgagaccagcttccctgaagattcattctcatgcggcgaatttaaagggacaccttcaggaggaggagaggaaactggcagaggtgaatcttc

SEQ ID NO: 7506 - DNA, 465 bp, Gossypium hirsutum
  Clone ID: LIB3828-017-Q1-N6-F8
aaagggcccaaaaacataatttttaaaaaaaaaaaaaaagggtttgtgggggaaaattttcgggtggaaaggccaacaaaaccaaaaaaataaaaaaaagcatttttaaaaaaaaaaatccaaaaaaagccaaaaatttaaaaaagaaaaaaaaaaaaaaaaaagttaaacccgaaaaacaacctatacccccataaagccacataaaaaacccaaaaaaaggaaaatgtttttaaaaaaaatccttatccctaaaaaaaaaatttaaaggaaataaattaaaaaaacccccaaatttttttaaaaactttaatggagggggaaccctaaaagggtaaaaaccatccttaaaaaatcctcccaaaactttgaaaatgtaaaaaagggggaaaccacattggggcttttccaatccttcaaaagcatgaaatttcccaattttgccccaaaccctaaaaatttttt

SEQ ID NO: 7507 - DNA, 569 bp, Gossypium hirsutum
  Clone ID: LIB3828-017-Q1-N6-F9
gagatccaaattcaatcagtctttaagcattataatcattatacattaggggattagcactagtatttgcaacatggcttgggtgtgtgaggggaaggcctcgatttcccccccggccattaatttactgatgttcttttggccacaaaaaaaaaaacttaagaagcaattaattgccgaacattcatgggaacacagtactcggaagggccatcgaaaacggtatccgcaacaatgcgagacattgcctcagttggatgggataaatcccaaaaaacatgatctgccctgttgggacagtagcttgaaaatggcaaacaagggatttttgctctcagttccccaaggccacaacaggctgctcgtacctttttaaacccgtgagccgatggatctcggatgactttttgcatgataccatacaaatcgaggaaggcgtagtttaggcctggaagttctgatttcaacccctttaatacttctttaaacccttcattgaacttaaccacccacaagttaacttcttcattgcattcatgggggctgtgcttggctctttggggctggaa

SEQ ID NO: 7508 - DNA, 613 bp, Gossypium hirsutum
  unsure (1)..(613): unsure at all n locations; Clone ID: LIB3828-017-Q1-N6-G1
acgaaatcaccaaacttttattccaaacagaaggtttacttagattaacatgttacattaagagataagaaaataggcactttcctaaaggcttatttgtgaccatcttaagctagaacaaagacagaagaagaattaacttctcactgcccaccacggagacgaagaacaaggtgaagggtggactctttctgaatgttataatcagctaaagtcctcccatcctccaattgcttgccagcaaagatgagcctttgctgatctggggggataccttccttgtcctgaatctttgccttcacattgtcaattgtatccgaactttccacctccaatgtgattgttttcccagtcaatgtcttaacgaaaatctgcatgcctccacgaagcctcaaaacaaggtgaagggtcgattccttctggatgttataatcagccaaggtcctcccatcctcaagctgcttccctgcaaagatcaaacgttgttggtctggcgggatcccttccttgtcctgaatcttcgcctttacattgtcgatggtgtccgaactctccacctncaaggtgatggtcttgccggtcaaagttttcacgaagatctgcattcccccgc

SEQ ID NO: 7509 - DNA, 464 bp, Gossypium hirsutum
  Clone ID: LIB3828-017-Q1-N6-G10
aaccactaaaacaatttttagttttattggggggatacaaatccagtaaaagggagtaaaaaaaggaggtttctaggtggcaaattaaaaatagggttattaagggtagagcaaactcactataaaagagagtttaaagacaaatttgggactatggaaataaaaaaagttacctttaccatctaaagactgaaaatatatatcttctctgggttcttctcgaactccggttggcgttgcgtattctaatgccatctcgaaatccaccttttaaacatgtggagggagcttttaatatagggtttctttggaaataaaatgatcggatactttttgaaaaatatctgcatctccttcctcgaaacgtttttttttcaatgcatgtgactttgccattttttgcaaaacattgaaaacggcttttgaggcatcggggatatacttgctaaaatttcgttttctcc

SEQ ID NO: 7510 - DNA, 512 bp, Gossypium hirsutum
  Clone ID: LIB3828-017-Q1-N6-G11
aacttcaaactaaatttcattttctgtaaagatacagggactaacggcctactttgacccactacttcgacacttcaccgacctaatagtagcgattgcttctctcccccccccccccccaaaaaaaaaaaaagcgactgcttctctttactctcttctacttcactgccttttacattttagccaaaccaggggacgcccttgaaagctgtgtttgagaactgaaaatgaaggagcaagattcacccacaacaccgccaataccaatcacttcacagcaactagcaacgccgagtgttgtgaagaaagatagctccgtaactgctggattcttgggtaaaagtgggtacaaattctgggtcttggctgcaattctcctgcttgctttctggtccatgtttattggctctgtttctctcaaatggtcttctggtcatcttactgcattttccgatgacatcgatttctctgtctatgatgatcttgacgttctcgtaagcacccaatctttc

SEQ ID NO: 7511 - DNA, 437 bp, Gossypium hirsutum
  Clone ID: LIB3828-017-Q1-N6-G12
ccccaaccaaaaatgggggcctctacccaaaatccacaggcagcccaaaaaccaaaacagccaaaactagccaaaaaagggaaaaaaaataggcgcaacccaaagaaacgggcagacaccgacccgggccggaaaaaaagctggcacgccgctgggaaaggggccccccaggcgcgggccgccatgggggacaggcccgggggcaaagaaaaaagccgccgggggcgggggacatggggcaaaagccaaaaaaacaaaaaagaaacggcgggcaacggcgaaaaaagcccggaacaacaaaaaacgaaaagggggtccggggggaaggggggcaaaaacccggcaaaaaacagaagacacgttttaaaggggaattttcaaggggagagaaaaattaaaagccctttctcttgtaaaaggggagcgtgggttgaggg

SEQ ID NO: 7512 - DNA, 552 bp, Gossypium hirsutum
  Clone ID: LIB3828-017-Q1-N6-G2
aacccataaaaaaacagctcttattatttaagagttcttgtcatttactaacaacagcatagcaaaagcaaaagcaccaaacaaaatgtaaaacaaggggacaggtgcttcaaaaggaaggaaaatttactgatcttataaaaacatgttaggcttaatcaactacctgcatttgggtgccttggggataagcattctccaatgggggcatatgggcattaccgtcacctttacctggatcctgatcaatgctcaagccgaggttcagcatgcgggggattatgcggccaaaggtggtaggctcataaaggctgaagccacatgggaggagagcagtctcgaaaaaaaggacaacaaggtccttcacagatttatcattcttctctgcatcggctctctttttgagctcttccatgatggggttctccgggctgatctccattgacttcttgctggacatgtaaccaggcatgctgtgatccctaaaagccggggccttcatgattctctacatgtcagcagcccaaccatgctcgccagtgactaaacagg

SEQ ID NO: 7513 - DNA, 592 bp, Gossypium hirsutum
  unsure (1)..(592): unsure at all n locations; Clone ID: LIB3828-017-Q1-N6-G3
attcaaaaaattcaaacgttctttatatatatatagtggcatcaaatagtgccacccaaaaggaaaaaaataaaaccaaaaacaaaaaccccgcaatcactgatggctgatgggggattataaatacaaacagaacccaagaacgaaaaattaagaaaacaaaacaaacggatatggtgaaaagaaaacaactcagatcaacccaagtccaaatgccagtcaaaccatcttatcaaaccgtatatagtttttcaatggaagaaaacgcaaattactcggaatccaagacttaaaaaagaagaaacaaaaacatatgggnggaattaaggcattgaatatgaaaagctaggtggtcgactacaggccctgttctgcaagataatcgcccaacctctccacaaccatgttgcattgccccggagtcactggttcttcatatatcccaaacacaagtgcttgtgctgttttcttaatagtcacccctccagatcccttttttccacgaatgacagcaccaggctcaccctgaatgaccataaactttgcgccaccaaggtgcaagcctgtaggggcaaggtgacctggttcgtcg

SEQ ID NO: 7514 - DNA, 608 bp, Gossypium hirsutum
  Clone ID: LIB3828-017-Q1-N6-G4
gattcataaatccataaattgaaattcacctcaaaatgacaatttgcttaaagttataggttgttaaacaactaattaatcaataaccgatgctatctaattctactttgtaagtctaccgccggcatttacaaaatcagctccctcggacattcatataatccatggttcaatgaaaaagagagcttttctttagagctatatttcagcttgaccacaaaaaatcaaaagaggtagtcgatgcccatttaactgttgagcgttgagagcatgcctccagtaccagtaggtagcacaacctcccaaccagggcctttgaggggaactgcatcagcactagcctgggccttctctttatcactagtatcagcaataaggtcgctgcgatcaagaatcctctcaagatcctcatcactgatatctgtctgaatcatcttgtcctcggcagtttcttcatcccggagtagtgcaagtagatcttcttcctcaacaagatcattactctgcttccgttcttggtggaactgcccttttccaatcaccacatgttctagcttcaacttactataagctcttttcaaaatgcgacactcaacagattgtgctgt

SEQ ID NO: 7515 - DNA, 595 bp, Gossypium hirsutum
  Clone ID: LIB3828-017-Q1-N6-G5
atataacaaagaaaatcatatatattagcatgcacatgcattaattacatatggctacaaaacaagattcaaggaactttaggatattgcaaatcgaatattgttttgagctatttattcttcataattactctttttgtccaagaggattttatagcaaacccttctgcaacatcattacttcttattttgtataattaataagacgacaaccaactcttcctcgttatttcatcttaatatggtatcatctctctactttggtggactgggttcactgtccataacctcttctatccctttgctctttacagtttcagcctggcaacatcctgatgcgcacctgggctgaccacactcagcacaagtcccaccacaaccctgacggcaacactctccactctcacatcccgactgtcctggcattagtgggatttttgggacttgtgggatctgtgggacttgtgggatctgtgggattagtggaatttgtgggatttgtgggatctgtgggatttgtgggatttctggaattcttgggatttctggaatttgaggaaatggtagaacgaaaccaccaggattacaattaccg

SEQ ID NO: 7516 - DNA, 597 bp, Gossypium hirsutum
  Clone ID: LIB3828-017-Q1-N6-G6
ataaaaatagaatctttagtagcattgttcatctcagtctcaagtaaaccaagattacaacaaaataaaccaaacttaccaaccctaacaaaataaccctaagcaaacttacttctttgcttatgtagcagatggacctcacctatttcacatgtatatagaccaaatgagtccagtcctaaccatgattgcttgattttttctctctgcccttttttattttccttcgttgtgtgaaaaggaatgtgacaatctgaaactttcaataagcaatggctgacaaagtgccaagtttcaagtcttatcaatccattcattttctgcagcaatccttcctgagctaaggccaccaatcttgctgaatgaacctattgcggataaacttttaaagctgctgcttccctcactgaaattccttggctttcttgattttcttggctttgaagtactatcttctccagtagagcgattggtattgtcataacatttcatcttggctaccaccagtcggacaatggtgcaccggcaaaaggggcataccagggttgttaggcttgcagtcacagggtttggcttgttgtgacagcacaaggcaac

SEQ ID NO: 7517 - DNA, 581 bp, Gossypium hirsutum
  Clone ID: LIB3828-017-Q1-N6-G7
aaagccgaacttataacaacttagcacccaaaaaatttgatcctcaaacccatacaatcaatatccaaacaacccaaacccaaaaatgatctaattcaaaatatctcgatcccagaattaatataatcagttaattttaaaaactcaaatgaagttatgaagttttttcctctaagcaaggaaggcaatattaatatgcaatgcccattaattgattcatatttgatgctaatccgtcaaatattgaagtccggcccctctagccaagtaggcaggcaggcaggatcagcttgcttagcttactcgttgcgcaatgggtgctgctggctcgggtgccacttcggctgctgaatgcccattgccattggcaatgtggtaaggcttgtcgtcaattccccagaatttagcggtttttacatcatcctcagccattaatcgtgagaactcttcatggtcgtacttcagcgttccatttccaccaaattcaccggggaggtcctcgacgtcaaagtatgatttcatgagctccatgctgtctttgtttttagggtacacaaacttcaccttctgagctgttttcg

SEQ ID NO: 7518 - DNA, 502 bp, Gossypium hirsutum
  Clone ID: LIB3828-017-Q1-N6-G9
aaatctaattatccacatttgtaaaaaagaaacgcaaaataacaactgggggaaaaaaaacgggaacaatgattcgaattacatataggggctctgacaattaaatgcttggcgcgaaagatcgaagggaaaattcgaacccacgttgatcgacgggaagggactccatcgggggtgacaaagagcatgtaaaaaccagggggggcaaagatgctattaacgggagctggaaaaacaagggggattggattaaaggcaacatttttgttaaattccacaattcccaaccgaatcaatctttgattgataaaaaccccgggcgtaaaaaaaggcggggaggaaaacgtcacttgaagcttatgtgggccaattacaacatttccacggattcgcactggaaatggctgaccgcattaaacccgggtatgggaatttccaacaaagagcccttgttggaacatacccaatttcgggaccaagtaatggggggagaacctttaaa

SEQ ID NO: 7519 - DNA, 576 bp, Gossypium hirsutum
  Clone ID: LIB3828-017-Q1-N6-H1
aagacaaatacacttccagtgcggctgattatgataaagaaacccaacaatcgtatcaaatacaagcttggtgccgaacaaagtttggttcctcattatgtacacaggcaataccctaattttgatttcagaacaaaggcttcttcccgtttagcatccccatcaagtgatcaaaaacttgcccacctccatcccgaagcccggaatgcatgtattcattggttatccataaccttattcctgctatctgagacgctgtttccttgaccagcttgaagttaacatacatatcctcatagtatacggcagctgctaccggtaccttgttattgttcaatgcagtaacatcatacagtggaggccaatcttccttctcagccaataattgagtggcctctttgaaaggcctcaaagctttaacttcatcaaacatccatggaaatatcatctcccctgtaaaaagcacaggacgcccttcttttgcagccttgattgcattaaatttgctctcatgatcagccctcactctgtgagcagaccaccgcgaagaagcaccctgacagtatattgactcat

SEQ ID NO: 7520 - DNA, 292 bp, Gossypium hirsutum
  unsure (1)..(292): unsure at all n locations; Clone ID: LIB3828-017-Q1-N6-H11
caataaaaaaaagtcttccatttccttaattgttatataacaataacaatttcttcacgtatagtttttgtatgatattaatatgttctgaatttattggtgaaaaaaaaaaaaaaaaaaaaaaaaaaaaaaaaaaaaaaaaaaaaaaaaaaaaaaaaaaaaaaaaaaggggcgggccgccccagaggacccaagcctaggtccccgggccggcgagggaatggccccccnatggggggccccaaacccactcccgggccgggggtnacaacnnngcngccgggaaaacccc

SEQ ID NO: 7521 - DNA, 580 bp, Gossypium hirsutum
  unsure (1)..(580): unsure at all n locations; Clone ID: LIB3828-017-Q1-N6-H12
ttttttttttttttttttttttttttttttttttttttttttttttttttttttttttttttttaaagaggggtttttttaaaaaaaggggaaagggggggggggggggaagggggaaaaaaaggggaagggggaagaggaaaaaaagggggggggggggggggggggggggaaaaaaggggggggggggggggaaggggccggggggggaggaggggggggggggtttgggagggggggggggtttcggacgcggggggggggggggggggggggggccggcaccgggggggggggcagggggggggggggggggggggaggagaggcgggggggggttgggggggggggggttccggggggaaaggggggaccgggggcaattccccccaacacccgagggggggccctatnggggaaaggcgggggggccgagggggggggggggcccacataaaagggggggggccgacgggacgggttgcaggcgggaaaccccccccccccccggcntgggggaaaggggcaacccccggggggggggggggggggtttcgggcgccaggggggggttgggttt

SEQ ID NO: 7522 - DNA, 598 bp, Gossypium hirsutum
  unsure (1)..(598): unsure at all n locations; Clone ID: LIB3828-017-Q1-N6-H2
tcgcgtngaatccatactatgactttgaggaggtgattgattctgatgaagacttggatttagcttcaatggtgactactgacttgtaatggccaggctctatttgcttttcatgatcactattcattagttttgaaagttgtacatggtattaatgagttttcattaatataattatttggtaacaaaaagcatgttcctttcactttgaagctgtttgttatgccgtaaaagaaacctatccttgtgttaaattaatatgatttatttatagttaaatggtagagtaaatgggcggacagacagacagacaggatgtgatggtagttgtagactagtggcagttgtatttttttttttttttttgttggtgttgtagagttgatgtagctttgatgggaggtcaaacatttagtttttgccctttttaagtaagttgatatactaaatttttgtttgtgcanttnnnnnnnnnnnannnnaaaaaaaaaaaaaaaaagggcggnccgcccttttttttttttttttaaatcgcataagttcaaatctgttcatattaaactaaaaaaaaaaacaattacagcaactagcaattagt

SEQ ID NO: 7523 - DNA, 412 bp, Gossypium hirsutum
  Clone ID: LIB3828-017-Q1-N6-H3
ggggggggagaaaaaaaaggggggggaaaaaaaaaggggggggggggaaaaaaaatgggggaaaaaaacccgggggggaaaaaaaaaaaaaaactttttgaagaaaaaaaattggggggggggggggggggggaaaaaaggggggggggggggaaaaaagaaaaattttccaaaaaaaaggggggcccgtgggggaaaaaaaaaaaaaaaaaaaaaaaaattttttttttttggggggggaaaaggggaacttaaaaaaaaaagggaaaaaaaaaacggggggggaaaaattttttttcccggggggaaaaagggcccaaaggggaattttttaaaaaaaaagggggggggggggggcccctttaaaaaagggggaaaaaaattgggggggttcacacacaaaaaagggggt

SEQ ID NO: 7524 - DNA, 557 bp, Gossypium hirsutum
  Clone ID: LIB3828-017-Q1-N6-H4
gaaaaaaagaattgacggtttacattaatctccatacgttttcagtttcataaatctcacactaactttgattttggtattaaataagtgtacaagtaattttacccccagtcattccatgaaattctggtaatgaagttcaatgagcaaaatggttagcaaaatttaatgcctacatgttggtataccatggaatgacagaatgcaaatgctatgttgaagatctctctgctctaaccaggtggacggcaagctgtttaggaacatgtaaggaaatcaaataggctacctcctcataccggcaggccaagtatcaaaagacctgtcctgcctacccggggttgaataagtatacagtccccattggcctaaagtataagcggctcctcaaatcccttcccctgtccgttgcaaaactcttcgaagctcgtctgccattccttgcaataaaacaggtttctgaaggattgcattcattcctatttgtaggcatctctcccgcacatgatcctcagcactagctgtcaatgctataatcaatggccaattacggctgc

SEQ ID NO: 7525 - DNA, 598 bp, Gossypium hirsutum
  unsure (1)..(598): unsure at all n locations; Clone ID: LIB3828-017-Q1-N6-H5
aatacaatgaaatcaatcaagatacagngaaaggtggaaattatacaatagttatacataatacatgacacctagatttgctacatttgacaaagtaatacaagctaccctagcgactgctttcaacatcaaggctacctaagactaatactaagaattcccttcaattgtaataaaaaagaacacctacaaacctacatttaaaattacattttaagtggttgttttataagttatctcaagctcatatcagggtcatcttcatcatcgaaatcttgttcgcttgatggcctcgttctctttccatctcttgctgatgaggcggtccttcccttctttggtttcccttggccattggcagctaagcctccacccttagaccgagctgagccgaagtcggatcttccatcatcttgtcgaactccgagttcatcagccactggtgacgtgactgatgacaaagaaaacaatctatcttcaggctgaaatttcctagacctcttcaagtttgctgtgttcttggatgaagaaagaaacccttcgaatcctttcaaaacatgcccgaaatggctcgaatcttgcaaataattagtttcta

SEQ ID NO: 7526 - DNA, 591 bp, Gossypium hirsutum
  Clone ID: LIB3828-017-Q1-N6-H6
acttacaaacacctaattcattgatattcatatcatccattgacatataccaaatgaagaaaacatttattatcactaatactccaattcagtagtcactaaaacccattttatttggaaaaaaaacaaaacactaaaaactggcagaagacagctaaacggatggccttcattttggtggtgggaagaagatggcatcattggtcctcttggagcggaaaagcttctctgtctcagcaggaaccttgaatgctgcttgaagaacttcaggtgatatcgccttccatgccccaatgcttccagccaagtgggtgaacatagggtttggggtggtgatgattgagaaccatgacaaaccatctggatcagcaatctttgaaacaacaaagaaccttggcacaatcaacagattgccggctttcacaatggtttccaggacccttttgccgtcgacgcccaccacttggagacgaccactgccgttgactatgtacgtaacctgcaaggctgaatcacaagaaaagccaggggagcacattgcattaccttccagcctgacgagatcggcccccatacccacctggccgacca

SEQ ID NO: 7527 - DNA, 353 bp, Gossypium hirsutum
  Clone ID: LIB3828-017-Q1-N6-H7
aaaaaaatagttgagtttatatttccggtaattcatggcttacaacaatcaggaatgaattaacatatgaaatgattaattcctttttttcacataattttatagaaaaagggagaagttaatgatgtgcgttttctagttgtggtcaatgaaagatgggcgttgtataatgacttcgacatcgttttaggtgtgaacatcctctgtcataaccgtttgatggtggtgggaggcaattaccgcctcctagtttgcatggaacttgaagattttttcccagtcccgggtagctgattggtgtcgcgtttgcaccctcttccatcaccattgagcttattaccaatgaacaaatc

SEQ ID NO: 7528 - DNA, 479 bp, Gossypium hirsutum
  Clone ID: LIB3828-017-Q1-N6-H8
attaaaaaaaaaaaataaaaaaaaggtaaaaattaagggtttttttaaaaaaaaaaaaaaaaaaaaaaaaaaagggaagggaaaggggggggggaaaaaaaaaaaacaaaaaaaaaaaaaaaaaagggggagggggaaaaaaaaaaaaagagcccccaaaaaaaaaaacaaaaaagggggggaaaggagaaaaaaaaaaaaaaaaaaaaacgaaaaaaaaaaagggaaatttgggggggggggggaaaaaatggggaaaaaaggaaaaaaaatttggaaacccgggggaatggggggaaaagaaccccccgggggggaaaactaaaaaaaaaaaccaaaaaaaggggggggaaaaaaagaacggaaaaaaaaagggggggggaaaaaaaaaggggggcccggggaggggggggaaaaaaccaaaaaaatagggggggggcgggggggggcccccgaaaattccgggggggccccggggg

SEQ ID NO: 7529 - DNA, 627 bp, Gossypium hirsutum
  unsure (1)..(627): unsure at all n locations; Clone ID: LIB3828-018-Q1-K6-A10
gnaaaccgattcagttggtgaacgagaatagatggagaaggattctggcagtaatttagaagtgaccagtgagagaaaatccgaggtggatgttgcggatgacctgttcaatgcgtacatgaatttggaaaatctcgagacattgaactcttctggtactgaggacagggatatggatagcaaagcaagtggcacaaagacatatggaggcgaaagtagtgacaatgaagtcgatagtagagtacataaacatccaatcagtatacagggaatgagttctggtatttcaaatgagaagagggaaggtgtcaagaggagggctgctggtgatattgcaccgactgttcggcactacagaagtgtttcaatggacagttacatgggaagtctgcaatttgatgaggatacaccgaaaattcctccttcgggaaatcatggcaatcatcactctcctggtagcccaggcgatgcaaattcaagtaaatttaactttgagcttgggagtagtgagttcaatgaatctgagcttaaaaagatcatggaaaatgagaagcttgctgagatggcatctgtagatccaaaacgcgtcaaaagggatttggctaatcgtcaatcagctgctcgttc

SEQ ID NO: 7530 - DNA, 254 bp, Gossypium hirsutum
  Clone ID: LIB3828-018-Q1-K6-A11
tttttttgatgttgaaggcctgattttgcaccaatggaagatctctaaacagttgcgttctgcagtatagcaagctttccttaatctgcgttttttttgtttttgagtaaatctgttggagatatttattagatttgtcaattttatctccggttattatatatttaatttgtacagagatgaagtgtgaatatgtaactaaattatttgcccacatcaaaaagttttgacggaaaaaaaaagtagattttttt

SEQ ID NO: 7531 - DNA, 536 bp, Gossypium hirsutum
  Clone ID: LIB3828-018-Q1-K6-A7
cccacctcgtgaaccatataacttattaaaatggacggggtgtctagtatctcgactttggttcgctcggggatggaggacggtggttccaatcatgtaccaaatcaaggctgtgtaagcgattattaactgttaaagcggtgaatctgtcaagtaacatgacatttgaatattgcaaacttacgactttgcacgggcatatacgggctcttgttgagcatgttacgtgaggcaggcctgatactcttacctatcgattttgatgccaggatgttctttaatgaatttaacggggcatgggcatatcttttacttactgatgatccctatccatcgaccatacattcataggattctcccatagactgattgccctggagaattcctgtggactttcttatcagatgacatgtgtactatggggccctatcttatatcatcagcgtggcatgaagcgctgctatggctttgtcttcgctttgcattggttgacgcaatcaccaacccaatgaactatgctctctaccatgcaaaca

SEQ ID NO: 7532 - DNA, 563 bp, Gossypium hirsutum
  Clone ID: LIB3828-018-Q1-K6-A8
tccatgacttatgtaaaggaaagaaacgttatcgtgaaagcagagaatgcctaaccaaaactggattaagagagagcagatgaaacaaaatgaaccccaacagcaccttcatcttggctggtctgctacttacagcttcactaactgcagcaggtctgccagtactcatttgaagctgtatcatctggaggaaaagggcaacaaaagcagcggcgaaccaggcaaccaaaacaacaaatgtagtggtggaaacactggtgggatgggcggtttcttcggcccagggcctgggtttggattgccagggtttgaaaaacggtggggacatgggatcgtacgcggtggctatggagctggcttccgaggtcctaccggagggtactcaaaaggtggtgttattagaactacagttgtttgcaaagaaaaaggtgcttgttttaacaagaagctaacctgccctgctgagtgcttcacctattttagtctgtctgcaaaaggttacagtgaaggtggcatttgcagtcgctgcaccatggattgtaagaaaaaatgcagtgcttact

SEQ ID NO: 7533 - DNA, 622 bp, Gossypium hirsutum
  unsure (1)..(622): unsure at all n locations; Clone ID: LIB3828-018-Q1-K6-B10
ttttgctttcacaaatctaagaccagagctccaaaagatgaatttttaacccctcaaattaaaatccttcctttttcgcgttttcggttgaaaatttgtataaaaaagaggtgatttagaaacaatggatgctgattcatggagtgctcgtctttcttcagcttctaagagatatcaatcggctcttcaattacgatctgatatgcttatggggtttgaagaaattgatggagaagatgaaataagagaggagtttcgatgccctttttgttcagagtatttcgacatcgttggcttgtgttgtcacattgatgatgagcatccagtggaggctaaaaatggggtttgtccagtctgtgcaatgagggtgggcgttgatatggttgcgcatataaccctacaacatggaaatatatttaagatgcagcgcaagaggaaatcacgtaaaggtggatctcattccacgctttctcttctgaggaaagagctgcgagaaggaaatctacagtccttcttcggnggttcttcttgtacagtgtcttccaattcagcacctgatccgttgttgtcttcatttattttacccatggttgatgactttgttagtgtccagcctaacttt

SEQ ID NO: 7534 - DNA, 648 bp, Gossypium hirsutum
  unsure (1)..(648): unsure at all n locations; Clone ID: LIB3828-018-Q1-K6-B11
ggnaaatcgtagagatcgtcagtttgtttacagtagattcaggccatggnagaacttgcagggatgatgctggcagtttgttgacatgtgtctgttttctgggggactcctcccatattgcagttggcagccatgctggggagctaaaaattttttattctaacagcaataatgtaatggacagctgcacaggccaccagcttcctgtgactcttgttcagtcatatttttctggtgagacccaaatggttctatcatcaagctctcaggatgtgcggttgtgggatgcctcttctttctcaggtggggctatgcattcatttgaaggctgcaaggctgctaggttcagcaattctgggagcagttttgctgccctatctgctgattctacccagcgagagattctcctttatgatatccagacctatcagttggaattgaagctttctgatgcatcagctaattctacgggtcgaggtcatgtatattctcttatacattttagcccatctgatactatgctgctttggaatggtgttttatgggaccggcgggttccagatccggttcatcgctttgatcagtttacagattatggtgggtggtggttttcatcctgcttgagatgaagttatcataaaattctga

SEQ ID NO: 7535 - DNA, 244 bp, Gossypium hirsutum
  Clone ID: LIB3828-018-Q1-K6-B12
ctaacattcaatcttcatttcttcccactttgtagtgtcaagtgctgtcatacatttctttacatttttctcttctattggctgctcatacgagagcaaagcagcaaacagctgcaaataatcaaggtatggttggcaaacacccattacatatcactacattctattgtattaaatttcgataaaatagaaactaaacccccttttctagcttgatttttaagaaaacccatatcatagtgtt

SEQ ID NO: 7536 - DNA, 620 bp, Gossypium hirsutum
  unsure (1)..(620): unsure at all n locations; Clone ID: LIB3828-018-Q1-K6-B7
gctaacgcgaacacagtcgtcgttgctccgttcatcgcctaccgtccggtcgtcaatccacagtatgtcatccatcaccgaaagtgactttagcaaagaccaagaagaaaaccagcagcgagagtcgttnactgaaagaatgagaaaaaaacgaaaccgccaccaaagagaacaggttcgatgtcaccgaggattataccggtccggttcaccccggttttcgccatggcttccatctctttcttcactctcttctcttttatcttcttctttgggttttatcttaaaagagaagaaatccccacatcggaaaacctcttgttagccttaatcttcgtcgctataacccttttttttgcttcgaaaaacaaagctttaatcaaccaaggcattgtttgtttcaaatcaagattctacttctccaaacctaattcgaagcccgtcgaatggttcattggagagacccaatgtaataaaagcaacatcagcaaagaaaaagaaggcttcttccgaccgtaagagaaggagtggagttttacagcaatggagatttttatgaaggtgaattccataagggggagtgtaatgggagtggggtttataactattttgtgaatggg

SEQ ID NO: 7537 - DNA, 282 bp, Gossypium hirsutum
  unsure (1)..(282): unsure at all n locations; Clone ID: LIB3828-018-Q1-K6-B8
aaaaagtctacattgctctttcgttccatgggttaaaaacccagggnncaaaatcggaaaacatgattaccatcctccacttcttgctgacacctcaggcaccgatcttccgtgatcactctcttcagctttaaattagaaaacgagggaatgtaattccactaaatcctctatattttaatttttactttcgagggcatgttcaaactccataatttcttgtaaaaatttttggtatcggtttgtataaaattactagggatcagtgtagattcttgtaat

SEQ ID NO: 7538 - DNA, 642 bp, Gossypium hirsutum
  unsure (1)..(642): unsure at all n locations; Clone ID: LIB3828-018-Q1-K6-C10
gttttctaatctttttggngaaatcggtagcaaaaaatgtcgtcgtcggggaggaagatcacccttaagagctcggacggcgaatcattcgaggttgatgaagcggtggcgttggagtcgcagacgattaagcatatgatcgaggacgattgcgctgataacgggataccgttgcctaatgttacgagcaagatcttagcgaaggtgatcgagtactgcaagaaacacgtcgaggctcctaagacagacgatcgatccgccgatgacgagctcaagagttgggacgctgactttgtcaaggtcgatcaagccactctctttgatctcattctggcagcgaactatttgaacatcaagggtttgctggatctcacttgccaaactgttgctgacatgatcaagggaaagaccccagaagagatcaggaagactttcaatatcaagaatgacttcaccccggaagaggaagaagaggttcgtcgggagaaccagtgggcattcgaatgaagggtcaatttcgagtgccggttcaattgtatcaaacttctctatatataaaaatgtagtttgttgctctgacttttcatctgtacttttggatattctgtgagctcttttgaaactcttcaaagtgtcatcttt

SEQ ID NO: 7539 - DNA, 628 bp, Gossypium hirsutum
  Clone ID: LIB3828-018-Q1-K6-C11
accattctttcctaagggcattatggatgcgagattcgggctcttgttcctcttcatgttgggtgctacttgggcatgtaacgcccgacaactagaagttgttgaggtagtaatctcggatccatcagttgtccaggtaaactggaggcaagatgaaaaagtgaggaaacggtagctcgataatgacaacgtgtgcaccttgtgtgaggaatttactactgaggcagttgattacctttcacagaataaaacgcagactgagataattgagattcttcacaaaagttgctcccgtttacgagcttttgagccccagtgcattacacttgtggactactatgcacctctcttcttcttggaaatatcttcagtacaacctcaagatttctgtacaaagttcaacctttgtcaaaaagttgcacttatatcttcacaattccgcgaagatagttgtggcatgtgccaccgtgctatttctgaagtactaatgaagttgcaagatcccgatacaaagttggagatactcgagcttcttttgaaaggatgtaattcagtgcagaactatgtgcaaaagtgtaagcggttggttttcgagtatgggccattgatcctcgcaaatgccgagcac

SEQ ID NO: 7540 - DNA, 641 bp, Gossypium hirsutum
  unsure (1)..(641): unsure at all n locations; Clone ID: LIB3828-018-Q1-K6-C12
caaatgaaaacttcagtttgagatttggcaaatcaagcgaaaatgctaacagcggatatacctcccaatcaaactatttacatcaagaacctcaacgagaagatcaaaaaagaagaattaaagagatccctttatgctttattttctcaatatggaaggattttggatgtcgttgccttgaagacgcctaagcttcgtggacaagcatgggttgtgtttgatgaattgacttccgctagtaacgccttccgtcagatgcaaaatttcccgttttatgataaacctatgcggatacaatatgcaaagacaaagtcagattgtatcgccaaaaatgatggaagctttgttcccagagaaaagaagaagaagcaagaagaaaaagctgaaaggaagcgacgtgcagaggaagcacagcaatctgcaatgccgaatggcacaggttctcaaaataatggtggtccaaaggctcctctccatcatggaaacctgaatgctgagcaggccgcaccaaacaatattctgttcatacagaatttgcctcacgagacaacaagcatgatgctgcagctgctttttgaacagtaccctgngttcagggaagttagaacggttgaagcaaagccaggtattgcatttgtaga

SEQ ID NO: 7541 - DNA, 590 bp, Gossypium hirsutum
  Clone ID: LIB3828-018-Q1-K6-C7
cttgcttcaggaatgcagtgtaagacgttccatggatttcagctttcatctgctgggattattcgattaccaaagtttgagatggtaatggctaaacctgaagctaacagtaagcctgtccttgcttctgaagatgtctatattgtcactgtttatgggagaatttactgcttgcaagttgatagagttgcaatggtactgcattcatatcggttttaccgtgatgctattatccaacagggttcattaccaatttactcgagcaaggttgctgtgagtgtggttgataatgtactacttgtgcaccaggtagatgcaaaagttgttatactctatgacatatttgcagattctcgagctcccatatctgccccacttcctgtactattgaggggttttcaaaggtccgatatttctaattctcgacctagcaccaaggaaagtgaaagttcagaggcctctgattcaaatgataatgaagcaattatttatggagctgactggacctttttggttcctgaccttatatgtgatatagctaataagcttttatggaagaaccacttagacttggaggcaatttctgttag

SEQ ID NO: 7542 - DNA, 633 bp, Gossypium hirsutum
  unsure (1)..(633): unsure at all n locations; Clone ID: LIB3828-018-Q1-K6-C8
ctcttctctcctctccatactttngaagnaaaaaacgttatctcaaagcgaaaatcctcccaaaactggattaagaagagcaaataaaaaaaaatgaaccccaagagcaccttcatcttggctgttctgctacttacagcttcactaactgcagcagctaggccagactcatttgaagctttatcatctgaggaaaagggcaacaaaggcagcggcaaaccaggcaaccaaaacaacaaaggtagtggtggaaacactggtgggatgggcggcttcttcggtccagggcctgggtttggattgccagggtttgaaaaagggtggggacatgggatcgtaggcggtggctatggagctggcttcggaggtcctaccggagggtactcaaaaggtggtgttattagaactacggttgtttgcaaagaaaaaggtccttgttttaacaagaagctaacctgccctgctaagtgcttcacctattttagtcggtcgggaaaaggttacggtgagggtggcggtggcggtggctgcaccatggattgtaagaaaaaatgcagtgcttactgttaagagggtaatatacagtataagtacttgctatatcattaatatctagttgcttaaccatgtatg

SEQ ID NO: 7543 - DNA, 513 bp, Gossypium hirsutum
  unsure (1)..(513): unsure at all n locations; Clone ID: LIB3828-018-Q1-K6-C9
ggaaatagtgggccaagagattaggccctgatgatgacggtgctggcgctgatatgcgttttattcgacttcaactacggccagatttgagacctggaatcacggcgtcgatgagggtagatggaacgatcgaggttgaagaggtgtgactgatggggtgcttacggcgcgaagcttctagaaaccctagggtttccagattctgtttaggcattgggccttatttaggttgggtcttgtttgggtttgggtgtaacgggttaatagattttgggccaaaagtttaggctaattgggttgtaactaggtactgcgttttgggtagtttagctaggttacgggttaatggattttgggctatagtattgggtttgtaaactggactgtacaaaagctattttatttttatttttttgtttttatttgttaatgtatcggcccgggtaaatttgggttgctacaatcatcatatgattattttggataanaaaaaaaaaaaaaaaaaaaannaaa

SEQ ID NO: 7544 - DNA, 651 bp, Gossypium hirsutum
  unsure (1)..(651): unsure at all n locations; Clone ID: LIB3828-018-Q1-K6-D10
aaaaactaagcaccccattttccactcggttgaactctaattcccttttgcttaaacgccgatctaccaccaccatcggcgaccggtatgttcgaaccttggaaggatggcttttcagccttgagatccctttcagcttcgatttcaacaaagcgaaagaagaaatatgtggcctattcgtaaggtaaggctcctctttcactttttctttgttttctattacaatgatgaatagatcgaaggaaaatgaacccaggaaacgcaaaaaaaaaacttcaagaaagttaagcaaaaatcaccttttttgttttctttctatttggttgctatctattgtgtaaaaaaaatacattctttctgtcttgggctttatagccgatgaaacaataaagaaaaatacaaattttttccattttgtatttgctgttgcgtttgtctcttcttgcaggtatggggtatgcgtgacgcatgtacgagactgtatgttggcgtacagaggcgcgggcgtggctgtggtgccatgaggctgaaggctgctgttcggttgcagcgcaaagaagtagaaaccttagggtttttatttctaacatgttttgngccatttgggcttgtagctggtttgagctataagccattggtatgattttggac

SEQ ID NO: 7545 - DNA, 139 bp, Gossypium hirsutum
  Clone ID: LIB3828-018-Q1-K6-D11
ccattttgtttggtcccacactttatgaaccgagtgatgatcccaccatcgacagctttaccttcgatatcggaatcggaatccgggaaataaccccacgacatcaaaaccgggtggagccggacatttcgggcgccgt

SEQ ID NO: 7546 - DNA, 632 bp, Gossypium hirsutum
  Clone ID: LIB3828-018-Q1-K6-D12
attttgccagaggccactatacaattgggaaggaaatgtggatctctgcctagatcgagttaggaagttagctgataactgcactggtctgcagggctttatggtgttcaatgctgtcggcggtggaaccggttctggtcttggatctttgttgttggagcgcttgtcggtggattatggaaagaaatcaaagctcgggttcaccatctatccttcgcctcaggtctcaactgcagttgtggagccttacaatagtgttctgtccactcattcccttcttgagcacacagatgtggccgtgctcttggacaatgaagcaatttacgacatatgccggagatccctcgatatcgagaggccaacttacaccaatttgaaccggctgatttctcaaaccatatcgtccttgacgacttctttaaggtttgatggagccattaatgtagacattacagagttccaaaccaatcttgtgccatatcctcggatccatttcatgctctcttcttatgcgcctgttatctcagctgagaaagcataccatgaacagatatcagttcctgagatcacaaacgctgtatttgagccctcaagcatgatggccaagtgcgatccaaggcatggcaagtaca

SEQ ID NO: 7547 - DNA, 429 bp, Gossypium hirsutum
  unsure (1)..(429): unsure at all n locations; Clone ID: LIB3828-018-Q1-K6-D7
ggnaaggcttatctctttgataaggtgtcaagtgtgtagaagttttcaaagggttctatgaaacaaaaacaaaacacagaaagcttacatggatatactcacagcgngaaaaaccaactacactttgcggtccaagaacaatttgtaggaggcacataatgactagctcctacctctacgaatgcttgtgggaggcattgcagcagcgaataaggatgataacatgtagttgaaaccgtatgtgctatgaatccgaattcaagtgtgatttttagatattttatgtgcaaaaaagtattagagtgtcttatgtttatatgtttgttaagcagattatagatagaacctgcagtaggatcaactaattagttgatcaaaagctacaccctattttgtaatcgactacttgcatatttgcatatacttaat

SEQ ID NO: 7548 - DNA, 646 bp, Gossypium hirsutum
  unsure (1)..(646): unsure at all n locations; Clone ID: LIB3828-018-Q1-K6-D8
ggagtttaagctttagcagtcacttgtctaaagaagatgaagagatctctaaatcagctctttctacttttagagctaaagaagaagagattgaaagggaagaagatggaagttangagaaaaagttcagcttcagttaggtcgtgttgaagaagaaactaaacgtctggctgtgattcgtgaggagcttgaagcacttgcagatcctatgaggaaggaagttgctcaggtgaggaagaagattgatgcagttaacaaagaattgaagccgttagggaacacttgccagaaaaaggaaagggagtacaaggaagcccttgatgcattcaatgaaaagaacaaggaaaaagtacaactaatcacaaagttaatggagctggtgagtgaaagcgaaaagttaaggatgaagaagctggaggagctgagtaagaacatagattccatacactgatcatataaggaaagagaagcccttttagctttggttttaactgattaggcttgtgtgtgatgtatttaaggtgactttgaatatttatatatgggtgtgttgtaatggtaatctttgtttgtttttagttagcattcgatgaatgctcaactgatttagaaaaaggaaataccctaaaaaacaaaacagtttgta

SEQ ID NO: 7549 - DNA, 376 bp, Gossypium hirsutum
  Clone ID: LIB3828-018-Q1-K6-D9
gttctttaggaaagtttttttcaaaagcacttgagattttaccatatcatttattatcacaattattttactcgttagggtttgtttgattaataacaagaggagagggaagaaagaagaaaaaaacccaaaaaaaagaaagagaaggaaagagaaaaaagagtttttttggttgggtttttagctgttgttttagggtttacaaagatggcgcatgttcaagttcagggacaaagtgggggcgttaacaatggatctggtggagccaataaccagtttgtaacctcgctatatgttggggatctggatccaagtgtgaccgagactcagctttatgagtactttaaccatattggtcaactgcttactattagct

SEQ ID NO: 7550 - DNA, 630 bp, Gossypium hirsutum
  Clone ID: LIB3828-018-Q1-K6-E10
caccaaggctagcactggaaggaagttgaagaaccagaactgctcgaggcaatacgtttgacgattataaacaacttacttgagtttcatccggaatcaagctcccagttagcaatgggtgcaacttttggtgctgagccaccaaaagaaacggttgatgtagacattgctactcgcattagagttcatgatgatggtcctgaccgtagcttgctatatgtagagacagccgatcatccagggttgttggtggagcttgtgaaaactattaccgacatcaacgttgcagttgagtccggagagttcgacacggaggggttgcttgcaaaggcaaagtttcacgtcagttacaagggtaaagccctcatcaagcctctgcagcaggttcttgcaaatagtttacgatattacttgaggcgtccgactacagaggaggcgagtttttgagccaccataagagcaagttagcaatggggtgaagtttagaatgctgttggcaaataatctcctcttgtaggaattctatatacagtcccctgttagagcatggtaattgttgtataacgattttaattaatttgatcactagttgtgcaacactactggattcttagaaacgtgggctcattt

SEQ ID NO: 7551 - DNA, 476 bp, Gossypium hirsutum
  Clone ID: LIB3828-018-Q1-K6-E11
cggccgcgtgggtggaattggacccggtgtctatgacatccactctcccagaataccatcaaccgaagagattgctgacagaattaacaagatgcttgccgtgctcgagaccaacatcttgtgggttaaccctgactgtgggctcaagactcgcaagtacgctgaggtgaaaccagccctgagcaacatggttgctgctgccaagctgctccgcacccaactcgccagcgccaagtgataggctcccgagatattggaaatcctaatcccataccactccagagagattaaaaagaaaaatggcaaagaagtttcttctatcttatcatttgaataaccttgtttgttgctgaaatatttgttacatgcccttggcgtccctttgatttccttatttttgggttttcttttctctaagtatcatgcacctttttgggaatattatatatatgcaggcttcagtttctttaaagaaa

SEQ ID NO: 7552 - DNA, 641 bp, Gossypium hirsutum
  unsure (1)..(641): unsure at all n locations; Clone ID: LIB3828-018-Q1-K6-E12
gnaaatcttctcagttcctttctttctttcttttcaaatgatttcttggaagaaaaaagtggattattgaagaaattagtttgagggtttctanaaaaaaaaatcaaattatcttcaatcgattatagaatggaagcttcgaattcgcgaatgcagacttttggtcagacggagattaattgggacaaactcgacaaaactaaattttatgtagtaggagctggaatctttactggagttacagtagcattatacccagtctctgttgtaaaaactaggcttcaggttgcttcgaaggacactgcagagagaagtgctttttctgttattagaggcatactgaaaacagatggaatccctggtctctatcgagggtttggaacagtcatcactggtgccattcctgccagggtgatatttctcactgctctggaaactacaaaagtagctgctttcagcatggttgaaccatttaaattctctgaacctacgcaagctgctatagcaaatggaattgctggaatgactgcatctctgtttgctcaagctgtttttgttccaattgatgtgattagtcaaaagttgatggtccaaggatactcaggccatgcaaagtacaacggaggtctagatgttgctcc

SEQ ID NO: 7553 - DNA, 379 bp, Gossypium hirsutum
  unsure (1)..(379): unsure at all n locations; Clone ID: LIB3828-018-Q1-K6-E7
aagnatctacccatgaatttctttttagcccaaatgagcattgaggttacacccactcgacaaattctattgaggcaaaattcatgaaaatctttgctccctcttccatatctgatttagttcgttctaattgaaggaatccattcaagtattgaatttatgttcaagttgcatgttccgattccaagtaggagccaagccatactgcactcgcgaaggcacaatcatggagtaggtgctacatgtcttctctttctctttgacagaatgggcaatcagtatcaaaagattgaattctcttttggatcttcgttttgcacaataatgcattgttcaaaattttccacaaaaatatggtaatacacgacaatttccaatc

SEQ ID NO: 7554 - DNA, 580 bp, Gossypium hirsutum
  Clone ID: LIB3828-018-Q1-K6-E8
attttgtgtatattttccccctttgcttaaaaaagacttttttttaaagtaagtatggtttcatttatctgtaattaaattaatggtttacgttttctggagatggtttctttttttttttgcgatgaaatacgtatctgaaataaagcttaaacagttggtagtggcgttttcaattattcgatttccctgaagaatggacaaagatgaaaatatcaaaattttgattgaaccttgtaagattaataatgaaattcatatgttcgggttttttatgtgatgtgaagtactaaataaattaatttggatgacagatatgagggtccgattggtgttcgttatacctcaactcaagtcgttagaaaccggatgaagagtgttaagaatattcagaaaattacaaaggctatgaagatggttgctgcctcaaagttgagagcagttcaaactaaagctgagaattcccgaggcctctggcagccatttactgcacttactggtgatcttcccagtgttgatgtcaagaagaacgttgttgtaaccatctcttctgacaaaagtctttgtggtggaattaact

SEQ ID NO: 7555 - DNA, 623 bp, Gossypium hirsutum
  Clone ID: LIB3828-018-Q1-K6-E9
cccagcgtccgcaataattgagggaatccgaaatggagaaaatgatggaattgggaaagaaaatggaagcacagaagaaaagcaaagtttcaaagatggatcaatttgtgggtataattcgcttcaccacctcttgagcgcaaatcttaagcctcaaatctaccaggaagtcagccggttgcttctggggctgaattgcgggaaaacacttgaaactattgttctacctgaatcagctaaagccctctcttcaaaacatgattttgatcttcaggctttcaaattttctgctgaccaagagttgttaagagaaccccgggtagtaagggtcggtcttattcagaactccattgctctcccaaccactgctcccttttcagaccagaaaaatgctatctttgagaaattgggaccaataattgatgctgctggtgcttcaggagtcaacatactatgcttgcaggaagcatggatgatgccatttgccttctgtacacgagaaaagaggtggtgtgaatttgcagaacctgttaatggggaatctacacagtttcttcaggaatttgcacgcaagtataacatggtcattataagctcaattcttgagagggatataaatcatg

SEQ ID NO: 7556 - DNA, 298 bp, Gossypium hirsutum
  unsure (1)..(298): unsure at all n locations; Clone ID: LIB3828-018-Q1-K6-F10
atcttaattggtgtcgatttcttgaaactcaggtgtggctatgtagttatttttgatagctgtgttatagaaatatgaagcggataattgttgaggtaatgatgaaacaaataattcaagaccaaatttcatcatatgtaaaaatggggctgtgcnaacaaaactgngaaaaaaaaaaaaaaaaaaaaaaaaaaaaaaaaaaaaaaaaaaaaaaaaaaaaaaaaaaaaaaaaaaaaaaaaaaaaaaaaaaaaaaaaaaaaaaaaaaaaaaaaaaaaatacaaaaaaaaaaaaaaataa

SEQ ID NO: 7557 - DNA, 632 bp, Gossypium hirsutum
  unsure (1)..(632): unsure at all n locations; Clone ID: LIB3828-018-Q1-K6-F11
gttnagggaaaataacccttgtgcagggtctagccttggtcatggtaactttgctatggactggaaccatggctcaatcagactgcaccagtgtgctaatcacgatggctccatgctttgattatgtgactggaacctcctcaaccccatctgttccatgctgctcacagcttgctaacgttgttcaattacagccacattgcctttgcatggccctcagtggtggtggttcatcactgggtgtggaagtaaaccagacacttgcccttgcactccctcaactttgccatgtcaaaaccccacctgagagcaactgcaaagctgctgatgggcctgctgtaatttcaatatctccatctggttcacctcaaggtttaccaccccattcaaatgataccccaggcagcaactcatcaacatcaggtggatctagaacaattgcagctactgccagtgatgttatcttcagcacatcccttcagttcatcctgttcttgctgcccattgctttgttttcttcaacttggaccaccatctcctaaggctcctatacatatgcttctggtactaatctcagatcctatctacttgtgttttatcctccacttttagtacttcctaagctttggtta

SEQ ID NO: 7558 - DNA, 621 bp, Gossypium hirsutum
  unsure (1)..(621): unsure at all n locations; Clone ID: LIB3828-018-Q1-K6-F12
catttttatgcatggnaatcaaaataatgatataaattgagctcgaatttaatctgatcggttcatttaaacatctttgagagatagtaccgagttaagataagatttgaacattataatttgtaatctcttctcttatttattagcttattcgtgaggagaaataactagggagttttatataggtaatcaaagtaacaataggaattgagccacacttaatccagttttgtaagtttaggattcgagtccttacattttcggattgtttatgtagagataactaggacttctatgcatagaaccaaaataaaaatatgaactaaacccagttccaattcagtaggttcatgcaataagccttaagagatagcatcgagtaagtttaaagtataaattgcaacattttataagaatcttatgcatggcatttgaatctcaacatttatattctctgggtgggctttaatggaggctaagaggtgccttgagcccccaaaattttggaaaactttttttttctttgaaatttgttgaaaaatttaatttggcccccttttatatttttgaaaattttcattataccttttaattttttttaaaaattttgattaaattctt

SEQ ID NO: 7559 - DNA, 493 bp, Gossypium hirsutum
  Clone ID: LIB3828-018-Q1-K6-F7
gttctcggtagtagtgcttgaagatatcgatgaagcagatatgctggttagaggcagcattaaacgagcaatggagagaggtcgacttgctgattctcacggtcgtgagatcagtctaggaaatgttatcttcatccttactgcaaattggttaccagggaatcttaatctctcatcaaatggtattattaccctggatgaaaagaagcttgtcggtttagctagcggaggttggcagttaaagttatctcttagtgagaaaaccgcaaagcgtcaagccagttggctccatgatgaagacagagcaacgaaacctaggaaggaaaccggttcgttatcgtttgatcttaatgaagccgctgatgtggaagacgacaaagccgatggatcacacaattccagtgatctcacggtggatcatgaataaggcaaggcctcacaaacagacaattatccaactcaacattataataagaaccccatgaactactca

SEQ ID NO: 7560 - DNA, 636 bp, Gossypium hirsutum
  unsure (1)..(636): unsure at all n locations; Clone ID: LIB3828-018-Q1-K6-F8
gttactttcaagcattataaggtatccgtgatgctatttcgttcgttgtacttagtagacgttgataaggaaacaattggcaggnngttctgaaatnntgaattctgtaaggggaatggaaaactatnggaaagaaattgatgttttgatattcaacacttggcattggtggcaccgtagaggactgaagcaacaatgggattatgtgcaatttgatgggaagattcgtaaggacattgatcgcacggttgcttttcgtacagctttgagaacatgggctaaatgggttgattcagatgtggataccaataggactaaagttatatttcaaggaatttccccttctcactacaatggcatagattggaatgagccaggagtaaggaattgttcaaggcagacgacaccattcaagggatcgatttatccaactggtttgcctctggcagagtacgtagttaaagaggtcataaggaacatcaagaagcctgttcatttgcttgatattacaatgctctctcaattacgaaaagatgcacatcctagcacttacaatgacttcaacggcatggattgcacccactggtgcgtggccggcctccccgatacatggaatctacttctgtatgcagccct

SEQ ID NO: 7561 - DNA, 612 bp, Gossypium hirsutum
  Clone ID: LIB3828-018-Q1-K6-F9
cggccgcgtgggcaaatttcctccacgtggcgtcgtcggggtcgcaagccgtctctcgtaggaaaccgtcttcgtcgtctgcaacaagtagtggtccgagcaaagctgagcaaagagaacatttgaggaaggatctgaaggtcgattatccattttggcaacataattggttcatcggattgctgttcttgatggcgatggggttctttggtcttgctctcttcctcttcctcactttcgatttcgatcaaggttctccttcctccacctccgcctccgcctccgccgcctcctcctcctcctcccaaaacgtccaggttacttatgggacggttttaaagctgatgcacgagaaaacaaaatttaggcttcattcacacgaggtgccgtatggttctggaagtggacagcaatctgtcaccggctttcctaatgtagatgactccaacagctactggatagttaggcctccacccgatacatctgctaaacaaggagacaccatccccgatggggcaattattaggttgcaacacatgaggacccgaaaatggctgcatagccacttgcatgcatccccaatatccggaaacctcgaggtcagttgctttg

SEQ ID NO: 7562 - DNA, 634 bp, Gossypium hirsutum
  Clone ID: LIB3828-018-Q1-K6-G10
ttacaatatatattgaagaaaaagcaaatctcaaacttatttctcaatggcaccaacatcccaatccttgaatgaagagcaacgtcgatccgctaactgtcatcccagtatttgggatcccaccgccatccaatcctttaccactccatacactaagttgttttgcatgctaggcttgtgataaatgttattatatatatgttgcatgtaacaaccctttttcttgtgaattttagtaccaactctgtgctacacaattggaggatctgaagcaaacggttagtaaattgcttgcctcaacgaaagacacagctgccttgttgaagctaatagattcgatgaagaggcttggagtggcctaccattttcaggaacagattcaacaggctttgaatcaattgaattcggatctaaatcttgtctccaattatctttccacagtcgcattgcattttcgactcctacgagaggattgctatcctattactgcagatgtgttggggaaatttaaaggtggtgatgggaggttcatggggagcttatgtggggatgttgaagggcttttgagcttgaatgaagcttcattcatggcaatacaaggcgaaaaaatccttgaagaagctaagggttttag

SEQ ID NO: 7563 - DNA, 631 bp, Gossypium hirsutum
  unsure (1)..(631): unsure at all n locations; Clone ID: LIB3828-018-Q1-K6-G11
gattgccttagcagcacaactngnagtggnaaaatccatcaactcgatgtgaaatcagcctttctgaatggtttcttaaatgaagagatctatgttgaacaaccacaagggtttgagatagctggcagagagcatatggtctacaaactgaagaaggccctatatggcttaaaacaggctccaagggcctggtacagcagaatcgatggctacttgactaatttgggattcgatcgaagcaagagtgagccaacactgtatgtcaagaagcaagggacacaaacacagctcattgtatccctatatgttgatgacttgctggtgacaggaggagatcgagcagtgctggtcgatttcaagaccaagatgcaagaagtatttgaaatgtctgatctaagggaaatgtcttatttccttggaatggaggtgactcaagcacaaaatgggatatttctaagtcagagaaactttgccacaaagattctgaccaagttctccatgcaaaacagtaaagcaactaaaacacctgttgctgttggagaaaaactatcgagccaaggtgattttgagaaggtttgtgaaacaacctacagaagtctagttggttgtctgttatatttaactgccacta

SEQ ID NO: 7564 - DNA, 624 bp, Gossypium hirsutum
  Clone ID: LIB3828-018-Q1-K6-G12
gtggctctctgtttgcaggtgtcaggaggccgtgattggcgagctgagcggcggtggctaggtttttttgctgaaaattttgttctttgtgggctagggttggttagggtattgggctaaaaattgggctggcaaatttgggcttctacacctattactatgctccatttccgtcagacatggactttctcaagtgagtgtaaagttccagaagggtcagccttttaagccctttgatcaactaatgagtgtattgccactgccagaagtgctcatgcacttctgaaactgtatgcaaaacttttcaccgatgtcgattcccaaatcattgacttctatcctacagatttcgaaatcgacatggatggaaagcgccacgcatggcagggcatatgcaagcttccctttatcgatgaggaacggcttctatcagagacactaagacttgagaaggaattgatgaagaaacagaaaggaatgcagagaaaactgacaaactctctgtaccaagacatttaggatcaaagattttgagacttttgcctgataatcaaaagttgcatacagaagccgaactgatcaggggtgctgttagaggacatgtatcatcatcacttatcatgt

SEQ ID NO: 7565 - DNA, 564 bp, Gossypium hirsutum
  unsure (1)..(564): unsure at all n locations; Clone ID: LIB3828-018-Q1-K6-G7
ggnaaagtgagnagctatgttttaggagctttgtaagcatttcaaaaaatcaataaaaaatctccctcacggagaatttccagtaaaactattctcaggaggcttatagccaaaatctaggatttaggagattcaaagagtttctgaaaattttcagagatcttttctggaggcgttgatacggcttggtggtaagacccgagaggcggcagtaaattccagtagccatccgcttgaaaagagaaaatcagcagaaacaggagaatgattccaaccaaacaaatccagaagaacgatggaaggtgtagattgcaaatttttctatcttcctacggataatagtcgctaagcactcaagggcatcgcctcacagagaccaaaatcaaacaagcacgacaaactaacataaaaaaatatagcaaaacctaaaacttattgccagagacggtagacaatagcttgctagggtagcagactatattttttattttatttctttgattatccctaaatagaatccttacctaagtgaaataagatacgagaaaattatctgtttacttt

SEQ ID NO: 7566 - DNA, 639 bp, Gossypium hirsutum
  unsure (1)..(639): unsure at all n locations; Clone ID: LIB3828-018-Q1-K6-G8
ngacgactaacaaacaatagcgggacgggaggatctctcagggtttaggtgatggcttcaaagcggatattgaaggagctcaaggatctccagaaagatcctcctacctcttgcagcgctggccctgttgctgaagacatgtttcattggcaagcaactattatgggtcctccagatagcccgtatgccggtggggtgtttctagtcaccattcatttccctccggattatccatttaaaccacccaaggttgcattcaggacaaaggtatttcaccctaatattaacagcaacggtagcatttgccttgatattttaaaggaacagtggagccctgccctcaccatatccaaggtgttgctgtcaatctgctcactcctgacggatccaaatcctgatgaccctttggtgccggagattgcccacatgtacaaaacggataggaacaagtatgagacaaccgctcggagctggacccaaaaatatgctatgggttaaagtgctactacgtatgtaataggagggcttcattccctgtgactntggtctttaaattaattgtgtgatttgtctcctctttacatactggacctagccctccttaaaaacacaatattcttgttagttgtttgtatgaaa

SEQ ID NO: 7567 - DNA, 618 bp, Gossypium hirsutum
  Clone ID: LIB3828-018-Q1-K6-G9
ccccgcgtccgaaaaaaaggcaaatattcccataatcgctcttttctgcttcaccatttttgtttcgtcctcactcaatttcgtctatggggctgaaaattgagctacgtcgtcgtaggccatgtttactgtgacacttgccgtgttgagtttgagaccaaactcagcgaacccatcgctggagcagtagtgaaactggaatgcaggaatcgtacagacaatcaccttaccttccagagccaagaaatagtgactgacgaacgtggagactatcacattgtagtggaaggcgattatgaggaatcagactgcgacgtcgccttggtgaggagtcccaacccggattgcaatgatccctccgaaatgtggaggatatccagggtggttctcaccacacttgacggcgtcagcggtgaacttcggtttgccaacaatcttgggtttaagaagaaggttgctcttcctcagtgtactcaagttcttcaagagataggctattatgagcttagccaagaagctggagacattgccccttggtcagaactataatatgtattttcacttcaactttttctaaaagctcggcattagcctataataaaaattgaatcattatta

SEQ ID NO: 7568 - DNA, 644 bp, Gossypium hirsutum
  Clone ID: LIB3828-018-Q1-K6-H10
gtgttaggttgctccagaacgcccatgatgaccccaaaaactggacgctattcctcccattgatgcactcaaccctaccgagttgaatggacccggtgttggcattcacgaagatcatgttgtcccaaaagtgctgaaattggtactcttggttttggttttgaaggtggtcctgataaatgttgttcttctggatgttccggtaattgtaatcctggtggtttcgttctaccatttcctcaaattccagaaatcccaagaattccagaaatcccacaaatcccacagatcccacaaatcccacaaattccactaatcccacagatcccacaagtcccacagatcccacaagtcccaaaaatcccactaatgccaggacagtcgggatgtgagagtggagagtgttgccgtcagggttgtggtgggacttgtgctgagtgtggtcagcccaggtgcgcatcaggatgttgccaggctgaaactgtaaagagcaaaaggatagaagaggttatggacagtgaacccagtccaccaaagtagagagatgataccatattaagatgaaataacgaggaaagagttggttgtcgtctttattaatttttcaaaattaagagtaatgatgttgcagaagggtttgcttt

SEQ ID NO: 7569 - DNA, 335 bp, Gossypium hirsutum
  unsure (1)..(335): unsure at all n locations; Clone ID: LIB3828-018-Q1-K6-H11
ccccgcgtccggccagtttgtttgtcatctcatgtgtggattgatctcctggtggatcagatatagatggtgtggagacaagatggacagcactaaccttggtntctnnctgaacctgaaatcaaccatcataactcgggctcctctctctggtgttttgccgctttgtctaaagccctcaccaagtgttctctagaagggttagaagctattgctaaccatttgcttttttcaattatacattgttctaatgatggtcagtgtgaaacgtgtaatatcccgtactttgtacatttatgtatgggtcatatatgtttgaatagatgattggcttc

SEQ ID NO: 7570 - DNA, 634 bp, Gossypium hirsutum
  unsure (1)..(634): unsure at all n locations; Clone ID: LIB3828-018-Q1-K6-H12
cgcttttgagaatagnagcagcagtggcttgacgttcccctttgctcccttcttccagaagccaaaagtttgagttaagaacaatggcttttgctgcaatgaagccgacaaaacctggtttggaggagtcccaggagcagattcacaagatcaggatcactctctcctccaagaatgtgaaaaaccttgagaaagtttgtgctgatttggttcgtggtgccaaggataagagactgagggttaaggggccagtgagaatgcccaccaaggttcttcacatcacaacaaggaagtctccctgtggtgaaggaacaaacacatgggatagatttgagctccgtgttcacaagcgagttattgatcttttcagctcccctgatgtggtcaagcagatcacatctatcaccattgaacctggtgttgaggtggaggttactattgcagattcttaaatatgcctcacttatatgctttttggcaacctctagttttagtcaattagaagacttccatctgatatagccctcgatgtcctaaacaatcttttaagcttgagtggttggttacagggcttttgtagtttttgattttcccatgctagtattaaagttaaggttctattttgccctgtggc

SEQ ID NO: 7571 - DNA, 624 bp, Gossypium hirsutum
  Clone ID: LIB3828-018-Q1-K6-H7
gcctcatccgagttgccaccaccacctgttggttgggcttggtcactcaatcaattccgtaccttccgttggaacttgacttctaacgctgctaggcctaaccctcagggctcctacaaatatggttccattaacattacccgcaccatcaagcttgccaacactgcacaaagagtagatggcaagctccgatatgctcttaatggagcctcctatgtcgaaccaaccactccactaaaacttgcagaatactacggcgtagccgacaaggttttcaagtatgataccattcccgatgagccaccaagtgacaacactaaggtaactttggcacctattgtcctcaacatgacacacagaaactttgtggaaatcatcttcgagaatcccgagaccgccattcagtcttaccacttgtctggctactcattctttgccgtgggcatggacattgggaaatggagccctgagaagaggatgaactacaatcttgttgacgctgtgagcagacacaccatacaggtattgccccaactgctggtcaggaatgctattgacatttcgaaactgcgggatgtggaacctgaggtcggagatatgggacaagcattacctttgggcaaa

SEQ ID NO: 7572 - DNA, 606 bp, Gossypium hirsutum
  unsure (1)..(606): unsure at all n locations; Clone ID: LIB3828-018-Q1-K6-H8
gnaaactcaagnaaacatgggnnacaagttctggttataacagtacttcagttctgcaactcatcaccattgtttcttgtctcgtggtgctctcctgttcaggatccgtcagtgcttacaagaactacacagtcggtggttcccttggttggtttgatgccctcgaaaagcctgatgttaattaccagaaatgggctgattccaagaacttcagcttgggagatttcctcatcttcaacacggataacaaccattcagtaatccaaacatacaatttcaccacatacaagttctgcgattacgacgacgctcttcaaaacgacacgatcgaatggtcagctgcagatccttcttccacggcgcctcattcaatctcagtagcggttcctctactgaaagaagggatgaactatttcttttccagtgactacgatggggagcaatgcaacaatggtcagcatttcaagataaacgtcacccacggccaagggctgccgaagagcttagatcagtcggatgatgcgccggcgcccaacagccctgattacaggggcgatgactccgcccctgaaaccatcgtgcctgccaacttcaatcaccccattg

SEQ ID NO: 7573 - DNA, 601 bp, Gossypium hirsutum
  unsure (1)..(601): unsure at all n locations; Clone ID: LIB3828-018-Q1-K6-H9
atcgagcaaggcaatgggcaaatttgcctccggnattacttttagattaatacaaangtggaacaaagaaatatgttggccaggaaggagagatgtggttgcttgtgcttccgtttgtaagtcatggagggaaattactaaagaaattgttaaaacaccggagcaatgtggcttcttcactttccccatatctttaaagcagcctggaccaagggatgcccccattcaatgctttattaggagggaaagagaaacttcaacatatcgattgcatctgggtctcactcctgctttgtctggtgatttgagtaaacagttgttggtagcgaagagagttagaagggctacctgcactgattttatgatatatttaaagggggatgatttctcaaaatcaagcaacgattatattggaaaacttaggtctaatttcctgggatccaagttcaacattttcgagagccaacctcaatatgattctactgcacaatccagtcctcgatcacgttggaaaacttacttgaagtcggtgcctccgaaggtccctaggattagcttgaacactgccagtatatcttatgagctcaatgttcttcgcacc

SEQ ID NO: 7574 - DNA, 600 bp, Gossypium hirsutum
  Clone ID: LIB3828-018-Q1-N6-A1
gcggcccgcccttttttttttttttttttttttttttgcaacgcaaaaattcctcggaaattgaactaattaatttttacaaatatagattctttgtttctagttctaagtttctaaaacagaaaggatgtacattttactcccaaaacagaaagaatgtacttgcatcaattcaaaaccacggatgccaagttggatccatcatgcataaatttctaggtagtaaggcggcatcgactaactcagtaacacccctctgcaccgactggggggggtccattacattctcctcctcttcaaaaaagcactggggtgctattccgctaatccggccgataacattctccacattggtagtaatcttgtgcttgaagtctgtagggttcatactaccccctccggcagcaggggcaaggggcatcccaagtggtcttctccaagaccatgaaagcaactcatcacggaaaaacatggctagctgataccacaaatgctgagtttgtttgggcgagacaacagcctgcgctgcagcacacattgcagatacaataaggccttccacaccaaaatgagagaagaatgcttgcatgttccttgtca

SEQ ID NO: 7575 - DNA, 587 bp, Gossypium hirsutum
  Clone ID: LIB3828-018-Q1-N6-A10
actccttacaagctgagaatgcataatataaccatcaaatatagacaatgcttgagattgtttgtgtctaccataaatgaataaacagagcttgagtttagcttcaacccttcaatgccttgtcaaagacaaggcatctaatgaacaaaaaatggttaaagtttactagaataaataatatatatatctaatttatgtagaaacctcttaaaccatcactgttattttgaatgtagttgaatatgataaacatggctgcacataaactgatgctggaatttcgctggtcatcacttggatacatttgcagcagaagcatcaccattttgttgctgggtctgtgactggttatggtgaccctgctgaggttgttggtgttgttgctgcatctgataaatgtttcgctgctgctgttgctgaggctgtaattggagcatttgatgatcaatcgaaagttgctgagccatacagttcgaaagatgaacctctccactgaactctgcggcagtgagcttcagtcgctggacttcagcagctaatgcttcatttagtgcatctttcagttgggcctgttgctccatggcctg

SEQ ID NO: 7576 - DNA, 428 bp, Gossypium hirsutum
  unsure (1)..(428): unsure at all n locations; Clone ID: LIB3828-018-Q1-N6-A11
aatggaaaattttttttggggggaagaaaaaaaaaaaggggtttgggtgggggaaaaatttaggggggggggaaaaaattgagaaaaaaaaaaaaaaattatttgggggnaaaaaaaaagaaaaaaaacggggggaaaaaagggaaaaaaaaaaaaagggggaaaaggggggaagggaaaaagaaaaaaaaatgaaaaaaaggaaagggggggattggggaaaagggaaaggggaaaaaaggtgggaggggggaaaaaaaagggggggaaaaaaaaaaaaaaaaaaaaggggggggggtttgnggggggggggggggggnggggggtttnggggggggnggggggggggggaaagggttntttttgggggggggntttnnngggggggggggnnngggggtnngggggtgnnggggggaaaaggtgtt

SEQ ID NO: 7577 - DNA, 483 bp, Gossypium hirsutum
  Clone ID: LIB3828-018-Q1-N6-A2
aaaaaataaataacaacagtccattattacaaggtccaaattacaaaacaggctacaggcccaataccaaagttacaagcctggattcaaaattcactacctaattttgtaagcctacgcataagcccaaaataaggacccaaactatagcctaaaatgtttaacatttttcggaggaaccctagggttcccctctctagcaccgcactgctcgccacttggtgtcagctctttcaacacctgagacaggcgccccgtccaattgcctgcacctccaaagacctgaaacccggggtcatgtcggcggagtccctacgccgtcgtcgaagtcgaatccaaaagggggaggggccttttctgtcgttttttttcttggggggctaagaaggcatggccttcaaggttgttttaagagagttaaaaacccgggttcctgcggcttcaaccaccgttcacagtggaagctacggccccacgcgtccg

SEQ ID NO: 7578 - DNA, 572 bp, Gossypium hirsutum
  unsure (1)..(572): unsure at all n locations; Clone ID: LIB3828-018-Q1-N6-A3
aaaaggaaattttgataaaattccaacacaaagcaccacaaacactaacaaagttttagcacnacaagaaaaaaagctcaatattttacaataacaacaatgtgttaagatatgccatattggttcattgttcaacagcaatacagcattcatgttatgtaaaatatcctagcctgcttcgacacgatctcggcatcccttgaatcaagaatcggcaggatgcttgcttgtttgaatcattccgtatcaacgagatcccttgtacaaaccaagcaatggtttctctctctcttcaactctcttctttgcagcttcccttgctttgagtgcagccgcctcttctttagatacagccttgggtttttcatcttgtctttttctcttaacagcaagtgaggatgaagcacctttaacagatctcatgggatttaaagtagcggaaatgacaggccctggtgcggtcttgttttgacttttagcgacacttttgctatctgcaactggtcccgtctctgaagttggaaatggctntttcaaaataggatctcttgatttagtatttgatgaagctt

SEQ ID NO: 7579 - DNA, 594 bp, Gossypium hirsutum
  Clone ID: LIB3828-018-Q1-N6-A4
cccagcagcttcgatcttttgcggtgtatccatttcccatgattctttctccttcacaaacgagaccatctcaacctcataataaacagttgaatttgcaggaactacagccaactcttgatgcgattcggatgaaccgaaagcatattctggttgaatggtgataagtgcgttttctcctttcttcatggtctttacagctttatcaagaccatcaattacttgttcttcatcaatcttgaactcaaacggctcctcatcgtaacccttctttatgaagatcgtcccatccggtagctttcctattaatttcacttgaaccactgttccatcatttggtcgttcgtaaccctctccctctttcacaatctttttcgagacctttttgtcttttgtgatatcagaaacactcttccaagaaaccaactcgagagttatatggagggtagcatttggaggaacagcacattcaccgcctgtagcaggcctgccatcctcaccaaatccatattgtggcttcacagtcaacaggactttctcccctttcttcattgttttcactgccttcgcagggccgggcagaatagccatctc

SEQ ID NO: 7580 - DNA, 346 bp, Gossypium hirsutum
  Clone ID: LIB3828-018-Q1-N6-A6
gttgaaggttttagcagaaatttatatagcaaagaaaatatatatattagcatgtacatgcattaattacatatggctacaaaacaagattcaaggaactttaggatattgtaaatcaaatattgttttgagctatttattcttcataattactctttttatccaacaggattttatagcaagcccttctgcaacatcattacttcttattttgtataattaatacgacgacaaccaactcttcctcattatttcatcttaatatggtatcatctccctactttggtggactgggttcactgtccataacctcttctatccctttgctctttacagtttcagcctg

SEQ ID NO: 7581 - DNA, 547 bp, Gossypium hirsutum
  Clone ID: LIB3828-018-Q1-N6-A7
gcaatactcaccttacattaaacagtccatcaagatttatttttggggttccagatggcttggaagcaagattttttgttcttatttccataggcattgaaatttccgccggttttggggtcggtgagaacttcgccggggttgccaggggcagcaccacgaccgaaaatgcctttgcaaacggtggctgggccgagttctttagccttgtttgaatggtagagagcatcgttcattgggttggtgattgcatcaaccaatgcacccgcgaaggcaacaaccatagcatctgctgccatgttgccgcttggtggtttaaggactggtccctttggacccatgtcagccgggaagaaaggccatccgcattctccagggcactccggttctgggttaccgactatgatgtatggtcgcggatggggatcctcagtaagtaaatgatctgcacattgcccgttgcaaattccttgaatagagacatcccttgcagcaacgatgaccggtaagagttcagtatcgcccttaaagacatgctcgataagct

SEQ ID NO: 7582 - DNA, 581 bp, Gossypium hirsutum
  Clone ID: LIB3828-018-Q1-N6-A8
acccccataaatgagtatattatttaacttttaataaaagctactccatgcatctcatacataatcatacatgggtaagcaactagatattaatgatatagcaagtacttatactgaatattaccctcttaacagtaagcactgcattttttcttacaatccatggtgcagccaccgccaccgccaccctcaccgtaaccttttcccgaccgactaaaataagtgaagcacttagcagggcaggttagcttcttggtaaaacaaggacctttttctttgcaaacaaccgtagttctaataacaccaccttcttgagtaccctccggtaggacctccgaagccagctccataaacaccgcctacgatcccatgtccccaccctttttcaaaccctggcaatccaaacccatgccctggaccgaagaagccgcccatcccaccagtgtttgcaccactacctttgctgttttgggtgcctggattgccgctgcctttgttgcccttttactcatagataaagcttcaaatgactctggcctatctgctgcagtgagtgaagctgtaagtatcagaacagccaa

SEQ ID NO: 7583 - DNA, 321 bp, Gossypium hirsutum
  Clone ID: LIB3828-018-Q1-N6-B1
gggaccaaacgacttctcattctccattgctaagcaaaaagactagtgttacagtcaaaaaaaaaaaaggaaagccccgccaacaatatcaacattaaattatcatttacatcaaatatatataattttgcccttgttaaagacacaaaagtagaaaaagaattgtgaatcctatgcctgtgaccttccaaaaacaacagctagttccaaaatcagactttaagggagtttaacatggtcgaagagagaattcctcacctgaatatgcaccaaatgctttcactggctctttggtttttgaatcttgacataagggaaaac

SEQ ID NO: 7584 - DNA, 613 bp, Gossypium hirsutum
  Clone ID: LIB3828-018-Q1-N6-B10
aaaaatatcgtcataccatattacctgagattaaaagattaagtgggaaccatgatcaggtctaacaacaactaaaagagtccacatatgcaaaaaattacattcattcctaccaaccttatttcaacattttcactacaaacacagtaatgaactgtagatttgcaagtttgcttgccggggggctcttcatcgtcaacccaatttccccatgggattcaggttcacgattccattgcagcaaccgatttgaacccgagaacgctgttttataaaatttcatcaggcattgtggacaacagcagcccttgaacaaactcgcatctttttgccttctcttcctgatcctttaccgaaaggggagacgacttcacatttctttctgacttattcacgtccgaacttttcttagttgttcttgtttcacgagaaaagttaggctggacactaacaaagtcatcaaccatgggtaaaataaatgaagacaacaacggatcaggtgctgaattggaagacactgtacaagaagaacccccgaagaaggactgtagatttccttctcgcagctctttcctcagaagagaagcgtggaatgagatccacctttacgtga

SEQ ID NO: 7585 - DNA, 497 bp, Gossypium hirsutum
  Clone ID: LIB3828-018-Q1-N6-B11
aaatcgaaaaaacaataggtaaatgaccaaaataaaaagatacaatttcaccccaagaaaaaacacaaatggggggacactgctacgctttcgagctagccgaatacagccaactgaacccaaagtctgaagcccaaaacaagattctgcataatgactacaaaccggcgcccacaataggcaaacgaactgcaccttcgtttcatgttatgccctacggggtattctattctcgttcgcaacatcaaaaaacaaataccgtagacgaaataaagatcatttcacctgttgtaacgggtaacccaaagtaacaaaattgccaaaagagaacaataataataataacccttgagcaataataattacaaacatttttgttttccactttcctaaaaagcattatgaccaaaattttagcctatcaggtcaaaattagaaaccaaaaccattccccacaaaatcctttttttcaccactggtaaaaaatcaaccaactg

SEQ ID NO: 7586 - DNA, 591 bp, Gossypium hirsutum
  Clone ID: LIB3828-018-Q1-N6-B12
gttgaaggttttagcagaaatttatatagcaaagaaaatatatatattagcatgtacatgcattaattacatatggctacaaaacaagattcaaggaactttaggatattgtaaatcaaatattgttttgagctatttattcttcataattactctttttatccaacaggattttatagcaagcccttctgcaacatcattacttcttattttgtataattaatacgacgacaaccaactcttcctcattatttcatcttaatatggtatcatctccctactttggtggactgggttcactgtccataacctcttctatccctttgctctttacagtttcagcctggcaacatcctgatgcgcacctgggctgaccacactcagcacaagtcccaccgcaaccctgacggcaacactccccactctcacatcccgactgtcctggcattagtgggatttgtgggacttgtgggatctgtgggattagtggaatttgtgggatttgtgggatctgtgggatctgtggaattcttgggatttctggaatttgaggaaatggtagaacgaaaccaccaggattacaattaccgg

SEQ ID NO: 7587 - DNA, 591 bp, Gossypium hirsutum
  unsure (1)..(591): unsure at all n locations; Clone ID: LIB3828-018-Q1-N6-B2
gacagtctccgaaccacttcatatcaatgttcactaaccaccaataccaaactcacaaaatggtggagtgcaagaaaatttccagttaggtggaacaatacccaaaacaaaaccagaatacataagaagacattactcgttttccaatgaccaaaataaaagtaagaaaaatacaactttcaggttcacctcaaataaatggaaataaaagattagatccccttgttttctgatctaagaagacccatctgttccgtgagcttatccatatgctgagatttgtcccatccatcgtccatcgcctgcccttcattttccttgcttttaccctccattgaggttgactcaatttcctcacatactggacttggaaaaaggtcatgaaaaaaaggagagttaaccagtaaggcatctatgtcaggatcagaaccaatgtcatcaagttctatggataacaaaccatttacagccaatgtatcgggatcaatcaatccatcattccccatttcagtaggaatatcaacaatgctttctgggaccatttccgatatttgactaagatcaggcataattatantctgtctgtgtaac

SEQ ID NO: 7588 - DNA, 274 bp, Gossypium hirsutum
  Clone ID: LIB3828-018-Q1-N6-B3
aacaaaaaaaatcattttttttagcatgcccatgccttaattacatatgggtccaaaacaagattcaaggaactttaggatattgcaaatcgaattttggtttgagccatttattcttaaaaattaccctttttggccaagagggttttatagcaaacccttctgcaacaacattactttttatttgggttaattaaaaagacgacaaccaactcttcctgggtatttcatcttaataggggatcatctctctactttgggggactgggttcac

SEQ ID NO: 7589 - DNA, 556 bp, Gossypium hirsutum
  unsure (1)..(556): unsure at all n locations; Clone ID: LIB3828-018-Q1-N6-B4
gaggcgaataaagatgacatagcaattgatttggtgtgccaattgttctgaaaaatttgttnttaaatggaaaaaaacaaagacagatcaactgtttgaaatgatgaggtcatacagcacaactataatcactgacatcctaaaaccaattagggaattaccggtaacacaatccagtcaccggtaagaaaatagcctcccaaaatttagtaaccatttatctgaggccttggagttgaacccatcagccgaaaaaaggcatttgaggacggccaggaagacccctttgccccgcatatcgatcatctgttttctgatctgaaaatgatttggaaaaggcttgagcaagctccaaagctgatgctgcttttccatagcgaacaccagcagcttcaggagagactggtttaggctgctccgcaggcttacgccaggtctcaggtgatggctgcctctcctgccgctgctgcctctcaatttccttgtcattccgccagttttcattaggccggttcctcctctgcgtatcaactctttcattgtaaacaccatggtt

SEQ ID NO: 7590 - DNA, 595 bp, Gossypium hirsutum
  Clone ID: LIB3828-018-Q1-N6-B5
gactaaagttggatgctcccaaaatatgaaattttataggtcaaaatttttatttatcttcaaacagaacaaaggaaaaaaagaaataacaaagggtaatactaaaaataacaaaatttcagggaagctttgtgctaaagagaccattagatcccgggatttgtatgggacaattgacaggaaagggaggttgcaaatatggaatatggctcggcactgccaatggcggctgtccaccggcgatgaaaggttgaggtacacaaaactgcaatgcttggtctggtgcacttccttggtgtttcggaaattggacgtgatgtggagtcaatggaggacgtgcaggttctggagagatagctgctgcatttggaaccaagtcatgagaaacaggcacacaaatcagttgtcccatatgcccaaacataactgcttgtgaatttgggttcaaatatgcaggtgcagcctgaacaggatgatattgactagcatatcgaactggctgggttctattccccatgtgcccaacaatagcttgcgaaaattgagaaccactgacaccagttgcagccgataagttgccatatgagacaaactt

SEQ ID NO: 7591 - DNA, 560 bp, Gossypium hirsutum
  Clone ID: LIB3828-018-Q1-N6-B6
ggtccaaaacattttatttcattaaatccatttggaactcaagcttttctcaccctctctctctccccatattatgtatttataccagaattggatacagatttataagcttatttaaattaactgctgaaaggtggaggccttggcatgccttgcacgatgccgcaagtcaatacaccttccggtaagttgtactcatccttgagggatcggttaggggaaataacactagcataaagctgttgcccaaggtaatgcctgtcccatatctccgacctcaggttccacatcccgcagttgtcgaatgtcaataggattgctgaccaggagttggggaatacctgtatggtctgtctgctcacggcgtcaagaagattgtagttcatcctcttctcggggctccatttcccaacgtccatgcccacagcaaagaatgagtagccagacaagtggtaggattgaatggcggtctcgtgattctcgaagatgatttccacaaagtttctgtgtgtcatgttgaggacaataggtgccaaagttaccttagtgttgtcacttgg

SEQ ID NO: 7592 - DNA, 593 bp, Gossypium hirsutum
  Clone ID: LIB3828-018-Q1-N6-B7
aagttgaaatctgattttccattgatatacaaagagtatatacaagttacattttgtgatcaatgaaaaacccttcaacataaatctctcaaacctccaatgagcttctgtttttttttgctcaccagggttacctcttcaaactacatagaaaacacctacaatttccagcaaagctattgtcttatacgtctatatcacaaaatttggcatccatctggttctgaaccgctcttactgcagcaaccctagctgccgttgcagctctatttgcggccaaaacggccttttttacttgatcatcgacccggcgaagatgaacagcgttcacagctgtttttctagcagcctcaactgctcgaatgactgcatcggttagttggggtaaaggtgttttaagggtgccggaatcccactcgccgcatctggtgtcaccactccggaaagtatacattccatacccttgtttacgaccttcgtgccatgatccttcgtaacagtgcccgttagcgaagtgataaacgccaaatccatgcattttgtctccaaaatactctccggcatatttatctccattcctgaaatggtagtag

SEQ ID NO: 7593 - DNA, 281 bp, Gossypium hirsutum
  Clone ID: LIB3828-018-Q1-N6-B8
attacaagaatctacactggacccctagtaattttatacaaaccgataccaaaaatttttacaagaaattatggagtttgaacatgccctcgaaagtaaaaattaaaatatagaggatttagtggaattacattccctcgttttctaatttaaagctgaagagagtgatcacggaagatcggtgcctgaggtgtcagcaagaagtggaggatggtaatcatgttttccgattttgccctgggtttttaaccatggaacgaaagagcaatgtagactttttt

SEQ ID NO: 7594 - DNA, 453 bp, Gossypium hirsutum
  Clone ID: LIB3828-018-Q1-N6-B9
ccaaaaaaaaaaagaacacaagtgctttatagtcgaaattatgagtacaaaaaatagtttttaaataaaatttcgtttattgagatgccaggttttcccagccagcgatagtcaattgaaaccaaacgggattctagcagggggaagaatatgaaactccacacattttagccatttttgcaatctcaactctgtcaaaaacacgttggacatcttctatcttcatgtactcacaatagcatggcgcctgttccttcattttttggcaacaaccagatgatggagggggcttcttatacgcgttcaagcatgagctatactccaaggggttatcacatttcggcgctggtgctgcctttgcacccgaaaataacaccaccactagagtcaccacgcacaaaacaataagggaaaatctcttcatgtttctttaaataaaaattttgctagctg

SEQ ID NO: 7595 - DNA, 197 bp, Gossypium hirsutum
  unsure (1)..(197): unsure at all n locations; Clone ID: LIB3828-018-Q1-N6-C1
agaattaaaacatggcagcaatgaaattgttgaaagcttgcggatgacttgaatacaaacaaatggtccaaaatattttatttcattaanatacatttggaactcaagctttctcaccctctctctccccatacaccagaattggatacagatttataagcttatntaaattaactgctgaaaggtggaggccttgg

SEQ ID NO: 7596 - DNA, 496 bp, Gossypium hirsutum
  Clone ID: LIB3828-018-Q1-N6-C10
aaacaaccattctcattcatatcacagaccacgattaaaagacattacttggatacaacaaactggtttttagtgaagacaggcaaagaacatagaagatgaccctttgaagagtttcaaaagagctcacagaatatccaaaagtccagatgaaaagtcagagcaacaaactacatttttatatatagagaagtttgatacaattgaaccggcactcgaaattgacccttcattcgaatgcccactggttctcccgacgaacctttttttccttttccggggggaagtcattcttgatattgaaaggcttcctgatctcttctgggggctttcccttgatcatgtcagcaacagtttggcaagggagatccaacaaacccttgatgttcaaatagttcgctgccaaaatgaaaacaaagagaggggcttgatcgaccttgacaaagtcagcgtcccaactcttgagctcgtcatcggcggatcgatcgtctgtctt

SEQ ID NO: 7597 - DNA, 595 bp, Gossypium hirsutum
  Clone ID: LIB3828-018-Q1-N6-C11
cgagcaaatacataacattttcaatatttataattcgttcaacacacaatttgcaaacctgggattaaaatgttttacgtgtatatacagacactatattacaacaaaatatcctttgtggttttcataaaataaaatcaagaatctgccactgattcttgctttccaccatcacaggcatgaagtatggtgcaaacatcggtagtttccaagaagtgctcggcatttgcgaggatcaatggcccatactcgaaaaccaaccgcttacacttttgcacatagttctgcactgaattacatcctttcaaaagaagctcgagtatctccaactttgtatcgggatcttgcaacttcattagtacttcagaaatagcacggtggcacatgccacaactatcttcgcggaattgtgaagatataagtgcaactttttgacaaaggttgaactttgtacagaaatcttgaggttgtactgaagatatttccaagaagaagagaggtgcatagtagtccacaagtgtaatgcactggggctcaaaagctcgtaaacgggagcaacttttgtgaagaatctcaattatctcagtctgcgttt

SEQ ID NO: 7598 - DNA, 594 bp, Gossypium hirsutum
  Clone ID: LIB3828-018-Q1-N6-C12
gatcatataatcatctaacttggttaactattttgaaacatcacaagagagaaggttgccggcattagtttctttcagatctacatgaccatggtaatatggtatgcattaatctttgcactcactacatatgataaaacgtacccaaacaaagttataccaaggcgaaaaataaagcatcactaacacaagggtaggttacttcttagcaaaagtgatggccatgggatattgaggagcaattttgaaaccctgaaggttctgtattgctgtagaagactgctcttcatcttcgtactctacaaatgcaatacctggctttgcttcaaccgttctaacttccctgaacccagggtactgttcaaaaagcagctgcagcatcatgcttgttgtctcgtgaggcaaattctgtatgaacagaatattgtttggtgcggcctgctcagcattcaggtttccatgatggagaggagcctttggaccaccattattttgagaacctgtgccattcggcattgcagattgctgtgcttcctctgcacgtcgcttcctttcagctttttcttcttgcttcttcttcttttctctgggaac

SEQ ID NO: 7599 - DNA, 589 bp, Gossypium hirsutum
  Clone ID: LIB3828-018-Q1-N6-C2
gaaaatcaatgcaatccaaataatattttccaacagtggttaatttttttttacagacccatatcttttcttttctcctgtggtctacaaaaaaaggcaataaagctggaacaatgcctctttgttccagttgctttgagacagttttttaagggggaaaaaaaaaaactagaaagcttatctaaggtcattatttgttaccataattttcttcaattattacgggaattcctaatcttcagcttggggagatggagcagcatctgaaactgaaccgtcaacagacaacctcgagacttcactggcaaggtcactgtcatcaggcccttctccttgctgctgtaggcaaaagtacatgatgctggcagtcaatgttagaatcattttctggtttacctctatgacatcctcgggtaataagaaaatggagcatccaatctttcgtgcaacactgattatataggttgcattcgacttcttgtcttcatcggtttctcccttggtaacgagattccagtcaaccacccttggctccactgcagtaagaagctcgaggaagaatacaccatttgaaaggcttttatccttg

SEQ ID NO: 7600 - DNA, 590 bp, Gossypium hirsutum
  unsure (1)..(590): unsure at all n locations; Clone ID: LIB3828-018-Q1-N6-C3
agtaacaaaacttaaagtatttttattttaatttattatnggaaacagagtattgggatccatcaggtgtgagtacagtaccatgcaattaatagttcttgttatgatcatgaatctagtgcaacattaaaacaaattgcttgcaaattcatcaatggggattccttctatgcgagaataagtggattttttggctaaatttctcaactgtgataagcttctgcccaattgcaatgctaccttcatttcaaacaacgctccatcttctcttttcttcacatcactttcatccaaagtcgattcaatcgattcctgcatatatttaaagaagccggcgttgttcctatacatctcaaacaccataccaacttggccgccatgctcgaaagtgttaacagctgaagctaaagcccccgtaatggttgccactgttgctgcccaaggtccgatattggaagaccccatgaaagtagatgccaaagctgcaattccagttagtaatgtccctgatgtagctaaaactttgtttatcttcaatgctttgttgcctaatctctcataatcttgactgtcttttctcttaatcacct

SEQ ID NO: 7601 - DNA, 558 bp, Gossypium hirsutum
  Clone ID: LIB3828-018-Q1-N6-C4
aatggaataaactattatgagtatgcctttcgtacagaatggtcaagtaattaatcaacccagtcgtacaaatgatcccactttaccacattccctgattgatcatgtgagaaccgtccaccagatttctctaaaactctcatctccagtggtaaggactgaacattaattatatatactagttatctgtatacttctcaaccttatagtaaaattgaaataatctacaggtagaaaaagaagtttgtcgtaatgataaatcatcacgaaatgcaacaagcgttgggattttcatcgctaaaaagctgaggagcaggcggcatttgctcgataacgtaaaggggctggtaatagtaaatcattctcttcatggtttcctcctcgttaccatgattgccactattttcctctgcttctgcagatccttctttcttcccttcttctttgttttcaccttcttcaggggacttttcttcttttttctctgcgttttcttcaagtttggcttcttcggtcggcttctcttcgccctctttctttttttcttgtttctctggc

SEQ ID NO: 7602 - DNA, 596 bp, Gossypium hirsutum
  Clone ID: LIB3828-018-Q1-N6-C5
cttgaaagttgtcatctggattgcaaacaagggcataactgcaacataagttgtttcaacactgcatggtttctttgttaggctacaaagttggtgtattttacacaaactgatgcaggtattcatcaacactagtatatttcagttcaggataaagctcagatgcctccacaccgaaccaagcttctataccgaaattcgaagcctctcccttcacaaacataggatgggcgaatgacaaaaagaaattccagggaacaggtgactcttgaatgatgttaagaagctgttcctcaggaacatagctcttttcaagggtcttgccaattttcctctcccatagggagactacttcattgaaagacaaaacattggaagggggtcttatataaagaatcttgttcaaggttcttggatcttcagccgctttaatggtgtaagttgctatgtcatcttcctggacaaaaataccttttggatttccatctccaagtatgactaccttatccctaggaggaacagtggcattttcctgcattaaatttggcaagaaatgccctgcaaaggcattggatgagatatacgtatatggtatc

SEQ ID NO: 7603 - DNA, 577 bp, Gossypium hirsutum
  Clone ID: LIB3828-018-Q1-N6-C6
agtaaaatattgatttatcaaataaacttaattgaaactgattaaattcgatccaattggatcgaatggataggcattgagtaatgattgtttttaggatgccaaggagagtggaaaaacattcaagaaggtaagccggttgttcaactttgttggcttcgcaataaagggacccttccattaatgggggtgcttaggccacaatcatcatcaatcgtttcttcttcttcttttgcttttccccataatacgcaatacagtcccgtacataaaattaggcttccaatcacacttccaagaaatattgcttcgccaaggaatatggcactcataacaactgcaatggcaattgaagttggcttgaaacttgcaacaaatacaggccccttcaagtgtatgccccatatgtgtacaacgcataaaaaggagaacccaaaaagtcccgagtataagacagcaacagcagctaaatcagaacttagtctccaggaacttaagtttggttcagcaaggaagcatattggtagagagataatggtcccgaacaagttgtaaaagaaattacagtaacctcttc

SEQ ID NO: 7604 - DNA, 607 bp, Gossypium hirsutum
  Clone ID: LIB3828-018-Q1-N6-C7
aaaaaaagaaacgaaatgctaataacgtaagaaaattacaaagtgaactatttgttcgaatattaagacataatgatcagttcttcacaagtgtaaatgaagaaaagttgatatttcttctgccctcgctaggaatctaatcccaactgttcagttttttatgttctacatttcatatgattgggatagttggcattgtattatttagaaagtgatcaaaacttcaacagcaaatcacatatacctataataatgactggcaattacacagttttcgtcctccttattacctcttaagcagttactgaagagctcatctcattgagaacgttgtagtacgtaaagaaatccgaggtgcttcggaagccaggaatgaaatctgaaaagaatctcaaaaccgcggccagatgttgcgagtcattggaggtaaatgctgcttcaagaaataatgacggccggatagtagtgaccttatgcttccgtgcataacgtaaagcttcaagataatatccatcttgcactaataacaacacataatcatgattcaaagaaagctgtcttagcatatccgaacccagcttcctaatttgcaaactttgacgacctg

SEQ ID NO: 7605 - DNA, 573 bp, Gossypium hirsutum
  Clone ID: LIB3828-018-Q1-N6-C8
acccccataaatgatgtatattatttaacttttaataaaagctactccatgcatctcatacataatcatacatggttaagcaactagatattaatgatatagcaagtacttatactgtatattaccctcttaacagtaagcactgcattttttcttacaatccatggtgcagccaccgccaccgccaccctcaccgtaaccttttcccgaccgactaaaataggtgaagcacttagcagggcaggttagcttcttgttaaaacaaggacctttttctttgcaaacaaccgtagttctaataacaccaccttttgagtaccctccggtaggacctccgaagccagctccatagccaccgcctacgatcccatgtccccaccctttttcaaaccctggcaatccaaacccaggccctggaccgaagaagccgcccatcccaccagtgtttccaccactacctttgttgttttggttgcctggtttgccgctgcctttgttgcccttttcctcagatgataaagcttcaaatgagtctggcctagctgctgcagttagtgaagctgtaagtagcag

SEQ ID NO: 7606 - DNA, 487 bp, Gossypium hirsutum
  Clone ID: LIB3828-018-Q1-N6-C9
atccaaaataatcatatgatgattgtagcaacccaaatttacccgggccggtacattaacaaataaaaacaaaaaaataaaaataaaatagcttttgtacagtccagtttacaaacccaatactatagcccaaaatccattaacccgtaacctagctaaactacccaaaacgcagtacctagttacaacccaattagcctaaacttttggcccaaaatctattaacccgttacacccaaacccaaacaagacccaacctaaataaggcccaatgcctaaacagaatctggaaaccctagggtttctagaagcttcgcgccgtaagcaccccatcagtcacaccttttcaacctcgatcgttccatttaccctcatcgacgccgtgattccaggtctcaaatctggccgtagttgaagtcgaataaaacgcatatcagcgccagcaccgtcatcatcagggcctaatcattttggcccactgatttcc

SEQ ID NO: 7607 - DNA, 595 bp, Gossypium hirsutum
  Clone ID: LIB3828-018-Q1-N6-D1
accaaattatatttattcacttattctcataatgaaagtacatgacatagttaataatgagatcacagacaactagtgcttcttacatgaagggaacaccaatttatttagtttaatttaattaagtatgcaacatacacaaatcttcaagcttccatggagttgtggggtttttctcaattcaagtggtgagaggttcttctttggtatcatattggatgttgtagtaattagcaccagtgaaagtgttaccagtgacatcagttgtgacaacggtcccattataaagagtgtctttttgagtgaatacgaagggaacatcacacgtgccatgcgtcatcgatagatacaccgtcaccttagtcatcggtggcacatgagcttggtggttaacttccatcacggtggtcgttgtctttgtctctccccactcgattcctgcttcgagtttggcagatatttcgacacccgctttaccgattaatggaacccctacttcgaaggttgctttggtttcaaggcctaacgtaaaatgagctagccaagtactggtactggtctctgtataagaaagtttacatcgagtgtgttggct

SEQ ID NO: 7608 - DNA, 617 bp, Gossypium hirsutum
  Clone ID: LIB3828-018-Q1-N6-D10
aaataaaaatccaaatattaacagtccatcatcaaagtccaaagtccaaaatcattacaatggcctatagctcaaacctactacaagcccaaatggcccaaaacatgttagaaataaaaaccctaaggtttctacttctttgcgtcgcaaccgaacagcagccttcagcctcatggcaccacagccacgcccgcgcctctgtacgccaacatacagtctcgtacatgcgtcacgcataccccatacctgcaagaagagacaaacgcaacagcaaatacaaaatggaaaaaatttgtatttttctttattgtttcatcggctataaagcccaagacagaaagaatgtattttttttacacaatagatagcaaccaaatagaaagaaaacaaaaaaggtgatttttgcttaactttcttgaagttttttttttgcgtttcctgggttcattttccttcgatctattcatcattgtaatagaaaacaaagaaaaagtgaaagaggagccttaccttacgaataggccacatatttcttctttcgctttgttgaaatcgaagctgaaagggatctcaaggctgaaaagccatccttccaaggttcgaacataccggtcgcc

SEQ ID NO: 7609 - DNA, 603 bp, Gossypium hirsutum
  Clone ID: LIB3828-018-Q1-N6-D11
aaaaacaaaaggattaaattccaaatttatgaaaagtgtaagtaattatgacatattttaaaagttttgtattttagctgctattctcttagagagacaataagcagtagacataacagtaatcataggattaacaccaatagcagtaggcaacacacttgcatcacaaacgtacaatccttcagcttcccaactctccccattttcatcaacacccccatctttttcatttctccccatcttacaactccccatttggtgcgctgtggtgtgaaccatccatttgtcgccccagaacaacggtccgcctaccgagaaaaccgtgtccaaaaactcctccagctcctctttgctcacccctttgcacttcaacttttgcccatcgctacgatgagtcccgacctcgaccgcaccggccgcaaccaaaaccctcaacgaccgtctcaaccccgctcggagattctctcggtcggtcgcatcgaacttgtacgttacccgtccccccatatgaacttcaccggaccctcggtctttcacaattgttatcaaatgagcggttcttgaaaatttaacatcctttgtttgaagtccaaaccggatacc

SEQ ID NO: 7610 - DNA, 583 bp, Gossypium hirsutum
  Clone ID: LIB3828-018-Q1-N6-D12
acctaaaacaattaatcatactcacccacggtttatttattttgaagaatcatactcatccactggttgttttttttttttaaacataaaatatcactccgttgatagcataaaagggcattagacaaatcttacaacatgaaaaacagaacaatagcttgtaaggctattcatgttcttatggagcatcataagtaaaagacaagcatttctaacaacaaaaaaatgacaagcaaacacgactctaaatttattccataggcataatttgagaaacctcacacgaataagaaagaacaggataccctcacagggtgaacccatcatcttcaaaataaatgatattgcgatagtagcatcaatattcttcaccttcctcttcatcatctccaccttcagcaccaacttcttcataatccttctcaagagcagccagatcctcacgggcttccgagaattcaccttcttccatgccctctccaacataccaatgcacaaatgctctcttcgagtacatcagatcaaacttgtggtcaatgcgtgcaaacacctctgccactgctgtgttattgcttatcataca

SEQ ID NO: 7611 - DNA, 516 bp, Gossypium hirsutum
  Clone ID: LIB3828-018-Q1-N6-D2
actggtgaaaagagattttatttctggttcacaaaaactcttgtggaggtggagatatcagtacattacagtactttaggattacatatataacgataataatacaatcccatcatagtatgtatttatatcaaccctttttgcgaaaatagttgctctctgtcttgcattatagatgaacaacatatctatacctactatatgatatacgtgccatagaagaagcgctgcaaatcacacgatggaaggaaatttgacaaacttagaagctttgtgacgtactaactgctaaaatgatattattacgtatggcacatgggataatatagggtcaagggcatgcgaaaatccaagaggtctaaccaacactgggagcacgaaccaaaaatggaggaaggtgatgctccaaagtagctagaagctctccggcttgacttacttcttctaaagacccacctccaagcattcgaacagcttcaacaagctgccccctcagcctttgcgataacagacgac

SEQ ID NO: 7612 - DNA, 549 bp, Gossypium hirsutum
  Clone ID: LIB3828-018-Q1-N6-D3
ccataataatgaattttttattaatataaataaaacataggaaaaaattgtttaacttaatcaataatcgacagcatgattactaataatgattttaaaagaatcctaatggcgatggttttaaaagtttacactccagggaccatgtcaggataacaaggagtgccagtttgcgaaatccaattgtcagttgcagtttcaaaaaagaccccaggagtccatttcttggcttcatttatatctattggcttgatagatggccatttgaccctgccttcggttttggcaccgggtcccctgttttggaactctacaaagtaaccggggtctagtcctacagtgccttgcatggggcagaaaccctctggggtaatgatgtcatcaatattgctttgcattatgatggccctcgccaaagctttccaaggacaacctaggtacgttttactcttgtccttcaccgggaggtagtcaggggcacccgagatggtacaattttaaagcacaatggctgagtgagtgtatgggaatttccttccgtgggctgaa

SEQ ID NO: 7613 - DNA, 594 bp, Gossypium hirsutum
  Clone ID: LIB3828-018-Q1-N6-D4
cctcaacaaaataacttcatataaaatcatggattaaaacaaaaatctccaacatgaatctcagatcaataacatttgactaaacaaggtttcaaaaggcataacaactctttctactttgaataaacatcaaaactacttactcaaagagtaagacagaaattaattcccagatacaacttccttcatcgactaaaatttcaatctttatcttttgctgaccgtctacacagatacttgggacttcttcgacttgctagctgccaactgagtctcaggctctttcttgacgggctcttccttctccgacaaaattaactcgatgtggcaaggagaagacatgtaaggattgattcttccatgggcacggtatgtacgacgcctttgtttctgagcctggttaacttggatgtgagaaatatagagtgcatccacatccaaacccttaacctcagcattgctctcagcattcttcagcaaatctagaatgaatttggcagattttacaggccagcgaccttgtccattagaatgcctgttctttgcctgagctgtacgtccaacaccaccacagaagcgtctgaaaggtatggc

SEQ ID NO: 7614 - DNA, 584 bp, Gossypium hirsutum
  Clone ID: LIB3828-018-Q1-N6-D5
gaaaaataataacattagacccaaccatattaaacataacgtaatagcaccatacaaatacaacaccaaaatgaaacagcgaccaacactatataaatatacaccattgctccaaatatacattaacaccaattatgataagataacatagatgaacatgatacaatttgttaaatctgaataaggtactgaccaatcattttattggagcattaattaatgtataagactcaatcctccccccacccccccccccggggatgctgagatactgatacactcaaaggaatatgattttcttccattcatttcaatatggtaattttgtttttaccctaagttaaaatcagtgtttttctttttactgcacagaaatctgaattcaccaaccctgctggaaggcttgtgatcgtgaccaactttacaggcaaaaatgaaaaaggatctacaacctttgtcaactgctttgtagaatacaagaaaatcccatacccaagcatgattttatatacaccctgctacaaaaacacgttttttctcttgggaagaattgcgacttattaaggtatctcaaagcatgccat

SEQ ID NO: 7615 - DNA, 556 bp, Gossypium hirsutum
  Clone ID: LIB3828-018-Q1-N6-D6
aaaaagctaagaaagtagggtttttttctttcatgagtttattagtagacaattgaataaattatgaatatacataaggataatcataattatccaattcatgggaaaaagtccaacttacccaacatatttcctcaaacagcttcgcttccaagttctttttgaagttcaaagtaacccatttctgttaaaactttggtacattcgggaagagcttccttttttttaaacccaaggttgttggcaaagcgaatttcacccgaaaccccatccaatgtggtgagaaccacccttgctttcctccactcttcggtgggatcattgcaatctgctctggggctcttcactagcattacatcacaatctgattcttcataatcgcccgtcacttggattttatagtttcctttatcaccagccgttatttctggactttgataggtgatcttttcgtcggtacgattcctacattctaacctcaccgttgcaccgggaataggttcgctgatagatgtctcaaattcaacacgacaagtgtcgcaataaacatgaccta

SEQ ID NO: 7616 - DNA, 428 bp, Gossypium hirsutum
  Clone ID: LIB3828-018-Q1-N6-D7
attaagtatatgcaaatatgcaagtagacgattacaaaatagggtgtagcttttgatcaactaattagttgatcctactgcaggttctatctataatctgcttaacaaacatataaacataagacactctaatacttttttgcacataaaatatctaaaaatcacacttgaattcggattcatagcacatacggtttcaactacatgttatcatccttattcgctgctgcaatgcctcccacaagcattcgtagaggtaggagctagtcattatgtgcctcctacaaattgttcttggaccgcaaagtgtagttggtttttccgctgtgagtatatccatgtaagctttctgtgttttgtttttgtttcatagaaccctttgaaaacttctacacacttgacaccttatcaaagagataagcctttcc

SEQ ID NO: 7617 - DNA, 536 bp, Gossypium hirsutum
  Clone ID: LIB3828-018-Q1-N6-D8
caaggaaactactgaagggtgtattgtagactaattacagtatgcaagttcgagttacataaaacttgaaaagaaactaaaacaaagagatacaatagttgaacatgagaaatgtaagagtgcattttagttacaaacctgttttgtttttatagggtatttccctttttctaaatcagttgagcattcatcgaatgctaactaaaaacaaacaaagattaccattacaacacacccatatataaatattcaaagtcaccttaaatacatcacacacaagcctaatcagttaaaaccaaagctaaaagggcttctctttccttatatgatcagtgtatggaatctatgttcttactcagctcctccagcttcttcatccttaacttttcgctttcactcaccagctccattaactttgtgattagttgtactttttccttgttcttttcattgaatgcatcaagggcttccttgtactccctttcctttttctggcaagtgttccctaacggcttaaattctttgttaactgcatg

SEQ ID NO: 7618 - DNA, 407 bp, Gossypium hirsutum
  Clone ID: LIB3828-018-Q1-N6-D9
tttttttttttttttttttttttttttttttttttttagctaatagtaagcagttgaccaatatggttaaagtactcataaagctgagtctcggtcacacttggatccagatccccaacatatagcgaggttacaaactggttattggctccaccagatccattgttaacgcccccactttgtccctgaacttgaacatgcgccatttttgtaaaccctaaaacaacagctaaaaacccaaccaaaaaaactcttttttctctttccttctctttcttttttttgggtttttttcttctttcttccctctcctcttgttattaatcaaacaaaccctaacgagtaaaataattgggataataaatgatatgggaaaatctcaagtgcttttgaaaaaaacctttcct

SEQ ID NO: 7619 - DNA, 466 bp, Gossypium hirsutum
  Clone ID: LIB3828-018-Q1-N6-E1
gaaaagaaataatatttgcattcttgttattattataacattttattaacaatgggttcaaaccacatgaaaggtttgatccaaaaaataaaaaaaaaataaagtagtgatggtgatagtgatagtgcttttcccatcaatctctatattataggatgagaaccatgctttgatatcccatattaaaccaagcttgtggctacaggtgcagctcaaaccttgacttcgggtgtttccgctgatgagcttgctggtgttggtgctggttccgatgctggtgaggatgatggtgaagaagcgaacatgcccccaataccgctgatcttgtccttggcccagtcggtccatgattcattggaactatcgtgtccctcatgacctggtgcctcagcttttgcagcgtttgattctgttgatgctgtaggtgacgttgcggcggtgtcaccaacgacggaatggattgaaa

SEQ ID NO: 7620 - DNA, 565 bp, Gossypium hirsutum
  Clone ID: LIB3828-018-Q1-N6-E10
gagaaacaacatctctcctttttgttttgtatatctgaaaatataagtaaacagagtttaaataggggagggggggtaaggcctgactcaaatgacccacaaaatgagcccacgtttctaaaaatcccgtagggttgcccaactagggatcaaattaattaaaatcgttatacaacaattaccatgctctaacaggggactggatatagaattcctacaagaggagattatttgccaacagcattctaaacttcaccccattgctaacttgctcttatgggggctcaaaaactcgcctcctctgtagtcggacccctcaagtaatatcgtaaactatttgcaaaaacctgctgcaaaggcttgatgagggctttacccttgtaactgacgtgaaactttgcctttgcaagcaacccctccgggtcgaactctccggactcaactgcaacgttgatgtcggtaatagttttcacaagctccaccaacaaccctggatgaacggctgtctctacatatagcaagctacggtcaggaccatcatcatgaactctaatgcgagtagcaa

SEQ ID NO: 7621 - DNA, 440 bp, Gossypium hirsutum
  Clone ID: LIB3828-018-Q1-N6-E11
aaaaaaaagggaaaaggggaaaaaaaaaaaatccaaaaagagggggggggatccttaaaaaaaaaaaaccccaaaaaagggaaaaaaaggggcccccgggggggttaaaaaaatttttaaaaaaaaaaaaggggtttaaaaaggaaaaaaaaaaaaaaccttttgggccttttttttttaaaaaccctggggggggggggggaaaaaaaattcaaaaattggggggggccaaaaattggggccgggaaaatgggggggaaaaaaattgggaaaaaaaaaaaaagggggaaagggggggtttaacccaagggttttgggggggttgggccccaaaggggggggaaaccaaaaaaatgggggttcaaaaaaagaaaaaatttttgaaaatttgggaaaaaactttttggggggagggttttggggaaagggggtggtaaaaa

SEQ ID NO: 7622 - DNA, 601 bp, Gossypium hirsutum
  Clone ID: LIB3828-018-Q1-N6-E12
aaatgaaaatttgttgtatacaagattttattgccttttgtgagacatacaaatggctattttcagttcttttctcatgtaaacaaaaaatttcaaaagcatcaaagaatcttagccacagatacaaagcgtctcttaagatcagtagctaatctgtttaatgaagtagttaaattggtgttttgtaagaagataggtaaccaaatttgctgcacaatcgcaggctacttgggagaatgcaagaaaataataatctgacaacagctgccttctgaaatataatgactctcagtcagctcaaggtcctatatcctctgctcttcatgtgacaagaaccaaaattgtttgactttgtcggtcacatttagtcatctttcacgcataaccgcttcaagtattcataagctaatatcattgaggttccccatgctgacatactgaagaatcttggacccaaccctctgtagaaacctttccaaccatcatctgcaattaagttttttacgacttgccttgtagaaggtcgcttctcatgccccatcacctgtaagcgagtcttaatagtgtccaatggagttgtgatgcaggaagctgtagcacc

SEQ ID NO: 7623 - DNA, 221 bp, Gossypium hirsutum
  Clone ID: LIB3828-018-Q1-N6-E2
caaaaatcttttctaattaacgtttattttgaaatacaaggttcaactatgctggtttgaaatgactgaacatttccttttcagcagaggaaaatttcaggaccgcactcattaacaccaacaacctcgatgaaccagattgccatacctttaaagttgtatgtattacatcaaccgtcattccttcaacattcatgacatccatcaaaatcatacatttc

SEQ ID NO: 7624 - DNA, 541 bp, Gossypium hirsutum
  Clone ID: LIB3828-018-Q1-N6-E3
ctctagtcaaacatcttattcatttaaaaaagccattaaagcatatctccaactaaaaggtgcctactgtagtccatggaatttgagaccagaaccactaccaatggtctggaaaagaataattgtagtcacccataataaacgaatcatgaaggaaatagaaacacaatgagactaagtgtctattggcatttaacgcctcccagatgccactgattctgcagaaaagaggtctttaacccgtgaaagaactgattcatgtgccggatcatatggatgatccttaaatggaatctccaagatcgctggaacaggcttgttgaagctatccaccagaaaccttatcatatttgcaacatattggctaatcagaacgacagcaatatcctcccttgaagagaactccttaaatgaatcttcaatttggctaactgagggtttcgaatctacaataagcaaattggtctttcttcgcaagccaacattgcccacaccagccattagaaaaccaaccaccgtgtcctcgtcggcaatcattgca

SEQ ID NO: 7625 - DNA, 393 bp, Gossypium hirsutum
  Clone ID: LIB3828-018-Q1-N6-E4
gattgaatcttgtgtaaaattcgtttttgacccaaattggggtaaaattgtaacacgaccctcacttgggcaaacgggcaacgtaatgaaacactagagttcacgactttttaagctaatcacatccacaatggggatccattctaccaatgatttcactaacaagtccctcccatttttacatatttacatttataccaccctcatctctattccgggatagaactcaacacagccttgaactgccctctccctctccctttccctttcttctccccgccgtttccaccaccggtggcgggtgaaaccttccggcgaggagacccttcaaaaaacgcgaaaggggtaaccgccttactcccgcgcctgcatttttcaaaggcggtggttttc

SEQ ID NO: 7626 - DNA, 601 bp, Gossypium hirsutum
  Clone ID: LIB3828-018-Q1-N6-E5
gacagcaattcaagttaattttcattattaagattgcttacaaaatctcagctcagagttcatgacaccatatgaacatgacatgataatcacttccaccagtagggatttgtctcaccttgtaccctctctgaatttgtttttttcaaagaatagctaccacatttatcatcttaatacttaaccagtctcatatggtgcaacaatatgactaagtttcttggctaattctttcaacgacatgttttccaaaacctcagaaccgtttatcacgttcacagctgaatccacagtcttggctaattcaacggctgcacccacgtaggaatgtggcgttaacttcaaaagatgagtcttagcttcttcgggtaattccaagccttcaataaattcccttatactttctttggtaactgctctccccctagtaagctccttcagcttctcgtaaggctctggaacaccatatctacgcatgacagtctgaattggctccgcaagtacctcccatgcctggttcaagtcttcgcttaaccgagcttcattgacctggagctttcctattccttgcagcgcacttttgtaagcaagaagggaatga

SEQ ID NO: 7627 - DNA, 592 bp, Gossypium hirsutum
  Clone ID: LIB3828-018-Q1-N6-E6
ctttttctttttataaacattatttatccagtttaaaacttttaacttgaatctgattaactgaaacttgttcaagcaacattacatgggggaatttaaaaagagaaattgcatgttgaaaacttctatttcagttgcctgaaactgaagtcaccatttttcatcatcagaaaacttaaaaaagccttagagctggacttctctatcaaatatccagctgaatggaaccctgggtgcttccttggcccttccttgagctctctcttccagccttcgaattcttggcggaagtccacacacataatcctgagctttacgcccatcggctgaaagtccagttaactccgtcaccttccatttgttcaccaggaactctagtatatcagcatagtctctggcagtgtaaacaccaagtctctgtgcaacagctgagaaattatcaaaaagattgtcatcttggccatcatacatcaagtgtgctggcatggagattttcttcctcatcatgtcagcaaaagccaggactgttccgtcgggatcgatctcaaagagcttttcaacaattttagtatatgcagtctcgtggcgcttt

SEQ ID NO: 7628 - DNA, 380 bp, Gossypium hirsutum
  Clone ID: LIB3828-018-Q1-N6-E7
gattggaaattgtcgtgtattaccatatttttgtggaaaattttgaacaatgcattattgtgcaaaacgaagatccaaaagagaattcaatcttttgatactgattgcccattctgtcaaagagaaagagaagacatgtagcacctactccatgattgtgccttcgcgagtgcagtatggcttggctcctacttggaatcggaacatgcaacttgaacataaattcaatacttgaatggattccttcaattagaacgaactaaatcagatatggaagagggagcaaagattttcatgaattttgcctcaatagaatttgtcgagtgggtgtaacctcaatgctcatttgggctaaaaagaaattcatgggtagaatcttt

SEQ ID NO: 7629 - DNA, 619 bp, Gossypium hirsutum
  unsure (1)..(619): unsure at all n locations; Clone ID: LIB3828-018-Q1-N6-E8
gagggggaaaaaaaacaggatatatccttccaatatcattgaattttcagtgttgcatgaaccaaaaggctagttgaaaccatcgaaaaagtaattttaattcccagaaatgaagatttaatactgggggagattattgaagagcctcagcaaaacactcaaaaattaagtatagagaaaaaaaaaaacagtgcactgacattttatttcattactgtctggaaaaatctagcagtgaaaaatatttgaaattaaccttccagtgccgatgctccagatataatctcaatcaactccgtggtgattgaagcttgacgggttctgttatatgtaagagtcaggcgatcaagcatgtcgccggcgtttctgcttgagctatccatagcagacatccttgctccttgctcactacaagcattctccaaaaccgcattgaacatgacacaagagaactggaactcagccagattttgaagtatttcaccctttgtctcaccaccctcaacttcataggagtctagttcaccaagctttcccccagattcagattccctttcaacaatttcaggtgataatacagttgagactgtcggcacanatgagactactgagtgaaact

SEQ ID NO: 7630 - DNA, 575 bp, Gossypium hirsutum
  Clone ID: LIB3828-018-Q1-N6-E9
gttcttgtggatgattcaatatgataaatcaatacagtttctattttcatctccatttatcagcttcatacattgagctgcaattagtacctggaacttaagaagacaggtacttaagaagacttcttatgtaacaagggatcagagatgacttggggttcaaagtctggtttcagataactggcaagcgtatctgcatataactcatatcttgcagtcattcggaacccccatttgtctttcagttgcctacagaggttaagatccatatctgagatcatcagtccatccttataacgggagagtgatggtgtgcaggaagcatcaggtgccgaaaaatgactagatccatagaaatggccaaaatctggatgttgtggctttccatcccctgaggtgaatgggttggggaaaatctcagtccctacacgattgattgacccaacaaaataactgtttgctattgcagcgttacgtgcctcaatgggccacatcggttcactaagttcaccgaccgtggctgatgggttgaaaacgatctcagcaccattcaaaccaaaagctagccaattcaa

SEQ ID NO: 7631 - DNA, 578 bp, Gossypium hirsutum
  Clone ID: LIB3828-018-Q1-N6-F1
attcaaacaatattattatttaaataaagtttcgttatcatcaactgattttacagtacaaagcacaaacatgaagaaactttttgagggattctcctgtctttgcatatcagagagataattaataaataaacaaagcataggaagtcctaaaaggggaggataaaacacaagtagataggatctgaaattagtaacagaagcatatgtttaggagccttaggagatggtggtccaagttgaagaaaacaaagcaatgggctgcaagaacaggatgaactgaagggacatgttgaagataacatcactggcagtagctgcaattgttctaaatccacctgccacacacccgtctgtaataaaatctgcaatcttaattctgtcggggtttttatctgtacccttcagttcgggtgttaggttgctccaggaacagcccaatgatgaccccaaaaacatggacgctattcctcccattgatgcactcaaccctaccgagttgaatggacccggtgttggcattcacgaagatcatgttgtcccaaaagtgctgaaattggtactcttggttttggttt

SEQ ID NO: 7632 - DNA, 433 bp, Gossypium hirsutum
  Clone ID: LIB3828-018-Q1-N6-F10
aaaaataaaatgtataaataaaaaaaaaaaaaaaaaaaaaaaaaaaaaagaaattttcttttttgaaaaattaaaaaaaggggggggggaaacccccccaataaaaaaaaaaaaaaaagggggcgggaatccggggggaaaagaaccccaaaaaaaaaccgggaaaaaaggcaaaaaaaaaaaaaaaaaaaaaaaacccaaagggcccccggggaaaaaaaaaaaaacaccccaaaaaaaaagcggggggggggaaaaccccggaaaacggaggccgggcccaaaggggaaaaaacgtaacaaaaaaagaaagggaaaaaaaggggggggaaaagaaaaaaaaaaccgcccgggggaagaaaaagagacacccaagaaaaaaaccacaaaaagaaacgcgaaaaaaaaagagagaaaaaaagggggggaaaaa

SEQ ID NO: 7633 - DNA, 598 bp, Gossypium hirsutum
  Clone ID: LIB3828-018-Q1-N6-F12
atctataaaacaatactatcattgacaaagcaaggacatggtagtaaatagtaacaaagtcagaaaattttatgttaagggccgagattgaattttgatttttgaaggatgaaactgcaactttatcaaattatatattcaagtagtgttcgaataaataagaggttaaggtccctacttataccttcgaatccgttcggaggggcagaagcatgtaattagggtcaacgacccataatctggtccctgggagggaccatgaccaagataggttgagaatcgagcccgggatgaggcaaccttcgacggagctcgcggccttcttggcaaagagcacatatatggcagaagaaatgtgtagcaaagtcccaagctgattcacattgttcacgtcgcacttcattttccacacagctaccacagcatccacatgacccattcagtgcctcaaaggagccctttttttttgtttatccaaaaataacaaaattaaatctcggaaaccttttatgtaattcaaattgtaaacttatcgaatgttacttcttaaagatgataacgtgaattaacaggactaagacgaggtttggttcataac

SEQ ID NO: 7634 - DNA, 549 bp, Gossypium hirsutum
  Clone ID: LIB3828-018-Q1-N6-F2
gaatcaaccttggacttaaaaattaaaaacaacaaacgaagaacatgttttcttcggacgcgtgggcggacgcgtggggtttgatcagctattctgggctgcccttcttcttcttcttcttcttcaaacaagcaaaaaaacaagaggaaaaaaatgggtggagaaagaaaggtctacactttggctgaggtttctcaacacaaccatgctaaagactgttggcttgtcattgagggcaaggtatttgatgtgactaaattcttggaggaccaccctgggggggatgatgtcttgctgtcttccacagggaaggatgcaactgatgattttgaagatgttggtcatagtagcagtgctcgagcaatgatggatgagttttatgtgggtgacatcgatacatcgaccatcccctctaagaggaagtacactcctccaaagcagcctcactacgaacaagacaagacctcagaatttgtcataaagcttctccaattccttgttcccctgctaatcttgggattggccttcggtgtccgctcctataccaaa

SEQ ID NO: 7635 - DNA, 362 bp, Gossypium hirsutum
  Clone ID: LIB3828-018-Q1-N6-F3
ggaaaaaaggaaaggggcccaaaaaaaaagagagaggggggaagcccatttttaattttcccactggggggaacaaacgaaaaaaccaaaaaaaaaaaaatttgccttttgggcaaaaattttggggggttggggaaaaaggggggggggaattttgggggggggccaaaaccccccttaatttttatggcccccccaaaaaaaaaaaagggggggttaatttttccggggggaaccctaaaaaaaaaaaaaccccggaaaaaaaaaaaaaaaaagggtttcccccctaaaattaaccttgggaaaccccccctttttggggggcaaaaaaaaaaaaaacccttttacgggcccgggggggc

SEQ ID NO: 7636 - DNA, 604 bp, Gossypium hirsutum
  Clone ID: LIB3828-018-Q1-N6-F5
agtagtataaaattagaaacaaccattaatccgaatccgatgagagttgaaataccaatgctggttcatacagtttatatagattaccaaatacccaaggaagcatattttctcttagcaaaagccaagtctagcattatacatgaggcaagcagccaacccagccggcatttaccagcaatttcatggaaagtcttagttactattttttaataacagactagaccagaggtgggtattgcttggcttgctggcgaacccttctcttatattcattagcatcctggatgaagaggtgatacccttcagtttgagcaggatcagcagggtttggagcatccagaagatcttggattccaataagaatctgcttcacagttatggctggtctccaaccactatcctcatttaggattgaaaggcaaacagtaccagatggataaacatttgggtggaaaaagccctggggaaatttacactttggaggcttgctgggataatcttcactgaaatggagcgtgagcgggaagtagccaccctcccaatcagttcctgctttaccagggatcgtgcaatgccacaccatcaaattgaccgttccatc

SEQ ID NO: 7637 - DNA, 569 bp, Gossypium hirsutum
  Clone ID: LIB3828-018-Q1-N6-F6
ttttttttttttttttttttttttttttttttttttttttttttttattttttttttttttttttttttttttaattttttttttaaaaaaaaggggaaaaagggggtaaaaaaaagagagtgaaaaaaaacagggagggggaaagggggggggcaaaaaaagggggaaaaaaaaaaggggccaaaaaggggaagggaaccagaacgccgggggtaaaaaaggggaaaaagggggggggggccccaagggggggggttttggggggaaaaaaggggggggacccccgggggggaccccctaaaagggaaccccgggaagaaaaaaaaaaaaaggggaaaaccaaaagaaaagaaggggggaaaaaaaaaaaaaagctttaaaaatttttgaaggggggctaaacctggaaaagggggaatttgcaaaaaaggactggggggaaacccaccctggggaagggaagggaataaaaaagaaaaacgggccgaacttttataaaaaaaaaagaaaaaaccggacaaagggggggaaatcgagtaacacaaaaggacttaacccttattttccc

SEQ ID NO: 7638 - DNA, 597 bp, Gossypium hirsutum
  Clone ID: LIB3828-018-Q1-N6-F7
acccctctcaccgtcaaaaacagttgagcatatttacatctctatccaactcaaataccaactttatccccccctcattcttcattcaatcatttcttttttgattttgagctagcaaccaagtataaatatatatattttttatttaatcatatatatttccttcactatcagaacccatcatcaacatctaccttcacactaccaggaagccaatctccattgtttcgattacatgtttcggaatcgagttccagtcggaacactagtgatgactcctccgatgccgggaatcgtgttttcagttgttgtaagcttggaaccaatgctttctcagtccattcttctaatccagttcgacctatccataccccacttgtaatcttttccagagcttcatctacgatcttgatcgttaccctgtcgccaatgacactgcagaactttttggttatgaaatcagaaatgtcgcgcctaatgggaccaaaatcgacaggtttaaaaatgatggcatcgtcgacggaattgagtagctcatggggtactgatgatgatgttgagttggataattgtctgtttgtgaggccttgtccttct

SEQ ID NO: 7639 - DNA, 571 bp, Gossypium hirsutum
  Clone ID: LIB3828-018-Q1-N6-F8
aagcaagaaaaaaacaaaccaatgccataaataattgaattacatcacatgcataattgagaactgcaaacagaagtaaaacaaatttattatattttcaatatataatcttatgatcttttttgagtaagcaaaataaataatttaaggagaccacatatatgttgggtggctagtgcctgaaccaaatttctctgctatttgatgagggctgcatacagaagtagattccatgtatcggggaggccggccacgcaccagtgggtgcaatccatgccgttgaagtcattgtaagtgctaggatgtgcatcttttcgtaattgagagagcattgtaatatcaagcaaatgaacaggcttcttgatgttccttatgacctctttaactacgtactctgccagaggcaaaccagttggataaatcgatcccttgaatggtgtcgtctgccttgaacaattccttactcctggctcattccaatctatgccattgtagtgagaaggggaaattccttgaaatataactttagtcctattggtatccacatctgaatcaacccatttagcccatg

SEQ ID NO: 7640 - DNA, 554 bp, Gossypium hirsutum
  Clone ID: LIB3828-018-Q1-N6-G1
gcatcaattcttaaatcctttgcaaatacatgcctacatacatccatatgtataatgcaacaagacatgagctcctaatttctaaattaaaaaaggtaagcattgctttcatctttttcacactcgtaagaagagccaatcactcaataccattactgaaagttgacgaaaataaagaacaacaaatgttgccccccactgcccttcattcatctgcccgaattactactctcctttttcatgtactgcccaccagggaaaagtgcaaccataatagcttgggttgctagaaaaaagcatggctgcttgtgagaaatcacagctagatggatccgggccagaactttgctaatagagattcatcgcatatgctgcatgtgctgatagtgtataatggctagaaacaagaccctcccggttggataggactacaatctatgccatgtgcacaagcataatccaaacttgcctgcaattcggcatctgtaacatctttctttggaacacaccaagatgctttctttggctgcggcgacggtgccactactgacggc

SEQ ID NO: 7641 - DNA, 574 bp, Gossypium hirsutum
  Clone ID: LIB3828-018-Q1-N6-G10
tttttaaaaaaaaacttattattcgatttaagaatattacagatataagaaaatataaaattaatttaaagtaatacaaagatttgataacattaactctttatccattacatgcatttattaagttaaatactcaaactaaaaatgtgagtaagtattggtcatctatattggaataggcctaagaattgatgaaacaatataatctttagtgacaccggttgatgtcccaactccgtcgccatgctggtacatgcatttcacagttcgagtcatgttcttagataaattcacaataactcgtgggaaacgattatcgaaaatttcttcattgatcttcttccatgaattgcttatcagttcttttacatgatttcgtgctttttcttctgttactcctttttcaatcatgtaacactgcactgcttccggtatgtctcctctctccatctcatccttggaagtacccagatcatcactgaatcgagtaatgagagatgaccagtaaaataattgagaaaaaacttaagacaatttggaaattgattaacaatggagtctgcctccacaaaac

SEQ ID NO: 7642 - DNA, 598 bp, Gossypium hirsutum
  Clone ID: LIB3828-018-Q1-N6-G11
ggatgaaatcttgattgaattcattcatttttttaaaatggcataaagcctatttatacaagcttacaacttgacaacttagttcgaatacaactaagtttcatcattacatccacttaaaataaatcaccacctactaccactaacaaacttagttggaatacaactaagtttcatcattacatctacttaaaataaatcaccacctactaccactaacaaacttagttggaatacaactaagttacatcattacatccaaataataataataataataataataataaaacatgtgattgctacatgctaaccattgcttcaatactcctccttggtttgcatggagcaaacacctagcttccttcttagacattcgaaccttgtgacattaagggctttagtcaaaatgtctgcaagttgatcctcagaattacaatggatcagcttcacttcttgagcttgctccatttctcgaacaacatgcaacttgatgctgaaatgctttgttcttccatggaacactggatttttagcaattgcaactgaagattggttgtcacagaagatctcagtagcttccttttgatgcactttc

SEQ ID NO: 7643 - DNA, 598 bp, Gossypium hirsutum
  Clone ID: LIB3828-018-Q1-N6-G12
aaattaaacactaaaaaaatatatataactttgtttggtgtaggaccaaaaacagagttggagaatcaaaaggcaaacattaaagaatcttttgaataacattcactttaaaccacttccagaatcattgttattagatttgcacagccccctacgccatggattgttcgtgtttgatgttgatgaccgaaaagaacttgactgctgcgagctccttcaccatgtctgccctcttccatgtacaaacatactgttatggctaggttcagatattttcatgtctgcaatggctttagccgtgtttgagcatgaaccagcaccacccactttgcatgtgtcaaaccttgggttccatggaaaccttgtatttgatgtctggttcgatgggtgaagatcatttctggttttttggactaactcgaacctgttatagggcggtctggttccaaggtattcatgccatagctgagttttttgaatatcagcttcagttatggcctttttgggaaattcaacaccctctagagggcgtgggatatgtggttttccgatagggatcttgaacgacaacaacatgataagtgatgatgatacatgt

SEQ ID NO: 7644 - DNA, 596 bp, Gossypium hirsutum
  Clone ID: LIB3828-018-Q1-N6-G3
gggttgatacctaaacgtttatttggatgcaattgcatagtgttcacttaacaatttatttagcacttccctgaactcattttcttcggacagagaaggttcaggtttcacgtggtatggatatatttaaagtgtggaattgctaggtacaatgaacggagccggttagtagatgaaacccttggtcgaacaagaagtaaggacctggttttaagtccgacatcggtgaaatgcacgaacatgaaggcccccgtctatatgaagattgatcatcgtcctgtatgtcactgctctattctcatcactcaatttgaatacgaagcaacggagaagaacagctgagaaaatcttcatctgtctataggcaaagtccttacccagacacactcgaggccctgcctggaaagctgtaaacttgaaagggctttctgatcggaacatgccgttcttgtcgagccatctctcgggtctgaactcctctgcatcatcaccccaaatgaacttcattctacccattgcataaggttgataaacaatcaaatcatctttcctcacactaaaaccatctggcagagtatcatcagagaaacatatct

SEQ ID NO: 7645 - DNA, 608 bp, Gossypium hirsutum
  unsure (1)..(608): unsure at all n locations; Clone ID: LIB3828-018-Q1-N6-G4
acctagaatatgtatattatatatttcatagtaagtggaaatgccatgattcatgggggataatcttgtaggatcttaatgcatgttctaagcaaatggaagaggacattcttgtctgaaaatcaaacttatcattcttacacactctacgcatcttaaacatggcagacgatcagatctagggtcctccatttaaggaaagttaacataatattcctgccttatatagtagctttcatctgacacaatgctaagatgttcttcactaaaactgaaacagcagcaatgaaccatgcacgcccccataacattagactagttgaagagctatctggtcttgctgcagctgagggttataataattggtggcgggttgtaaagcatcgacttggaagtagttccgagagtcatatggttgagaatgtagggcctcgaagttagcacttgaacctccgggcatcaaattcatgctctgctgcttcctctcgttctcagctatcttggctcgaagaattggttattgttatgcaagtcaatttcccttttctgcatatactcaatttcagcaaacaacagctcattctttntggaacggattctgctaattc

SEQ ID NO: 7646 - DNA, 564 bp, Gossypium hirsutum
  Clone ID: LIB3828-018-Q1-N6-G7
aaagtaaacagataattttctcgtatcttatttcacttaggtaaggattctatttagggataatcaaagaaataaaataaaaaatatagtctgctaccctagcaagctattgtctaccgtctctggcaataagttttaggttttgctatatttttttatgttagtttgtcgtgcttgtttgattttggtctctgtgaggcgatgcccttgagtgcttagcgactattatccgtaggaagatagaaaaatttgcaatctacaccttccatcgttcttctggatttgtttggttggaatgattctcctgtttctgctgattttctcttttcaagcggatggctactggaatttactgccgcctctcgggtcttaccaccaagccgtatcaacgcctccagaaaagatctctgaaaattttcagaaactctttgaatctcctaaatcctagattttggctataagcctcctgagaatagttttactggaaattctccgtgagggagattttttattgatttcttgaaatgcttacaaagctcctaaaacatatgctctcacttttcc

SEQ ID NO: 7647 - DNA, 587 bp, Gossypium hirsutum
  Clone ID: LIB3828-018-Q1-N6-G8
gaaacataattttcatacaaacaactaacaagaatattgtgtttttaaggagggctaggtccagtatgtaaagaggagacaaatcacacaattaatttaaagaccaaagtcacagggaatgaagccctcctattacatacgtagtagcactttaacccatagcatatttttgggtccagctccgagcggttgtctcatacttgttcctatccgttttgtacatgtgggcaatctccggcaccaaagggtcatcaggatttggatccgtcaggagtgagcagattgacagcaacaccttggatatggtgagggcagggctccactgttcctttaaaatatcaaggcaaatgctaccgttgctgttaatattagggtgaaatacctttgtcctgaatgcaaccttgggtggtttaaatggataatccggagggaaatgaatggtgactagaaacaccccaccggcatacgggctatctggaggacccataatagttgcttgccaatgaaacatgtcttcagcaacagggccagcgctgcaagaggtaggaggatctttctggagatccttgagctccttcaatatccgc

SEQ ID NO: 7648 - DNA, 596 bp, Gossypium hirsutum
  Clone ID: LIB3828-018-Q1-N6-G9
agaataataatgattcaatttttattataggctaatgccgagcttttagaaaagttgaagtgaaaatacatattatagttctgaccaaggggcaatgtctccagcttcttggctaagctcataatagcctatctcttgaagaacttgagtacactgaggaagagcaaccttcttcttaaacccaagattgttggcaaaccgaagttcaccgctgacgccgtcaagtgtggtgagaaccaccctggatatcctccacatttcggagggatcattgcaatccgggttgggactcctcaccaaggcgacgtcgcagtctgattcctcataatcgccttccactacaatgtgatagtctccacgttcgtcagtcactatttcttggctctggaaggtaaggtgattgtctgtacgattcctgcattccagtttcactactgctccagcgatgggttcgctgagtttggtctcaaactcaacacggcaagtgtcacagtaaacatggcctacgacgacgtagctcatattttcagccccatagacgaaattgagtgaggacgaaacaaaaatggtgaagcagaaaagacgattatgggaat

SEQ ID NO: 7649 - DNA, 596 bp, Gossypium hirsutum
  Clone ID: LIB3828-018-Q1-N6-H1
actgttggaaaaaaattgaccaccttccactatattttaaaagtaattggtgcataaagatggaagactacagataaaaaataatctaaacttccagaagccacattagtttttcaagttttatgatattttaggttctaagaggcagcacccgtatctgcagcaggagcagctgcagctacttcagttttctcttttgcagcttccttcagtttcttccaattctcgtcactgtcaaggatttctcccgtctttatgaggtaccgcacttttttcccgtcatctaacactttatgacccacccggctcgtcacttctttctctttcgaatacagcatcacatttgagctgtgaattggtgcttcaatcttaattatctgtcctggttgatcctctcctctgctcttcatatgcttcgtcttcaggtttatatctttcactacaatggtgctgttatgcttgaagatcttgcttatctctccaatcttgcccttatcacgacccgatattactttgatggtatctccaaccttaacatgcattttatgcaaaactggaaggctgttcggtttacattccttccgttcccatcgttt

SEQ ID NO: 7650 - DNA, 412 bp, Gossypium hirsutum
  unsure (1)..(412): unsure at all n locations; Clone ID: LIB3828-018-Q1-N6-H10
ttnttttttatatattagcatgcacatgcattaattacatatggctacaaaacaagattcaaggaactttaggatattgcaaatcgaatattgttttgagctatttattcttcataattactctttttgtccaagaggattttatagcaaacccttctgcaacatcattacttcttattttgtataattaataagacgacaaccaactcttcctcgttatttcatcttaatatggtatcatctctctactttggtggactgggttcactgtccataacctcttctatccctttgctctttacagtttcagcctggcaacatcctgatgcgcacctgggctgaccacactcagcacaagtcccaccacaaccctgacgggaacactctccactctcacatcccgactgtgctg

SEQ ID NO: 7651 - DNA, 514 bp, Gossypium hirsutum
  unsure (1)..(514): unsure at all n locations; Clone ID: LIB3828-018-Q1-N6-H11
ggaaagaaaatattgaattacgaatataatgaaatgagataaataagtggacaacaaattgagttgtgtagaaaggtagcgtagaaaaaaaaaaaaaaaaaaaaaaaaaaaaaaaaaaaaaaaaaaaaaaaaaaaaagggcgggccgcccttntttttttttttttgaagccaatcatcttttcaaacatttttgacccatacataaatgtacaaagtacgggatattacacgtttcacactgaccattattagaacaatgtttaattgaaaaaagcaaatggttagcaatagcttctaacccttctaaaaaacacttggtgagggctttaaacaaagcggcaaaacaccataaaaaggagcccgagttatgatggttgatttcaggttcaaaaaaccaaggttagtgctgtccattttgtctccacaccatttatttctgatccaccaggagatcaatccacacatgagatgacaaacaaactggccggacccgtgggcggacccttggtgtt

SEQ ID NO: 7652 - DNA, 582 bp, Gossypium hirsutum
  Clone ID: LIB3828-018-Q1-N6-H12
aatgtcaaataatgcaataaacaaaatcatccagacatgatctttttaggtaacaaaaaggaaagagaatccagagccacagggcaaaatagaaccttaactttaatactagcatgggaaaatcaaaaactacaaaagccctgtaaccaaccactcaagcttaaaagattgtttaggacatcgagggctatatcagatggaagtcttctaattgactaaaactagaggttgccaaaaagcatataagtgaggcatatttaagaatctgcaatagtaacctccacctcaacaccaggttcaatggtgatagatgtgatctgcttgaccacatcaggggagctgaaaagatcaataactcgcttgtgaacacggagctcaaatctatcccatgtgtttgttccttcaccacagggagacttccttgttgtgatgtgaagaaccttggtgggcattctcactggccccttaaccctcagtctcttatccttggcaccacgaaccaaatcagcacaaactttctcaaggtttttcacattcttggaggagagagtgatcctgatcttgtgaatctgctcctgggac

SEQ ID NO: 7653 - DNA, 598 bp, Gossypium hirsutum
  unsure (1)..(598): unsure at all n locations; Clone ID: LIB3828-018-Q1-N6-H2
atgtaataattttcttgtattcttcagctaaatgtttcccacccagaatttgaattgaactccactgggaaaatacaagcaaatgcacaactcaaaaaatgatttgagcaatacaaataacccaactaaacttcattgttttcctcctcctaggttttctatagtttcagttacaaacacattcaaccacctgcaatcactgaatatcatcattttcacactttcagagcagctttgtgaaccatggtttctttgtgtatttggtggcaactcttctcaacaagatcaagaagtttttccaagttcacagcccatgagttgagaatttcattgctatcctttgctacctggaagcacactattcccattggccggtcaatctttgctaccagtgcctttgacacaaccatttcagacagatgcttctcagcttcctggacagtgagacacaacaactctgccagtctcttcaatgtaatccttgagtagtaccttgaaacaacaaggatattatgctctataattcgctgtttcaaatcttctgcagctttgtcacccaaagaacctncaagcatgttcttctcattctcaaattcat

SEQ ID NO: 7654 - DNA, 583 bp, Gossypium hirsutum
  Clone ID: LIB3828-018-Q1-N6-H3
aactatggttgaatattaatttgttaggaaagctcaattttagtccattttctacacaaagtaagaagcaggagggcagcagcttggcatgaaagaccacatatcaaccctatccacaaacccttagcataaagcttgaacttaaaagcaagaatccctgcaactggcattccaattaaataaaaggtccccaagttggcccacacagccaacacctgccatccgcttcctctggccacccctgataagatgccttgaaaagaatcgatggtaatggagattaaaaggaagggtgtgattgaagcaaattggttaataatggaagcagtgttggtgaagaaagcagcccatatgttatgcccaaatgctaatgcaacaaccactgttagagccagaaggattgaaagcttgagtgacacaaccatggcggtctttgccttcctcggattctcagcccccaattcattcgaaaccctcgtgcttgctgcagcactaagtccgtaagtaatcatgtacgcaattgattctgtattcacactgaaacaaatattttactcaaatcccattaatcttgaaatcttta

SEQ ID NO: 7655 - DNA, 589 bp, Gossypium hirsutum
  Clone ID: LIB3828-018-Q1-N6-H4
tttttttttttttttttttttttttttttttttttttttttttttttttttttttttttttttttttttttttttttttttttttttttttttttttttttttggggcggggggggggaccgggaaatccgggacggggcccggggggggaacaagtttccccaaaggggggggggaaaaaaggggggggaaaaaaggggaaaagggggtcccgggggaaaatgggaatccgccaaaaattccaaaaaaaaaaaaagcgggaaaaaaaaagggaaaagccgggggggccaaaaaaggaaacaaaaaaaaaaaaaagggggggggccaacggcccgttttcaagggggaaaaccgggggggcccggggcttaaaaaaaacggcaaacccccggggaaagggggttggggtttggggccccaggggggttttttttttccccagggaaaggggaaaaaggggatggcccttaaccgccgggccctgaaaaaggggaagaaaggggcccacgcgggttggccccaggggggaaaaacccagttggtgggggggtaacgggggaataaaaaaggaagggttctggggttcgcc

SEQ ID NO: 7656 - DNA, 576 bp, Gossypium hirsutum
  Clone ID: LIB3828-018-Q1-N6-H5
tttttttttatatttaaaaatttttttttttttttttttttttttttttaatttttttataatttttttttttttttttttggattatttaaagtttttttatttatgaaatgagaaaaaggaaaaaaaaaaaaaaaaaaaaaaaaaaaaaaaaaaaaaaaaaaaaaaagggagggaaaaaaaaaaaaaaaaaaaaaaaagaaaaggggggaaaaaaaaaaaaaaaaaaaaaaaaggaaaaaaaaaaaaaaaaaaaaagggaaaaaaaaaaaaaaaaaaaaaaaaggaaaaaaaaaaaaaaaggaaaaaaaaaaggggagggtggaaaaaaaaaagggggaaaaaaaaacaggaaaaaaaaaaggggggaaaaaaaaaaaaaaaagaaataaagggggggggggggggaaagtagagggaaaaaaaaaaaaggggggggggcgtgtaaggggaaaaaaagggagaaagattgaaaaagagaaagaaaaaaaaaaaggggagggggaaaaaaaaaaaaaagggagaaagaagggggaaggaaaggagaaattgagaaaaaaaaaaaataggaagaac

SEQ ID NO: 7657 - DNA, 585 bp, Gossypium hirsutum
  unsure (1)..(585): unsure at all n locations; Clone ID: LIB3828-018-Q1-N6-H6
caaaattaaatgaaaatatatatattggctcactttccactttctatatataaaaaagagtaacantcaaaagggcattttgcctatacacatcctataatacagtagtgttctctttcaaatgcttaaaacacaatccacaaaggagcaacaccagataagacagtatatctattgtagcaaagcaaaattctgccaaaaaagaaaaaggaaaataaatgcttaaaaactgaatcctctaatcagtctcacataattttaaattgaaaacttccctgtttagaacggcctgatgacccgagccgaaggaccatgagaaggagatggttatcaaaaggtgaataatcttagtaacttctgccccaataggtccacttttttgcaggcttcccagaagcaaagcatttagtaccatctgggagttcaggctgttcgaatgggatacaaagagacttagctgctcccatctcaccccttgttcgagctttcacatctttctccacctcctcctcatcacaccaaggagctaagatcagtttcttttgcccaagagcttttacaaactcgtcccaagtttttacaact

SEQ ID NO: 7658 - DNA, 421 bp, Gossypium hirsutum
  Clone ID: LIB3828-018-Q1-N6-H7
cctccttaacattaattaattaggagttatggactctgtgggaaaacagcatgcgaacaaaacttttgtaccgtaagttgtaaatttgtaagcagtggttgagatggaaaggctatttaattttccgtttaaaaaaaaaaaaaaaaaaaaaaaaaaaaaaaaaaaaaaaaaaaaaaaaaaaaaaaaaaaaaaaaaaaaaaaaaaaaaaaaaaaaaaaaaaaaaaaaaaaaaaaaaaaaaaaaaaaaaaaaaaaaaaaaaaaaaaaaaaaaaaaaaaaaaaaaaaaaaaaaaaaaaaaaaaaaaaaaaaagaaaaaattgaattaaaaacaacaaatgaagtaaataccaagcacggatactattgattattagccataagggtgagggggtgttcccccttttttttttttttttccaaaa

SEQ ID NO: 7659 - DNA, 563 bp, Gossypium hirsutum
  Clone ID: LIB3828-018-Q1-N6-H8
aaattattatattatattactacttttgttattttacaaaaaccagatatataatcctaaacacacgctcgcaaatcctaaagtataaggagaaaaagaatatagtaatatagtaataaaaataataattctggagcatcaaattttgaaaaatatgcaaacaatttgtaagaatattaaaaacccatagaattgggtgttaaaataaaccgatcccgagccagaagcttcatccttatcgctttcctcttcaatggggtgattgaagttggcaggcacgatggtttcaggggcggagtcatcgcccctgtaatcagggctgttgggcgccggcgcatcatccgactgatctaagctcttcggcagcccttggccgtgggtgacgtttatcttgaaatgctgaccattgttgcattgctccccatcgtagtcactggaaaagaaatagttcatcccttctttcagtagaggaaccgctactgagattgaatgaggcgccgtggaagaaggatctgcagctgaccattcgatcgtgtcgttttgaagagcgtcgtcgtaatcgc

SEQ ID NO: 7660 - DNA, 580 bp, Gossypium hirsutum
  Clone ID: LIB3828-018-Q1-N6-H9
ggaacaacatagactttgagcattggttaaaaacaaataaaacctgggagtttaacatattcaaattttcccctgcataagattaggatatttcaaaaaaaaaaaattcataagctgggttgcagggttctaatcagtgttctaatcctagcagaagaaggaaaactcatgagcatcttttcactcaaaatcgaaaaggacggttcagggttacgtgatcaacccaggcaacataaaatatagttccctcgtatattgaatgacataaaacataagtcgtggaatgtatgaagcaacttgctcagtgggagagcctggagcttgcagtttgaaaatagatagatgctaaacatagaatacatgtgtacagccttcattacttagtatgtgcagagaaacaaaagtggttgccgatgaaaatggcaaaagctaaagtgcttccggagagaattatgtacaaccaaatcgttgtgaaatactagcatgatcatgcacataagtagagggaataagagggattgtcattcacaaaccggttttgtaccgaagctgctcaagcagattgcaaaggcttggaaag

SEQ ID NO: 7661 - DNA, 582 bp, Gossypium hirsutum
  Clone ID: LIB3828-019-Q1-N6-A1
gacttaaatcagatttaaatttatttcaaattttaatctctaaaaattaattttgaattcgtaatctctaaagatataatgacaaaactagttgatatataacgcttcatcacagtgccatagagatggaaaaaaagaatacgatggtaactccagtcaatgatatcctgtcagcacctccattttgatctgcagatcgtcctcctggtggggatgtagcagagcttgtagaagtgctgttgctgttgcaagcggttagatcagtagtgacgccgcattcacgagtgacattgagagcttgcgcggtggagatgttcaaagaagcaaaaactttagggtctttgtagaggttacaaaggcaggaaagatcgttggttacctcttccttgatcgggttacaacagtcatcttgaggtttgatggtggtgtttaggatgtaacgagaacaagacactagctttgccgcacaagttgcttgcgcgtccgtaacggttgccgccgtcgacaccgcaaccaggagaaccgccatgatcatgaggttagccattttgggggtttgtgaaattcacggacgcgtgggtc

SEQ ID NO: 7662 - DNA, 566 bp, Gossypium hirsutum
  Clone ID: LIB3828-019-Q1-N6-A10
aacaaatcaaagttgaaaggagtgcttttattacaaggcaataatatatagatgacttcagaaactgaaatagcaagcaaacattaatttcatagtatagataaaattctgaaacccaaatgccaaacattattctatcatcttaaaaatgcgaaaacatatctaaaaaaaccctgaagctgaggcattaaactgacgagacggagagaaccccggattcaccatcttaacttcgccgggaagtacttttcaatgagtgagagataatatggcttgaccttttcgacatcgatccggactttgctcttgctgtaaagatcatatttattgaatatttggagccacttcatattctcagtatcctcctcgttcattaggtgcctgtatgctcctgacttatgcaatgcataaaacgagtggtatcgaatgatgaaaagagctgctggtggcagagtcgtattgttccccttggacaccagatacatgtagtcatcatgcccccacgacatcatcacattgttaagtccacatccctctgagtacaccccatatttagtgttgtaatc

SEQ ID NO: 7663 - DNA, 589 bp, Gossypium hirsutum
  Clone ID: LIB3828-019-Q1-N6-A11
accaaatgctgcatccatttatatttaaggaaaaaaaattacaaaatccttgtgcttaccagcaactcatccattcaatccagttttaacctcaaaacctaaaaccaaaccttattacacaactaatagagcgcagccattacatcagatgctctcagagcaatatagttactaccatcattgcccttgaagtcattcccagcatactttgaatacaggacggtgtttccaggcgagaccgatagtggctttaggttaccttcctcatctaaagtaccgggtccaacagctatcaccgttccaatggaaggtttttctttgcttgcctcggtcagcaacaaacctcctgcagttttctcctcagcttccgaaaccttaatgaaaactctgtcgttcagaggtttgagatcttttatgtcatcggtttcaagaagtccaacaatgtcatcctcttttaggagaagatgatttgcaccattgaactcgacctccgtcccagcatacttggaatatatgacctgagcaccagtcttcacagaactttccaatttggtattcccaattgtcttcccttcaccaacagcaacca

SEQ ID NO: 7664 - DNA, 509 bp, Gossypium hirsutum
  Clone ID: LIB3828-019-Q1-N6-A12
ataaaaaaaaaaaatttaaaataaattaaaaatttttttaaaaaaaatttttgtttcttattccacaggaataaaaccacccaacccctaaaacaggggaaacttaaacaaaaaaacggcccaaatggccccacccaaaatttttaaaaaaaaatagaaaatttttttttaagtctaaatttaggaaaaattaacaaatttttttttcaagtttccaaacccaaaaaaaaatttttttttaaactggaacccgggtacctaaaaacctttaaatttaaaaaaaaaaaattgaaatttttaaattgggaaaaatattttgggaaaccccaaaacctcccctccgggaagggtttaaggcggggggccctaaaattaaacccttaaacctgggggaattttccaaccggtttaaaaaaaaaaaagggccaaaatttattttgccccaccctttaaccaaaatttttttaaaccaacaaaggccccttttgtccaaaaaaaggggggggaaa

SEQ ID NO: 7665 - DNA, 561 bp, Gossypium hirsutum
  Clone ID: LIB3828-019-Q1-N6-A2
gataaaaatttggcattgttgttattattataacattttattaacaatgggttcaaaccacataaaaggtttgatcgcaaaaataaaaaataaaaagtactgatagtgatagggatagtgcttttcccatcaatctctatattataggatgagaaccatgctttgatatcccatcttaaaccaagcttgtggctacaggttcagctcaaaccttgacttcgggtgtttccgctgatgagcttgctggtgttggtgctggttccgatgctggttccgatgatggtgaagaagcgaacatgcccccaataccgctgatcttgtccttagcccaatcggtccatgattcattggaattatcgtgtccctcatgacctggtgcctcagcttttgcagcgtttgattcatgttgatgctgtaggtgacgttgcggcggtgtcaccaacgacggaatggattgaaacaagcacgatcattgagatcaaaacaatgaccaaagcaatctttgtcatttttgttttttatgtaaaaaaaagtaaaagagtaaaagggataggaatgaat

SEQ ID NO: 7666 - DNA, 554 bp, Gossypium hirsutum
  Clone ID: LIB3828-019-Q1-N6-A3
agttagatgaaaatgaaattgtacatcataatcaatatgttcaaaagttttacaacatcaaaaagtttgaacattgatatttaatggtgagaaagaaatcttctgacccattccaatcgggcaacagaaggtaaactgaagaaaacgatcatttgagttggatgatcgggaattttactcaaagcatcataccgctgatcgtcggttaaattttctctcttaagaaccttatcaggcgcattcccggagttgagcccaaagtaattcattctaggcttgcatctccctatattgttggattgtagcctgcaaatcttctcttgctcatgtattttagcatttccattcatcttgactatttatcaaaatggtggaagaaaatagaagggtatgattgttgctctatcattggaattatagaaaggatggattataggtttctacagcatcacttttatttggtgtctagatctaccttagtgttaataatggatggaatcttggtctttttttctcctaagatgataactccttgaagtagagaaactttttgc

SEQ ID NO: 7667 - DNA, 608 bp, Gossypium hirsutum
  Clone ID: LIB3828-019-Q1-N6-A5
aaagaaaagttacttctgttattaaatagaaccaatattcaatacaaattgtgacagactaatatactatacattatacaaagactttcaaggacgtggccaccccatggtagaagaacttaatctccctgcctgattgatatgccaccaaattccatattcagacaccagctgagacttcatttttggtcggtttatcttttttctttccgggatcttgttgagctttttgtacaacagccttatttggaaccaaaactatgaatatattcctgtctttgaagttcttgctttcctcagttgcaagctccccaacgtcattctgaaaacgcctgatgagttccatagccatatttctaaattcgttttctcgacctttcaagttcactatgaccttaaccttatcaccatcattcagaaacttccttgcagctttcaaacgaacagaataatcatgttgatcaatgttataacccattttcagttccttcaaatccatgcgattagttttcttctgctgtactttcttcttcttttgctggtcatatctatacttattataatccattattctgacaacgggaggatctgcatcaggggataatatc

SEQ ID NO: 7668 - DNA, 591 bp, Gossypium hirsutum
  Clone ID: LIB3828-019-Q1-N6-A6
aaatctaattatccacattttatataagatcttcaaataacaacttgtgaaacaaaacgtgaacaatgattcgtattacatatagtggctctgacaattcaatgcttgttgtgaaagatctaaggtaaaattcgaacccacattgatcgacggcaaggtactccattgtagttcacaaagagcatgtaataaccaggtggtgcaatgttgctattaacgggagcttgaagaacaatgttgtttgtatttatggcaacatttttgttaaattccacaattcccaattgaatcaatctttgattcatagcaaccccgtgcgtcacaaatggcggtgagtaaatcgtcacttgaagcttttgttggtcaatttcgacatttccacggatttgcactgtaaatttctgaccgtatttcacctggttattggaattttcaacaatgatctcttgttggaacatacccaagttcgggtccaagtaatgtggcgagaacttctcaacccgaacttcggtggggaacaatgcgtcatcaaggtaacctgggtttgtgttgcttccagcaatgagatttttgcatcgggaaggacagcga

SEQ ID NO: 7669 - DNA, 575 bp, Gossypium hirsutum
  unsure (1)..(575): unsure at all n locations; Clone ID: LIB3828-019-Q1-N6-A7
aaacgcttaatatatatatgtattngaagccattgcaaaggagtttctacagaataattcagtgatgattcaacactgattaggtttgccattttcttcaggaaaaaaattattaaatagcagcaatagaagtgaaaatcaatgcttgtttgatcgtggagacatcaattccgaatatcaggaagtggtaggccctttatctgcatctgcttatacatccattgccagttctcaggtgttacctcacccccaagtgaacgaatcactgcaccaccactacatgagcccactttgcaacattcctcaagtgataatcccttgaccaatccatataagaaaccaccagcgaagaggtccccagctcctgtggcatcaaccacttttgtctcccctatagccggaactcggacaacctctggtgcgtgttttgcgatgcatccgttggcccctaatgtaaccacagcccatcggcaatatttggacaggtattccagtgcagcttcaggactagcatttgcttcaccccttagtagttctgttgcttcatcctcgttggcaaagcagaggtcgatatc

SEQ ID NO: 7670 - DNA, 514 bp, Gossypium hirsutum
  Clone ID: LIB3828-019-Q1-N6-A8
agaaaaaataagctatatataatcatgtaaaggggaagagtctgctaaaaagccaattcagttcaacaacattaaccaatgaatgcgactgcagaacatttttttacaaacatatattcttaatgggacatacttttttttcaggttgcaataagggaaaataaatgaaaaataaaatgtaaatgttaagacagccaaatccgcagaagaaaacaaagtttggggtttcaccttcattgtcaagccatatacttcttttcacttgtcttgcttcggaacggggataacaatgaaaatgtacgagaagacttttgtggagtattatcggctgtcggggtttcatcctgagagattaggttcttcaacgattgaacttcactagatgaggcaccgtttgcaaccaactcatcagcctcattgtttgagtcaatactatgttcgcttctagctgagctatgattcctttttccaaacttcaacaaccgtcgaaaccctttcgatgactcctttactt

SEQ ID NO: 7671 - DNA, 602 bp, Gossypium hirsutum
  Clone ID: LIB3828-019-Q1-N6-A9
gttgatacgaaacaatatttgtggaatgaaaaatttccaaataaaaaagtcaagaacaaagttccagtctgataacagaaacagcatatttacaagtgtggtggccctgagtagggtatgaactaacgaacgaagcaaacaccgtgggaactcagtaattcagtcaagcaatgcatacaagggtgattatcatgcacgggatatgcatttacaagcagttgcaggtatacccaatatgatccatcaataaattgtcaagccatagctctaattaagtgctggtgctgccaagatcaaagtccatggtgtagtcatactcaattgtcggaattacagaggctacaaatttcaagaacaagaaaagatacttatcaacttcaggttctactccacgtgacataagcacatcaatgatctttttcatgacagccccatgtctgcatggatgtacggatgcatgcttcccaggtaagtgaggatggtcctcaatagtaaccgttttgtgtgcgtgatcctgactaacatcctccagaacaagctctggttgtaagagcatccttgactcatcatacccagtaagccacacacgaggagtctgatag

SEQ ID NO: 7672 - DNA, 201 bp, Gossypium hirsutum
  Clone ID: LIB3828-019-Q1-N6-B1
tttttttttttttttaaaaaaaaaaatggggtgcagtagggtttgctataaaatcctcttggacaaaaagataattatgaagaataaatagctcaaaacaatattcgatttgcaatatcctaaagttccttgaatcttgttttgtagccatatgtaattaatgcacgtgcatgctaatatatatgattttctttgttatat

SEQ ID NO: 7673 - DNA, 551 bp, Gossypium hirsutum
  Clone ID: LIB3828-019-Q1-N6-B10
ggtcaaacacgagccatgaaatagttataatgctagaaaaggtaagtagcaacgagcatacatgaggtcataatctggaacaagaaaatgatgaactagtctttcagctcgatctggtggcataagagtaaagaataactagaataggtaagcccatctacaaacaaaatggtacctaccatccactagccttcccgaattagttaagaccaataagggtcggtgatcagatttcaatttaaaaggatgtcgcacgatggtgtttggcgcaaaattctaccattccttattgcaaattgaacgatcaagtctctgaaacaactaccctctattccatgtgaacattggccccactggttcaagctgtactagcatcctctaacgattcgtcactacaaccatcaacctcaactacctcgtccatcatttttgaactctctccaatgtcgcactacagacgatatagtatttctcctatcactatcggaaccgaaaaccttggttagtcattcgctaccaaaggctaaggttcttagccagtgttcttaccc

SEQ ID NO: 7674 - DNA, 582 bp, Gossypium hirsutum
  Clone ID: LIB3828-019-Q1-N6-B12
tattttttgatttaattacttgattaactaagaagttaagttattcataaaatattaatatataacccaatcaaatggactttagatatgagactcaaatttatattcatttatgaaataatgttttttaataacttctcgcttaactattatataaacaagaaggtctgggtcttatttatattttaatagttttctatttatttttttcccatatatatttggatttacatatacttgcattttctatatattttttacatatttttatgatgcaattatatgaaataaagcagagatgggacctacggcagtggaaggtagaaaatgcgagtctccaagtcataaattcaaagggatgtgcatgaatcgtgataactgtgccattgtttgccagacagagggttatgaggatggcaaatgcgaaggctttcgtcgtcgatgcatatgcattaaaccttgtttttaagcaatctattaatatttcatcatccctgaagattgaaccttacacatgttgatatgggctcatgagtaaccagaattgaaagggcttgatattatcaacataattttgtcata

SEQ ID NO: 7675 - DNA, 598 bp, Gossypium hirsutum
  Clone ID: LIB3828-019-Q1-N6-B2
gggagtgatttcagttatttatttatatattcacagaatatatatgcaggtcctaaaattacattataaccataaaatggcggcaaaagaaagcataattaaatgaaattaaataatttattttactcactaaggctgctgaatgataatggcagtagacgccggcagtgttcataaattcattgaccatgaaagaacctgctgttgatccctgccctataaagttgcagctcagatgtagtcgcagtaatgacgagctctgtgttggctggttcgaacaccacatctccttcggtaacaatgcctttccaacatccagttttcatttttccttccccaacaaatgcgaggaagattgaaggacccgggatggccgagaaaaccaccgacgaccctttcggaagaatgcaacgatcaacctcgaactcatcaaacggtgggaggtaccttgttatgtaaggactcaatgcaagtcccgaaaggatttcagggtaaccctggttataggtgagcatagaacagagggtttggatatcacgatgcttgggagtgagaccagctcggacgacattgtcggaggttgccatgcattcaacgc

SEQ ID NO: 7676 - DNA, 575 bp, Gossypium hirsutum
  Clone ID: LIB3828-019-Q1-N6-B3
catgaacagtgataattctagctacagcatacaatttatgagccatttaaagagttcattttgaagcatgatttcgaagaaaaagaagaaaatgccaaaactccttagcatctttgcttacttgatttgattaattttggcattttcatcttcttactgaaatttaatcaaccaaatctgtaccagagatgaaatactctagtcgaaagttcatcttctcaataagaagcaatactcttaagcacgctactcaaatgatgcttcttcagttttcttcgtctcagattgcttgaccagtactgattgtgtaatacaaacgagtcagttgccacttttttcccatcatcattgcggttccaatggtagaatgcatgtgtcctattttggaattctagtgcttccaccaacaagaacgatctcatcaatttggctcttctgcaaaccagcatcttccatcgccttcttcacaggtcccatggtctttctgaacaggtcattgttcaattcctcaaagcgagctctggtcagtggctcggagaaatcaacaccgtcaaaaagtgattcaatctccacac

SEQ ID NO: 7677 - DNA, 611 bp, Gossypium hirsutum
  unsure (1)..(611): unsure at all n locations; Clone ID: LIB3828-019-Q1-N6-B5
aaaagtcataaatatttctatacttacaaataaaagcttaggatacattgaattttaacataattaaatagacaaacatgaagaaaatacaaagctccctccccttgactgcatattgatctaaacatacatattcatatcaaaatacatgagaaaggaagctgtcacttcattcattaaatagatgctccaagtagcggtaacaatagcaacatgcgatattgtttagtttgcttggatgaggtgggcgtcaatgtctttggagatatcttaaaccaattgcagtagagtctcggggtgcgcaatcccatcgtgtagcttctcgtattccaaagtccagtgcactatgctgccactatcctcgctcttgggcgaaactagaatcatagctacaaagctcttgtactcttccattagatctccttcaatcactctgaaagtgatcaaattcttatcagggtctaccgcttccactacttcctttgcctttttagcctttccatctaagcaaataaccttttttctttaacaaaacaanaagagcaacaaatcaggtgataagcattaaaagaaattgggtttgttatgttatatcataccatgcacataac

SEQ ID NO: 7678 - DNA, 532 bp, Gossypium hirsutum
  Clone ID: LIB3828-019-Q1-N6-B6
attagcaactagagattcaatgtcatagaagcaagtaatgggagaagctattgttacaatgttcatgtttcttctatgaaaacatttgaattctcgcgtactagcaccgaaagtaaaacgaaaactcaatttgaagattgaaggaaaccgaatcctgcaaaatttcacagcttctactctcatttatagcaaatagtatatagtatatattatcaacttcatgcttctggactcagcctatgcatgtttacctttttatctgcaaaattcatgggggataaactctatacatggtctttaccgggtttgtgagtacgggttttccagctataggcttcggattttgcgtcttcttcatcttccgtactgtcacctcttgttgtggaggttcctccagtgttcgtagctaattggagagggccttgaggagaaccggattgtgaactgctacctttcgaagaatctccatattgatcatgggacagccatagaccattccccaaaacaagggctgattcatttgctggggtgg

SEQ ID NO: 7679 - DNA, 595 bp, Gossypium hirsutum
  Clone ID: LIB3828-019-Q1-N6-B7
gtaaaaagaaacaaaaagaaaaatgaacagaaaacaagagacaaatatcaaaagtgtcaaccaaacagagatcaagtgcatccattcaaatatcaaataaataagaaaatttactactcaatttatcccgaaggagatctactttcctttgtaactcagtcttcagtttcataacatcttctcgagctaaccgtaattcatagtcactaagtgctaatttttcttctattgcttctttctcttctagcaaattttgagggtctacaactgaatttcaagaactatattagatgaaaccatcagtaagattcacttattccagatctaaattgaaaatggacttttgctctagggcttagagcattgataaatgggtagaaacatgcaacaccagcaaccaacgattatttctttaagcagatactttaatctcacgctctaagcaccccaacccccaaactatcagaggtgcaatctaatttctgtatttaattgcttaatttgatttccatgtcaactggaattaagaaccatttccttttctcctatcttggatgaagttttcataatttgctaattttctggttgtacttct

SEQ ID NO: 7680 - DNA, 433 bp, Gossypium hirsutum
  Clone ID: LIB3828-019-Q1-N6-B8
tttttttgtcttttaaaggaccaacaactaaaacatgtgttatggtaaatgccgtacaaggggtgaaacaaaccaccacatgcgtaatatcatttgctgcccctacttaaataccggcgtaactgaaaaaacacacctagggaaacagtttactccaacatgacaatgtacccaggataagataaccggtatctaaaaaggttcaactgcatactaatagatagtgtacaccttaatttttaaggaatgacaacttgtatgcgggctattaacagcaaattgtgagctatccgccagcccccatatatgaaagaataaccaacgcatgaaatctatgttgaatttttaaacatttcatcataaaaagggggggggggtggagatactacatactttacaacatcaaacattatcaagctctgaggattgatgc

SEQ ID NO: 7681 - DNA, 411 bp, Gossypium hirsutum
  Clone ID: LIB3828-019-Q1-N6-B9
aaacagtgttgaaggttgtagcttaaattaaataacaaaaaagatcatgtgtattgccatgcacatgcattaataacatatggtcttccaaacaagaaagaaggaactttaagatatcgaaaatcgaatattgggtggagctattcattctaacataattactcttcttgggcaaaaggaatagatagcatacccttctgcgacatgataacttcttatagggtgtaagcaagaagacgactaccaactgtgacttgatgttcaatttcaataagtgatcaaacttctactctggatgcctgggtgtcacatgtctcataacctggccatatatcatacgatgtatacagtggcagcctggcaacatgctgatgagcctgtatcctggaccgactcgatgttatacccata

SEQ ID NO: 7682 - DNA, 285 bp, Gossypium hirsutum
  Clone ID: LIB3828-019-Q1-N6-C1
aataattagtgtttaagaccaaaaaaaatataaaaaaaaacaaaaaaaaacataagaacttgatagatagaataataaaaaaaaagaaaaccaaataaaactggtaaaagaaaaaaaatatgagaaaaaaatatcaaaaatggtggactgggttaaaatgatataaaaggaaataaacctccgaaatatacaggaaaagaaggtaacaaaaagaaaaaaacctggagagaccaaactaaaaaaaagagccaacaaaacaatgacggtaaaaatgtaaactctcac

SEQ ID NO: 7683 - DNA, 586 bp, Gossypium hirsutum
  Clone ID: LIB3828-019-Q1-N6-C10
atgattagaaaattctagttctcattaatttgccaacaatccaaaaggaaatcattgtttaaggggtagatggtctttaacaaaatgcatccagaaatgaaaagtcttggccctactacaaaaataaaaaagaccaaagcaactctcaagttcgaaatccattcaagccactccatgccaaaagtacttttggaatctaaaacctgaaatctaatgagagacagactgtatataccataaactttcctccattcataaaaaccaaagcttcagatgtccaacaaactgaactcacacagacagatgactgaaaaatgtaggcttccgatacattcaaattagaagcacttccggtgaacgatagctgggcctgattcatcatactcgcccttggaaatccacatctgctggaaggtgctaagagatgctaaaatggatcctccaatccagacactgtattttctctcgggaggtgcaaccaccttgatcttcatgctgctaggggcaagtgcagtgatttccttgctcatcctatcagcaatgccagggaacatggtcgatccaccactaagcacaatgtttccgt

SEQ ID NO: 7684 - DNA, 485 bp, Gossypium hirsutum
  Clone ID: LIB3828-019-Q1-N6-C11
aatgattctttttatttcattttattttatttcaacggaaaaaggcttgaacttagcttaatcggatgtaaaaaaaaaccctttgaaattgtaacagcaaggcttgggggagaaaaatcacatcttacaggccttggaaagtaacgtcatgtgaaacattttgcaaattatgaactgcttgctgaaaaaaatggggcctttgtaatatctcaggattttttactatgtgtcgaattttaagaaagcttcaaccaaattctttttataggtgagggagatccgaacttcttctattgtgatttccggatgttgaatccgaaaagaccgtatatgctacattgaaaccatagaattgccttgttttatccaaggaacgtgaatagaagtaccgtttgtagtcatcttcgccaacagaattccctttctcacttgccttgatagccttaactgcctgtttatgtgatctactgttatggacaacgggt

SEQ ID NO: 7685 - DNA, 289 bp, Gossypium hirsutum
  Clone ID: LIB3828-019-Q1-N6-C12
aaaaaaaaaaaaaaaaatatttattaacaggcccaagcaaaaataacaaaggggcacaaaaaaagattaaggggactttagggaattggaaaaggaaaatgggttggggccattaattcttaaaaaaaacccttttgggccaaaggggttttaaaggaaacccttgggaaaaaaaaaaactttttatttggggaaaaaaaaaagaagacaaccaaccctccccggggatttaaaataaaaagggggaaacctccctacttgggggggagggggtcaccggcaaaaacct

SEQ ID NO: 7686 - DNA, 591 bp, Gossypium hirsutum
  Clone ID: LIB3828-019-Q1-N6-C2
gtcacactataaactccttcgcttaatattgtattaaaatatttctttaaataatacataatatatatatgtcataagatattttaggagtaattaaacgtacaatccgtaattaaataacataatgaacaagatcgtacacttttttttaaaaaaaaaaacataaatgttgcctgaattgcatcggcctttactttttggtgatgatgaagctgtcgtcaacatttttggtatcggaattcaacaaactctaatttcagctcatcctttgttgcatgtgctctaacatacccaaattcagaaatccttaccaagctccaactaggtgcatcatcagggaatttgtcgaggctgaaaccagccattccaacgatagcttggacaggtgcagtgtagttggtattatcgtatgtgtcgatgccatttttatctttttcgggcattgctagacattctgatttgtagatcgagcacgttctctcataattatgtaaatgtccgaaaaggaccagatccaccttgttattcaagagaagggttctactgtttcagaaaatgatcatcagcacctaaaaaaccgtacatgggcct

SEQ ID NO: 7687 - DNA, 427 bp, Gossypium hirsutum
  Clone ID: LIB3828-019-Q1-N6-C4
attattcaaagctccattttattcaattttttcaaaattcatcacatgtttctttcgaaaagaataaaataaaacattcgttgacatgttcatttttcatacatgtaacttattgcagcatgtaagaaaacaaagaaacaatgggggccaatgatccaagaacaggcaaggtagcggcagccaccctggaatccggtcctgatgctggggcggaaccaggagaggagctaggactagaaccaccggctgaaggggcaggaaatggtgcaccggcagccatgacgaccctcattgaggcggcagcaacaatgatggcgggggagaccttcttcatgtccatggcgtataaaggggttattaaacccactggaaatgaatgagacctgcgtttaataactggtgaatggggatccgccggtgattgtta

SEQ ID NO: 7688 - DNA, 489 bp, Gossypium hirsutum
  Clone ID: LIB3828-019-Q1-N6-C5
aaaaaagatacttttttgcctccatagaacaatatatatatatatatagggaataccataaaaccctttcacaatcattgattacttagtaaaacaaggtaagaacaaacagtataagaaactacgacacactgaaaatatactgagactccggtgatgccggtgctacaaaaaaggggttcgagtttcaaattggagtatttatatcagtgatgttttgatgatggtgaaggtggacattggtagcacttggcgaataatccgaacgtatctacttgcttgatgaaattcgtcatgctagcccaacctcctaatccgaatccgactacgaaaacccatatcacgatagctgtgttcaccgcatagattgctgtccagcttgggaggaagcaaggaagtttctcacctgcattctttcttggagaggccgatttataagtgagcgcatgagctaaagcaggaatgatgtaaacagggaatctaaccaaa

SEQ ID NO: 7689 - DNA, 87 bp, Gossypium hirsutum
  Clone ID: LIB3828-019-Q1-N6-C6
gaaaataagaatggcaaaatttattttaccattatcactggtacttggcaaatgctgcttgtattgaaatcctaggatatcttccaa

SEQ ID NO: 7690 - DNA, 257 bp, Gossypium hirsutum
  Clone ID: LIB3828-019-Q1-N6-C7
caaaagggggtttaaacttggaatggagggataaaaattaaaaaaaccccccccccccccgggggtattaacacaaaaacaaatcgcacgggctctctctctcttgggcaaaaaaaaaaattaaggggggccaaaaacttgaaactggatttttaagaaacaaaatatatatatataggaaattcaaaccccggataaaacaaccccaggccatggccaaattggaaaaaaaaaaaatggaaatcgtttaaattttc

SEQ ID NO: 7691 - DNA, 589 bp, Gossypium hirsutum
  Clone ID: LIB3828-019-Q1-N6-C8
gagattataattactaagatagagttccataatttagttcgcctcattattctatattaaaaggacgaatacaatctaaaatatgaaccataaaaaaaatattaaattgattacaggaatatcaattacagtatctattatccaaagagaaattcctccagtaatgtcgaccatttatcccgcttccctcaatatttcatcaagtgatcatacgcattttttggggggtcagaaaccgctactacattttggatgttgcaattgcaacattgttcacatcgtctgtagtttcatcaactccaagtttatctaaaatctctctataaagctgctttctattttcacagtaaacttggccgttccacccatttttaaccaacttttctcctaattccagcgccccttctgccgtctccgccgctgtatcaaacgctgcgtcgataattccactctccaatgcttgctcagccgttaacttcttcgctttcaacaccacatctcgccgtaccttggcgtctccaatcttgcagcttataacggcaatgaaccaagccgggaatttcagcccgatatccgtttcactcatgta

SEQ ID NO: 7692 - DNA, 587 bp, Gossypium hirsutum
  Clone ID: LIB3828-019-Q1-N6-C9
ggtaagttataatgctatgtataaatgttttatttaaacaatatctagccataaccattttggcaccaaatgtaatagtcttataccgggtttgtatgattagatcaggtatagggttgttacagcattaggctttgtcgtctgaaaaactcacgatacaatatagccagaactgcggaaccctaactatacgagcgaacattctgcaaatcagctaataggggtaaatacatcaaatgaaccttattgttcccatccggcatcagtacaccccttataatatgcataatgtacgctccagctgtgcacatcacctcatgctcagtgacattaattgataaatgttcaaaatttattttcagccatgaaaatttcaaactcgtaaaattggactcggcattgttaggcgagacttctagtaggccataacaaagggtagtcagctcagctatcgtacttacgccctttacggcactcccgtcgattgggagcccaagttgcaatgcaacatcctccaaagtgacattgcacttcccacacggtaaatgaaaagtgtaggtctttgggtgccaacgctcgaccaatgc

SEQ ID NO: 7693 - DNA, 568 bp, Gossypium hirsutum
  Clone ID: LIB3828-019-Q1-N6-D1
attagcatgcacatgcattaattacatatggctacaaaacaagattcaaggaactttaggatattgcaaatcgaatattgttttgagctatttattcttcataattactctttttgtccaagaggattttatagcaaacccttctgcaacatcattacttcttattttgtataattaataagacgacaaccaactcttcctcgttatttcatcttaatatggtatcatctctctactttggtggactgggttcactgtccataacctcttctatccctttgctctttacagtttcagcctggcaacatcctgatgcgcacctgggctgatcacactcagcacaagtcccaccacaaccctgacggcaacactctccactctcacatcccgactgtcctggcattagtgggatttttgggacttgtgggatctgtgggacttgtgggatctgtgggattagtggaatttgtgggatttgtgggatctgtgggatttgtgggatttctggaattcttgggatttgtggaatttggagaaaaggtagaacgaaaccaccaggattacaatt

SEQ ID NO: 7694 - DNA, 411 bp, Gossypium hirsutum
  Clone ID: LIB3828-019-Q1-N6-D10
tttttttttttttttttttttttttttttttttttttttttttttttttttttttttttttttttttttttttttttttttttttttttttttttttttttttttttttttttttttttttttttttttttttttttttttaaaaaaaagggaaaaaaaaaaattttggttttggaaaaaaaaaaaaaaaggggaaaaaaaaaaaggaaaaagaggggtcaataaagggttttggaaaaggaaagaaaagggggggaaaaaaaaaaaaagggagagggggggggaaaaaaaaattttttggaaaaaaaaaataaaggggaaaaaaatggggggatttggaaaaaaaccggaaaaaaaaaaaaaaattttaaaaaaaaaaaaaaagatataactaacaaaaatttgaggggg

SEQ ID NO: 7695 - DNA, 551 bp, Gossypium hirsutum
  Clone ID: LIB3828-019-Q1-N6-D12
catgaaatggatttatattgagaaaaggaagtaaaaacaaattagtgaatgaatattcatatgaatcaagtccctgtgacaggaaattttagactatggattaagcatacagagtgctaatgaatggttctacttttgtttttgttcattcatcggacgaaataaatgatttttgtttgttattgttcattcatcgaactaaataaatgatcatgagtaagatttgagccggatgctaatattttcccggagaacataatctttggagtttcaggtataatacaaatgctttcagctcttcatcttattgggtggtactgttcagagacccgcttcggaggcaattttcgaagaatgaacagcaccaaagctgatggaagaatttctacgaacatgtaatagataagatttaggattggatgatctagaacataaagaccagcattcatgtcggccgagagtgtggacacaatgcatcttatcaagaaacaagtacagcagattcctgttacaaagccgacctcgaacccacgcgtccgcccacgcgtccg

SEQ ID NO: 7696 - DNA, 606 bp, Gossypium hirsutum
  unsure (1)..(606): unsure at all n locations; Clone ID: LIB3828-019-Q1-N6-D2
atagtaatactcaattattaagctagaatattaaccgtcataaattgaaaacaaccaaagccaaataaattatttataattgtgttatataaaaataaaaaaaaggactgaataattataaattagcttccaaaccacaattaatactagaaattaataaaaaaaccgctggaaatgcttgactgtaactggaagttggagatgctggagcctcaaactcggctacactatcccgattttcaggtacatagtcaagaacatcaagaagattacaaatgcggcccatttcatcagctataaaaggcaaatcatgtgtatatctccattcaccatcgacaatgaacttgtaatggtatatgccagacggaaggaccaaaagaactgagtggtccttaccagatctctgccatgacatcttcgtcttgatattctccttccatgtcataatcatcataatcttcgacttccttgtgtgagcaagccaatctcattagaaattccttctatttcttccaaggaagaccaatttacataagcttgtctgaccaaattctgttgatactacttannggtttgtataggatatgtagtcccattaatctctgc

SEQ ID NO: 7697 - DNA, 457 bp, Gossypium hirsutum
  Clone ID: LIB3828-019-Q1-N6-D4
cgcatcaattctgtcaaatcctttgcaaatacatgcctacatacatccatatgatataatgcaacacgacatgagctcctaattttaaattaaaaaagtaagcatttctttcatctttatcacactcgtaagaagtgccaatcactcaataccattactgaaagttgacgaaaataaagaacaacaaaagttgccccccactgcccttcattcatctgcccgaattactactctcctttttcatgtactcccaccagggaaagtgcaaccattatagcctgtaaagtgccaaatattcatataaaatgagattaacaattgtattcgcacagtaaaaagcagaggtccactttaagaaatatgtacttgggttgctagaaaaaacatggctgcttgtgagaaatacagctcgatggatccgggccagaacttgattatagagatcatcgaatatact

SEQ ID NO: 7698 - DNA, 492 bp, Gossypium hirsutum
  Clone ID: LIB3828-019-Q1-N6-D5
aatactacaaccatacaattatattttacgatttcagggtatatataaatatatatatgttcgttctccatattcctacaacatgtaaatatctttagaatacacactctgaaacccaaaccctattcactacaaaatagtttctcttacccatttttttccttctaatctctctgcgccagtgatgaaatggaacctccaaccctaaagcacccccaactgccttctaaattttattcactgtcagattcatttcctgaatctatgttcatcggctgaggatttttatatgcattcctttcaacatcgtatcgtcttttatctactttagcctttgcttcatatggttctttttcctcctctgacagctttttccacttttctccgagtattctcgatatctcagcaaacgaagctccaggattagttttctttatgttctccctctccacttgggaaaaaaacatgaaaccccacatagccctctttggg

SEQ ID NO: 7699 - DNA, 520 bp, Gossypium hirsutum
  Clone ID: LIB3828-019-Q1-N6-D6
tttttttattttttttttattttttttttttttctttgtttctttttttttttttttttttttttttttttttttttttttttttttttttttttttttttttttttttttttttttttttttttttttttttttttttttttttttttttttatttaattttttttttttttttttattttaataaaaaaaaaaataaaaaaatttaaaaaaaaaaaaaaaaggtaaaattttaaaaaagaaaaaaaaaaaaaaaaaaaaggtaattttaaaaaaaaaaaaaaaaagaagataaaaaataaaaaaatttttaaataatttatttaaaaaaaaaaaaaaaaaaaaaataattatttaaaaaaaaaaaaaaaaaaaaataatatttttttttgaaaaaaaaaaaaaaaaaaaaaagtatgattgaaaaaaaaaaaaaataatataattttattaaaataaaaaaaaaaaaaaaataaaatatttaaaaaaaaaaaagaaaaaagaaaaaattttgtgggtt

SEQ ID NO: 7700 - DNA, 428 bp, Gossypium hirsutum
  Clone ID: LIB3828-019-Q1-N6-D7
ttttttttttttttttttttttttttttttttttttttttttttttttttttttttttttttttttttttttttttttttttttttttttttattttaaaaataaaaggaaaatgataagaaaagaaaaaaaaaagaaaggaaagaaaaaaaaaaaaaaaaaaaaaaaaaaagaaaaaaaaaaaaaaaaaaaaaaaaaaaaaaaaagaaaaaagaaaaaaaaaataagagaaagaagaaaaaaagaaagggataagaaaagaaaggagaaagagagaaaaaaaagtattggagggaaaaaaaaagaaaaaaaaaaaaaaaaaaaaaaaagagatgagtaataaaaagaaaataaaagaggggggaaaaaaaaaaggaaaaaaggggagaaaaaaaaaaaaaggaaaaagaagaagcgggataagaagg

SEQ ID NO: 7701 - DNA, 591 bp, Gossypium hirsutum
  Clone ID: LIB3828-019-Q1-N6-E1
atataacaaagaaaatcatatatattagcatgcacatgcattaattacatatggctacaaaacaagattcaaggaactttaggatattgcaaatcgaatattgttttgagctatttattcttcataattactctttttgtccaagaggattttatagcaaacccttctgcaacatcattacttcttattttgtataattaataagacgacaaccaactcttcctcgttatttcatcttaatatggtatcatctctctactttggtggactgggttcactgtccataacctcttctatccctttgctctttacagtttcagcctggcaacatcctgatgcgcacctgggctgaccacactcagcacaagtcccaccacaaccctgacggcaacactctccactctcacatcccgactgtcctggcattagtgggatttttgggacttgtgggatctgtgggacttgtgggatctgtgggattagtggaatttgtgggatttgtgggatctgtgggatttgtgggatttctggaattcttgggatttctggaatttgaggaaatggtagaacgaaaccaccagattacaatta

SEQ ID NO: 7702 - DNA, 482 bp, Gossypium hirsutum
  unsure (1)..(482): unsure at all n locations; Clone ID: LIB3828-019-Q1-N6-E10
gcatcaaacaaaattcagggtctttattttattattgctcttatatattttctttagggaaaaaagatttgctatccgtcatgttctacactcaagtaaaagtttaaacatacataccaaaacaaaggatccataaccaaacaaagtcataaccagtcttctcactcagagataacaaatgaagtttttgttatttcaaaaggctcccaccctgtcacggggaatcaggcgaagttccgatccatgtttgaggaacacatttcctgcactttgctgaggattgattcccacaccatcattggtgatgatagcactggtttgaggagggactttgaattcctcggctgcgaatttcaagacggctgtaaaaggggctgcttcaggcacgctaaacactttgaaagggagcttaggatcagaggtaagagtgactttaaatgacacttttcctccgctcgccatttctctcctttgctttnctc

SEQ ID NO: 7703 - DNA, 539 bp, Gossypium hirsutum
  Clone ID: LIB3828-019-Q1-N6-E11
aaggatcacgcatgtaaaatgcaaatcagacaaaatttgaagcaaacattacacatcctaaaatataatcataataattatccaatattatgatagtttctaatcataaggaccttcccgaagtcttttctaatccataaatcactcatttgactagtaagaataataagaaccaaaaccacaagccaaacatctctcccccaaaattaaacatgcacattagagcatgtaaacccgacctcatttgccaccatgcttggccttcttgtgagactctaaaccgccctcagacccgaacgactttggagactttgcagaatttttcccaaattgctttgctggatgcggtgttgctgtgtgtccacccttcttaccatctgtcttctgaggtgtaactgcagatttagccttttttgcagaagcaggggttgcagcttcagcaggtctcttcttgcttgactcgacaggtatcttcttgcttgactcgaccttcttaggtgtctcctcatactcgtgatctgaactatcatccatagaca

SEQ ID NO: 7704 - DNA, 329 bp, Gossypium hirsutum
  Clone ID: LIB3828-019-Q1-N6-E12
atcaaaaagcaaatgtttattagtaattttttatcccttcatttttttcatagatcaaaaaagcaaatggctatatatgaaatcttaaaccttgaataatcccatggaacaggagagaagcttatcaactgtcagaaagaaaatttggaccaaggtttaggcaaggggggaggctcaaacatggggggtttcccatatttcgaccccgggaaatgtaaaaaagtggaagaaacccggcaggttttgccatttggccccccccaaacgggaaaaaagtatttgaccccaggaaccttcaggatttgggggcctaccgcccaagaaaacgt

SEQ ID NO: 7705 - DNA, 461 bp, Gossypium hirsutum
  Clone ID: LIB3828-019-Q1-N6-E2
cggaaaaaggccgaaaattggggcacgagaataaaaaattacaacctgggtaaacagtttacagccctacatggttttggataaggggttatacaaggaaaccacattgccctacaagccaaggcaggggggtaaaaggcaaatccattctttcaaacaggggtattggggcaagggtgactgggtgggatcttaagactctggtagaatgaactcgctttccacaacacccttgccttttggtttggccaaagtgggggccgggaaaggtaatgaagcccttaagggacggggggcctgagattacgggccaaatccccgcacacaaaaatattctttacaaaaacaggggggaagtccctgtgttggtaagcctttaagaattgaggggatggatggcccaaaggagaccattgtccttggcggggaacatagccattccctgggaacggaaatagggt

SEQ ID NO: 7706 - DNA, 150 bp, Gossypium hirsutum
  Clone ID: LIB3828-019-Q1-N6-E3
tttttttgcaaagtaacttattattgccataaatttaatataagttgatacatgaactgaataggcgttaagcttcccgcccacaccatcaaaggcttctagtctttaacaaaaaaatagaaaaaaggaaaaaagagagaatcatctttc

SEQ ID NO: 7707 - DNA, 355 bp, Gossypium hirsutum
  Clone ID: LIB3828-019-Q1-N6-E4
gggaaaaaaaaaaaaaaagaatggggaaaaaaaaaaaattaaaaaaaaaaagggggaaaaaaaaaaggaaaaaaggattggtaaaaaaaaaggggggttaaaaaaaaaaaggggggggggaaaaaaaaaagggaaaaattcaaaccaaattgggggaggggagggggactttttgggggttaaaaaagggggaggaaaaaccggggggggaaaggggtttataaagggggggtaaaaaaaaaaggggtttggttttaagggaaaaaaattggtaaaaaccaaaaaatccaaaaggaaaaaaattttggataaaaaaaacccgggggggaaaaaaagggggggaaaaaaaaagaat

SEQ ID NO: 7708 - DNA, 553 bp, Gossypium hirsutum
  Clone ID: LIB3828-019-Q1-N6-E5
agaaccaaaccaagacttgcttacattatatatatattggccagattgcttacataatatttaaaaagcatataatataataagttttggtgcaacaataaacactgtaactaggaatttaaatagcatcatccacattttttaacccgtcgtcaatgtgtgtaattcttattctcgggactaaatcgacttaagagttagccgaagtggggtttaacccgtgttttgcaagccggcagcaatacccttcatggtcaaaatgagggtgtcttctaaaccgggggcgtattcacttgttgggtttagtttcacgagttcatccgcggatttgtttgattccatgatctctttggagatatgtggacggaacttgacatcgtagctcgggtcacggatacctttgagtgtgtaggcttggcagacatttagtgttgttatgtatgaatctcggagccgtagtctttgcttcaagtacggatcaccttcgagaagatccttgtgcccagcaatttgtaggagaaggcttttagtttcttcataggtaggcctcaac

SEQ ID NO: 7709 - DNA, 599 bp, Gossypium hirsutum
  Clone ID: LIB3828-019-Q1-N6-E6
atgcaagccactatcatttcaaccactcaatcagaaggataacaagaacaccgccctatcattaactgttagctacaaattttctttcttcaagcctattttgcacttcaaacaccgccctattcttctaggtaactatgttcaacacatacccgaacacgatatcgagaggggtacaagaatgaccctctaagaaccttccaatttaaagcttcaagctaatcctcttggaccatactgaggggaagaagaaactacgtctcactacttgcttaatgggatagcatctaacaaataccaaatatacattaaagaagaacaagtttggacatgcaaccaaaaagccataataaatactactacttcctccaaacatacacatggcttattcattagtcagaatatgaaaaactcccttaccaagtaccaacggaaatgaaaggaagatggggaaacaaaacacacgcacaaaaagaacattcaatttccacaacattcagaaaacaggacacccgccttcgaaaagcctggagacaatttgaagtggttccatttcgtacttgcagccagtatgctgccacaaccatcaacgtcggcca

SEQ ID NO: 7710 - DNA, 482 bp, Gossypium hirsutum
  Clone ID: LIB3828-019-Q1-N6-E7
ggacaaacagatgaaatcttgattttaattgaagtagatggaaaaagtttacttgatcaatagaaagagcccatgttttttttaaatcctagctagcaccctacattgcttgaatcactgattcttattctttatttgggcaacatactcaaactacacgtttgttaaaagcagcaaccttcattccttcaatctatagctctttttgctaccactggtattcattttggcaacgtactcaaacaaactcccatcgaaacaacccctcacggttttttttgacagataaccattttcattttttgccagtctatacaaaactatccattctcccttcgatattatccagccaatgaagtcatatgagtttcgattagcctcagtcatgtgccatagttctccgaatgttaacttatcggacacagttcgagcgtacttgctgaaaaactttcaaagttcattggcataaaccttccttcagg

SEQ ID NO: 7711 - DNA, 400 bp, Gossypium hirsutum
  Clone ID: LIB3828-019-Q1-N6-E8
aagaagcaaaaattatatattttaatatatatttcaaatccccctcatttgacacccaaatttactaattaaatttaccattttatggcaattgaggaaaaaaaaaaggctccccaaagcaaagtgcagaaagattagaacgatgataaaaaaagaagagtttagaaagctcgctctttgacaatatcaatactcatttcacttgcatcggttgcttgcaattcaacttgaacaccatccaactcttttctgaatctatctttagagctcgcatataacattttgctcctcacccttgatgtatcaggagaccatgcaatgaagaagattttgcttttctggacattttcgtcggtagtgaagtcgaaatcaaagacagcgtaacgacactcgttatgag

SEQ ID NO: 7712 - DNA, 527 bp, Gossypium hirsutum
  Clone ID: LIB3828-019-Q1-N6-E9
caatctaaaccatctttcatgcgattataaagcaaattttacatccatgttcagttttaaccaacttgcaggcatgcagaaatacaccttttatttcattaaatacatttggaactcaagcttttctcaccctttttttccccatacaccaaaattggctacagatttataagcttatttaaattaactgctgaaaggtggaggccttggcatgccttgcacgatgccacaagtcaatacaccttccggcaagttgtactcatccttgagggatcggttaggggaaataacactagcataaagctgttgcccaaggtaatgcctgtcccatatctccgacctcaggttccacatcccgcagttgtcgaatgtcaataggattgctgaccaggagttggggaatacctgtatggtgtgtctgctcacggcgtcgagaagatgtagttcatcctcttctcagggctccatttcccaatgtccatgcccacggcaaaaaatgagtagccagataagtggtaagactgaat

SEQ ID NO: 7713 - DNA, 610 bp, Gossypium hirsutum
  Clone ID: LIB3828-019-Q1-N6-F1
agcaaagaaaatcatatatattagcatgtacttgcattaattacatatggctacaaaacaagattcaaggaactttaggatattgtaaatcaaatattgttttgagctatttattcttcataattactctttttatccaacaggattttatagcaagcccttctgcaacatcattacttcttattttgtataattaatacgacgacaaccaactcttcctcattatttcatcttaatatggtatcatctccctactttggtggactgggttcactgtccataacctcttctatccctttgctctttacagtttcagcctggcaacatcctgatgcgcacctgggctgaccacactcagcacaagtcccaccgcaaccctgacggcaacactccccactctcacatcccgactgtcctggcattagtgggatttgtgggacttgtgggatctgtgggattagtggaatttgtgggatttgtgggatctgtgggatctgtggaattcttgggatttctggaatttgatgaaatggtagaacgaaaccaccaggatttcaaattaccgggaacatccagaaagaacaacattttttcaggaaccacctttcaa

SEQ ID NO: 7714 - DNA, 538 bp, Gossypium hirsutum
  Clone ID: LIB3828-019-Q1-N6-F10
gaactattcatatatatatatggtagatatgtttttgtttatttcctttgtggtgtgatttaagcagctgcaactgtgctagttcgaatagagtaaccttgagcttcattcggagatgtagactccctttggctcttctttctcatagctttcactgaggaagaaaggttcatgtccttttctttagcttcatctatctcgatttgttcttgtctgcagtcttcactgcagaaaggtgtgtcccctctgtacatgaagatgtcacggttacacccaagaggcttcttgcaaagaaagcaaacatccaagaaatagggttgatgaacgtcttataaatctggcatcataaaagcgagcaggcctcggagaagaaactgaaccagacgaagatgacgaagaaaaagaagatagattcctcaaactactccttctagagaaacaaagaggtcttgaaagaaacccattttggttaacctttcggtaatggcttcctgaatatccagcctccatatctacaatggaagccaatccatcatct

SEQ ID NO: 7715 - DNA, 263 bp, Gossypium hirsutum
  Clone ID: LIB3828-019-Q1-N6-F12
aaaggaaaatttaaaaaaaagcctacttaaaatttttttttttcaaataaaaataaaagaaaaaaaaaaaggggggcccatgggaattaaaacatttttaaaggggggggggtattcttaattttttttcttttgggaaaaaaaccggggtttctaaaatctttttaaaaaactaagaaaattcggggcccaaagctgggatattaaggggcttttttttcccaaaaaaacaatgggcataaaatttcggccccggggggccc

SEQ ID NO: 7716 - DNA, 516 bp, Gossypium hirsutum
  Clone ID: LIB3828-019-Q1-N6-F2
attagaaattgaagcttttaaatttaatataattctagtggcaatattttgaagctctacagatgagaaaaaagataaacgttgagaaatccatcaagtttaagttggagagaactgaaagaagttcggggtcttaatcatccgccaatcataataataacacctcaataagaaacactgcctttttcttttctttttttttgccaaaagcgcgcacacatacatgcgcaccatcatgtcatatgaaccctcttcagggacttaaaaagtttgagatctttaaaaaatgcaatgctaacatttccaaaaggaatatggcactccaccgtatcatcttaaaaaccttcaacaaaagccattttctcatgatgttccgtgcttgtcctcagaatcttgaggtgcccacttatagaagtatatgaactgttttactatgaaagtatcaagcagaacacattctcctgcatccaccaaccatgggaaatttggtctgattctaaaccaatcacatgccga

SEQ ID NO: 7717 - DNA, 434 bp, Gossypium hirsutum
  Clone ID: LIB3828-019-Q1-N6-F3
agaggcaaatcttgtgtagagcctaatcactgtaaaaaacacattagtatggttgcagaatgcagagagacaaagtgtgggactttatttctagcaatcttaaagatctaatttgagataacgaaacagatggctaacattttagcgcataaattacatcccctgtatgagcagactccactttaactactatcacttggaacaacagtgcactggtgatggtggctcaacaaccaaaggctggggccctccttcacttactaatcagaccgagctgcgaaccgctcaaccttcttatggttgaaattaaggccaaccatgggcttaccaagcccacagttaacttgcacaaggaagtcggggtcactatagtgagtgacggtctggacaatagcttgggcacgcttaggcgggtcaccactcttgaaaacccc

SEQ ID NO: 7718 - DNA, 587 bp, Gossypium hirsutum
  Clone ID: LIB3828-019-Q1-N6-F4
gatgaatccaggataaggacaatgttatttaggtaaatgcttatacatagaaaacatagatatcaagtagattaattagataaatcgccaaatatcttctaggactttgattgagttgggaccttcagaggctgaaatccatgcttgagacatgcttcccaaactttgtcaatgttagacatggtgtaaccacatccgtgctcttcccatccttccagagcatgcagtatcccagctatgcgccatacacttatcactctccttggcaaccagttctcgcaagaatccacattctcaagggccgtcggagtctgcatcgctggtgttgtgtgatagaagcagtccttgcgcaatttttttggtggaagttgcgagaagggaataaatagtgttcctttatttgcctttctttgctcttcttcggtcaagtcatctcccacaaaccataccttgcaagagctataactcttagaggtaaccaatttaccctcagatttggttccaagtgacttatcaagcttctcatattcatcctcacgcaatatagtgacctgaatgcccttttggcatagggcaaaggcaactgc

SEQ ID NO: 7719 - DNA, 554 bp, Gossypium hirsutum
  Clone ID: LIB3828-019-Q1-N6-F5
aattcaaaatatggttaaatttccatttaagctccgcaaattacaggaagacccacaaaaagctactgatttttacaacaaaaccatatttcccagatttttggaaactaagaactggtgaactttgtaaccgccttggtcccttctgaaacagcatgcttggccaactccccaggcaggaccaatcttacggcagtctgaatctcacgggaggtgatggtgggcttcttgttatagcgtgcgagcctcgaagattcttgagccagcttctcgaagatgtcgctgatgaagctgttcataatacccatggctttgctggaaatgccgatatcaggatggacttgcttcagcaccttgaagatgtagatcttgtaggtttcgatgctcttcttgcttcgcttcttcttcttgtcccccgcttctttagggagcttcttctcggctcttggttttttctcagctgggactttctcggcttttttctcctcggctggctttttctcggctggcttcttctcggctttgggtgccattggaaactggttgtgatttct

SEQ ID NO: 7720 - DNA, 527 bp, Gossypium hirsutum
  Clone ID: LIB3828-019-Q1-N6-F6
ataacaaagaaaatcatatatattagcatgcacatgcattaattacatatggctacaaaacaagattcaaggaactttaggatattgcaaatcgaatattgttttgagctatttattcttcataattactctttttgtccaagaggattttatagcaaacccttctgcaacatcattacttcttattttgtataattaataagacgacaaccaactcttcctcgttatttcatcttaatatggtatcatctctctactttggtggactgggttcactgtccataacctcttctatccctttgctctttacagtttcagcctggcaacatcctgatgcgcacctgggctgaccacactcagcacaagtcccaccacaaccctgacggcaacactctccactctcacatcccgactgtcctggcattagtgggatttttgggacttgtgggatctgtgggacttgtgggatctgtgggattagtggaatttgtgggatttgtgggatctgtgggatttgtgggatttct

SEQ ID NO: 7721 - DNA, 419 bp, Gossypium hirsutum
  Clone ID: LIB3828-019-Q1-N6-G1
aatcataatatgttttttttaatacttttaaaagaaaacatgcatttatgtcaacataaatacctttttacgacttttaaacccacccccacaaaaggaatcatattttaccaccaaaagagtccggttaaacaatgacccaggaaaacccaaaaaaaaaaaatcccccaagcccaaaaaaagggacccaaacagcagcgatggccaaactgaggcaaaccgtcgtgcgaatcgacttaacgatatccctcaccggcgacacgatgttagccgcttccaactcgacctcgcagggaaacacagacgcggaatcggcggagagttattcaataatgtggttggcgttgggcacagagatggctaccaaggcttttctgaccaggacgatgatgaacccgaaattctggacgcaagaccaa

SEQ ID NO: 7722 - DNA, 581 bp, Gossypium hirsutum
  Clone ID: LIB3828-019-Q1-N6-G10
gatggacgtcaaaatttttaaaatacaaccaattaaaccagaattgcttagttttggcctcagtaagcattgcaactgaacaaccagcaacattatgacatttttagtccatcctcaatggatgcaaagaacttttatagctatggacctagctattagcatgttgttcaaccaaaactctcagttccattcaagttaacttcttcagacaggataatagtaacctaatgctagaagtatcagcaccactagtgcagcaggtgcggcccatgtccagtagttggttgacttcttacatctcaggatggctcttgaaagcacctcaggtcctttagttcgatttttgtaccaaatagcattccccttttgtgctttatccttcactgaaataggagcaggaacaggtgcttcagcactagcatcaaccttctctgattctgaagcttcagccatgggttcagttggttcctcgggatttatagtattcgtagatgctgctgctttcttctttgctttcttctcacgctcctgaaaggaaaaaaactcaaaagaattcagttttaacccgcaccacttataaa

SEQ ID NO: 7723 - DNA, 596 bp, Gossypium hirsutum
  unsure (1)..(596): unsure at all n locations; Clone ID: LIB3828-019-Q1-N6-G11
actgagacaagaccatgattatattcaagcaaagcaagaaaattgaaaaatattagtttcatacaaagcatggaaaatcatctacgaacaatcacaataggtcatagcaacaatagggtaacagcagagatgtactgcattacaaaccaacattacaacttcatctttcaaaatggcagagtggctttgcgaccaagaagcctgatccagcaaaagaatttgctgccaaaacagtcaaatactggttatattcgatcagctaggtaccttactagagagttgacaggcttagcaaagtcaagattttcagtcccctggtgcctaacttttattcgagctaggtaatcagcagcaatccaagcaaagcttaacatcacaacgccttcatcgccatcaggcttctggaactctaacttcttctgaacccattcaggatggtaggtgacttggtaccatgctgaagcctttctttcatacaacttgttcttctcatcctcactgagctgctcaaattcggagtccatgttctcaaaaattgtctgaattctttcctgnaggaaccataagaatgaccaagcttctccttcaaatcccct

SEQ ID NO: 7724 - DNA, 590 bp, Gossypium hirsutum
  Clone ID: LIB3828-019-Q1-N6-G12
aaacaaacgcactatgatttattattattacttgtaaaagacaacatgcaaactgcctcttctaataaaaacatacaagcacaaacactaaatttaaacgacctgcttgggacccaggaaccacccattacagagaacagattgaacatgaaaaatgcccccccccccccaaaatgcctgcttgaaccttctctaaactctctctccctgccatatgccaattgcatgttagtttagccaataggcaagctatcattggtgggtcatttccatgccccagtcccaagcctcatccaccttaatactatcacatccttattcaactagaattgaaactaattgatttcaacatgcaaacttagctaacagtaagcccactacacaagcttccattgattccccatcttacaagcttatttactcggtagtagtattctcagcttgagcttcagctggtttctcttcttcctttgcagcttcctctttgggtgcttccactggggcggcttcggcttctgcttttacttctgctgctgctgctgctgctgctgctgctgcttctgtagactctgtgctttctttggtttctt

SEQ ID NO: 7725 - DNA, 583 bp, Gossypium hirsutum
  unsure (1)..(583): unsure at all n locations; Clone ID: LIB3828-019-Q1-N6-G2
gaaataaacaattctgaaatcgatatttttcatttctctatatatgtaagggaatccatacatatacttactagaaaagcgactaacaacacaacataatcaacaagtaattgttgcaatttgcacaaactctttggtatttttgtttgacaaaaaaaaagatagaaaagaaataatacaagagtcttgaaataataaaataataagaatagagccagataaagatgatattgtcatcataatggtggtgattttcatgcaggaaggatatttgctttgggtctttggttatatccttctatttgtcagtatagagaccagccttttttcttgcttttttttcttcttttcttttctttactttactttcttcttcttcttcttctttttttttcccttttgttctttctctctttccaacatggactgttttacagttagttcatttgagacttgagagcctttgaaagtcataaaccaggtccctctggtcctcccccattngaagaagaaaaaagagaaagaattaaaaaaaaaggagtaaactatagtaatagatggttttgttggcctctctccttga

SEQ ID NO: 7726 - DNA, 600 bp, Gossypium hirsutum
  Clone ID: LIB3828-019-Q1-N6-G3
aacaataaagtggtccaaaagcttttatttcattacatattgtacacaactcagcttttctcaccctctctctccccatataccataattggatacagatttataagcttatttaaattaactgctgaaaggtggaggccttggcatgccttgcacgatgccgcaagtcaatacaccttccggcaagttgtactcatccttgagggatcggttaggggaaataacactagcataaagctgttgcccaaggtaatgcctgtcccatatctccgacctcaggttccacatcccgcagttgtcgaatgtcaataggattgctgaccaggagttggggaatacctgtatggtgtgtctgctcacagcgtcaagaagattgtagttcatcctcttctcagggctccatttcccaatgtccatgcccacggcaaagaatgagtagccagacaagtggtaagactgaatggcggtctcgggattctcgaagatgatttccacaaagtttctgtgtgtcatgttgaggacaataggtgccaaagttaccttagtgttgtcacttggtggctcatcgggaatggtatcatacttgaaaaccttgtcggc

SEQ ID NO: 7727 - DNA, 566 bp, Gossypium hirsutum
  Clone ID: LIB3828-019-Q1-N6-G4
agaataaatgtcttgagttaccttatctaactcaatgaataaagaatcggctcgccacctctaggaacaaacattaaatccaaataagatgatcagcggagactgatcaagctaaatgcacctaagagtaacagcttagcaggcaacaaaagaaccacaaacaaatgcatgtgctgtgatgcaaccagcctactgaatcttttcaaggattctctccctgtttgtaaaacgccagcaaagttgaattggtcttgccccgcattcattggtgctactgacctcccaagaatgataccgcccgcatttatgtcgtgaggtaataccaggggccaccagatcttgcgtcgctgctctctcttggtcttcctgatgcgttttagctcctgccgtatcacgcctttaacacattttaagtaagaattcatgtcatggtgctctttggattgttccttcagaaccatatgcagaacggtcgcttaagatctcaagtggatgtggtgagttaaagaaaactctctgtgcagccaagagcagcttctcttcactatcattatctgacacctgac

SEQ ID NO: 7728 - DNA, 566 bp, Gossypium hirsutum
  Clone ID: LIB3828-019-Q1-N6-G5
gggtcatcaaacaacttaccaagtaatattattcccaaagttgtatcaaagggaatttggtttttggtaaacaaattctgatgatgaaggaactacatgtacagtccaaactaccaaagaatacacaagttttaaccccatatcatctaacatatcaccgacgcctttggaagcattttatcaagcatttggtttgtttgcactcttgtacatctcatcgattacactctgataatatttaagcaactggggcctcttcttcttatatgttggagtgagaaggtctcgttccatgtcgaacggcattgggtcaagatggacagcttttatgatttcaaaacctttcagctttttctctttgccagtctttgcgagctccccaagtatgaactctttggccttggggtttttacagagggactcgaagtcaccacttacgttattgtcagcagcccagctttcaagtgcttccttattggggttaacaaccgcaacaaggaacgactcaaagctgtttccgtaaatccatatcgaatcaatagctgacacgagaccgtaaatgttct

SEQ ID NO: 7729 - DNA, 408 bp, Gossypium hirsutum
  Clone ID: LIB3828-019-Q1-N6-G6
atatgaaaatcagttcataaacttaatgaaaaacataacattctatttatagaactaattatttattttccaaaacctcaccattcttttaaattacaatttattttatgatttatcgaaatttcgtagacaatcattttatgggtcatcaatagggataccatcgctaagacctggattggtagcctgagaagtaggggaggaactagcggtactgccaactgtagaagctccaactggtgcacttgcagggctgccaccggcggatgaggcgtcggtagaaacgacgccggcgagaaaaatcaaaaccaaagcaagaagaacaagttggcgtgccatttttgtttcaaaatgtggtctctgtgtttattaagcaacaatttttttttaaaaaaagagagaaagaag

SEQ ID NO: 7730 - DNA, 441 bp, Gossypium hirsutum
  Clone ID: LIB3828-019-Q1-N6-G7
ggaaaccaaaaaaaatcaaggtggtttcaaatttaggggaaaccaacaaaaaaggggggaaaccagagggggcaatggctccctttcaaccaaaaatgggggggaaaattttgaaaattccactcgcaggagctggcccccgggggcttccaagttggggggggggaggtcaagggaaatatcgggaaggggggcctttaaacttttacaagagactagcaaagaccctagtaattttaatttacagcccgggactaaaaacttttacaaaaaatgggggaagccacccaccccttcaaaaggtacattaaccaggggggaaatatttggaaatttcattccttcattagccaaccttaaggaaaaaaaagcgtagctaacgcccttggccctaaaggcccccaaaagggggaagaaagttttcatttttttcaacagggc

SEQ ID NO: 7731 - DNA, 560 bp, Gossypium hirsutum
  Clone ID: LIB3828-019-Q1-N6-G8
attcaaactactcgtttttatttatttataaagagcaagcatctcacataaaaactagaatctttattcattatccgataacacaacctagactcatacaatattgatataataataatgttcatgggattatagaaatgaccactttcccggtaactcggccggtttcaaggtaagcaaaggcttgtggagtttcagaaaagggaaatatgccattaggatcaatcattggcttaactttcccactctccaagaaaggctccaatttctctaaaattgctccatttgatgtgaggatgaatgttgttgctggtggaactaccgctccatatattgtcactacatccccaccttctctcactgccttcactgccctctcacattgccctgtttaccatcccataatcaaaccaaaaatccatgtcactgtacagattttaacacgctcatgtaatcgtatcgtgtattcgaatattaccgactgcatcgtatactacatcgaatttctcaggcagatcttcaaagttttgattagtgtaatcaataggcaaatcagcccc

SEQ ID NO: 7732 - DNA, 591 bp, Gossypium hirsutum
  Clone ID: LIB3828-019-Q1-N6-G9
aactcggcaccaataataaatttgattaaaaaaaaaactacttgatagttgaaagctcgaaccaattttgcagggatcaacaaagtcgatgagaaccatacaaagtccaaattcgaaagcatctgaaattgatgtaacccaaacgccaaaaccccaaatccttaacaataatgtaacaaatttaacacattcctaaaggcatcaccatcggcaaccgcaacgctatcggcaaagttagatcttatttctaaaccaaaatacacctttgctgctctgctcaccttcgtctggttcaacgtaaatacactcctttgcctctctaaatatcgctttataaactggtgtaccatcaaatgaataatactctcccaatattggttttattgccttagttgcttccattgcgtggtaatgcggcatcgtcgaaaacaaatgatgagcgacatgagtatcagttatgttatggaaaaccttgtttaatatcccataatctcggtagaccgtcgcgagggctccacgtaaccagtcccattcggatgagtcgtagtgtggtaatgcggggtgagtgtgttgcaagtatgtgatcatgac

SEQ ID NO: 7733 - DNA, 516 bp, Gossypium hirsutum
  Clone ID: LIB3828-019-Q1-N6-H1
gatattaatcatgttttaataataaatttatattttaatctaatacaaatcatgtagcttcaattactcgaattgaatccatgcatttatgtcaacataaatacctctctcgagtatttaacccacccccacaaaagtcatcatattttcccaccaaatgattccgctttcgcattgacccaggaataccctattaataataatttcccaggccttcaaaaatggacctttatagcagcgatggccaaattgatgcgaatcgtcttgtgaatcgacttaacgatatccctcaccggcgactcgatgttagccgcttccaactcgtcctcgcagggagacacagacgcggaatcggcggagagttcttcgatgatgtggttggcgttgtgctcggtgatggcttccatggctttctgatccgagtcgatgatgtcctcgaagttcttgacgcaagtccagaggatctcgccgtattcgggggtggtggatggatctttcatgataatattagctttg

SEQ ID NO: 7734 - DNA, 560 bp, Gossypium hirsutum
  Clone ID: LIB3828-019-Q1-N6-H10
atcccaataaaaaattacagtatcatatatcctagaaaaagctccatgttttcagcaaggaacaatcaaattctctatcaaacaatgttttcttctacacctcacaaaaatagtaccaagaaattgtctaccttcccacattttcaacaacaaaaaatttgattcttctgcctccctttttttcttatagatgtttttgctttctgtttacctgcttatctgttcttaaacagggcagggtgggacttcaatggttgttccagcttggatttggccccatccgattagacgccaatgcttctcaacacgccgactaagtgcaattttctctcccttgctggtgcatacaggggacgtgagttgcagctttgccaaatcattctttacagctatgactcgagcaccggtcgacatagacccaatattcaacattaggatctctcccttggccaactttgacacttttccttgcctctccgaaccctttgtcctaacaccaagaagccttcggcagaagaagaaatttacctcgagctcaacataaacttttggaagtgacc

SEQ ID NO: 7735 - DNA, 565 bp, Gossypium hirsutum
  Clone ID: LIB3828-019-Q1-N6-H11
atatgggttgatacctaaacgtttatttggatgcaattgcatagtgttcacttaacaatttatttagcacttccctgaactcattttcttcggacagagaaggttcaggtttcacgtggtatggatatatttaaagtgtggaattgctaggtacaatgaacggagccggttagtagatgaaacccttggtcgaacaagaagtaaggacctggttttaagtccgacatcggtgaaatgcacgaacatgaaggcccccgtctatatgaagattgatcatcgtcctgtatgtcactgctctattctcatcactcaatttgaatacgaagcaacggagaagaacagctgagaaaatcttcatctgtctataggcaaagtccttacccagacacactcgaggccctgcctggaaagctgtaaacttgaaagggctttctgatcggaacatgccgttcttgtcgagccatctctcgggtctgaactcctctgcatcatcaccccaaatgaacttcattctacccattgcataaggttgataaaatatcaaatcatctttcctcacactaaa

SEQ ID NO: 7736 - DNA, 377 bp, Gossypium hirsutum
  Clone ID: LIB3828-019-Q1-N6-H2
caaagctccattttattcatttttttcaatattcatcacatgtttctttcaaaaataataaaataataaaatattcgttgacatgttgatttttcatacatgtagcttactgcagcatgtaagaaaacaaagaaacaatggaagccccaaccaatgatccaagaacaggcaaggtagcggcagccacgctggaatccggtcctgatgctggagcggaaccaggagaggagctaggactagaaccaccggctgaaggggcaggaaatggtgcaccggcagccatgacgacgctcattgaggcggcagcaacaatgatggcggtggagaccttcttcatgtccatggcgtataaagtgattattaaacgcaccggaaat

SEQ ID NO: 7737 - DNA, 584 bp, Gossypium hirsutum
  Clone ID: LIB3828-019-Q1-N6-H3
ggcaacaactatgattatttaaatttataacactgctgtaaagacctaggctaacaaagggtacagtaggattaaatttattattgttgttttcttccgtccaaaatattacaaagagattagcagatgaataatatctgattgctttttttatctttttgggtgtgccggggcgcacgccaaaaagagcagagccaatcctgcataaaaatttatgtgacgttccaaattggaagggtgtctcagttgtcagctgcctgttgagtgttgggtgttgaagggagcccacaacaaaaagagatgagctgagcctggggaactggcaaaagggttgaagaaactgaaacaaaaccataaaccgcatccactcatctaaatcatgtaccattgcgtaatataatcctgcagatgccgatatcagtcactttgtaggcagtacagctgccgaatatttcccgaggctgccattttaagttttcacataaattaacaacacccgctaagattagactgtaaactcagaggcatacataaatgacgtcacaaaattagttttaacaaagaacaaaacaaacccaactatt

SEQ ID NO: 7738 - DNA, 593 bp, Gossypium hirsutum
  unsure (1)..(593): unsure at all n locations; Clone ID: LIB3828-019-Q1-N6-H4
aaaccagcaatgagtttacataagcaaaaaagcatcctaatgcgcatgtcaagtaaattatattggttcaccaccaactaaaattccatactctaacaagaattgatctttcaatgaactcggagaccatgtttcaacgttgtaaagttcatatctcgaaaagtacgatgctcatcgatccgttctacaggaatggaggaagaataacccatcttcgggggtacttcggccttccatctttaccgtcgaatagcttcttcagtcgacgatgctttgcaagggcccaattcgtcatgatagaggtagcaaccacaangaatacatagccagcaacggtctgtgtagcgatattgaaacccaaccattggtaaatctctgttgtgtagttcgcgcaagtcacaatgttgaacagaaacccacgaggaatttgataccctccactaccatcaggactgcgtagattattcagtataatatgacaatagaaatttgcaagttgacaaactataccaaacccgaacccgatcttcatctgaagatcactaacaggtgtgtaaagtgggtggttgacgtagtaagcaatgtatgaaccg

SEQ ID NO: 7739 - DNA, 598 bp, Gossypium hirsutum
  unsure (1)..(598): unsure at all n locations; Clone ID: LIB3828-019-Q1-N6-H5
gatacaaacacaacaggcaatactaagattgcatcaacagagttcacatacacacaaccaaatatcccacatgataaaaagaacaagaggcatactttaataaatggattcgcagcctaacatttgctctcacaattgtaagctacatttgtgagagaaacgaatctgactgctgaaaattattgataaaaaacaaagcagcaatactagtctgtaaatcacaaagacagcagcaataagcgatccaaatgctgaaaaccagcaaagccgagattgcacaaccgaatgtcctacatgataaaaagaacaaggagcatcctttaagcctcttcctcgtattcctcatattcctcgtactcctcgtcttctgcagtggcatcctggtattgttggtactccgaaaccaaatcattcatgttgctctcagcttctgtgaactccatttcatccatcccttctccagtgtaccaatgcaagaaagcttttcttcggaacatggcagtgaattgatcgctcaccctccgaaacatctnctggattgaagtagagttccctataaacgtggatgccattttcaatccactcggaggaatgtcac

SEQ ID NO: 7740 - DNA, 446 bp, Gossypium hirsutum
  Clone ID: LIB3828-019-Q1-N6-H9
acattaacatatattatgtttgttttaataataaatattaattgctatacatgcgatctttaaaaaatgccagggagcactaatccgcaatgtaatataacatgcaacggcggttctattatgcattgagggagtcgctcaaatcacatgtggctcgggcccatataaagatgatacatccgagctcaaaaataatattaccggagcccgaagcaccgacgtgaaaagataaaacttaaccgcagggaggtggaatatgtttagcgggcccaaaactttgaccgttgcgcatttttaactgaacggagcgcctttgttttatcgggaggagccgaatactctaagagaatgttgttgggggtaatgtctaggcatggaaatgtaggggtgaaagatacgactataggggttatggtaattgtgggaactctggggaaaaaataatc

SEQ ID NO: 7741 - DNA, 384 bp, Gossypium hirsutum
  Clone ID: LIB3828-020-Q1-N6-A1
ggggggacggctcaacgattttttattaatcgggtcgatgaccctaatccgcttcgattttgaaaatcccataaaataaaaaaaaattttccagaaatttaagggttaatttttattttatttttggcccaaattttgcaaaccacctacattaaacagtccagcaaggatttaattttgggggtccaaatgggtggaaacaaaaattttttgttcttatttccataggcattgaaatttcccccggttttggggtcggggaaaacttccccggggttgcccggggccccccccccaccgaaaatgcctttgcaaacggggggtgggcccagttctttaaccttgtttgaatgggaaagagcatcgttcattgggttggggatt

SEQ ID NO: 7742 - DNA, 571 bp, Gossypium hirsutum
  Clone ID: LIB3828-020-Q1-N6-A10
attgtaaatcaaatattgttttgagctatttattcttcataattactctttttatccaacaggattttatagcaagcccttctgcaacatcattacttcttattttgtataattaatacgacgacaaccaactcttcctcattatttcatcttaaattggtatcatctccctactttggtggactgggttcactgtccataacctcttctatccctttgctctttacagtttcagcctggcaacatcctgatgcgcacctgggctgaccacactcagcacaagtcccaccgcaaccctgacggcaacactccccactctcacatcccgactgtccatgcattagtgggatttgtgggacttgtgggatctgtgggattagtggaatttgtgggatttgtgggatctgtgggatctgtggaattcttgggatttctggaatttgaggaaatggtagaacgaaaccaccaggattacaattaccgggaacatccagaagaacaacatttttccaggaccaccttcaaaaccaaaaccaagagtaccaatttcggaaccttttgggaaaacatg

SEQ ID NO: 7743 - DNA, 599 bp, Gossypium hirsutum
  Clone ID: LIB3828-020-Q1-N6-A11
gtaaactgattaatttcttgttctcatattatagaaactattccactagccatagaatgcgaaaacaggggaggaggacaaaacagaagcgtattagagcatgatatttcactaattttccttccacccacaactcaaaacatcaaaataactaaaaagacaacaccataacaaagttgacaacattgactgcaacaaatatctaaatcaaaaactaaaattactgagacacacccaaccacttagagaagttctcaaactctgtgtaatcactgtcggagatcatagtctgataccatgctttgcctgctgacttgattgctgttgcctcctccttagaaatgggcttcctcttcttgtcaagcttctccttcttagctttaacacgttgtgcctcggctaaaagagacatcctcctagcagtcttcgcatatgggttcaacttcagcatagcattcaagttcttgagtgggttcttcttcaaaggtgccctcttgatctccttcttaatgggcttcacaaccgactgcacctcatcagagttgataatcctacccagatcagcgttcaccatcttagatcgaggcagtacgtaccct

SEQ ID NO: 7744 - DNA, 390 bp, Gossypium hirsutum
  unsure (1)..(390): unsure at all n locations; Clone ID: LIB3828-020-Q1-N6-A12
gggggggggggggtttttnnnntnnnaaaaaaaaaaattttggttgttgggggaaaaaaagaaaaaaaaatttggggggggggttaaaaatggggggggaaaaaaagggggggaagggggaaaaaaaaaaagttttttgggaaaagggggggtgtgggggggtattagggggggggttttttttgggggggggggggttttttggccggttttaaaagatttttttttgggggggaaaatttgtgtgggggggtgggttttttgggggggggaaaaaaaaacgccccttttggggggggcagtgtggggtccccaattttaattttcttctggggcggttgctgaggggcccccaggggtcttttttttttgcccaaaagttgggggggt

SEQ ID NO: 7745 - DNA, 543 bp, Gossypium hirsutum
  Clone ID: LIB3828-020-Q1-N6-A2
gtcctcaacatacctcccatcaaatataataaatatccaaaatcatgtaattataataatccaaatccataaattgccttaaactgaaatttcagttcattaatgacggaaactaatgaaaaagcctatcttattccatggttagttcttaaagaaccaccaaaaccactaaccatttaaaacaaaaataaaatgaagcttaaaacttcagacatgaaccaccgtggctgtctttttaattttagagttgtccgcaatcggcaataacaactggcttagaagttcttccaccactagacccaactttctcaatgtctcgaaccacatccattccttcaacaacttgtccaaacaccacgtgcttcccatcgagccactcagtcttagtcgtgcaaatgaagaactgcgacccgttggttcccggtccggcgttcgccatcgagaggatccccggtccggtgtgtttcttgatgaagttctcgtcctcgaacttggctccgtatatcgattcacctccggtgccatttccggcggtgaaatcgc

SEQ ID NO: 7746 - DNA, 542 bp, Gossypium hirsutum
  Clone ID: LIB3828-020-Q1-N6-A3
agtaataataatagaaatctgctcaaatttctccctaattttatctttactttacatcgaagggactaaattgcaaatctcttacaaacttttttcacaacggagcagaaaagcatttttcccatctcaacattttaaaactcaaccctcgcccactattcccctaatattacatatcaacccccttgatttttcttttttccttaaagaaaccccacttgtttaacgcataaactgataagcagggaatattatctaatcgcccctaaaattttccagattttcaaatccgtccaccgtcttcaaaaaatatcacggagggcatcggatcttgaaaattccggagatatctaaatagagacgaaacgtatcaagagagagatggagataaaaagagacgcaggcttatttggatccaaatctaaatattcgggtatcagagatcaagccgtagcaaacgcctgagatcccttgtagctgaatcatcgaccggaacctgtttcttcttcgagaaagttggtaaaggaagtgagctcggtgcc

SEQ ID NO: 7747 - DNA, 254 bp, Gossypium hirsutum
  Clone ID: LIB3828-020-Q1-N6-A4
gggggaaaaaaagaaaaaaccccttaaaaagaaaaaaccaaaagggaaaccagcttgggccctgaaacacaaaaaaaaaagggggaaaaaaaaaggggggggggcaaagaaaaaaggaaaaaaaaagggggcccccgggggccccaaacccctaaaaaaattttttccccctaccccccccgggaaaaacggggcccccccaaaatacgggggtttttaaaacgggggggaaaaaaaaaattcgacccccaaaa

SEQ ID NO: 7748 - DNA, 601 bp, Gossypium hirsutum
  Clone ID: LIB3828-020-Q1-N6-A5
gagaaatcaacatgcttatataataataataataataataataataaagaaaccaccacttgaaataaataaataaaaacctaaaacccatcctccctaagaagaaaaacggtcaaaagaaaaacatatccatcataaaatgacttatggattcttagaaaaccctacaccgcttgcctgcaacccccccccccaaccccgccttggattattcactttatatccccttgaagatggtcccatggtaccgtaaaatctataataaaattctaaagccagtaaaaaaccaccaagcattcattatattttacaagaccacaaacacatccccaaggggattcatagaaaatgtcagcaaccgtttgacaaaaagttcttcactgttttgggtatcctgaaccatcttctgaaagaaggccgttcgagtgaggaattggattggcttctttgatcaaatcaccatttgttgttgttatatctttcttttcatctccaggcttttcttcccatacctgcttttgcaactgatgtttagcctttttctcctgaattgctttctggcgaatctcgtaaaattcgaaatcgtctaaaatgcaagttt

SEQ ID NO: 7749 - DNA, 586 bp, Gossypium hirsutum
  Clone ID: LIB3828-020-Q1-N6-A6
ataaaataaatcaataaacaaaaagtttaaaacacaaacagcccattttagtgtccttttacaaaccaaatcattgcagtccaaaacctaaaattaatacatgaccctaaacccaaaattaaaatccaagacccaagtcacaaacccaataccccatagcccatttacatgacccatagcccaaaactaataaaactagtccaaattatatcagcccaagtggcccaagattcaaaaataaggcagaaccctagcaatctgtttgcgccgcagcagccccagcctccgtaccgcctccgtaccctccagcagctacgcaagtgccagcacagcctccgtacgatgccaacgcaccccgtacctgcgaagaacagacaaaccacagcagtagcaaatagaaaaacaaagaaaagttgtattttttattttttatgttttgatcttttcggattttggctataaagccctgtgtatttcgattgtaaagtctctcttttttttggggatgagatacgcacactacaatacatattctaaacagtagaaaagaaatcaaaaaagttatctaaatgtgatttcaaatctt

SEQ ID NO: 7750 - DNA, 483 bp, Gossypium hirsutum
  Clone ID: LIB3828-020-Q1-N6-A7
aacaaaaaaaatcatatatattagcatgcacatgcattaattacatatggctacaaaacaagattcaaggaactttaggatattgcaaatcgaatattgttttgagctatttattcttcataattactctttttgtccaagaggattttatagcaaacccttctgcaacatcattacttcttattttgtataattaataagacgacaaccaactcttcctcgttatttcatcttaatatgggatcatctctctactttgggggactgggttcactgtccataacctcttctatccctttgctctttacagtttcagcctggcaacatcctgatgcgcacctgggctgaccacactcagcacaagtcccaccacaaccctgacgggaacactctccactctcacatcccgactgtcctggcattagtgggatttttgggacttgtgggatctgtgggacttgtgggatctgtgggattagggga

SEQ ID NO: 7751 - DNA, 562 bp, Gossypium hirsutum
  Clone ID: LIB3828-020-Q1-N6-A8
aagaaattaaaaattggatttttgttcatgaaatcgtattggaacataataatattatatatacatatagatctctctcacaccttaaacatgtttcactctgcttaaacaaacttcccttcaaccccaccattgatgcactgggacaccttcatcccttaacttcccatacaaagccaagcattcccagtaagcccttctgctcatgttctttcttccaccaagtcctttaggtttgcattccaagaacagctcatcaaccaatctaatagccttgctcttcaccatattttcaaccacttcagcctcagccttcatcactacatactcttcctcctgcacgttcttcctcagccaacccgacatcccagtctccgccgcagtctgcggcacctctttcttggtagagtccttggtcagtgtctcgatcttgtacatctcgaacttcagattccttgtgggataattcttgacaaaccaggtggtggcactgccgccatctttcttaggcaagcctacatcaatgaaaacccgacgggggtagctttcgagtgagtccccc

SEQ ID NO: 7752 - DNA, 553 bp, Gossypium hirsutum
  Clone ID: LIB3828-020-Q1-N6-A9
gaccaaataaagcaacgtttagtcagcaaatagaatatcatacataaaaattgcataattcagctcaaggttacaactcgtattgatgcagaatgcagagacgagctgtttaatttctagcaagctcaaagatcaaattttagagaacgaaacagcatagttaacaaaaacatccttcacttggtgaacatttagacatagaagtagacccccacttatggaagacgacacttgacttggataaccttcgcgtagccacagaaatttgatagacactactcagatcgagcagcgaacctctcaacctttttatcattcaaattaagaccaaccatagtctcaccaagcccacagctaacttcagcaagcacggccgggtcactataatgggtgatagcctgaacaatagcccgggcacgtttagccgggtcaccactcttaaaaacgccagaccccacaaacacgccatcacaacccaactgcatcatgagagcagcatccgccggcgtcgccactcctccagcggcaaagtgcaccacaggcagcctcccca

SEQ ID NO: 7753 - DNA, 570 bp, Gossypium hirsutum
  Clone ID: LIB3828-020-Q1-N6-B1
gttaattccaatgccatcaatataagcaaaattctcactcagttttgcaacaccgacgctgataaaaagacacataaatcaaaacaagcatcgataaaagaagaaatagaaaatgaaaatgaaaaagggcattataagtatgagattagatatttccggtaggagctacgaaacatcgggattattcagcaccgcggatgagaaaagcacggggcagtacggacggggggacttcaagattgaggcttttcccatttgaggggcttcacaacttcccaggtgaagtcggggtcgtcccttccaaaatgtccataggcagctgtcttcaagaaccggccattgccacccctcttgaggtccaggtcgatggtgatcattccaggcctgaaatcaaagttctccttcacaatttggaggatttccttgtcaggaatctttcctgttccgtagctgtttacgaagacagacaagggctcgggcacaccaatagcataggagacctgcacgaggcacctgcgtgcaagcccattagctacaatgctcttggcagcttgcctaacgatgtaagct

SEQ ID NO: 7754 - DNA, 545 bp, Gossypium hirsutum
  Clone ID: LIB3828-020-Q1-N6-B10
gttgaagtgtatttttaaaaataattaagtttatgaaaataattctttataacatagaatatagaaaaaaacaaaatttatttgtcgaaataaatataattgttagagttacaacgtcatcaaaaaaaattatacctctgctattgattaaacggtaggggtaggttttggtgggataggggcagaacatgcagctggattctgtttgccactaactttaggcttaacattcgaacattgcgatactgcaggtccagtcggcccactatgcgtaattccaatgtctgcaagttctacattttcacaaggcaaagtagcgctacgaataatcttgacagcttctggacgcgcagaagtgccgtgaatgtttttgaaactaatgttgcttagttaaactttcggatcttgatttattttgcatttgaaccatgggcaatatttctgatcaattataatacgagaactgacattggtcacaggaatatcctttaagtgaatgttcgaacaagtggccgggtcaacacctgcccaagttttgagtctaa

SEQ ID NO: 7755 - DNA, 555 bp, Gossypium hirsutum
  Clone ID: LIB3828-020-Q1-N6-B11
atctcaaatcatttgtggagattcctgtttttcaattacaggttgaaatcaatgcacaagacacttgtatgattgaaatttatatatatatatatttgatccaataacattaaaaaccaatagtttatactaatgtcaaaacctaaaaatgaaaacgaggagaaaagtaaataactaatccatagtttggtggagtgaagtctacacattctttggaacatggtttcccttgctcatttccatacctccattagagtaatcagcttcttcgacgaatcgggaccaataccagtgagatctccagacttggttcatctcttcgattggaatacccttggtctcaggcaagaagtagtacacaaagatcgacatcaccaccacaaagaaggcgaagaacaggaatagcccgaatttcaagtggcaaagcatggataagaacacttgtgccacagcgaatgtgaagatcatgttcaccgacacgttcacactttgtgcggctgatcggatttccaatgggaaaatttcactaggcaccaaccatccgaggggtcccca

SEQ ID NO: 7756 - DNA, 553 bp, Gossypium hirsutum
  Clone ID: LIB3828-020-Q1-N6-B4
attcaaagtatatattatcaattgatcatgcaagttgttcgaatcatcaaatacatagaaatcaatccaatccaaaaaagaacattcagtttttgatgagatggtctgccactcaatcaaactggtttcatttgcaaaagctctaaaagatcatcgtcatggtggtaggaaattataaaagaaccaaatggtgtgtgtttcaattatcagatgcctctttggattcttcatcagcagcactttcctccggttcggcacgagtttccacattctcagacgacgatgccgtcgaattgttccttctatgggtagcagcttgaagaacgtggttatagtttcctttcaccatgaaaagttgagcgaaatggtgcttgcaatataagacaccgtcgagagcagcataagatgagtgtgtcagtgggcagccaccgtgggcgcacctaaaacatgtcttgtggaaacattcaccttccatagtaaccttttccaacgggtacactgttttctcgcaagctgcacacttgtctagggttccagaaaacagggatgaaag

SEQ ID NO: 7757 - DNA, 491 bp, Gossypium hirsutum
  Clone ID: LIB3828-020-Q1-N6-B5
ataaaaaaaagggtttattaaaaaaaaaaaagggaaaactaaaaaaaaaaaaaaaaggggggggaaatatttaaacgggggggggaaaaatttagccgaggggaacaccaaaaaaaaaaaaaaaaaaaaaaaaaaaaaaaaaaaaggggggggggggggaaccggggggccggggggggggccggggaggccccccccggccccggggggggggggggtttgccccgggggggggaaaaaaaaaagggggggaaagagggaaaagggggggggggggggaaaaaaaaaaaagccgggcgggggggaaaaagggaaaagccgggggagaaaaaagaaaaagcgggggggccaaaaagggggggcgccccccgcccgggggggagagggaaaacccccctcgccaagagaaaaaaaaaaggggccaatagaaaaaaaaaagggggccgcgcccgggggagcaagctaacaatattgggggggggggggggggg

SEQ ID NO: 7758 - DNA, 620 bp, Gossypium hirsutum
  Clone ID: LIB3828-020-Q1-N6-B6
ggactatcataagtagataaaaaaaaaggaaactaccagtacattcaaaatgtattacacatctacaaaggtgaaacaggctactcatttaccgatccgacctttgaaacaacccctgataatgacatggataaataaatcgaggcgaaattaggaattctaaatgtctccttttactggctggaacctaattttatgcttatcactccacgggaaatgtgaggggtatcccttttccgtgtttcccactcctttatcaggtacagtctttatgcctccattttgaccgtacactgatgtactcttcttaatgcctgtcctcgcctgaacgtagctaaaataacttgtgccatgtagcacggagccggctaacctaacatacattgcccccgccatcattaaaatatacgtcatcttgattaccctcaacaggagaggtaaggcgaacaccatcagcattttcatcagctgcacgctgtaggctgccttgttcgtctaccaagggcattccctgtatggcccaaatgcatgcagaaaaagaaagaaattcaaaacattattatctaaccctacatcaaaatctccaaccctttctatagcatcggttgagccaataccac

SEQ ID NO: 7759 - DNA, 348 bp, Gossypium hirsutum
  Clone ID: LIB3828-020-Q1-N6-C1
ggccaaccaaaaaaaaaaaactttcaatgggtaaaggaaaggatccaaccaaaaaaaaaaaccatagccaaaaaggctggactccaaaccgtaaccccgggtggcaggaagggacccccccaaccaaatccaaatttgggaaagggggccgcccactatacgggaaaaaaaaacaccaaaagaggggggaatagaaaccaaagcccctacaagaggggagggtcaaacccaaaaaaaaaaaccctggccaaccggagccccaaaaaccggagccaagggcccccaaacgaaaccagaacaaaggcaggcccgcccaaacaagttgggagggcagggaaaaaaacaaaa

SEQ ID NO: 7760 - DNA, 439 bp, Gossypium hirsutum
  Clone ID: LIB3828-020-Q1-N6-C11
aaaaaaataaaagggaaaaaacccccgggggggggaaggaatccaaaaaaaaaagaaacatttcccaaaaacccccaaacatttagctcatttttggaagggaaaaagcccgccctgaggagaggtaatggggggggggcaaaaaagggttgtttggggggcccccgagggttcccgacccccccaccaggaggggccccatgggagccggcttaaatgctaaaaattgggcccccccaaatttttggggggcccccgggtcccctgatgggggaaaaaaggccccgttaaaaaaaaaaaaacccctggatccccaaccacaggttttccactttgggaaaagggcaaatcccccttggaaaacccttttaactgaaaaggaccggggggctcaaaaaagggggcccagggtgaaaatgggggggggactggtgccccc

SEQ ID NO: 7761 - DNA, 586 bp, Gossypium hirsutum
  Clone ID: LIB3828-020-Q1-N6-C12
aattattggaatatttttattttgatcaccaagtaaagacaagttttcaatttcatcattaatattttcaatatttgatttcttttatcgttcttccgttaaatcattagaagaatgttgacatagcattttttttattggcctaataccaaactattaataagttgctcttttaaaagtggaccaggtcgacaccaatggtcaaggtgttgctaatgatctttgcaagctttgcatccatctctttcatcggtgattcaagcttagcttgtttgaatgcattttcacaaccgagtacgttttccacattagcgcctaactctgtgctcaacttgacaaggttatgattagtgatggcttcaagggatttttggtcattgttaagaatattattgtagacatcgatgcatgtttgaaggatgggaacaacatttttaagggtagtagggttcattgagagctttgtaacctcagccaatgcatttttggtctggttatccattgcttcaaccccagctttaaggacagaaagaggcttaataggagctttctcatctaggaatggcatagttgcttttatacattc

SEQ ID NO: 7762 - DNA, 420 bp, Gossypium hirsutum
  Clone ID: LIB3828-020-Q1-N6-C2
acccaggggctaaaaaaaagacattttatttgttaaagaggaaggggaaaattttttggctatacgccaaaattggggaaaaaaaaccccggctgggaaaaaagaaaaaatattttttttttaaaaaaagggggggggggtctcccccttttttacaaggattctttttaaaaaaacaaaaaaaaaaggggcaaactttttttaattgatgaaaccccttttttgaggccttttaaacgagggaccaaaaaaaaaaataatcaaagtgttatttcaaacgggacggagggggccactccgtttataacaggacatattaggaaaatttttcctcttttaaaaaagaaagcggactcgggggtatccccgaaaattaaaagccgtgacctaccagcacacaaattttccttataaggatga

SEQ ID NO: 7763 - DNA, 121 bp, Gossypium hirsutum
  unsure (1)..(121): unsure at all n locations; Clone ID: LIB3828-020-Q1-N6-C3
aaagcacaaaacanacatcaaattcaaggccttcatttcttgaggactttaaacattacacatagtagtcattgtctttcacattttgcaagtctatctatataggatttttaatacataa

SEQ ID NO: 7764 - DNA, 569 bp, Gossypium hirsutum
  Clone ID: LIB3828-020-Q1-N6-C4
gtcctcaacacaatatttccattcttcaacaaatgaacaaatgctgtacaaatgatgcctactctaaggcatttgtttctttttttagtaaccaaaaaacaaatataaatatccagccgtaaatacatgtaaaaaataacccctattaatacaattaaataagactccatttgattgatttcatgcttttgtttcttttgctatctgtttcttgtttccctttctatccaaaaatttaccaaccaaatgaaacccttcgaaaattacctcgaaaatatcaaaatacaaatgctgaaaaagggggagggtaaagagggttaaaaagttaatactggtgcatgctgccattgttgtatatgctcggaaatatcgtattcagatccaaggaacaaaactttttgatatttacatcgtcgacgaatcttcaggtcaaagttccacctcatgtagttgttcatctccaaaactaccattagctggaccaggcatgaacaatggtggaggttttccaggtgcttctcctgaaggtcttatttcgggtttactaggaggacttattggatcatcaa

SEQ ID NO: 7765 - DNA, 586 bp, Gossypium hirsutum
  Clone ID: LIB3828-020-Q1-N6-C5
cgagagagagcaattttatttaagagaaagtagctacagcacggtagaggaccccaattacgtattaccactagactagactagactagaaagccatgaaatctccctcaatacaataatgacttttaatatgatggcctaataaaataacctgaagctaaacttagacttgaatttctacgtgccatctgtacatctcctccgatggcactggcaatgtaagtgtcaccaatccggtggctgagtcatagttgaagtgagtgtcggcattgtccacacaacacttcaacggatgctgagatgagtatgcaccaaacctcccacaaccccggactttgagactgatcgctgctgttggattccggttgttgctgagtgaagttgtcaactccgaggaaacctcgccatcaaagaactgcagtttctcattggatgtcatttgtacttcgaacttctccacggcaccgctgctgttgaacatgtcaagaaggccgattggtgcaaatgaaatggtgttggaaatttccttgacgggacagaagtggaatagttcatactcgagaaccttaagtgttaccgggcactg

SEQ ID NO: 7766 - DNA, 589 bp, Gossypium hirsutum
  Clone ID: LIB3828-020-Q1-N6-C6
aaccatgcaatgcattcaatataaagaaaacaaacaaacagaatgacatggaccattctgttaaaaataaaaactcaaaacgccctctcccaaaactctctgtttcacttaatcttcgcaaatgtctcctgctaacttttctgctcataacaatattcctttcctagaaaatagccttgtcctcaaggctgaaaatgaggaaatttggcttggattgcagtcaaagactcccacatgtttcttcaattatgaaatctggaatgtatgatggatacgggagtgttgtggaagttgcagggtataagccattgcccctactttttggatcaccgggaaaagaccataatactttggagatagcttctggttggaaaccttccgaattgattgctgtctatatggttgcaatcgcaagtaaaccatgtcccccacttgaaaactcctctccgagcgacgtttgtcagcagatttatcacattgattctttgagaaacctaatataaccgcatgtaatagtgacttctttgaaagcttgtcaataagcatcaaccaagttgttctcctagatccccaactattctggccacct

SEQ ID NO: 7767 - DNA, 445 bp, Gossypium hirsutum
  Clone ID: LIB3828-020-Q1-N6-C7
aaaatgaacgaaacaaatccaaataaccaaatttcaagtccatttacaatgttaaacagcccaaaaacaaaactacccaagcccaatttatatgaccctagacccaacatttaaaacccataacccaatatccaaataaaataaattgggtccaaatggcccaagatcagactatccatagaaaccctagggtttccaccttggcgccggagcctccagcatccgtaagctcccacgcacgaccctcgtacgccccaacgcccctcgtgcctccacgtactcctccgtacctcgcttataggccgtcggtcccctatcacttcgttgtaatcggagatagaagggggatctgaggccaaaataggccatacttcgaagcttggggcgtcggtcaccgcaccttgcggtgggctggtgcttttttgagggagaaaatataggtgcg

SEQ ID NO: 7768 - DNA, 582 bp, Gossypium hirsutum
  Clone ID: LIB3828-020-Q1-N6-C8
agaatgaaaatcatgtttattatatatatatataaataaaaataaaaacgaaagccaattttagatgattctcatgtcgtgtatgttccaagtatatggtctactaacggagtaattaccggaggaatggtaaatttaacagtaggacctaattccaaccctcaccataaaaatacaaacaaaacatttgcatattcccattacaaacataacacccttactgcaagcctctaccctgctgcttgaaaatccccaaaatcatcatcctctatgtcttctgtgttctgactttcaccacattgtcgttcatctctatgctctttcccggacttcgaagccttcttttctgaagttccgtctaactggagatccgggggtgagcttgttggagaattcccagtcgtttctacaggtgaaagctgtgctggtggatgtggctggggtgacttaagagcgctagctacaggtgaaagaggtgtcggtgggggaggtggtggtttgatgctaaggatgggctctttctggttgcctttgtcagccaaagacagcttgtcaatgcccagctccgcagcttttgacttc

SEQ ID NO: 7769 - DNA, 591 bp, Gossypium hirsutum
  Clone ID: LIB3828-020-Q1-N6-C9
agagaaactgcataattgtattcataacaggcaacagccatatatagttctgttcaaggaaaccatttcagtgaacaaaactggaattaatagaaataaggatcaaaagaacttacctcatagtacacttgaaaccctaaccaaatttggttgaaacccaaaaccgaataataaaaaaattaaaaaataatgtcgatgtaggaaatcggtggatctgggcttctagatatcaaatgttgtacataacaaagaaaggacgcatgcttatcacggtgttttttagcaaggcttgcccggtttgcagttgagtgttccggcatactgggtgagtttgggggccatctcaccgggattgaaaggcatcattttgtcaataccatatttcttgctggctttgggatcaccggatgaaacaaaaaaggcaccgttctcgaaatggtcaccctctgatatccagttccatttcttccacacttcgggtggtgcgtacacccttttggtcacctccctagacgcgagggtggatgacgcggtatacctgttgccctggctgataattgtagggttgcggctgccgccaatagcatacat

SEQ ID NO: 7770 - DNA, 613 bp, Gossypium hirsutum
  Clone ID: LIB3828-020-Q1-N6-D1
attaaatatctcatgtatatgattagaatttgctatatatacaaaaaaacaagaaaataacgccattatatgattagaaaacaggcaagctaaccatggcttttttttttcaattcacaaatagaaagcaggaaaaagattgtgcaacatgcatataacaacacctaatgttgtaccatactgcaaatcattttacatttacccattcatattccaacaccaaaaagaatacctgaaatctgcatctacttcctgacaccagatgatccattgttcccttcaaacaactcgttaatcctcgcctcgatatcctccgggttgtaccgtataagcctatcagtgttcctcccgatttcaggcatacattggagcctccctatgaagtttctataagctggtaacaaaagcctagacactgatatcctcatctcttctctaagctgctcatcgaatacaatccatgatgactgagttttacatacgtcctcgaattgggtattgaatgatttgatcttttgattcatggacttggcaatcgcattcgatgctatcgaggaaattgtcgagctttaatgttccaataatcttgttccatgaacttctttgatagttg

SEQ ID NO: 7771 - DNA, 448 bp, Gossypium hirsutum
  Clone ID: LIB3828-020-Q1-N6-D11
ggaacctaaccccggaaaataataagaaaaagaaacagggaaaaaaaaccgggaataaccccaaaacagggtcaggaaattaaaaagcccacaacttcaaattttttttaacaaatttaaacaacaaccccataaaacaaccatttaaaaaccaaggggggggaaatttaaccctaaatcccctaaaaaaaaggaaaacccccccaactagaaaaactttaaaaaagggaaaatttcttttccattaaaaaaaacctttcccaagggggaaaccctccattttttttggggggcctccctgcaaaccccggggtcccaaaaaacttgggacccaccccttggggggaaggagggggggaaccctggggttttttgaggccattcttggaacccctgaaaaaatgattgggagcgggggggttttttgacttggccatatttgcccaac

SEQ ID NO: 7772 - DNA, 575 bp, Gossypium hirsutum
  unsure (1)..(575): unsure at all n locations; Clone ID: LIB3828-020-Q1-N6-D12
ccaaatcaaaagaggaaattacattagtangatccgagccagaaaaacatgacttaatacagatctatcagttgctgaacattacaactaaattcttgaactgcaaacattttgtacaaaggaacagctaaacaaccaaatcctaagacgttaaaaaacaaaagaaaaataagaacagtaaaatcccaaatgaagcagagaaaaaaaaatcaaaccaaccccactattacaaattaatttagatcttcaaaaaaaaaaaagaaaaagaaaagaaagccaccctccaatcttcctttaaaaacatactccatatttctacaagttatgatgcccttcaagaaatgtaactatattccaatctccacattcctgtaacctgaccctccttcagtcaaaagttcctgtgaagttttggcgacatgggtgtcctcatgaacaaaagcaaaccttttattgtcacccattctctccatggacacttcattaatcttatcagcttttttggaaccaatgtgggttctcttgagccccagaaatcccttccaccttgtggaacccttaggaggcgttagtgt

SEQ ID NO: 7773 - DNA, 228 bp, Gossypium hirsutum
  unsure (1)..(228): unsure at all n locations; Clone ID: LIB3828-020-Q1-N6-D2
aatattactatngatgcaattaatttttattacataggcaaaggttttaagaagtgagatcatggggcagtagaatgaccttcaacttcctccccaatttcatcttgaagttcaaaatatcccatttctgtgagaacttttttgcattcaggaagagcttccttcttcatgtacccaagattgttggcgaatcgataagtcccactgacaccatctgcctttgtcaag

SEQ ID NO: 7774 - DNA, 568 bp, Gossypium hirsutum
  Clone ID: LIB3828-020-Q1-N6-D3
aattccaataaaacttactgttcatgagcattaagcccgattgagtaactcgcattatggatttcaaacccacagcaaccaagttcctccgtctgcacccccgcatatgatacgtggtaccatccactacatttaataactgacctgcacaagacccagccatcacaattccatatgtaccaccccataaatactccatctaccaccggagccacctggtcttgtccggcgtaccatgcgataaccagtgggtcggctgctaatttagcgacttcgtagtccaatacacacttatcattctgtcaactccaacgtcactgtagggtgactttaacggattccaccccggcatgggttgaggtacggtgaaaggaaaagcgcatacttctggacaaaacttggcagatttacccacccatgcatacgggcagcgggaaccccaccattgacggtaacgtaagcttatggaacccacaaacttagccgcaaaaatctttgacgtacacaacggcgtaggtgaacaagaggtacaacccgcttttgggatagatcggtaacagtttaaaac

SEQ ID NO: 7775 - DNA, 507 bp, Gossypium hirsutum
  Clone ID: LIB3828-020-Q1-N6-D4
gggaaaatagtttgcaaagtaacttattattgccataaatttaatataagttgatacatgaactgaataggcgttaagcttcccgcccacaccatcaaaggcttttagtctttaacaataaacacacaaattcataggattctaaaaaaggaaaaaagaagaagataaaactgcaagccaagtggagcacgaccaattacttaaaaggcatgtttgtttaactttaagcagcaacactttggagcacaacagtctcaacagtgaggccaggtccaaacccaaagagcactccccactccaatccttttcctgtggtctgaagcccatcttcccttgatttcttcctcatctcatccaaaataaatagaacacaagcacttgacatgttaccatactctgaaagaacgtgccttggggctcgtagcttctctggcttcagggctaatttggcttctacttgaactaatattgctggaccaccaggatgagcaatccaaaaaagggagt

SEQ ID NO: 7776 - DNA, 593 bp, Gossypium hirsutum
  Clone ID: LIB3828-020-Q1-N6-D5
gcagcgaacttgcaatcttgtgctatatatatatatggcgtctctacttaatacatagtaatttgtatggatattagaagaaaaaaatgatacaataccaatatatatctcgcacaaattacctcaccagaaagaattgaattttctgatagcaagccctagctttactttctcttggaacacagttgtttgaggtttccgttttcttgaataagtccttggattctagccaatttgcacgagtgttctatggtgagtttgtaaattggcggggactgccatggtaccatcccgaaatcatcactatattcctgcattccttctacaaagaactgccagactaaagcacctgcccccgaccctttcttctttgcagatttataaatgatgtcctgaatggttctataaagctgctctctttgggatagctggaagtctttgttctggtctgacagaccgtattcggtgaacataactggcttcttcagttccttgtcacaatcttcaatgtgcgagtgcatccacttggaaacatagttccgtttttcttcgaacccaagaccatgaaaccactggtcggggtatatatgaac

SEQ ID NO: 7777 - DNA, 543 bp, Gossypium hirsutum
  Clone ID: LIB3828-020-Q1-N6-D6
ctggaattcgcacatattcatttaatatttaagaaatacaaattaaatagatcgagcactcctccatgcaccgtcttagctcaattaaaaaaaataaaatgggaagcttaatccaagctgggtcgaagcacgcatttgtttaggcacatttgagttggacggccaaagtcttcctgagatgggtacatgcgtcattttggttactgaaaggaatgctatctagtgggatttggcagctgggcttccccaagcaatacttctaaacgacttgcttggattctggcgctgtgcaatttccaataaagtaggctccgcaagcgccaaatggatcaccattgctcgcaaactccactgccacgatttgcttcttgcctggacatttcaattcagcccttggtttcaaatcattcactttggcttggagactaccatttttggtttcgaacaatctcggggatggggggtgaatttcactaacagcactgcagattgtatccctgttgactgttactatatggacatctttaggattgcctccttctt

SEQ ID NO: 7778 - DNA, 568 bp, Gossypium hirsutum
  Clone ID: LIB3828-020-Q1-N6-D9
aattaattaatttatatattaaccaaaaacaaaaaaacaaaatgagatagttgtccctggaaggagctgatacctttgctgcatcagtaaattaatatataatatataaaaatattatagaaatgtataatataatttagaaattaagcctggattattgatttcaactcaacttttccatggtgcttcttggatttcttccctttcttcttccctttcccacggtgcttcttcccttttccatggtgcttctttttcttgtgtttatgtttcttcagctttatctcccctttgtgtgcggctttactagcggaaagatttggggagatagggatcaccccattattttcaggtttactagccgaaagatctggggagatagggatcaccccattattttcaggtttactagcggaaagatctggggagataggcatcaccccattattttcaggtttactagcggaaagatctggggagatagggatcaacccactgttttcgggtttactagcgggaacatctggggaggtagggatgaacccattgttttcgggtttactagcgg

SEQ ID NO: 7779 - DNA, 605 bp, Gossypium hirsutum
  unsure (1)..(605): unsure at all n locations; Clone ID: LIB3828-020-Q1-N6-E1
aaataaaaatcgatccaaaatttattcgattttcattttataaaaggaatagttaaaagagaattggtgtatgtactgtaaacatttgcttagctatgtctttgcagtgctcagtcaaatggaacaatctttttttttccaatccaatatcttctgacttctggtaccttacaaggatgctatctacacataattgtcctctctacttaagctgattgcatgtggatgctcagatttgaccttgtatgtacagaatctgtggcggtggtggtgccttctttagtaggcagattgcctgaatgcggttcaggttggttcagtttccggacaaactcaatgaacaaaggaaaatgctccggtgcgaagaattgagctccaatcctctggacaatgaatgagtcattaagattctcactcaacatgttcttcttgatctgcttaagaccatcaggagctccgacagtcgagttctggccggaaattctgaccccgtgcttattgcaagctgttccaatttcagcaagtaataattcanggcttgagagagattccttaagctggtacttatctgactggtccatcccaggcaagatgattttgcatga

SEQ ID NO: 7780 - DNA, 333 bp, Gossypium hirsutum
  Clone ID: LIB3828-020-Q1-N6-E10
agaaaaaaagccaaagattctaccaaaatttggtaaagtacaagtaaaaaacaaataaatttggaggaaaaaaaaaagggagaaacctggggggggggggggggaagtactacccccaaagcggggaaaagggggaccagtccaccaggggcgttaggggggggggcccaaaaactttttcaccttaaaagggagaaaagggaaaccccagaaaaagagaaatttggaaaaaaaaccggaagactttggaaattcggaaaccaaaaggggcgggaaaaaaaaattcacaaatgggggaaaaaaggggggggcggggggggacccgggaaaacc

SEQ ID NO: 7781 - DNA, 525 bp, Gossypium hirsutum
  Clone ID: LIB3828-020-Q1-N6-E2
aaaaaccaaagggaatatttccatttcaaaatatgattacgaactttaataacataaacaacaactaaatataacaaaaacaatgatcaaacgatcacaatatacatccatccatccatccttccatacatacatgcatacatatatatatatataggggttttatatattacccatattatacattatagcatactgaagttccatggataatatggcacaaattatactaatcaatcattaaatttcacacattttgcttcaattttcatggcacttaaccatgtatggcaactccaggaatctccatcatcaacggtattgactcaacaatcttggacggcttgttatcgaaaggtgtctccgcgtcgtaagctgagagatgcactccaagtgctgctctgcccgacgggtcaaggttgttcttccaagtggcatcccattcgacagctttggccgtgctgcatgctacacttgctcctcccgggacggtcaatcgtgctgagttctgagggaagaaccttt

SEQ ID NO: 7782 - DNA, 111 bp, Gossypium hirsutum
  unsure (1)..(111): unsure at all n locations; Clone ID: LIB3828-020-Q1-N6-E3
aaaaaaaaacaaatttatttgcgaaataaatataattataagagttacaacgtcatcaaaaaaaatatacctctgctattgattaagcggtcgggngtagaattttgctgg

SEQ ID NO: 7783 - DNA, 584 bp, Gossypium hirsutum
  Clone ID: LIB3828-020-Q1-N6-E4
attcatataataattaaagataaaaaaaaacagctagcacattgtaattcaatcatatatcaagctgcttggttattctttattttctttctctttgtatagaatccgtagtttctataatctatatataaatctatgaagattctggcgccatagcttgtatattcatggccttctttttccctaaaagaccattggcatcaagtttcatggtaaggtccttaatcgttcgtttgagttcatccatataagcgataccaccaccacacccattattgaacctgcggtaagggcatccgtaattgcaggtgccgcaaaagctgccgcccatgatatccacatcgtcgcagtcgatacagtaagggcttctttcataacctatacctatgccagcaccgaatccggtaggatcaggatcgatagaggttgaagaatcaggatcagcttcatgcggaaaaccgttgcttggttgaaacccatcggctccgtcagccatggtggagattccggtcctcttaccataggacgccgataaacatactgaaaacagtaaggttatggaaacccatttgctgcgcctgccc

SEQ ID NO: 7784 - DNA, 595 bp, Gossypium hirsutum
  Clone ID: LIB3828-020-Q1-N6-E5
ataggtaaatatgcaaattccattcaaagagaaaccatacatagatgcaaccggtaaacaaagactagaaattatttaaaaggccatcaaagggcacaatccttcacgtaaaaccagaaaacccacattaaggaagaccttaaggcttagaacccaccacgaagacgaagaacaaggtgaagagtggactccttttgaatattgtaatcagccaaagtccttccatcttccagctgtttcccagcaaaaatcaacctttgctgatctggtggaattccttctttgtcctgaatcttcgctttcacgttatcaatcgtatccgagctctccacttctaaagtaatggtcttaccggtcaaagtcttgacgaagatctgcatcccacctcgaagacgtagaaccagatgaagagtcgattccttctggatattgtaatcggctaaagtccgcccgtcctcgagttgctttccggcgaagatgagacgttgctggtctggcgggatgccttccttgtcttggattttggctttcacgttgtcgatcgtgtcagagctctcgacctcgagagtgatcgtctttccggtaagcgtcttaa

SEQ ID NO: 7785 - DNA, 527 bp, Gossypium hirsutum
  Clone ID: LIB3828-020-Q1-N6-E6
ttttgcggaagcatagtgattatatcttactaggggataacactagaatcggtcggatcgcctaagaaaaaatttctgtcagtcatctcaaaacatgtccattagtactatgcgagtgtgtcaaacctagtactttaccaaagggacgacccctgcatctcattatagcttgttttgcacgcactgccgactgtgctgcttgattggtacgagccacttacactgctgtgggaccatcatgccagaagtgaaaggcgtccttgggccatcaccaacttgctagctggccctggctgacctgatggcttctaacctgcaccgatatgacccggttcatccttgtttacacaccaatacaccatgcatactgcatccccatggaataggacactacagggaatctctttatatgatccttccgaggccagacacccacattcctgtgtaatcatacccagcatatgcggtaccgtcaatggctggcacctacccactgtccaaggattggaatgactactttaatcaaa

SEQ ID NO: 7786 - DNA, 569 bp, Gossypium hirsutum
  Clone ID: LIB3828-020-Q1-N6-E7
tttttttttttttttttttttttttttttttttttttttttttttttttttttttttttttttttttttttttttttttttttttttttttttttttttttttttttttttttttaaaaaaaaaaaattattttttaaatttgggggaaaaaaaaggggaaaaaaaaaaaattttaaaaaaaggggaaaaagaatccaaaaggggggggtaaaaaaaaaaaaaaaaaaacccaaacccgggttcaaaaaaatagggggaaaaaaaaccaaaaaaacttaaaaccttttggggggggtttaaaaaaaaaaggggttaaaaaaaaaggggaacccccccttttttggggggggggaaataaaacaaaattttttttgggaaaaaaagggggggggggtttttaaaattttttccccttttttcaaaaaaaaatttaaaaaaatttttttaaaaaaagaaattttccccaaaagaaaaaaaacccccccccctaaaaaaaagggggaaaagaaattttgggaaggggggccccctccggggggggttaagagggggacccttccccccgggg

SEQ ID NO: 7787 - DNA, 565 bp, Gossypium hirsutum
  Clone ID: LIB3828-020-Q1-N6-E8
acagataatctttgaaatgacattaattgtcgcaccataaacaaggcagcttttacagggtgaacttcgaatgttaatgtcaacaacggtttctcgtagttcaaacgattaaactacaagtttatcaaagatctagtcaccataaacagtaatactgaaatcaggaaaccatattaatatgcaacatttttacttcctagtccctactaaatctttatactaaagttcaactagaaccttcttagttccaagcccaccccaagagagttcagctaccgaaacaaaaggcaataacattaacatacactggaaagagctagcttgatattgcttattgagcaaccgagggccaaataggagaatataggctaggtagtcttcacaaagtgaggggttaacattttcccaatctccaggaaacctaccctttcttttccattaaaaatggtcttaagcttcagatcgcaaaagatctccttcctgttattgggattctggaggttttgggatttgatatacaaccagatctgcttaacagctttagtacgggaagcctgttgagctc

SEQ ID NO: 7788 - DNA, 576 bp, Gossypium hirsutum
  Clone ID: LIB3828-020-Q1-N6-E9
aataagtaaatagaacatgattataacatgagaaaatacacaaatacggtacgaatacaataattgccaagtctagcaaatatactaatagacagtaatatttttcatattcattggacaataactcaatcgccataccatgaaatctttccgaccgaccttgtgagaaatattgtataactagttatccccggatctcagaacccgtaaaatggaaatgaacaaattcaggatgtccaaataaagagtggcggaggccaaaatgtaatcatcatatgtgaagcgtttgatcaggttgtcggtgtcatatactatgtacccacagaaaatcaacgcactaattccaccatatacagcagtagatgttgggccgagcgggaagaacatctggattagaccagttaagatgaggataataaggccggtgaacaaaatcggtccgagatagctgaagtccttgcccttcttcgatgcccagaaagtgtagccagtaagagatgcaaccacagcagctgtcaaaattagcgcttcaagcacgattcttccatcggtatttgcacagctcacaccaactgt

SEQ ID NO: 7789 - DNA, 600 bp, Gossypium hirsutum
  unsure (1)..(600): unsure at all n locations; Clone ID: LIB3828-020-Q1-N6-F1
gagttcaataagatcaaagatatgcttataaaattccnacaaattaactgaaaaaaaagaaagaaagaaggaactgcctttcacaagctaagcctggtagttggaaagaaataagagataaatacatcaaacccccataatgtcgttatgattagttttacatttagagtgactgtgaagccgaaccttccatttcgaatctgcaggcctttttttgttcgctttatccacagcaacccgacttttgagcagcttgactagctgctgctgagtcttgcttattaattttgagtccagtaggctcagccttgttatcagactctgtaagcctttgcttaatgtcggtggctattgaaaagaaaacctcctccacattcaaattcgtctttgcactagtttcgaagaacttgataccatactcatcagcgagggcttgacccttggaggtcggcacagcccttttgctctcatccatgtcagccttgtttccaaccagtatcttgttgacattgtctgaagcatgttgttcaatattgcgaatccaattccgaatattgttgaaagatgactcatcagtaacatcataaaccagcaaaatcc

SEQ ID NO: 7790 - DNA, 404 bp, Gossypium hirsutum
  Clone ID: LIB3828-020-Q1-N6-F11
aaaaaaaaaaaaaaaataaaaaaaaaaaaaggggacccccccccccccaaaagggggtttaaacttcccaaaaaaaaaaaaagggaaaaaaaaaaaaaaaaggggggttttaaaaaaaaaaaaaaaatgttttaaaacccttaaaaaaaaagggggaaaaaagggggggggggggaaaaaaaaaaaaaaatttggggggggaaaaaaaaggggggggtttttaaaaaaaaaaaaaaaaagccctttaattacccccgggggggggggcaaaaaaaaaaatttttttttggggggtttttttcaaaaaaaaccccggaaccccttttttaaaggggcccccaaaaaaggggggagggggggacctttttccccaaaaaaaaaaaaaaaaaacccgccccgggggg

SEQ ID NO: 7791 - DNA, 593 bp, Gossypium hirsutum
  Clone ID: LIB3828-020-Q1-N6-F2
gaaacaaataagaaacttcataaatctgagtgggatttagttgagttagttccgacaattatgatataaacaacacttgtgcatgtgctctgataggatcaaagtcgccttttcttgtatccaaaaatcaaagtttactaggtcacatatagaagtgactgacttgtacaactctaatgctattgtaaaaaaaaactatattatatccattaattaattagctgttaaattgtaaggatcagtaattcccagtgatgcataatatgctctctctgcagtagtcaaacgatcttggaacattgtccattctttcctacacctttgcctcaccccttcccatggagcccttccaccctctgcttctccctggttcccaagagaaggcacactttgatgtacaatccactgagcatctacaaccccgattttctcgtgaggaggctcgacacatttcctaagagagaaatctagaccccatccgtgaaccaagtcgttttgaatcatatgccaaacacatcgccatgcatcccgagaaaacctgtagccatgatctccacaaacctaagcatccagtatgcaagaatgattagcta

SEQ ID NO: 7792 - DNA, 515 bp, Gossypium hirsutum
  Clone ID: LIB3828-020-Q1-N6-F4
aaagagtataatatataatatatagtttaactttgagagcaacctatgacccgatagagtcacatgatgaatccaggataagggtaatgttatttaggtaaatgcttatacattaaacatagatttcaagtagattaattagataaatcgccaaatattttctaggactttgattgagttgggaccttcagaggctgaaatccatgcttgagacatgcttcccaaactttgtcaatgttagacatggggtaaccacattcgtgcttttcccatccttccagagcatgcagtatcccagctatgcgccatacgctcatcacttttcttggcaaccagttctcgcaagaatccacattttcaagggccgtcggagtctgcatcgctggtgttgtgtgataaaagcagtccttgcgcaatttttttggtggaagttgcgaaaagggaataaatagtgttcctttatttgcctttttttgctcttcttcgggcaagtcatcttcaactaaccatacctt

SEQ ID NO: 7793 - DNA, 590 bp, Gossypium hirsutum
  Clone ID: LIB3828-020-Q1-N6-F5
ctcggtaataaaaagaataatacttttatttaatcaaggaaatcttgtaatgaactcaaagcaatgagcgtgaaactgaaagcaacagaattgtaatgaactcaaagcaatgagcatcagaattgagaagaaaaaaaaaatcacgatacgcaaacaagatccaaaacttctgttcctttggacgcccacactggatagtccccgcttcaacgccattggctatcagagcccgaaaagcatcagtaacttggcgtccttgtagcccatctttttgcagagaccatctattatcagtatttttcttctttgaaaaacccgtaaaatatgggttttggtgttaaataatcgactgttcagcaatgctagctgccttaccataagcatcttggatgttctcagcaagcctaaaggttgaagacaagatttagcatggagataactttgcctaggatctgtctgtaactgtggactaaaatgtatcttcttgctgacagaattcggtaaaatgtagtgcttgtgatgtcttgggataaatgccaacagctactactgcctgataccttctttatccgtgtatgtcttaaaatgaa

SEQ ID NO: 7794 - DNA, 490 bp, Gossypium hirsutum
  Clone ID: LIB3828-020-Q1-N6-G1
actataatccttgcttgaaattcaatatgttgttgaattaagaccatcatactttaaaaaattccaacacattgtacaagaacaaacaaaccaacaacttcaatgttctagccaaacacatttatcgacaaagaaacggatatccatcaagtatcgagatgactatgtcgagaaaccaactttgtcactattgatgtcgttgaaagagatggaggtttgtatggtgtctaatgcttagtttagaaatgcttcttaaaattatttttgagaaaaaaaaacacttttggggagaagttaaaattttcatctgaaaaaatatttttgggctaatttttggcttaagagaagcactttttctctaaaaaaacagcttgtttagaaataattttgtcccaagagtattttttttttgtctcaaaaaatttgaaaagcattcctaaactagccctaatagcctttaaaggaagagattaagttgaaatgttggtcg

SEQ ID NO: 7795 - DNA, 570 bp, Gossypium hirsutum
  Clone ID: LIB3828-020-Q1-N6-G10
catacaataccccttccctttatttaataattatttaatatagcagcagctgccgccgctcacggccgggatcttgaatgacataaggtcatcgaccaccctgcgctgccgcttactcttttaaacatcttacttactactactacttaattgacccattgaagaacttttaaaaaggacgatatatatatttacatgcaaatcctgctccttcagtagctgcaaccttctgctagtggttttgctaccatccgccgccgtcagccaccgcctaatcaacggtgatgcttgctccgggtctccccgctgtaaagcctttggttgcaaggttgctacctggattgaacacgctcctccacacgttgtccctacgagccgacaccggcgtcgatggtgtcccaggtgtcgtcggactcgtcggcatcgccattgatgaagcctcatctttggtggacaagggtggggtggtggtgatcttcctcagccggccaaggccacgttccggttgaggaccggccactacatcatcccaaagtttctctagcagaaccatttttcttttctttcaat

SEQ ID NO: 7796 - DNA, 413 bp, Gossypium hirsutum
  Clone ID: LIB3828-020-Q1-N6-G11
aaaaaaaaaaaaaaaaaaaaaatttgggggggaaatttttttaaaaaaaaaaaaaaaaaacgggggggggggggggcccgggaaattggggggggggccgggggggggaaaaatttttttttaaggggggggaaaaaaaaggggggggaaaaaagggaaaaagggggttccgggggaaaaaaggtttcccccaaaaaaacaaaaaaaaaaaaaaaggggaaaaaaaaaagggaaaaggggggggggccaaagggggggacaaaccaaaattagggggggggggaaaaagggccgtttaaaaaagaaaaaaatgggggggcccggtttaaaaaaaaaaccccaacccgggggggaaggggggtttttaattggggccccggggggtttttttttttaaaaaggaaaagggaaaa

SEQ ID NO: 7797 - DNA, 576 bp, Gossypium hirsutum
  Clone ID: LIB3828-020-Q1-N6-G12
ggagaaataatgtgcattttaatggagtgatgatgctccgattcaagcatacaagggaatccacccatcgcctggaaaacatacataatagccaagatactagaaaatgtttatttaaaagagtagcataattgttatggaaagcaaaaaaatgttgaagaggggccgtggtgttgggaaacagagatgaaaaaatcaacagactccagctctcttgcgatctacaaggcgtttccagtacctaaagacctcttcctgagtttctctttcggtcttcttatgttgaaggcgactcgggaggccatccatttccttgaggacttgctcaatgtgtgccaccagtcttttcgccagcccatggctgaaatcttctcggatcactgctcggaggacagccacgtgctgtgcattggcaggcattgtataagccggaaggatccatccaaaccttcgcaagttctcggctatctcgaacactgtatgtttgctgctatcttttagagaaaaggccaccagcggtactcctatatcctttgacaatatgttaaacctcccggtgttctgtatgccttgttt

SEQ ID NO: 7798 - DNA, 560 bp, Gossypium hirsutum
  Clone ID: LIB3828-020-Q1-N6-G3
aatgaattagacttggtttaaaattcaatatctgagtcatcaaatcaggttatcagttgtccatttatttcacaaatcaataaattggaggtatcagctacaagtttgctttgacgaactatatcgccacatgattcatgcctagagtctggccttagtgattttaattctctgaggggatctgttatcacatttttactgcatatttctttagctggttgaacatgcttccaccaaaagtcagagagtgccgatttcagaacattccagtattttacatctcggtaaatcctaaacagactgcttccgttaggagtccaaacatagaaatccatccattcccggtccatgatttccattaaaccctgagcttgtggaatgcaatagagggggatgcgcttccaagggaaagcctcgctcattttcccatcaatatatggacattttatctccaatactcccccaggaggcaacccataaacaaacctgttcaccaagccatcaggtgaagctgctaaccaattgtcttcaggattcatcttaccataaacttgaaattc

SEQ ID NO: 7799 - DNA, 431 bp, Gossypium hirsutum
  Clone ID: LIB3828-020-Q1-N6-G4
caaagctccatttcaattttttcaatattcatcacatgtttcttacaaaaaataataaataaaataaaatatgcgttcacatgttcatttttgatacatgtagcttactgcagcatgtaagaaaacaaagaaacaatggaagccccaaccaatgatccaagaacaggcaaggttgcggcagccacgctggaatctggtgctgatgctgtgacggaagcaggagaggagctaggactagaaccaccggcggaaggggaaggagcaggtgcaccggcagccatgacggcgctcattgaggcagcagcaacaatgatggcggtggagaccttcttcatgtccatggcgtataaagggattattaaacgcaccggaaatgaacgagacctgcgtttaatttctggagaatggggatccgccggtgattgttatta

SEQ ID NO: 7800 - DNA, 600 bp, Gossypium hirsutum
  Clone ID: LIB3828-020-Q1-N6-G5
attaccatcaaattctctaatgtctgttattattacaaattatcatatagcgtttacatcaaccatagaaccattcacacccgaaatggggaaccgataacctgagaaatgttttatgagggaagacataaaaatggcacaatcatttgaataataatacactgaatcatataatcaaatccaatgacgatgatggatcgagatgatcgagacatgatatgcaaattagaagaattcatctccgcttttacagttaacgagcagacctttagaagtcaggagctcaccggcttcggttcttcgatcatgatctcatcactgagggagttccggtggggcgatcgtccgggtgttgtaagatctacagtgactgcatttctgtccgattatgtggaagtaaacctcggtagtgtcgtcacagtcattgcatagaatccaaaccttcttatatcggtaatcctccggcattagggtcgcttcaatctcttcatccatcctcttccaggctcgggacatatcgatcaccgactttgagcatatgggacagcaatatttgtcacgctttagcatctcatggtaacattcatagtgcatcgtgtg

SEQ ID NO: 7801 - DNA, 578 bp, Gossypium hirsutum
  Clone ID: LIB3828-020-Q1-N6-G6
aattcaatgaaacatgcatttcatccaatcaatcagcaaaaattctatcattttaataatatctactgaaacactccaatttaaacataagctaacttgtcaacttaggtagcaaacacaacactcattgcatgtccaggacaccaaaaaaaaaggatagcccataaagtactgattaaaacaattgaaattctccccgcccaaggtgtaataatctcgtctaatgcctcaacggttggccttggcaaccctctcgatttcatctttcttcttgatcgcgtagctgttcgacgatccctttgcagcattaataagctcatcggctaaacattcagcaatggttttaatgtttctgaatgcagactcacgtgctccggtggtcaagagatagatggcttgattcacacgacgaagaggagaaatatcaacagcctgacgcctcacaacacccgcagaaccgatacgagtagcatcttcacgaggtccactgttgattatagcatcgacaatgacttgaattgggttctgatcagtcaggagataaataatttccatggcatgcttcacaatcctaactg

SEQ ID NO: 7802 - DNA, 465 bp, Gossypium hirsutum
  Clone ID: LIB3828-020-Q1-N6-G7
ataaacttgaaggggccctgcccaattcaatgaaaaattcctcacaaacaccaaacctgaaagaaacccttaagttgaaacttcgattttttgaccaaaaaagctgaattttccccataagggcacaaggagcacaaatgtcccaaatctgcctcaattgccttttgcccaaaaagaggaaaccctccaaaaaaataagtatcatatctttttaatccctctctaaccaaatagtatgctgcatcatttgcatgttttagtacataatggaaaacacatttttgatatcgttcatgtaacaggcctaatttgccccgcccgctttaaaacaaaaaaataataaaccaaataaaaaaacaattcccaggaccaaccaaaaccctaaaacccaacaaaaacaaagcctaatggcccaaaatgcttatgcattttcaacaaaccctaggcccaacccattttgggtgc

SEQ ID NO: 7803 - DNA, 595 bp, Gossypium hirsutum
  unsure (1)..(595): unsure at all n locations; Clone ID: LIB3828-020-Q1-N6-G8
gaagaatgagattatttgcactaccacattcataagaaaaatttagacaaaatgaattacacacactggncttgtctcataagtgtgtagtaatgtgacagcaactggagtgcagacctatttcaaactaaatgccttaaacccacgaacaactcaacaaacataacactaacataactcgtgaaacttatataatctaaaacaaagtcgcaagagaatggtttcaaaataaacatgacaatactaacagaacttcaaccatgcatcaatatttctgctattgcaaatttgcaattactggcagagctgctcaacggctgtcacaatctgggcaggctgaacaacagtcacttcctccagagttccagcatatggtgtaggcacatcctgtgaagataagcacataattggagcatccaagtagtcgttgaaattctcggtaatcgcagctatcaagctagcaccaataccaccagtccgcatgcactcctccacaataagaacacgatgtgttttcttaactgagttcccaatagtgtaaagatcaaatggtttcaaagacctaatatcaattacttcaggatcataacccttg

SEQ ID NO: 7804 - DNA, 547 bp, Gossypium hirsutum
  unsure (1)..(547): unsure at all n locations; Clone ID: LIB3828-020-Q1-N6-G9
aacggcncnngccctttatgttttnnttttttnntaataaatggcgatnncttattgatnnaatttaataatnntaagtacgcnnaaacatcaacnnaaaacatgaaaacagtaccagcaagcaccatagttaggtataaaaagaaaaacaataaaacattgattcctgatatcccttcctgatcagtcagtcactgtctttatttttgtccgcaaagcacgcacaacccgaagcacgtgcagttatcacagcaaatcttgttctgaaacaagcaaaatccatattttttaatgcagttttgatcatctgggttgcattccactacaggttcgccattaacgtcgaaaatattgcccaagggtttcttgatgatgttagtcaagctcgagttcaaacttgctttgatggaaagagtttccgtcagctcgttgcgagccgcggttgccgttgtggtggctgccacaaccatcatcgccaacaccaaagcaagcttcttattgtactccatttcttagtgttaaatctgatcataaacccacgcgtccg

SEQ ID NO: 7805 - DNA, 191 bp, Gossypium hirsutum
  Clone ID: LIB3828-020-Q1-N6-H1
tttttttttttttttttttatttttttttttcatggaaaagtttgaggatttttaaattgaccattttgaaataaaagaaacacattttgaaataatagaaaaactcaattaaaatagaccaaacttaaaagggataattaataaataactagaacatcaaattaaagccaaggaccacaacttaatgcgc

SEQ ID NO: 7806 - DNA, 577 bp, Gossypium hirsutum
  Clone ID: LIB3828-020-Q1-N6-H2
caataaagagacaaattgaatatgaaattagatgaaatccaaaaataatatcaagttttctaacaaacaacagagtagatggtaaatattattgaatacaatgtgtggcacaacgaagagccgtttactgccttcaaatgcttggctaccatggggaagggaaagcaaggaaacaataaaacttgtcaaaaagataggtagtaaagaatcaaactgacattgacgcgcatcgataacctctgcatgcatcatttatgccactgcaggcatgtccttgagccatgcatcaagtggcttgccaattgagtacactatgaaaccaatctccctcagctggtccacgtttacaatgttccggccatcaaagacaaaagctggcttttgcatgttgtcatatatcctcttgaagtcaagattcttgaattcatcccactcagttagaatacatattccatgagcatcctttgtagcttcataagcatcccacacacaagtgacttgcttcacagttgtgggactcatgggctgcaagtgaaggggatgatcccagtcaaattttttcatggtaaggtccctt

SEQ ID NO: 7807 - DNA, 576 bp, Gossypium hirsutum
  unsure (1)..(576): unsure at all n locations; Clone ID: LIB3828-020-Q1-N6-H4
aaattaaatccgagatttcatagaacaaatggctcaagacaacatggnaaatgagacacttttgagttttctacccttaaaactgtaaccacaatgatgaaacagccaaacttcatgttggtttacatgttccataagcaacaaaaacaaaactaacattaaaacaacataggagtagccaaaaagaaaaaaacaggggatatattttttaaggactcgttgccggacagccagccattttcaatggtgttttaagcatctttcttctccacgagcttctcaatcagatccgctgcatcttgaacggtgacaatgctttgggcactttcttcttccacactgattccgaactcctcctcgagtcccatcacgatctcgaccgtgtcaagagaatcagctccgagtgcagcaaacttagattctccggtaacagaagaatcttcgggtagtgctagttgcttcctcactatgctacaaactttgtccaccgtctcgggtttggccgcacaagaaacccggaggcgcataggtccccggtcggattcttagaagatgggagactaagtaagtttgaca

SEQ ID NO: 7808 - DNA, 471 bp, Gossypium hirsutum
  unsure (1)..(471): unsure at all n locations; Clone ID: LIB3828-021-Q1-N6-A1
tcgcgcgaaaacgaattctgatgggccgcctgacatccaccgtcgaaattccggaacggagacgccaatctgatcgagaaagcggccggtacgcatctgaatccgatggttcccccgattaccgccgccgtcgccgtagccctagctacgaagcctatgaacgcgaccaccagagccgcaaagattaccaacagcgtaacccttctggttcatctgaatacaggaaccctagaagacgaagccctgtcgaaagtcctgaaagaagacggcgttttgaccgcgaaaatggtcgctacgcatccgaatcggatgactctgttgattaccgccgtcgtcgccgnagtcccagttacgacgtntacgaccgngaccaacctcgaaaccgncaccgttcggagttgtctggagacgaaaattctataagggggaaccctgcacatgacggaaccctaaactgtctggccaagaaat

SEQ ID NO: 7809 - DNA, 567 bp, Gossypium hirsutum
  Clone ID: LIB3828-021-Q1-N6-A10
accaactccaaggaataattatattattattctataaatataacgatttgttacaacaacaatcatctacccatcatttatgctatataattagaacctaatctctatgaccaacacatttcaattcatttctctactctaatggtgataaagccatatgagaaacagataaaagggactaatcccagaacctgcaatgcataccacatatttctatgtacaagatgcttacagtgattggattttcttatgcttaccaagcatttccttccaacatgaaactatgccctctggttaaaatccataaagtgaggttgaggctgtccgttcaaagtcgggttattggtggatgaatgaggcatctgcagctgctgctgctgctgctgctgctgttgttgttgatgcggtgtctgcaggacgccaaagtgatgtggagcaggttggtgggttaaatattgaggagatagtcctctattgaaaggatttccattcatagcagacacttgaccagcttgtatcctaagccgttgcacttcttccttcaatttttcattcaaagcatcccta

SEQ ID NO: 7810 - DNA, 596 bp, Gossypium hirsutum
  Clone ID: LIB3828-021-Q1-N6-A11
gatagataaaagattaaaaaatctgtttaattaattagtaaaaaacgacataattagaacaatgatatgataataagcatactaatggcgttggtatcgataataagctgtctagactccagggaccatgtcgggactatagggaatgccggaactcgggatccaagtctcagattcaagatagacgcgaggagtccatttgttggcttcatttatatctatctttttgatacctttccatgctaccctacggctggtatcggcaccgggtcccctgtttccaaactcggcaatgaaagaagtgtctattcctatggtgcctgtcatgggggcataaccctctggttgaatgatgtcgtcgatctgagattgcattatgatagacctagcgaattgtttccagggacgccccaagtatgccttgttcgtatccttcactgggatgtaatcaggggcgcccgagatggtgcagttttgaagcacaatggctgagtttgttccaagatcattccttccctgtgcagtaaccatgcaattttggccaggccctggcttcctcacgatgagcatacagttctggtaaatgctcgtcgcat

SEQ ID NO: 7811 - DNA, 581 bp, Gossypium hirsutum
  Clone ID: LIB3828-021-Q1-N6-A12
tcgcgatctagctaccaccacgtcgccgccgtcaaaactccgccgccgactccgattcaagtaagttccgtccttttctttttctttttttttttgtttttgcacaaaaacagagaatcaaagaaataaataaataaaatacaaagaaaatcacctgtcaaaatcaactgctgtattcttattatttttgtttttgtatttcgttgtaccctgatttctttctctatttcttgtttcaatctaaaaaatcctattcgcttttttttttaaagttttttctcttttcctcccccccttctgctattctagcctctttttatttgttgtattgctattcatcatttgcaggtggaatcggcgcaactactaatcgtgggtgaagcgacgtgggtgatgggcggttgctgcaacgtgaggacaacgtgcggcgccaatctgctgttacccactgcttagggttaggctgggatttgggttagtgacttgggcttgtaatgggtttgggctttaggcttagttgggcccgggcaaaatttaggtcttacacttaaaattttgaaaatgtgaaaaatttttgtacg

SEQ ID NO: 7812 - DNA, 585 bp, Gossypium hirsutum
  Clone ID: LIB3828-021-Q1-N6-A2
aacaaaaaaaatgaatgcaataatcttccttttttgaagtgttgtacattaagactctctccagctgcaagacagtgaagggtcaaatcttgctcaattgaattcctttttcttttcccagaaaaagaagttagtatcgaccgattatatacagatggacagatggaagcattcgaatcagagcaactctaaccgatgtgctcactggtcacctccacagtcgttattgttgacactgctagtcaaggataaaagttccactagttcctgacggtactcgaggcctctaaggtagtgtcccaacagcatacaccagaagagaagacgagcaagatagtctcgtgttaaggaaattaacggctgtagctggagcgaagtatcctcaacgagttcggaacaattttcacttccaatatttacagttctggttgccgtgttctctgacagaggaaccttggaatgcatcctcggagaaagagtggcaaggagaccatggactacagagtggatagtttctttcaattcaggggaagacggttcagaaagctcaactaccttttcgggttgtagtgatcttaatagtca

SEQ ID NO: 7813 - DNA, 588 bp, Gossypium hirsutum
  Clone ID: LIB3828-021-Q1-N6-A3
atcaatagaaaatggcaaaggttgatatataaaatttacgcttgaacaatgttcacaatatctatataatagctaaattaacgtaaaaaagtgagcaacaagagttccatttccacaaaactccaagcaaaattatagatttcacaagctcaacattgaacccggctacaaaataggaattagctctaagatttttaaatactatgctttaaaaagaaccaggcaaagataagcattggcttcaagcaaaacccgaacccgaaccagatggagctgcactgtaacctccacctccacgaccaaaggcaggccttccaccagggcccctgaatgatggttggaaatctgctggggcacctcccttatcaccaacaaagtcacccccacgaggacctccacggtacccatctctgtcaccaaaccttggtcggtctccttcaaagcgaggaggaccccgagcgcgatcaccaggtgggccgcctagcctacccggtggccttgcagatttctttaaagtagcaggaacaatttcggatggaagattaaggtaagttctgagaaactcaattccatcattagtaaggtacc

SEQ ID NO: 7814 - DNA, 324 bp, Gossypium hirsutum
  unsure (1)..(324): unsure at all n locations; Clone ID: LIB3828-021-Q1-N6-A4
acaaaactgcccaattcaattaatttggttttaattttgggcggggcttaccgaagtaacaccggggacccaaactaatacaattaaggggatgcaaagtttgggggggggggtccctttcaattacaacattagaaacagggacctggaaatcacctttattggttctaacccttccacgaacttttgtttctttcccaaacggggttttattcgggaaggttttagccaaattagaaataactngaagcgtagggggttgtcgggaagtgaaaaaaggggaagtgggggggttaagccagagaatgcaagttatagaatggg

SEQ ID NO: 7815 - DNA, 587 bp, Gossypium hirsutum
  Clone ID: LIB3828-021-Q1-N6-A6
acgtgaaggccattacagggcacagtccttcacgtaaaaccagaaaacccacattaagggagaccttaaggcttagaacccaccacgaagacgaagaacaaggtgaagagtggactccttttgaatattgtaatcagccaaagtccttccgtcttccagttgtttcccagcaaaaatcaacctttgctgatctggtggaattccttctttgtcctgaatcttcgctttcacgttatcaatcgtatccgagctctccacttctaaagtaatcgtcttaccggtcaaagtcttgacgaagatctgcatcccacctcgaagacgcaggaccagatgaagagtcgattccttctggatattgtaatcggctaaagtccgcccgtcctcgagttgctttccggcgaagatgagacgttgctggtctggcgggatgccttccttgtcttggattttggctttcacgttgtcgatcgtgtcagagctctcgacctcgagagtgatcgtctttcccgtaagcgtcttaacgaagatttgcatcccgccacgcaaacgaaggacaagatggagcgttgactccttctggatgttgt

SEQ ID NO: 7816 - DNA, 600 bp, Gossypium hirsutum
  Clone ID: LIB3828-021-Q1-N6-A7
aaagtaattaattatacgaaactctggaagaaaaaaatgtgaacactaaatacaatggttgccttgacgaaaaggaaagataccaagctcttggctcatgggatcctttcatactacaaattaagcaatcaaaataattaccactcacacgcttgtaattaagaaataactacatgaactagattgtaccaaaccctaaacgctagggaaatgtataagaattgaaacccaacttcaggtttctgtatagaaaagattagctaaaaagtactggcttgaagcttagctcttagaaccagacgctggtggttgttgcatctgctgatacatggcggccagccgactgtaagcatccatggtcatcggctgtggttggcaagccaggaatgtggaaagcgggtctggcatcatggctgctgctgaggcagcttgttgtaacctctcaccggagccatcccaggaggtcatagccatgaaaggattaggcataacaggtgagatgccggtgatgttgggacggcccatagtgttgatgtccatgacacccatgcccatgcccatgcccataccccatcccatccccattcccatcgctggggg

SEQ ID NO: 7817 - DNA, 594 bp, Gossypium hirsutum
  Clone ID: LIB3828-021-Q1-N6-A8
agatcaaaatctgctggttatatacacagttaaaacaatgacgatgataatgctaactgcactttttgagtaaattattattttgtatctctattctagcaaaacttgaaatctgaaaatacaattttttatcctattgaagcactctatttagatttatttgggaaggaacaaataaccgaaggtgcatgcactcttttaaagggccattctaaccagaaaacctacaaaggctttctccttcaagatataataagaatatcggtttctcaccttaaataaatgctgagtagagctcgaaatgaatgtcttcatgggacctagtgatctggtgttagcacagagacaaaatttcgattttcacactgcaccaatttaagcatctctccaaagctcatcgcctcatcaattcctggaattgcattcgccaagtctgaaaataaactatccattccttccgtcccgaattcatcattatccacgctaggatctacctccatggcatataaattcttgaagccatagaccaaagtgggagtcttagtgaatctctgttgaaaagcatcgctgagattatgagcagggtcggtggaa

SEQ ID NO: 7818 - DNA, 583 bp, Gossypium hirsutum
  Clone ID: LIB3828-021-Q1-N6-A9
aaccataaatagagaactccaatatcatatcataaaattcaaaattaatgacataaaacaaggagaggttcaagcttaaagaaatcaaagccaacttagaaggtaattaagatctgttattagcactacaccattcaaattccaaacagaacatctgaaattgaatgactttaaaactccatcaagatatccaatctacttgatcttgagccttgagaccgagggctcacttgttccgccaaaagtgagttctgtctttcaaatacatccttctctaagcttgtccccatgggtagatcaccaaataccttccctgagggaatacactctttccacccccatgtataaacttctgcagtttctgtaactgcagcacagtgagcccaaccagctgctgcttttactacagaaacttcagttggaagtggaattggctctggaatttccccatgcttcccggatgtgacgtagctttgacccaaatcatctgttgaaccccatgtgatgagcttccctgaatcagaaatggccatggcgaatccacaaccaccaccacagacgtcggtccaagaacaacctgcgg

SEQ ID NO: 7819 - DNA, 580 bp, Gossypium hirsutum
  Clone ID: LIB3828-021-Q1-N6-B1
cattcaaaatgttataaattttaaaggactaaataatatgaacggctaaaaattgtttgaaaaaaatcaaatcaaaacgtcatgaatggtaagacactgtataataatcaatggctaaatggctaaaaaaactaatgaagtcttgtattcgagctacgaaacgtcacgccatgtaaaatttttttatatccaagaaaattaagctttccatcagagattctgatccagtctttgaggaatgagtaagctgaagggcctacactcagctcccgtgccaattcctcaattgaaattactcgattgccctcctgttcgaaatgctcaaaagcagcggaggctatctgctcccagccttcaactgcttccaattgatgtgtgctaattgcagcggcacaaaactcttcaaagtacatcttcctgtatgcaagcaatcccatagcattaagaatatcaggtacccttgattcacccatcgcttcagtggcattttgagcaagtgccattttaaaattttctagagacacactcccatctctgtttggttccaacaacctgaattgtgccctgagataaaccagct

SEQ ID NO: 7820 - DNA, 590 bp, Gossypium hirsutum
  Clone ID: LIB3828-021-Q1-N6-B10
acatatatgttttagtttattaccacaaggcatgttgaacacaagagagaaaacagagcaacgacaaacagtcatgtttaaacatgtagtatttctttgttgattaaagagagtttgtgtttgtatttaatttggttctattgatcaagcttgcttccagcaacatccacgacgaatctgtatcgaacatcgttcttctccagcctctccattgctgtgttgatataatccatcttcaccacctcaatcattgaggtcaaattttcctccttacagaagttaagcatttcctctgtttccttcatgctcccaataaaactccctgtaatcgactttctcccaagcatgaccataacttggaaacaaactgaagaggggtgttaataacaccagtcaagattaacttgccgtcgaatttcaacaatgaaaggtaaggctcaagtgggtgaaaaacaggcacagtgtcaatgatataatcaagtgaatcagcagccttttgcatcccttcagcgtcggagctgacttagtagtcatcagcaccaagatgcttcaaagccttcacttttttcttatcagatgagcttataact

SEQ ID NO: 7821 - DNA, 572 bp, Gossypium hirsutum
  Clone ID: LIB3828-021-Q1-N6-B11
gaaaaaaattgtttttatataatatgaataaatatattaattacaattgcattgaatttgttggtatgctttaagcggtggcgctaggggtttttgggacagggccggaacatggaatcgggtttaatttgccactagttataggcttgacattcaaacattgggatgttgcgggttcagctccgttgtgcttaatgtcaatgtccgcaagttccacattttgacatggcgaagaaccgctgcaaataaacttgatcgcttctggaagcgcagatgtgccacggatgttcttgaagctaatgttgcttagtttaactttcgattcttcatttttcttgcatttattccatgggcaatattgttgatcaattaggataggggaagagacattattcatggtaatatcctcaaaatgtatttctgatactgccccaccatgttcgcctggccaagttttgattcgagctccattcgaagtattagtaatggtgcagtttgagattttgattccctcaactggctcttcattttggaactttccaagactaccgatacttataccatgtcctggt

SEQ ID NO: 7822 - DNA, 356 bp, Gossypium hirsutum
  Clone ID: LIB3828-021-Q1-N6-B2
ggtgcctctactttcatcgtgtgatattatgccaaattacattagatagtgactgtaatagcctatttttgcccggcccattcaaaataagaccaatccaaaattatttacacagcccaaattaaatacaattgaacccaataaaacttgggccaagctaaacccaattatagggcccaattgacctaaaacagcagaaaccctagcagcaactagcctccacactcccacgttcagcactccgcgcacgccatacgctcgtaccgttgcgagagtcgtcagagagcgtcctcgtttcgtcgtcatctagtcggacatgggaggggactggaacggcggaggagaactgctgcggc

SEQ ID NO: 7823 - DNA, 451 bp, Gossypium hirsutum
  Clone ID: LIB3828-021-Q1-N6-B5
ggggtggggcttaaaaaacccaaaatcaaccccgttcgactggcccaccaccaccgttttaaggggccgggaatccccaaaaaggggcctttaccctcgttttaaaaaaccctaaaaaaaccacccctaaaaacccaaaaaaaaaaagttgaataaaaagggttctaaaccccttcggggttcaattttaaaaacggagggggaccctccggggttaaaaccgggggaaaccggttttgcaacccgtgaaaggggaaatggtaaggggcgtggatccccaggagaggccaaaacccgagggggagggggggctaaactttgggggctagggtaaggggggctgctaaaaaaaaaaaaaaaaggggctagggttaaatttatttcggccatggaaatggggtttaagttggggcctaattttgaaaaggacttttattattgggactttaaa

SEQ ID NO: 7824 - DNA, 584 bp, Gossypium hirsutum
  Clone ID: LIB3828-021-Q1-N6-B7
aacccataaataagaaaaccttgtgttaagcatcgagatttgtcgccaatgcagagtaattgtttcagtccactgcattatccaaagatgttactgtttttcttctattttctttaaaggaattcatcatccagacaatttaggatgacttttctcaaaaaagaatgtaatttgagcagggaaaaaattaaagtgtgtattagaaagcctttaagttgatactgtaatactttgacaagggttaaataactctgcaaaatgtacgactaaaaagtgtatgaagatcgacaacattcattggcttgaatcaaaattactagattgatcttccgagtccatgatcatagtaatatgcgggtcctcctcaaccttggtatccttggcaagcacattgcagttaatggtgtgccacaccggtctctcttcttggaataacgggtgtttgcataacatagggctttgaatagtaagtgcatacttgcacgtggataactctgtaattgaactaatcattgctcttggcttccgagcagaaaatctcacctcagtttctcggggctgattagtaagatcacattggggtt

SEQ ID NO: 7825 - DNA, 596 bp, Gossypium hirsutum
  Clone ID: LIB3828-021-Q1-N6-B8
ggcaaaatacctaggttgttgtttgtatttcttgaaagaaaatgaaactcagaaatgctcatacaacaatggattggtatggagtaaacaatgcttctatagcatcagcagctatagaattctgtaatccctaatccacaaaatgtatcattctcttctccgaaaccaagttgttcaatccacgagagaaaaaaacaactggggccgaaaatgcgcctccatctcccttatgctatgttatcttgtcctgtgatcacatgatgaatggaaagagtttttgagttgaaggacttgcctgtgcctgtgatcacaaggtgaatggaaagagcttctgagttgaaggagttgcctgcgccttttttaagtatttcttatgaagtttcattgcccctatgcatgctttcttggcatctaagttcccagttatgtcattcagaatctgaactacatcgtccagaccgcgagcttcctgcagtagcgttgagcttttgtctttcaagacactggcgacgaggaaaacggaaatgggaagatgagcttcagggtttttcaccttcatattttccctctcgtatttcccgcactttcgtgttgat

SEQ ID NO: 7826 - DNA, 246 bp, Gossypium hirsutum
  Clone ID: LIB3828-021-Q1-N6-C1
aatgcctgaaacgattagagacctaaaagcaaatccatgaaggttttacgtgcgtaacgcacacaataggccaaaattgggttaaacaaagaccacatgaaaatgtatcgactcacagactgccaaggaacagaacaattagtagtactcaaaaactattattgatggtactgcacatcctccgatcgctcatggcagtttggaccgctattcacaggagtgaatgtaagcatatcttattttctc

SEQ ID NO: 7827 - DNA, 544 bp, Gossypium hirsutum
  Clone ID: LIB3828-021-Q1-N6-C10
cataataaataattccgcaacttcaacgaaaatcataaacaaaagtttcaagccaccttggaaaaccaagggggcacctcttgacaatgacaagatacagtagtaaattaaacaaaaccaggtaacgctagagaccacccatagatatgccaccgtctgtcaagcacccaatactgagaacagttaccagacaacaatggcaacacactataacatgcaaaaccaagcaaaagaccaactatatcataaatgataaagtctatcaaactattattatgataataaaatactccatctgcggaaacttcattagatttaaccagcacggttcacttcttcttagcagcagacttggtgaccttggcaccggatgggtccttcttctcaacattctttataacaccaactgccacggtctgacgcatgtccctcacagcaaaacggcccaagggtgggtactcagaaaaggtctccacaaccatgggcttggtgggaatcatcttaatcataccagcatcaccattcttcaagaacttgggtttct

SEQ ID NO: 7828 - DNA, 562 bp, Gossypium hirsutum
  Clone ID: LIB3828-021-Q1-N6-C11
gcaattacattgattctgctataattcatttatgagtccaaaaccctgggaaaggagcacatacataccatgctataacgctccatgcgaatgcagtcaaaccctgggtgagcgataaacaacttggggaacctactgcaaaaagaaaaaagcggtggacgtggcaagttcggaagcccatttgaactgggcgaaacaatataaccttagcacacagggtaaggcctttccgtgtaggactcgtccactaatggtgctgacaccccaacagatatgattagcagctctgaccttgagcatagacgaccaatttaaggattgacattgcacgacaaaacatgaagcactctcttacctacagaagacatggatgaactctctgtagggcctacagatgaatttatgctcacacactgagggcataaatccccataatgctgacaaagtctaacggaaaaagcgggccgaaatacccatccataattgccacaaaggtgcaagcagacgttaccttctgaatacgaaaaacatcccgcatgtaaacaaagaagtcgaaatactc

SEQ ID NO: 7829 - DNA, 582 bp, Gossypium hirsutum
  Clone ID: LIB3828-021-Q1-N6-C12
caaccacgaagtggatcacatcatacgcactccatcagtgtaagaatgttgtaaaactattaagtaatcaaatcaatgaaatgcttgtataatatactacaattcagtaacaccatacctaccatcctctgcaatggagcatctttcgagaccctttgagttatgataattttacagtctgccatttctgcatattcttcactcctcaccagctataaagtttggcccttcaccttggcacaagtactcatcacatagagatgctgttccccagtcctttcggagtcgcaaaatgtcctctgtgaaagttgagcctggggctccaatgaacacactcgccatcgcacagatggtcttatccaacatagcttccacctgggggtcatcctcaatgccatgtctgtataacaatgcatcccatttttcagctgaattacgaggaggccgtttaaccagtggtatagtcttcccattcagtacaaccatcgattgcagcaaaccagtttcgctttctgctgcatctgttgaaaggtatataattggagtgttggccctttcaaccattctagtgatgcaatccgc

SEQ ID NO: 7830 - DNA, 587 bp, Gossypium hirsutum
  unsure (1)..(587): unsure at all n locations; Clone ID: LIB3828-021-Q1-N6-C2
gaaaanaaagtaaagaattgatttgctagcacgcagaaataccagtctatagtttcataaagacactgagaatggatacagcaatataaaacaagttcatagttgggactgcaatacaacttagaaattattacaagaggtaaatatgcatgagtttaagatcatatcacatccctggaattaaatactcagataaaatgttatcatattatcaccagaaagcaagcttgagagaatttcaggcttcagcaagccccaatccacagtgttattacattctctcttgtaagtttggctgcattggctgcacttggaaggtggaagacatctgtgagttgtagtcccgggctcgctggtatccatgatccatctgctctcttgcactttcataagcgacttgttgttgattcagaatgaaactgagctgcttgtagtcctcctccaggaatttggtatttttccatgtcttatcaaggacatccatctgtttgccacgaacataggtaagcccattttcaagggcatcctctatggccatcagctccttgtaaggcaaagaggtgatatcctcccctttcaaatgcctc

SEQ ID NO: 7831 - DNA, 145 bp, Gossypium hirsutum
  Clone ID: LIB3828-021-Q1-N6-C3
caaacctattttagtttaataattttacccaaaccttctcaaaaatatttatagtacagggtgaataacccaacctatggacagttctattactatcaatttataccaaagccaatccctacaaaatcgggcccccttccaacct

SEQ ID NO: 7832 - DNA, 328 bp, Gossypium hirsutum
  Clone ID: LIB3828-021-Q1-N6-C4
tttttttttttttttttttttttttttttttttttttttttttttttttttttttattttatttttttttttttttttttgtggtaaattaaaaattttaaaaaaaaatagaaaaaaggaataatttagggtttagattggggggggaaaaaaaaaaaggtaaaaaagataaaagaacaaaagaaaaaaaaaaagaaagggaaaaatatcatagaaaagagggggggaaaaggggggaaaaaaaaatgaaggaaaaaaaaaaaaaaaagagaataacacaaaaggggggggaaaaaataaaaaaaaaaagggggagaaaagaagaggg

SEQ ID NO: 7833 - DNA, 580 bp, Gossypium hirsutum
  Clone ID: LIB3828-021-Q1-N6-C5
agtcaaaaagaaaatggatataaggaaaaaggaaactcatgtatacgtaatatacagaatagtacatgattccttataaacgtggaaaaaaaaaaacttttcaagtaatttctaactgcctaaactttgacagaaaacatcctttgtgagaactattcctaactaattagaaaattccaagcattgccttggctcaagaatccatgtcagatatttacctcaacattttgcagtagtttgctctgctagcacctgccaacaatggtggatttccaagttgcaacaccataaatagacatttcaagttgaacaatttgccaaaccaagggagaaatatgtagatgttcctgggatacatttgtcagggaaaaaaaatataatatgcacaatcctgccaagagtctccagaggttatcagcactgcattcatgtggtggtattattttgcccaaaaagtgaaccaccttccatgtaatttgtcttgcagccaactaatgatactatttccccagtctcaagctggcctccaacaattaatggcagacatgtctggtcgacatggaaaaatccatgacctgaa

SEQ ID NO: 7834 - DNA, 370 bp, Gossypium hirsutum
  Clone ID: LIB3828-021-Q1-N6-C6
aaaaacaaattaatcctcatgcccatgacaaattaagcaaaaataaaagggcccatttaagccatggcccccataacggaaaaattacatcttttttattattataggaaaaatagggtttcttaatttattacaaaaggccgggccccagcctaagcttacataatattgtatacccggtataaggatcatggaccaggcttggggggctcgggatgaaaacctggaccacctggtcctggggggggcccatgggggcctggcccaagaggaggaacatggcctggaggaggatgaacaacatgtggcggacctggaggcggaacatggggttgcggatgtgggtgggggggaaaaacggacccctggg

SEQ ID NO: 7835 - DNA, 453 bp, Gossypium hirsutum
  Clone ID: LIB3828-021-Q1-N6-C7
agggacaaataccccggtttaacaatccggctttttgttctgacttcaataaaatcattaccctcataaatcaactaatttaaatgggggttcacaatttttttaggggagctaatttccaagtcaaaattttaacaaaactaatggtgaaaaatggctctcatgaaatgttacaaaaattgaagccgtccctcagctgtaatgaacaacgattctattttttccctaaaaaaagaagaaactttcatggcttgaatgcaaaaaaagccaccacaaagttgtgtccaccaaatcccaaaaaattcgatattgcaacgttaacctcatgctggtgcttttcattggcaacagtgtcgaactcaactgaaggctttggcttaaattgattaatgggttggatgaacccatccagttataatggctttcacaagggcaatggcttttaaaccacct

SEQ ID NO: 7836 - DNA, 573 bp, Gossypium hirsutum
  Clone ID: LIB3828-021-Q1-N6-C8
gtaaaataaaaggataaaattcataattagaattttttttcctttacattgataatccaacattgattgtcaagcaaatacaaatggagatgactcaacaattaatagatgatatatttgatatatatatatgcgaagttaacaacaaattacaattgcctactaaattattattattgattagtccttttaaaaattctttgtccaggtgcaaggatggacataggatcaaaattggccttcctcttctcaagtctcgtccattgattcccaaaatgtcgtttccaatcctctttggcacggtagtgagggaggtatagcttgaaatccaatccctctttgatgcaccatttcactatctcacggttctccgctaccttcttctccaccgacggccccttcggagcaaaccggagcaacgccacgatgtaaaagatctccccttctggcaacgccaccgatgtccgactatcccatttgcttcgtaaaagagggtagattaacatgggcccaccgattccatttttcaccatctttttaaacaccgtccgatcgaattcaacgatgtctgat

SEQ ID NO: 7837 - DNA, 566 bp, Gossypium hirsutum
  Clone ID: LIB3828-021-Q1-N6-C9
caaacaaagaattccatgtttgagtaaaataaaacattaaaacgcttaaacatgctccacttcgtagcataagaaaggttcttcctcaaacaagctattaaacaatccatgaataagatgcaaacataagcaagtaaacaactgaaaatgaaaacctaaataacaaacaggcctcaaaatcaagtagggcagtaatattaaactctaaatcccttgctgttccttcttcctctagccctctcatacttccttcccttcgagcgcacatatggcttggtgtggctgtgaggaacaccgggagcaggaccaaagtgtttaactgcttcacgggaattctttggacctctgaggagaaccgtgttttgacccaaaggtgccctcaaagcaagctgatcaaaagtcaagcattctccaccagctttctcaatcctagctctagcagtctcagtaaacctaagagcagtaacgttcaaagcaggaacctcataaaccctaatatcatctgtcactgtccccactaccacagcaatcttatcctcctttcccttcatgaattcaataagcct

SEQ ID NO: 7838 - DNA, 611 bp, Gossypium hirsutum
  Clone ID: LIB3828-021-Q1-N6-D1
agcaatcaataataatgaaggaaccattagaggcttttaaaatgagaggatataaatacataatatcctctactaagggctacaaatcaactaataacttcaaggcttaatctcctttctttactctaaaagtggaccttatcgacaccaatggctaaagtattgctaatcatctttcgtatcgctgaatccatttgtatattcggcgatttgatgttggcttctagaaatgcatcctcacaagtttgtacattctcgatattggagcttaattccatgcttacttggtaaacgtcatgcaaagagagagcatcaaggactctcttatcgctatcgaggatggatttgtagctatccaagcatgtttcaaggcaagaagcagtcattttttgggtcgagtgatcttgcataagtttcgtagccttgtctatggcttccttaaccttgttatccattgcttgaatctcaagtttgaggacagatacgggttctgcaacaaatttactatgacctaggaatggaacaatatttgatatacactcttcaggatggtcagtgtctttactgatttgctgaaacccaggtcaacgttattggtaggtaatgtaggt

SEQ ID NO: 7839 - DNA, 589 bp, Gossypium hirsutum
  Clone ID: LIB3828-021-Q1-N6-D10
acatcaatataaccattaaataacaatgaaaaattaaaaaggaccgggcagcagccatggaaatgaaaatatgaaagcttgttcttaactggattcatcgaaatgttgggtttctttcgagtgtttcgattcaatcccaaagtaattcacgtaccatttcacgaattttctcaacccagaagataaatccgtggtgggtttatacccaaaatccttgtaagctaacgtgacattggcatgtgtgtaggggacatcaccatttctgggcaacgtaaccacatgtttcttggcttttgtgttgagtaatccttctaaaatcgagactaatcggccgacgggaacaggggaagtgtttcccaagttgtaaacccttaattgagccggtcctttcttttttccgccgctaccggtgcttttttccgccgtgtctaacgctcctaagcaacctttcacaacgtcgtatatgtaagtgaagtcacgcgccaccgctttttgatcttgggttctgtagatatcaatgggtttcccttgaagatatctttagtgaaaaagaataagccatatcgggtcttccccatggaccataaac

SEQ ID NO: 7840 - DNA, 594 bp, Gossypium hirsutum
  unsure (1)..(594): unsure at all n locations; Clone ID: LIB3828-021-Q1-N6-D11
aagttcaagctagaaatgagcattacatttgaaataattaatatatagtttttcacactaaattataaaatcctttaaaagaaaaagaaaaaagaactagggatcatcaactttacaagatattcttctagatgtactgtcaaaatctaagaaaataattgaggtgttatctttcgttcgctgtgttctagcctcattcaacaaaacattcgcaatcttctctgccaaattctccttctccgactctgccatcaactctttctccctctcctgagcaactaactggattgccttcttagcagtaacaacatcccagaacccatcgctagccagcagtgcaaatgccccacttgtttgattgatatgcacaggttcacttataaaaggctcggagctaaagcgtgaatcttgctgcttcacaaacttgtctccaagcatccttgcgaggttcaaaccacatagacgtgtctccccatctcttaatggctcccccattccttccattcggagtctttcagaataactacttattttatggtcttctgtcatcttaatctgcttacctncaacattcataagaacatgctgaatccc

SEQ ID NO: 7841 - DNA, 270 bp, Gossypium hirsutum
  Clone ID: LIB3828-021-Q1-N6-D2
aaccccaaatcaatctttatatatattattatcaaaaagctcacaaaatgtgttgatgtgttcaaggatttgaacatgaagatttgaaggcaacaacaatcaaaatcttaaaatatgacatacgttccatacaatcaatcaccctacctaattcctttctgattttttcgttgatgacaaggaatcaaaaaatcccaccacctccatttacatataatttttggcttacaacatttcattaaacatatatttggggaagggcactaaagc

SEQ ID NO: 7842 - DNA, 607 bp, Gossypium hirsutum
  Clone ID: LIB3828-021-Q1-N6-D4
agaataataatgattcaatttttattataggctaatgccgagcttttagaaaagttgaagtgaaaatacatattatagttctgaccaaggggcaatgtctccagcttcttggctaagctcataatagcctatctcttgaagaacttgagtacactgaggaagagcaaccttcttcttaaacccaagattgttggcaaaccgaagttcaccgctgacgccgtcaagtgtggtgagaaccaccctggatatcctccacatttcggagggatcattgcaatccgggttgggactcctcaccaaggcgacgtcgcagtctgattcctcataatcgccttccactacaatgtgatagtctccacgttcgtcagtcactatttcttggctctggaaggtaaggtgattgtctgtacgattcctgcattccagtttcactactgctccagcgatgggttcgctgagtttggtctcaaactcaacacggcaagtgtcacagtaaacatggcctacgacgacgtagctcatattttcagccccatagacgaaattgagtgaggacgaaacaaaaatggtgaagcagaaaagagcgaatatgggaatatttgccatt

SEQ ID NO: 7843 - DNA, 496 bp, Gossypium hirsutum
  Clone ID: LIB3828-021-Q1-N6-D5
gggtcttataaatagttttgtgaccctgtgtcttcaatacctaaaattttaacttgacattccatctttagcacttccctctaagcctagggatatttacacatttttttactacaaaagtgttcacaaattcaggacatcactgcatgtgtagaatgaacccccaacttttccaacaacttggggctcttcttcttcctctcttttctcccataacatcacctaccaaccgacctcatcttcaagcagacactaaatccttcaatgtttttctttggcaagaaaccgatccatttcatcttcaccataaagaattttagccccacatcctctttcatccactgacccaagagcttcttcatcgaccaaaaccgcattcaccctgtgagattccatcttggtgtttggaatctcaaacatagcttctgtaagaatgctttccagtatggctcttaaacctcgagcaccagtattcttagccattgccttctttgaa

SEQ ID NO: 7844 - DNA, 495 bp, Gossypium hirsutum
  Clone ID: LIB3828-021-Q1-N6-D7
tttttttttttttttttttttttttttttttgattttttttttttttgtctttttattttttttttttattttttcttttttttttatcttattatttttttttaaattttttaccctattaaaagctttctccaaacaaaacaaaaaaaactcaaaaaaaacaaaacccccaaaacaaaaaaaaaatccttatcccaaaaaataaaatccccaccaaaaaaacattaccaaaaccctataaaaaaggaaaaaaattttttaaccaaaaaaccccccctaattgagaaccagcctttaaattcaaaaaaatttatccccaaaaaaaaaaatccgaaaaatttccccaacataaactaaaaagatgattccccccccaaaaaacattaaacctttttattaaaaactaaacccccacaaacctttaaaaaaaattaaaaaaaaaaaaaccttttttctttttttttctccagggggaataatcccgcctgcccccc

SEQ ID NO: 7845 - DNA, 429 bp, Gossypium hirsutum
  Clone ID: LIB3828-021-Q1-N6-D8
aaaaagagggggagcacgcatttgtttttgaaaattaaaaaaaaaaaaaaaaaattttaaaagagcaggccccacgccgcctttttggaaaaaaaaaaaaaaaaaaaagggggggaaaaccccagggggggggaaaaaaacaatttttggaaaaaaaatgggggggggggggaaaagtgcaatgagggggaaaacccccccccttggggccaaaaaaaaaaaaaatatggggaggggggggggggggggtccccaaaaaaaaaaaaaaaaaaaaaaagggggggggggggggggggggacaaaaaaaaaaaaaaagccccccccggcccaaaaaaaaaaaaaaggggggggaaaaacccccccacaggtttgttttggggaaaaaaaaaaaaaaaaacggggggagaaaaaaaaaaaaatagggggggg

SEQ ID NO: 7846 - DNA, 608 bp, Gossypium hirsutum
  Clone ID: LIB3828-021-Q1-N6-E1
gcaattacattgattctgctataattcacttatgagtccacataaatgttaaatgaacacatacataccatgctatttgctctctccgaatgcaatcaaatcttgtgtttgtgataaacaacttgtggttcctactgcagaaagtttagagcggtggttgatgcaactttggaggcccatctgcactgtccgcagctatatctttatagcacagttgataaggtcgttccgtataggactgtccccctttgctgttaacaccccaacagatatgatttgcagctcttccctttagcattgatgaccagctcaaggttcgacattgcacgttaaaacatgttgcactcttttacctacagaagacattgcttccctctcggagggtctacagaggaattcatgctcacacactgagggcataactggtcgaatgctgccggggtttaacggaaaaacatccggtaatacccatccataatttccagaaagttgcaagtggcggctaccttcggaatctgataaacatcgcgcatgtaagcgtgaaggttggtatactcgagcagctttttcttcgtacatttgaacaaaacatttagacaagatcaaac

SEQ ID NO: 7847 - DNA, 588 bp, Gossypium hirsutum
  Clone ID: LIB3828-021-Q1-N6-E10
agaataataatgattcaatttttaatataggctaatgccgagctttcagaaaagttggaagtgaaaatacatattatagttctgacgaaggggaaatgtcttcagcttcttggctaagctcattatagcctccagcttcttggttaagctcataatagcctatctcttgaagaacttgagtacattgaggaagagcaaccttcttcttaaacccaagattgttggcaaaccgaagctcaccgctaacgccgtcaagtgtggtgagaactaccctagatatcctccatatttctgagggatcattgcaatccgggttgggactcctcaccaaggcgacgtcgcagtctgattcctcataatcgccttccactgcaatgtgctagtctccatgttcgtcagtcactatttcttggctctggaaggtaagctgattgtctgtacgattcctgcattccaatttcactactgctccaccgatgggttcactgagtttggtctcaaactcaacacgacaagtgtcacagtaaacatggcctacaacaatgtaggtcatattttcagccccatagacgaaattgagtgaggacg

SEQ ID NO: 7848 - DNA, 588 bp, Gossypium hirsutum
  Clone ID: LIB3828-021-Q1-N6-E11
ctagttaaaacctttagtgctgatattgcgaaaaatattatacagatccctttggcaagatcgatacatgatgatttccaagcatggggaggagaaccatcaggcatcttttctgctcaaagtgcctacaaactattacataagtctactcgaattcctaatgacgaaattatacatgctgaaaacaaaaatttctacagaaaattatggaatttacatatcccctcaaaaattaaaattacagtatggaagatctcttggaacaatatccctacttttgctaatctcaaactgaagagagtgattactgaagctgggtgacctagatgcaaacaaacagaggaagatagcaaccatgtttttcgacagtgtcatgggtctttactcaggggacaaatcagtatgtcgccttttctgctgttggctctagcttctctggtcaaacagaaacaaatttatttatgaaaataaaatctcaaacaacagagacatttcaagacaaataataagctataactcagaagtgcatgggttagagggaaaactatgtatctgtgaatcaggcagacttcataatcacgatgaccg

SEQ ID NO: 7849 - DNA, 578 bp, Gossypium hirsutum
  Clone ID: LIB3828-021-Q1-N6-E2
ataaattcttcatttttactataaatatattcgcccatcggaaacctcgttataggctccccatccttttaaaaaaaccagtacacttgatggtaacctgtaaaacaaaagtcaccatattaaactggaatggaccgccgcacaaccccatgttgaaacaatgccggggaaaaaaggccgaggccatgacggatgcacatacataggagcttctacaattgaattacaaaacaggaatattattgtccaagaaaaacccggccaaagatatttaacagcttcaatttactcccctgccactggaactgattcaaccaggttacggctcttaagaccataaaacatatcaagtaacaacgactcttacggggttcaaggctggaaacatgcttgcaaaatccatacactcctgtcatggacaatagtctctccgagcaaatctagcatgtatacttctcctctatccgggtcaagcctccttgggagatcttatcccagagagatggatctttcttacacttttgaaacaaatcaaagagtatgtcagcagcttgatcaccatggtcaggatcaatgat

SEQ ID NO: 7850 - DNA, 134 bp, Gossypium hirsutum
  Clone ID: LIB3828-021-Q1-N6-E3
ggactataccattatcaaggcatgacggtccaagtgcatctttttattgacctcatctaaaaaacagggatgtaaatcgtgaatatcatcaatcataagcataacctgctgatagctatgcaacatactagaat

SEQ ID NO: 7851 - DNA, 536 bp, Gossypium hirsutum
  Clone ID: LIB3828-021-Q1-N6-E4
attcatagaaagaaatacaaataattatgaaattaaattttgagatggagctatggaataaacgaactattgagagataacattacacatacgattcccacaatagagacatgttacagaaaaattcaggctcttacctatcctgactatatctaactcacttaaagattcgcagaaacatagagacggcaatcaggaattaaagctacttacgtgtttatcgtctcaatttgctccgtgattgttcccaagatttgccgattctaaactaaaagtgaagtcagccttgttcggaggaatcgacaacgtcgttgaattcaccgaatatattcgggcagccatcccatttcgcttgttttcttgattcccagtaaccacccacgtagcggaaggacccattttcactgtctctctgaaaccatctaggcttccacccattttcttgtagttttctagacattctctgcctcctctctagtcgttgtttctctgaatttgctctatcatattctccattctccaaatgacgttggtct

SEQ ID NO: 7852 - DNA, 581 bp, Gossypium hirsutum
  Clone ID: LIB3828-021-Q1-N6-E5
agacaaaaaagccaaaaattactaccataatttgatatagtacagtatacaaccatatgaatttgtagtactattactagctagcatcttcggggttgctttttgctatttttctctctaagctgcaataattgataccagtctaccagagtctttatacacaatttcccatcatctttttttatctttcaatcatctaatgcacattcatgaaatattttgattttgattttaaatttgacgacattggacttcctttcactcactgtttcgagatataacctctccaaagttgatgaaaagttgtgcatctgaggtactcaatagatgggcaattgactaagtgtggagtcttgagatttgcatactcatccatgtaagaagtgaccttggtagatgaaagtggtgccggtgggattgtggttggttgctttgctgggggttccaatggcattaggcttcctagaactcgtgtcacttcatgcattgttggtcgatccgatgggtgtctcttggtgcatagaagggcaagctgaaaaacattcttaacagctccaatatctttgcaagttgcagtgatc

SEQ ID NO: 7853 - DNA, 518 bp, Gossypium hirsutum
  Clone ID: LIB3828-021-Q1-N6-E6
gtaaatcaaatattgttttgagctatttattcttcataattactctttttatccaacaggattttatagcaagcccttctgcaacatcattacttcttattttgtataattaatacgacgacaaccaactcttcctcattatttcatcttaatatggtatcatctccctactttggtggactgggttcactgtccataacctcttctatccctttgctctttacagtttcagcctggcaacatcctgatgcgcacctgggctgaccacactcagcacaagtcccaccgcaaccctgacggcaacactccccactctcacatcccgactgtcctggcattagtgggatttgtgggacttgtgggatctgtgggattagtggaatttgtgggatttgtgggatctgtgggatctgtggaattcttgggatttctggaatttgaggaaatggtagaacgaaaccaccaggattacaattaccggaacatccagaagaacaacatttttccggacgcgtggg

SEQ ID NO: 7854 - DNA, 360 bp, Gossypium hirsutum
  Clone ID: LIB3828-021-Q1-N6-E7
aattgaaataaggtttactagaatattgctcacatacatatgcattaattttcaaacacttaatcttaaaactattgccaacaatttcaccaaatacttatcaacttttcaaatggaaacaccaatcattagtggtaccaaaatggtagccattgatttcaacatttttctacctaatgataactttgaagacccagaaatatgttggctactatcagccggtaatggggcaggcaccagaaaatcatcttcaggggaagaaaaaaatgggactggtgatggaggtggtggtggcaataaaggtggtggggccaccagagaaggtggtggtggtacaggaaccatggtgttagagcaagt

SEQ ID NO: 7855 - DNA, 581 bp, Gossypium hirsutum
  Clone ID: LIB3828-021-Q1-N6-E8
agaaatactcaatttttttatttttttatttgtacatctgaaagcatcgctaatggctataagcgtttaaaaaataaaaataaaaaagaaggaacttgaaaaacaaaatcaccatatttaactggaattgacgggcgcacaaccccatgttcaaacaatgccggcgaaaaaaggaaaaggaaaagacaagatgaaatacaaaggagcttctccaattgaattacaaaacagaatattattctccaagaaaaaccggcccaatgttatttaacagcttcaatttactcctctgccaatggaactgattcagccagcttacggtacttaagagcataaaacatctcaaggtaacgacgactctcacggcgttcaaggttggaaacatgcttccagaatccatacactcctgtcagggtcaatagtctctccgagtaaatcttccatgtatacttcatctctattcgtttcaagcctccttgggagatcttatcccagtgagatggatctttcttacacttttcaaagaaatcgacgagtatgtcagcagcttgatcaccatggtaaggatcaatgttgaaacc

SEQ ID NO: 7856 - DNA, 581 bp, Gossypium hirsutum
  Clone ID: LIB3828-021-Q1-N6-E9
ccatagtcaacattgaaacattgcacatctttcattagatgcaagttagcacctgtttgttaaaccaactgattataaccaaaagtgtaacaaaatagaagattgtaaatgatatgtatgtatttgtgttttgcaatgatgtttctttcatcgtgatataacaaaaaaacacagaaacatgttcttaactgacacacacatacagcatcctcaaacatcaatgccccgttttgatttctcattcaatcatccattggcacagaagttggatcttgaaacattggtatcaagaatatgacctgataagtttgtgttaatcaactgctcttggaagccatggcttttctggcagccatagtattcctagcagcccttgcattatcatactcaaacttcaacacatctgatatgtgagaagtatccttaacataaaaaaacctcccaaaggaactctcttcaatcaaagggaaataacagaagagcatagaattcaccacccaaaaccagagcccaccaagcaaaatccccaaagaagctccagcaagaacctgggccaccgtatggtaacccaaataaaccct

SEQ ID NO: 7857 - DNA, 572 bp, Gossypium hirsutum
  Clone ID: LIB3828-021-Q1-N6-F1
aaaatgaaaaaaattgtttttatataatatgaataaatatattaattacaattgcattgaatttgttggtatgctttaagcggtggcgctaggggtttttgggacagggccggaacatggaatcgggtttaatttgccactagttataggcttgacattcaaacattgggatgttgcgggttcagctccgttgtgcttaatatcaatgtccgcaagttccacattttgacatggcgaagaaccgctgcaaataaacttgatagcttctggaagcgcagatgtgccacggatgttcttgaagctaatgttgcttagtttaactttgtattcttcatttttcttgcatttattccatgggcaatattgttgatcaattaggataggggaagagacattattcatggtaatatcctcaaaatgtatttctgatactgccccaccatgttcgcctggccaagttttgattcgagctccattcgaagtattagtgatggtgcagtttgagattttgattccctcaactggctcttcattttggaactttccaagactaccgatacttataccatgtc

SEQ ID NO: 7858 - DNA, 519 bp, Gossypium hirsutum
  Clone ID: LIB3828-021-Q1-N6-F10
gtctcaaattttgcaaaccacctacattaaacagtccagcaagatttagttttggggttccagatagctggaagcaagaattttttgttcttatttccataggcattgaaatttccgccggttttggggtcggtgagaacttcgccggggttgccaggggcagcaccacgaccgaaaatgcctttgcaaacggtggctgggccgagttctttagccttgtttgaatggtagagagcatcgttcattgggttggtgattgcatcaaccaatgcacccgcgaaggcaacaaccatagcatctgctgccatgttgccgcttggtggtttaaggactggtccctttggacccatgtcagccatgaagaaaggccatccgcattctccagggcactccgtttctgggttaccgactatgatgtatggtcgcggatggggatcctcagtaagtaaatgatctgcacattgcccgttgcaaattccttgaatagagacatcccttgcagcaacgatgaccggtaag

SEQ ID NO: 7859 - DNA, 567 bp, Gossypium hirsutum
  Clone ID: LIB3828-021-Q1-N6-F11
ctataatccgaatatttaaagataagaaattacaaatatacaatttaaatataaaaacatattaatatttaattattactgtaagaccctaagacccaatttgtgcccgggcttacaccaaaaccaaaacaaaaaaataaaactaaaaaatatataaataatagtccaatgtccatttcttacatagtccagcaaccaaaataatgggttcaaattattaaacttaatccaactagcctaaataacccaaaataaataccccaagggaattttcagcagaaaccttagaagcttcagccaccgcagcctttagttgattcttccactcgtgccatgttccgcaaataactcctccacgccatgcacacctgcaacaaacgaaaaccacaacagaaaatgacagcaaacaataacagattacagcaaggattttttgtatttttatttactcattttttggctataaaaccgaatgtaaacgatgtaaatgggggatcttcttctttttttcagaaatacacatgcataccaaaataaaaaaagttactgaaattaaaaaatgattga

SEQ ID NO: 7860 - DNA, 519 bp, Gossypium hirsutum
  Clone ID: LIB3828-021-Q1-N6-F2
caggggaaccaatcaatcttgaaaaccataaaaacatgtacagaggcgtgtacataatacaagtagagaagcatagatttgaaacaaaaaaagaatgaaaaggccaaaacagaggaaaactaaagattcatacctgaaatgactctccaatgaagaagaggatttaaagattcatacctgaaatcactgatattacggtctgttccaatttgacctatctccaaacagcccaattcaaggataggaatttcaacccaaaacagaggcctactagcccaagctgatttactacggccctaagcacaaggccccagcggcaacgacaaaagaacacaaaaacgaaccaaaaacccgcaaacccacagagctatatatgccagacaacaaagcagagatgaaaaatgaagacaattgttgaaattaacattcaaagctgaaatcagtgatcaagcagtggttacgaaaatttaaataaataaataaaaacaggaacgtcagacttcgggtttcccattccca

SEQ ID NO: 7861 - DNA, 387 bp, Gossypium hirsutum
  Clone ID: LIB3828-021-Q1-N6-F4
aaaaccaaccccccccccaaattttaatatccaccctaaaaagttaaaattctaatttaaataccaaggcttttgggggggggtaaataaaggttggccatcctaaataattaaaaaaaacaaaagggcccccaaataaaaaggaaacctaaggcccaccattttaaagtcttttttaaaaaagggaatttttttgctaaaaaaaagggaacagctcctataaaaatcaggggggaaaggggaacaattggaaacatccctgaaaataaaaaccttggagggggaaaaaattgcctcccggcaataaaaccattaaggggacctgcaaaaagggaagggtaaatcatacttgcccctgaattgctgaaaaaacctgctgttgccttt

SEQ ID NO: 7862 - DNA, 451 bp, Gossypium hirsutum
  Clone ID: LIB3828-021-Q1-N6-F5
aacaaaaacactttttatgggggctatagttagaaaaatccactggtcatgttttaaaaaaacaaaacagggggggggttacccatgaccaaattcaaagaccataactggagagaattagcaacatcactggccccccgaaggaacccctatttgattacccccacaaaaaacacaagggggggtcactattataccggccaaaattggccgacttacaggggacccaccgggtttacccccatgaaaaggaaaataacacgggggaaaacaaaaaaagagaacatgggaaaacaaaaaaaaaagggcaagggcatgaaagctaccctggtatcaaaaaatatgccataaggagcccttttggggctgaagaaaagccgaaaataaagtccaaagacagacaagttgggctaggaaaaaaaaaataacacattttgtcaagggagaaaaa

SEQ ID NO: 7863 - DNA, 398 bp, Gossypium hirsutum
  unsure (1)..(398): unsure at all n locations; Clone ID: LIB3828-021-Q1-N6-F7
tttttttttttttttttttttttttttttttttttttttttttttttttttttttttttttttttttttttttttttttttttttttttttttttttttttttttttttttttttttttttttttttttttttaaaataaaaaaaaggggggaaaaaaaaaaaaaaaaaaaattaaaaaaagggggggttttaaaaaaaatttaaaggggttttcccaagaaaaaaaaaaaaaaaaaaaaaaaaaaaaaaaaggaaaaaaaaaataaaaagagataattttttttttttttaaaaaaaaaaaaaaaattaaaggtttgccgnaaaaaaaaagaaaaaaaaaaaagtttgttaatattaagggaaaaaagaaaaaaaaaggggaaaaaattttttttgc

SEQ ID NO: 7864 - DNA, 381 bp, Gossypium hirsutum
  Clone ID: LIB3828-021-Q1-N6-G1
gcaaatataaagtttttatttgtttttggacaccaacgcatttttaaaatcgtttatggggagccaaaaaaaagggccgaaacaagaaaaaaaatgacaattacaaaaaaaaaacatcacgaatgggtaacacaagaaaattgtcttcgtcatcaccatcaaattcaaaccaaaattggacccgaaagggaacccggctacaagcggggcaaaagaggaaaactgggtttccaaaaaacaggagggacaatcaaattctaatataaccccaggacttaaaagcaaaaccatgtcggaatccaaaaccgaagttatccggggagcgaacgcgaagaccggccaaaggggaaagggctccctaaacgacattagaataagggg

SEQ ID NO: 7865 - DNA, 439 bp, Gossypium hirsutum
  Clone ID: LIB3828-021-Q1-N6-G10
gatagaacagtacacaaagtaatccaaaagagaatctgggtacaccgggaagattgcatcggtaacatcagttttatagttttagggactccagtttcactaccatgatgccaactaaaggatgaacaacttgtgcaccgattaacattatatacaccagagagggcaaaaagctttaccgtagatcctggttacgcaccgtttcatcgttcatgatttcagaatcctttctatggcagctatatagtactcctttggcatggtaccaacaacagactctttcctctctccgtttttgaacagtaacaccaccggtacggccataatgttataaacctctgcaactttggggtcatgggcaaaaagggttttgagagtgatagaaggcgcattgcgacgaagcttaaaggacccatttttcaaaggaaaggagatgttc

SEQ ID NO: 7866 - DNA, 580 bp, Gossypium hirsutum
  Clone ID: LIB3828-021-Q1-N6-G11
gaaaagataaaaatatttatttttaatctttttcatttatctaaagaatcatattttaaaacttataatcaagaataaaatgtacaaatacttcaaaaaaaattaaataacatagatttcaacattatctctctcctttatttgaattttgaatcattatgcatgtatatatattaaaattaagaaaattatttggactatgagtttaataatagataaacttatgtttcatttaattattcatttattcatattagtccttgaagaaggaaatgctctaatgaagcaacattttaacacttaggaggatatgcaactccacacgagctagctacctttggaatgttgggattgttcatatactgtttaagagttgggtccttaatgtaaccacaaaagcatggttgctgttccttcaacttactgcaacaagcggctgaaggaggctgcgacggcaccatgattgccgctaagcatggactgagctcgatggggttacatgtcactgcctccaccatgcatgtttcacccgaaacaccaccaccgctagtgccaccacacacaagataacaaaggaaac

SEQ ID NO: 7867 - DNA, 574 bp, Gossypium hirsutum
  Clone ID: LIB3828-021-Q1-N6-G12
aagcaaaatgaaaatgaagcagctagcttcgtgatatttaatgtcaaataatgcaataaacaaaatcatccagacatgatctttttaggtaacaaaaaggaaagagaatccagagccacaggacaaaatagaaccttaactttaatactagcatgggaaaatcacaaactacaaaagccctgtaaccaaccactcaagcttaagattatttaggacatcgagggctatatcagatggaagtcttctaattgactaaaactagtggttgccaaaaagcataagtgaggcatatttaagaatctgcgatggtaacctccacctcaacaccaggttcaatggtgatagaggtgatctgcttgaccacatcaggggagctgaaaagatcaataactcgcttgtgaacacggagctcaaatctatcccatgtgtttgttccttcaccacagggagacttcctcgttgtgatgtgaagaaccttggtgggcattctcactggccccttaaccctcagtctcttatccttggcaccacgaaccaaatcagcacaaactttctcaaggtttttcacattctt

SEQ ID NO: 7868 - DNA, 584 bp, Gossypium hirsutum
  Clone ID: LIB3828-021-Q1-N6-G2
aaatagacctaataatcttccaatcatgctaagtaatatggtaaataaatagatgtaataatctcttagtcatgctaagtaatacggtaaataaatagatctatatcccccctgcaaaaataatcattccaagctttaatggaagagcttgaacaaaaatggatgatcagcgatacgagccaatagcagctaaacttaacgcgaagtaagcttatttcgagggaccattaggcaaatcagaagattttgaggcacctgatgggttcagctcatcccatgcttcaatccatgtcaccatagcatctgcaagcttgttaaagtagtcatcgaccttgccgagtttcgccttcacctgattggcgatttcaatgtagcattttttaacgctggtgcagtccttcggaagggtaaccgattggaagaacgggatcaactcttcttgccagtagatccctttgtattctttcctaagattcacgaatgggttgcttgctttgctgtgccaaatgtatggcaatccggtcttcactccccatccgaggtgatcgcatataaccttggtgcaccagccagcccacatatca

SEQ ID NO: 7869 - DNA, 574 bp, Gossypium hirsutum
  Clone ID: LIB3828-021-Q1-N6-G3
gaaggtaaaaggtgttcgttgaagataaatataaatatgagattataacaagacatgtttcagttctaacaggcaaaactggaatagcttttgtacttaatacataggaaaattgggatcaacatcattggcccatgaatccaagcccccgacaatatccttagctaaatcgaatcccttgtttcggaggtaatcaacggccctttgagaatcattacctcttctgcatattacatataggttagctcccgatccagtgctttccttctgttgttctttaagtgcggaagatatttcgggcagtcgagcctccaagctcgcgagcggaatgttcaatgagttggggatagaaactatcttgtagtgaagttccggtcgaacatccaccaaaacatgtggttccccacttatgatcctctctttgtactctttactggttattctagaatccggggagagtagtttcagcttttgcggagaggttgacaatggcgattgagtgaacttctcataatcaagatctttgaattgctgttggttaaatgtcgtattttctccacaaacttcgcattgc

SEQ ID NO: 7870 - DNA, 566 bp, Gossypium hirsutum
  Clone ID: LIB3828-021-Q1-N6-G4
gaaaaagaactgtttttatgtaatatgaataaatatattaattacaattgcactgaatctgttggtatggtttaagcggtggcacttagggtttttgggacagggctggaacatggagtcgggtttaatttgccactagttttaggcttgacattcaaacattgggatgttgcgggttcaggtccggtgtgcttaatatcaatgtctgcaagttccacattttgacatggcgaagaaccgctgcaaataaacttgacagcttctggaagcgcagatgtgccacggatgttcttgaagctaatgttgcttagtttaactttcgattcttcatttatcttgcatttactccatgggcaatatttttgatcaattaggataggggaagagacattattcacgataatatcctcaaaatgtacatctgatactatcccaggagattcgcctggccaagttttgattcgagctccattcgaagtattagtgatggtgcagtttgtgactttaactccctcaactggctcttcatttgggtactttccaagactaccgatacttataccatg

SEQ ID NO: 7871 - DNA, 564 bp, Gossypium hirsutum
  Clone ID: LIB3828-021-Q1-N6-G5
ccaaaagttcaaagagtcctgaaagcataaaataaattctgctggggtgaacggagagtaaaaatttctaattcttgaaaaaaagcgcataaatacggaactgtctaattagatcatttgctctagatgatctcaaaaaaagcctttactactattatataaaaggcctagccattgctctcaaagattaaaatcaaaatgaaacgtgagtggatcccagcactgggaggcaaaaccaatcctcgaaatcgtcgctgaaaactcgagccccatgccagtgtactagactggtgaatacagtgaactaagttcacataaatgttgataggatattcttcttgagagtgaattcatctgcttttgctgggcttatagacttgtcaagaatgcgctgcagccgctcgatttccttcttgggataatcagcacctttctccaaacagcttttagcagctttcaagtatatctttccatacctctcactggaccccttgagtttctcaacttcctgttcgatcttagagaaaaccgtcttcttctcatcattgtgggcagccacaaaat

SEQ ID NO: 7872 - DNA, 459 bp, Gossypium hirsutum
  Clone ID: LIB3828-021-Q1-N6-G6
gcaaagtatcacatgggaattcaacttttttttatgaacgtacaaatgaagtgatgaacaaaaaaaaaagaaaagcggtaaaaatggattgaaccccgagtaatattttacatttattaatcccccattttttattcttcaacacttcatgctttcgtatattcttgctggcttactgaaaatagtaggcaaagaaagaaacaagggtggctccaaccaaggacccaagaacaggcattgttgagattgcgacgctggagtctgggcctggggcagctgctgaagctgaagctgcacctggagctgaagctggagctggagatggagcgccagcagccatgacttcgctcatagaggcggcgacggccacaatgacggcgcatgagatcttcttcacgtccatggtatagaagaatagtaagctgactgagagtcgagagacctgctgcgacgaaaaac

SEQ ID NO: 7873 - DNA, 390 bp, Gossypium hirsutum
  Clone ID: LIB3828-021-Q1-N6-G7
ttttttttttttttttttttttttttttttttttttttttttttttttgtttgttttgggacaattttttaattaaattttaaaaagggaaagagggggggggagaaagtaaaaaaaaaaaaaaaaagaaaaagaggaagggggggggaaaaaaaaacaagaggaaaaaaaagggggaggggaaaaaaaaggaaaaaaggaaaaaaaggaggaggaacccgggagagaaaaaagaaaaaaaaaggaaaaaaaggaggaaaaggggaaaaaagaggaaaggaagcgaagaggggggggacccgggaaaaaaggagaggaaacagggggagaacgaggggggcggcgaaaagagagaaaagaagaagggggaagagaaggggagaagaggag

SEQ ID NO: 7874 - DNA, 572 bp, Gossypium hirsutum
  Clone ID: LIB3828-021-Q1-N6-G8
aatgtaaatttaaggaaaatcatccatccatacatagacatatgcatatatacagataatatttataggttaatactgtacatatcctatttaaacaagcaacgacatgaaggttccatcttaaaggatactacatagaaagaaaagcacaacatgggctatggggaaaaatagtaggaaactgatcaaatatgttcctggaatgaggaacaacgttaatggtggtgatgctgcttctaccactctaagattgcggtacgaagtgcgtggttagggatgagattgcgatgagcaagtggaatattcgtgcaaggagaggtattgtgcccaccatccagccatctccgtatctgtcgtaactcataggtgaatccatcggctgccacatgtgggtccgtcatgatttcctttgaaatgggacaaaagaaagaatcaggaggctgacgaagctctccagaccctgcatggaatgttgataagggtccaatagtatttctaatcggttcaagcaccttatacacctctgaagcaaggtctggtcgacggcttcgattagtatcacagcatctcaa

SEQ ID NO: 7875 - DNA, 584 bp, Gossypium hirsutum
  Clone ID: LIB3828-021-Q1-N6-G9
aaaaataaagagacaaaacaccaatttaatgtgctggttgcagacaaaaccgcatacaagttctgggctatgtagttatctaagctagctgctgctataaaataagaggggcaaaacattgaacgcaaacatttcttactgctgggcacattgcactcttggtgctgactcatcgtcatcgtcatcttcatcataagcttcacggtgcctatgctgtcgttccttccgcctctttacctcctcagcactgacatcatgcaaagtagtctcttcacagtcatcaagctccatgtctgtcaaatgcttactaggcctcatgggcaatatactctcgatcttccggcattgctcaggtgaaaataccccagattctgggaaaataacatggaactggatgactagcttgcccttcatgaaaggtctctgatggtgaggcataccttcatcattgatagccttgtattgaccaggcttaatgacctcgccagggttcgatttaattaagagctgcctgccatcaaggtgagtcagggcaaactgaaacccaatagagcctctgtcaaactgagattgtggtcaacata

SEQ ID NO: 7876 - DNA, 211 bp, Gossypium hirsutum
  Clone ID: LIB3828-021-Q1-N6-H1
attgtggggggtgatttttttttttttttatttttatttttaatttttttattgttaggaggttgaggagaaaaaaaagtggaaaaaaatgaaattttgtgatatgaaaaaatatatattatggaggtatgttaaattgttatatagatattttttgtgaaagtaaaaaattgtttatgtgtgtaaaaaaaatttttttttggtagtaaga

SEQ ID NO: 7877 - DNA, 558 bp, Gossypium hirsutum
  Clone ID: LIB3828-021-Q1-N6-H10
gaattgcatttacttttttttattgggcggcccccgggggggggggttattgaagcagatgatcataagtataccaataaaatgaaagtcacagcttagatgaacatatgcaaatggtgaatagtttatgtacatgaacaagaaagacattggaccccccccaccccttttttgttgaaggaaaaagaagacgttggcttcaatcgcaacatagatgaggcctaggcctacgcgttggctgcagcagcctcttcaaccatctgcgatactggaagaagggtgcagatgacattgcgatcacattatacgttgtcaacacgtcctgtagtaggccagaacttagcagttcgaagccaggaagcagggaaggcagcgtattcccgagaatacggctttgtccatgcatcggccatgagcaaagatggtggatgaggagctcccttaagaacattgatgtggatatcagcctttccattctcgatttcagcaatttcttccctaatggagataagagtatcacagaaccggtccagctccgccttgctttcactttcagta

SEQ ID NO: 7878 - DNA, 84 bp, Gossypium hirsutum
  unsure (1)..(84): unsure at all n locations; Clone ID: LIB3828-021-Q1-N6-H11
gggggggggggggggggggnggggggggatgggggaaatatagggggaattcagggtaactctgagagagacttggacgtcgca

SEQ ID NO: 7879 - DNA, 508 bp, Gossypium hirsutum
  Clone ID: LIB3828-021-Q1-N6-H4
atataacaaaaaaaatcattttttttagcatgcccatgccttaattacatatggctacaaaacaagattcaaggaactttaggatattgcaaatcgaatattggtttgagctatttattcttcataattactctttttggccaagaggattttatagcaaacccttctgcaacaacattactttttattttggttaattaataagacgacaaccaactcttcctcgttatttcatcttaatatgggatcatctctctactttgggggactgggttcactggccataacctcttctatccctttgctctttacagtttcagcctggcaacatcctgatgcgcacctgggctgaccacactcagcacaagtcccaccacaaccctgacgggaacactttccactcttacattccgactgtcctggcattagtgggatttttgggacttgtgggatctgtgggacttgggggatctgggggatatgtggaatttgtgggatttgggggatc

SEQ ID NO: 7880 - DNA, 397 bp, Gossypium hirsutum
  Clone ID: LIB3828-021-Q1-N6-H5
atgcaagccactatcatttcaaccactcaatcagtaagataacaagaacaccggcctatcattaactggtagctacaaattttctttcttcaagcctattttgcacttcaaacaccgccctattcttctaggtaactatgttcaacacatacccgaacacgatatcgagaggggtacaagaatgaccctctaagaaccttccaacttaaagcttatagctaatcctcttggaccatactgaggggaagaagaaacttcgtctcactacttgcttaatgggatagcatctaacagaataccaaatgtacattaaagaagaacaaaatttggacatgcaaccaaaaacccataataaatactactacttacatccaaacattcacaggggattattcat

SEQ ID NO: 7881 - DNA, 402 bp, Gossypium hirsutum
  Clone ID: LIB3828-021-Q1-N6-H7
aagcaaccataaaaggaaaattgtttacttccaggggcatcaatataagcaaaattctcatacatttttgcaacacgacattgaccggacacaattaaaggggaaagaaaacaaataaaaaaatgaaaatgaaaatgaatggggggcatcatttgtttgaaattagaaacattcgaggacagccaaagctggattttaaaactggggcttttcccacttggggggcttcacaccttcccaggggaagtccgggtcgtcccttccaaagtgtccgtaggcagctgttttaaaaaaccggccattgccaccccttttgaaaaccaggttgatggggaacaaaccgggcctgaaatcaaagttttccttcacaatttggaggatttctttggcaagaatttttcc

SEQ ID NO: 7882 - DNA, 429 bp, Gossypium hirsutum
  Clone ID: LIB3828-022-Q1-N6-A1
aaaattaaaaaattataatattttttgaaaaaaaaaaataaaaaatataaggggaaaaaaggaaaaaagggggggggggggcgagaagaaagggggggggaggggaggggggggaaaaccggggaagacggggggggggcccgcaggggaaaaaaggggccctaaaggggggggaaggaaagcttggagaaaggaggggaaaagagggggggggggaaaaaggggaaaaaagggaaaatgggagaaaaatggtagcctaaaagagaaaaaaaaaaaacgggggaggcaaaagagggaaaaaaaggggagtaaatgagggggggggaaaggcaaataaagggggggggaaactggggggacaagtgagtcaaaaaaaatgaaaaaacccgagaaaaagcgggtagagtaaggggcgcaagggggggcttt

SEQ ID NO: 7883 - DNA, 538 bp, Gossypium hirsutum
  Clone ID: LIB3828-022-Q1-N6-A10
agcatgggaaacggatctttgctccaacagaaaagtggggtaacattgctacaaacgagtggtaaccgattataacggttctcaagtaaccaatttgatactgaaataagcatatcgagtcactgacctcttttccagttattttcatcaatggtgtatcatttaatttatactccgcaaataattccaacaacggataacaagtttcaacacaacgtctacttcaaggaatgcattcaccaaacatatctatggagcatccactaagaaagaaaatgcaacagctacgaacaagaagatggggaatgtgagtttagaataaaattatcgaaaaaagcttgtctcggaaacctccccaaattcattccttaagccaactttagagagaaaacaaaacctaaaacatctgtgtcgttggcttcttcctatttttgcaatcatcatcagcttatgcatcagcaaatcctagctcagagagcttcaggtgagcttcagtgtaatcagcaaagaaagcatcctcatcagctgcatatttgtc

SEQ ID NO: 7884 - DNA, 169 bp, Gossypium hirsutum
  Clone ID: LIB3828-022-Q1-N6-A11
gattggaggaagaagatgaattgtttgagggtccatgggagttttctagttggttgccatatgaggagttgattcacttgtatttgacaaagaagatgatataaaaatccatttttttgttataacttataattaatgagacattggcattctacataattttccgctt

SEQ ID NO: 7885 - DNA, 586 bp, Gossypium hirsutum
  Clone ID: LIB3828-022-Q1-N6-A12
aacataatcacaagatatcaatttaagtagagaaaccataatcacaacatatgcattaaagtagagaaacacttgcaatgaaacttgaaacattcaagtacttgggtaataaaactgaaacaacccttcttcacacaaaaatatgctccgtacaatttgtttattctctcataacatctcttctaaattaaaattgctaaagcttggatacacaaagcacaatcactcactcacttaagccttagacatgtgtcggatcaagtcgataacacgggaactgtaaccccattcgttgtcataccaagtcacaagcttaacaaagttgtcattcaaagcaattccagccttggcatcaaaaatgcttgacctgttgtctccgatgaagtcagttgagactaaatcttcgtccacataaccaagaattcccttcaagttgccttcagattccgccttgatagcagccttaatttcatcatatgtagccttcttctcaagtctcacagtgaggtcaaccacagagacatcaacagtgggaacacggaaagccattccagtcagcttgccattcagtgctggcaaaactttg

SEQ ID NO: 7886 - DNA, 549 bp, Gossypium hirsutum
  Clone ID: LIB3828-022-Q1-N6-A2
ggaaaaagttgagatagacatgtttcccataatatgtttctgggtatgtgaacagatccacaaaaacaaaagatcagagtgtaacaaggcaagttgcccttagcatacactgtttaaagcttgaccattagcactagcaaaggacgcttattcttctcaatttaactcttttgtaccacacaaatgctcgcatcaaatgctgctaatctttgttgaggaaagtgatgatgagctcattcacctgctctggtagttgttcttgaacaaagtgattcccttctggcatgaaagtgatgtccagattaggcataaactgcttcactatccctttcttcatgtactcctccattatctgggaatttcataaaatagtccttctcccccattatcagcaatgatggagctgtcacttttggattggttataccataatccaattgagagcacctgtaggggacctgcaatgcggttcggaaaccagaattttgatataaagttgcatagacctcaagatccttctctgtgaaccatggtggcagtggagtagat

SEQ ID NO: 7887 - DNA, 587 bp, Gossypium hirsutum
  Clone ID: LIB3828-022-Q1-N6-A3
agagggtcaataaagcaaccaatttattcattattgtttcaatcatggtgaggattcaaacctcaattggacataagggcaaaaaaagaaaactacaaatacataaataaaacgaaaacaagctgaagaaataacctatctgacacttttgcagctcaaagacattcagctctccttgaagataagttttaccaatgttgcggagagaaagtatggcacttcttacttgggaagtccagtttctgggtcaagaagagccagtttgtcatttgaaagcagaatagggcctttcccaggtcttgtacagatgaagtaactgacatccccagggtatttctgagctgaaccattttcaggaggtggggacaaagcttccacatccttcaatccctcgagtccagcatctttaagtatcgtcttatcaccgagaaggtagctgtccagatcagtatcagactttggagggaagtagaatagcagccgctgaattaattgagcagctgcctttctatctcgtgcaattaaaactgcattcggcccagcgtcaaatgtatatgccacctgaggggttcccggacgcgtgggtc

SEQ ID NO: 7888 - DNA, 409 bp, Gossypium hirsutum
  unsure (1)..(409): unsure at all n locations; Clone ID: LIB3828-022-Q1-N6-A4
aaactgattaatttcttgttctcatattatagaaactattccactagccatagaatgcgaaaacaggggaggaggacaaaacagaagcgtattaaagcatgatatttcactaattttccttncacccacaactcaaaacaccaaaataactaaaaggacaacaccataacaaagctgaaaacattgtctgcaacaaatatttaaatcaaaaactaaaattactgagacacacccaaccacttagagaagttgtnaaattctgtgtaatcactgtnggagataatagtntgataccatgctttgcctgctgacttgattggtgtttggctttacttagaaatgggntttctatttttgtnaaggttgtnattattagncttaacatnttgtggaagcgtgggtttgagat

SEQ ID NO: 7889 - DNA, 562 bp, Gossypium hirsutum
  unsure (1)..(562): unsure at all n locations; Clone ID: LIB3828-022-Q1-N6-A5
aaatgatggaggcgccccattttttttttattttttttatgatgaacttaatgacagattttatgaaaatgggaaaaaaaagaaaagaaagggttgcttgagaaaatctaagtacaagaagaagaagcaaacccaaatgaggttgacacagataaaaaatgaaatgaaaaccaaagaggacatagtagcatactgtacttaatcgaagaattcccaagggaacttcggtggggctgagttattagcggttgatgaagatgtagatgtcgaggtgaccggcaatgttgccggggatgaatcgaatgtttcccatttngtggtaactacgacgggaccagatgcctgctggtgctggtgcttgtgctggtattgttgttggattggcaaatgagaaaccgagttggtcgattgttgctcctgaataattgctaatctttgcctggattggtggttttgttttcgtaccctatgcttatgtcgattttttgttattgtttgatcttccttggtgtatggtcttgtgtttttaatttttaaatttacaatggttttaccttttttt

SEQ ID NO: 7890 - DNA, 551 bp, Gossypium hirsutum
  Clone ID: LIB3828-022-Q1-N6-A6
tttttttttttttttttttttttttttttttcctaaatgtgtaaggtctgaatttaaccatctttttaatgtcttacaacctttctgacctttgaataggtcccctactacaccttggtaattcaacgatgttaaatattctagaaaataagtaaatacctttgttcgtttaactagtttaacaatgtagtccaacccattttatcttctataagacccatctgtttatttgcaagtgctgagtagagctgttgaaataccacaaatccactctttccataatccacccttcagccaaggaagccctaggcgctgcagcctccatgtgcgtccttggggcgcgctccgttcaagggacggcccccctgacaccggttacaccaaaatggcaagcttttgcctcgttgacccttagaacctgcaaaaatagagacaaaaagaaagcaagaggcagaaacgaagcaaaacagtagcaaggaacaaaaaagcatatttgtatttggctatatagccacaaacacaaaaaatgtgacacacacgatcaagcaatc

SEQ ID NO: 7891 - DNA, 574 bp, Gossypium hirsutum
  Clone ID: LIB3828-022-Q1-N6-A7
gccataaatttaatataagttgatacatgaactgaataggcgttaagcttcccgcccacaccatcaaaggcttctagtctttaacaataaacacacaaattcataggattctaaaaaaggaaaaaagaagaagataaaactgcaagccaagtggagcacgaccaattacttaaaaggcatgtttgtttaactttaagcagcaacactatggagcacaacagtctcaacagtgaggccaggtccaaacccaaagagcactccccactccaatccttctcctgtggtctgaagcccatcttcccttgatttcttcctcatctcatccaaaataaatagaacacaagcacttgacatgttaccatactctgaaagaacgtgccttgtggctcgtagcttctctggcttcagtgctaatttggcttctacttgatctaatattgctggaccaccaggatgagcaatccaaaaaagggagttccaatcggatatgcccaatggttgaaatgcttctaccaggctcttttctatattcttcgaaataagccccggaacatccttaagaaggtgaaatgta

SEQ ID NO: 7892 - DNA, 594 bp, Gossypium hirsutum
  Clone ID: LIB3828-022-Q1-N6-A8
aaaaatgcaagccgatgaatttgtttctccattactccaacaatcaaacatgaaacataatgcaagtaaacaacttttaaaaagttgtgacacaaaacataatgttaaggattcagaacaaaacagccttagtgctaagctaagtcaaagcaacagtagcagtaatgaatgcatataggcaacctccgagtggtcccttcatttgggctttggagaatatttagtagtaccccaaagttgatagattttcctaaaattccccacaaaactagtaccatctctaggctggcaaaccttgccttggcttgatccttttcttctaatggttgacgtctttgaatgcgaggaccaacttctccataactgaccaaattggcattcttgttgtacaatcatacttcgcttcttgtcatttccactcttgcatgtcccagcctccatatcatcttcatcttcgtcatcttcaccgttatgttcacatgctaaagtgctcgttgagcttgatatcgacaagtatgattgtttttgggcagccattcttctctttgattgaatctttgtcaggttatagctggaagtgacatgcctaataaa

SEQ ID NO: 7893 - DNA, 574 bp, Gossypium hirsutum
  Clone ID: LIB3828-022-Q1-N6-A9
agaacaagcactactgcaattttatcattaacaatcaggataacaaaaaagacatccaatccaaatgcatctctgatggatgatgaggagaaaccaatttatttataacaagtccaccctatcagcctctacaacctcagctctactaaaattcactcttggataaaaatactagccaccattacagcagtgaacaatgttcaaaaaaagcaaagaggtgcaaaattaaaagtttaagcgtcgttaagagcaaggacccctggaagttgtttgccctcaagaagctccaagctggcaccaccaccagtagagatgtggctcatcttgtcagcaagcccagctttttccacagctgcaacagagtcacctcctccgataattgttgtcactcccttcccactgagttccgcaagcttcttggcaaccgcctcagtgccggcagcaaacttctcaaactcaaacacacccattggtccattccagataatggtctgggtagtgtccaaagactcactaaaggttttgatggagtcaggtccaatatccaagcccatccaaccactctgggatccct

SEQ ID NO: 7894 - DNA, 588 bp, Gossypium hirsutum
  Clone ID: LIB3828-022-Q1-N6-B1
aaattgatatttttggtcattaaataaatgagattgaaatggaaagtgtaaataccacaaattcaaatcccacgtcacaatataaatgagatcgtcaacatttatcatacttaaatctacatgacgcttgcgcggcccagcactcatcaatcaaaattgcatcaaacggaagacaaagctaattataacaaaattaagatcttaccataggttttgtaatgagatggggtcttctctaattaactgatgtgtactcaactttctttttcacattgatttgcattgcagtttaaatgtaatcctagtggcaatagagcttgattgatgaatcagcaccagcagtgaataaccagggctgccttggatggaacttacagtccattactcctcttccatcataactagtatgccctctcagaatttccaatggtacaattagtggattctggttaagatctgcataaaccatgccatgaaagatgtaggctgtgcaatcatccgagcatgatgcaaacagcgggtatgagcgatggaatgccactttggtaatgtctttaggatgacacttgagagttttgtaaggttttg

SEQ ID NO: 7895 - DNA, 590 bp, Gossypium hirsutum
  unsure (1)..(590): unsure at all n locations; Clone ID: LIB3828-022-Q1-N6-B10
gacaccgacccaactctctataaacttaaaagtgcagctgtgtatgaatgcatcctggtgagcaccaggagatctgttctaagggctgagtgatcccattaagcgaacattacaaaaacaaagttcagaattaccaaagaaaattacagtactaatttgtaaagtttcggtgtccagactgtagggtactgaacttctataactcaagtattataactcacagaaaattccagaaaataaggaataattatatgaatattacatgacatgcaaacaaacttctattacacaaagatctccaagtacagctgaacattagttcaccctgggctactgttccacagacatttctttacaccaatacttcgccatcagcttctcaacaatactcttcaatgcaggagcgctaatactgcacttctgttcagaaaaacaagatttgccttcttcagctgccttgcaaagctgtggatccaatggaacctttccgagaaatggtactcccatttctgtacacatttttgctgcaccaccaccactgctatcaaanatttcactggcagcaatgagatctagcatttcaggtgctt

SEQ ID NO: 7896 - DNA, 539 bp, Gossypium hirsutum
  Clone ID: LIB3828-022-Q1-N6-B2
agatctcgggaattaaaagcaaaaatgtctcatttccaaaagtttaaagagtcctgaaagcataatataaattctgctggggtgaacagagtaaaaatttctaatcattgaagaaaagggcacaaataccaaactgtctaattagatcatttgctctagatgatctcaaaaaagtactttactactgttataaaaaaggcctagccattgctctcaaagattaaaatcaaaatgaaacatgagtggatcccagcactgggaggcaaaaccaatcctcgaaatcgtcgctgaaaactcgagctccatgccagtgtactagactagtgaaattcagtgagctaagttcacataaatgttgataggatattcttcttgagagtgaattcatctgcttttgctgggcttatagacttgtcaagaatgcgctgcagccgctcgatttccttcttgggataatcagcacctttctccaaacagcttttagcagctttcaagtatatctttccatacctctcgctggaccccttcagtttctcaac

SEQ ID NO: 7897 - DNA, 323 bp, Gossypium hirsutum
  Clone ID: LIB3828-022-Q1-N6-B3
caataaaaaccaaatcgaatatgtaattatatgaaatccaaaaaaatatcaagttttctaacaaacaacagatagatggtaaatattattgaatacaatgtgtggcacaacgaagagccgaatactgccttcaaatgctgggctaccatggggaagggaaagcatggaatcaatcaaacttgttaaaaagataggtagttaagaatcaaactgacatatacgcgcatagataacctctgcatgcatcatttatgcacactgaagcatgtgcttgagccatgcatcaaggggcatgccaattgattacactattgaaaccaatc

SEQ ID NO: 7898 - DNA, 533 bp, Gossypium hirsutum
  Clone ID: LIB3828-022-Q1-N6-B4
cgagagagaggcaattttatttaagagaaagtagctacagcacggtagaggaccccaattacgtattaccactagactagactagactagaaagccatgaaatctccctcaatacaataatgacttttaatatgatggcctaataaaataacctgaagctaaacttagacttgaatttctacgtgccatctgtacatctcctccgatggcactggcaatgtaagtgtcaccaatccggtggctgagtcatagttgaagtgagtgtcggcattgtccacacaacacttcaacggatgctgagatgagtatgcaccaaacctcccacaaccccggactttgagactgatcgctgctgttggattccggttgttgctgagtgaagttgtcaactccgaggaaacctcgccatcaaagaactgcagtttctcattggatgtcatttgtacttcgaacttctccacggcaccgctgctgttgaacatgtcaagaaggccgattggtgcaaatgaaatggtgttggaaatttccttgac

SEQ ID NO: 7899 - DNA, 548 bp, Gossypium hirsutum
  Clone ID: LIB3828-022-Q1-N6-B5
tttttttttttttttttttttttttttttttttttttttttttttttttttttttttttttttttttttttttttttttttttttttggaaacggaaaccttgattttttttgggggggaaaagacaataggggaaggggaaccaaacccaaacccgtttttaatacacaaaagaggggggggaaactaaaggtccaacacccccaacaaaagggaattttaacccggttttagcccttattttaaggagaggggccattggcaaggggctccatttgggggggagggttggggttttttggtttataccacaccggacaaacaaaatacagggcgaagtttatcacccctagaacgggtaaaaggccaaaaaagcaatcaagtctcccaggggttatgttatccggtagccatccttgcccaaaatgggttcccggaacttttttaactacggaaaccaaaaaactgggggcaaaaaaacccaacgattggggggtgaggaaaagaccaggggataggggtttcattccttggggggagggggggag

SEQ ID NO: 7900 - DNA, 402 bp, Gossypium hirsutum
  Clone ID: LIB3828-022-Q1-N6-B7
aaaaaaaaaaaaaaaaccccccgtttttttttaaggggaaagaggaaaaaaaaaaaaggggaaaaaaaaggggggaaaaaaaaagagggggcaaaaaaaggagaaaggggttttttttttggaaaatttcccccaaaagaaagggaaaaaaaaattggggggaaaaaaaggggggaccggatttgcggaactttggctgggaaaaaaaaaattgggggaaggggcttagggaaacaaaaaaagaccccccgacccaaaaatgggtttttttttaaggggggggaaaaaccttgaatttaaagggggggagggaaaaaaaagaaaattcctgggtaattcttatggaaaaaccggaaaaaaagggtgccccaccacggggggaaaaggtaccgcaaaaatttt

SEQ ID NO: 7901 - DNA, 435 bp, Gossypium hirsutum
  Clone ID: LIB3828-022-Q1-N6-B8
ggggccattaataaaaaagggcctaaatcaaaaaacattttttttctaaattttttattagaccctcaaaaataaaaattcccccctaatcctttttttttaattctaaaaaaaattgggctaaaaatttattcattccctttccatatttcagttccacaacttacccctatagtaattggcttcataaccatcatcttttttttttttacaaaaatccaacggttgctttacagccttgtgaaaacccctaatgccccgggaaaaaaatggcgaaaccctgggggtcccatttaaagccaaacatccctcgttccaaattctccttattgggtaaaacaccttcctgcttttggaaaacttggggaaacaatttcggcgtgatttgtcgtgaagggcacaaccccaattacgggggtaccggcgacgttcaat

SEQ ID NO: 7902 - DNA, 409 bp, Gossypium hirsutum
  Clone ID: LIB3828-022-Q1-N6-C1
aaataatagaaaaaggagaaacaaactttccaaccgtacatccggcttacatgcttattcactaaattttttcacgagagtaagttctatgaaatcataggctgaacaaacatataaaaacattgtagaaataaaccattgaaaacgcacactgacaaaaaggcagtggaccaccattgcaaccctttaaacatgccatgattgacctcgattatgcgctcatttacacctaggtacataacacccactaaaagccttcaccaggcgacctaccttgttaaccacttaacagcctaggtataacatattgcctggcgagagcttacactgggtttaaactacaaccctggttgtatccagggaaggtaaaatttccattactgagactaaccattgaacccttaaggaa

SEQ ID NO: 7903 - DNA, 597 bp, Gossypium hirsutum
  Clone ID: LIB3828-022-Q1-N6-C10
acgaggaaagaactttctcaactctcaatagttcctgctgtcactaaataaatgtacaattaagcctgtcttctgtcaatggcaaattcatgcagtaaatacgatactcgaatcttaatattcgcaagctcttttctcctactaaaactgcaatctatttcttccaaaaggaaaatatgggtataaatagtgatacctgcaagctgcagatatgaaaactattgcattgaaactactacggaaagacgtatacagcgagggggatcaatgagcctacactacattaatggtatgatctaattgcagttgtacaggccatgaagagccacaaaatacactaggcacttgcactcaatggcagcaatttctttttctttttcttttttaaggtgatgatctagaaactagaaagtcataaatggcttggcctccttttacctgtgtctgtttctttggattcagtaccgccaccagcagtaaataaaatgttctttgatggcttttttgataaagtagctacagcagcatttacttctcttacactggctcgaaaccactttagtacctgttcatgacaagtcatctcctcagtccaat

SEQ ID NO: 7904 - DNA, 544 bp, Gossypium hirsutum
  Clone ID: LIB3828-022-Q1-N6-C11
aaaaatcaaactctttacttatttatttatcgatcttacagcaatatggccaattggctatcattgtttaggcaacctgctagaggataacgacatgataacataatgcaaacataacacaaaaaatagtgaaaacacctaaaatagcatgaccatcaaacaaatttataatacgagttataatgtaaatataaacattgtcaccattttaacatgaagaggacattatacagcaactgttaggtctcaagaataagcccagcaaatgttatccatcttccatgtgcacctagcaataaatcaagggcaaactttaacgtgaatgagtccaagacatgttctaaggtacgccgcagtcttaagatgggagaactccttaatgacacagacatgtcgaccatgctatctccgaacaggaaattatctccaataaaaaatcttcttcttcaatggagtaactcattctttgcttcctccttgtaaagcattgctgtcttcaccgtacgagttctatcaaccctatgcgatcaagatcactcatttg

SEQ ID NO: 7905 - DNA, 489 bp, Gossypium hirsutum
  Clone ID: LIB3828-022-Q1-N6-C12
ttttttttttttttttttttttttttttttttttttttttttttttatttgtaccatatattatgcctaaaggccctaaactattttatcatatgttggcaaaaaaaaaacccataacaaatgggcgcccaaaaggaggccccaaggcaaatgattttgcaaagcaagtgggggggcatataaagacccacaaaaaaagactgacagaggggttcccaaaaaaaaggggtcccattaattggcacaaaaagcattaaaaaaaaaccagaaaaggctcaaccccggggggaaaaaaaaaagggcccctgttgttgcacaaaaacacaactttggtatcacccgaaagagttggacacagggggaccaaataaacccccgctcaagaaatagcagaaaaaaatttggtgcccttcgggggaaagaacgcccgcccacccaaaaaacgcccgtgataagagtctccggggggggggaatttcccctccgggg

SEQ ID NO: 7906 - DNA, 593 bp, Gossypium hirsutum
  unsure (1)..(593): unsure at all n locations; Clone ID: LIB3828-022-Q1-N6-C2
gaaacgggtaattaaatatatctaaacttaatactaggaaaccaaaatagcgcataggcctcaacgcctaccaatatccccatccgaatacattaagataaagaaacgactcaaagatcctttcaaacattttttaacaaaatcttaaaaaaagactaagaaccagaaggtgcttatgattgcaacaccatcatcatcttaataacgaccaattccccaaactctgataacaccatctgtatacccactaaacaaggtgcttccatctgcactccagttcaagcttgtgcaatatatcaccttctttttgtttgcgttgtcggtggctgcagatgtctcagcctcggccttgaggtcaaccttcaagtcttcgactacgctcttgctttccaaatcccagatcttgatactctgctccgttgcagcacaaagccagtacctattaggactaaagcaaagcgagtgaattacggcaccagcttcgaggctgtaaagcttctttccttcagctaaatcccacaacagaatcaccccatctttgcctccactagcacataaagaaccatcaggcgaaaccgncaccgtgttcacat

SEQ ID NO: 7907 - DNA, 112 bp, Gossypium hirsutum
  Clone ID: LIB3828-022-Q1-N6-C3
aatcatatcatagaaaaaaactccattaagcataaaaaagggctgctacaatggagctcaagcacagaagcatacataagagattagaactattgcaaaatgataaattcac

SEQ ID NO: 7908 - DNA, 606 bp, Gossypium hirsutum
  Clone ID: LIB3828-022-Q1-N6-C4
gaatacaaacaaatggtccaaaatattttatttcattaaatacatttggaactcaagcttttctcaccctctctctccccatacaccagaattggatacagatttataagcttatttaaattaactgctgaaaggtggaggccttggcatgccttgcacgatgccgcaagtcaatacaccttccggcaagttgtactcatccttgagggatcggttaggggaaataacactagcataaagctgttgcccaaggtaatgcctgtcccatatctccgacctcaggttccacatcccgcagttgtcgaatgtcaataggattgctgaccaggagttggggaatacctgtatggtgtgtctgctcacggcgtcgagaagattgtagttcatcctcttctcaggactccatttcccaatgtccatgcccacggcaaagaatgagtagccagacaagtggtaagactgaatggcggtctcgggattctcgaagatgatttccacaaagtttctgtgtgtcatgttgaggacaataggtgccaaagttaccttagtgttgtcacttggtggctcatcgggaatggtatcatacttgaaaaccttgtcggctac

SEQ ID NO: 7909 - DNA, 589 bp, Gossypium hirsutum
  Clone ID: LIB3828-022-Q1-N6-C5
ggatggcgaatatactcgatttgtacaggccattagcaagaatttgatttcagaacagcttacaaacaaactgaaactgcgtagtttttcttttgttgaaagatagcagaattaagaaagctattctaacatgcattcattcttcaggtaataggtcaaaattaactaggaagagcagcaaccagtcttctggttaacaggttgtcctcgtatctgcaccattggcggcctcgcattgtttaacgccggctgacttgccatcctgttcttaatatcaccagccatggccataaaagcttgctcaacattagtggcattttttgcactagtctccataaatggaatgccaaggtcatctgcaaaggccttggctgtttcataagaaaccacttttttagcagtaagatcacacttgtttcccaccagaagcttgttcacgttcccacttgcatagcgatcgatttcattcaaccattgcttcacattgttgaagctcgcttggtcggtaacatcataaactattataatgccatgtgcccctcggtagtagctgctagtgattgttcgaaaccgttcttgccctgcagta

SEQ ID NO: 7910 - DNA, 589 bp, Gossypium hirsutum
  Clone ID: LIB3828-022-Q1-N6-C6
gcgccaacattttcctttttacatcgggtaaagaaaaccacacatttgacgaaaggaaacctaaatccccctgaaagcatatacatcaagctacgtgtacactaaaacaacagattattgtcaaagtccctttctcaagagttggttttcattatgaaatgaagcgcagtgtggattagtgcttcctataacagtaccatattccctcacatcagccagcgagaaagaccgccaattagagagattccggcacggcggcgatgatggggtggtattatcattattgcaagatgatctggtttgtgggtataatggaggaagccgagggcttgaagttgaagtagagtcttcactgatactagacatactttcagagctactcattgcaacagctagagccaatgtgcttttgcttgagctgatgggcctaatgggtcttttattgttcctgtttttgtcccatatgtggttgattgccaatagatttcttctcctcctggtgtaagcgttttcaggctttgctatgtctttaatcgttgaagctgtagaagcatcggctaagcttgtgaaagaccttgatttgcccttg

SEQ ID NO: 7911 - DNA, 586 bp, Gossypium hirsutum
  Clone ID: LIB3828-022-Q1-N6-C7
agcacgcaaacctcatgatgatttccttacctggagaggctagtttccggtccgcagtacctataaactattacaaacttttgatgaaattcctagagcttacgctttacaaactgactacaggaatttttacaaaaaaaactctggctcctaaatctaccaaataaaatcaaggttacagtatagagaatttcatggaactatttgccgacgagggttaatatgcagcaccgaaagcttgtcagtagtacaagctgccttcgatgtggagaaagagttgaaacaatcgaccatattttcgcgaatatcctgaatctttgatcagcttactttataccagagccgcctcttttgttgtggactttgggctatctagagagttcgtaaaaattaattttgatggtgcgtatgattcaaatcaccaccaatctgcctcagggattgttgtcagaaacgaagaaggggttgtcttactttcctgctcagagatccatcacggggtaacttccgcatttgcagctgaagcaatcgcgtgtaggaaagcggtcctagtaggagtggaacaggaatggccgaaggttgtaat

SEQ ID NO: 7912 - DNA, 488 bp, Gossypium hirsutum
  Clone ID: LIB3828-022-Q1-N6-C8
acaaaaaaacaaatttaactcgcgaaatgcactacaaatccatcattgctctcaataatgtcgaacttggtctatcaaatttataaagagtacatcaaatccagcaacactctagagacacaaattgactgaaatagtttaaaaggagtttacgaatgaaccagttgccggcattcaatccatccttcccttcaagatcctttcctttacttccgtaggcgtcacaacatagacatgtcctccccaaccactcagacagtcgcgatctactgatgaaaggagagcttgggaaaccgtctcaaacaattcctcaggttccatgccctccttgaacattgattcacaggcaccatagagagactccgaggcagtgccagctacaacaaaatctttcgcaagctccttggctccgatggaatccatggtgcaaatgaagggcttgtcttcatctcctaatccagcaattacaggttggcagaagtatggac

SEQ ID NO: 7913 - DNA, 381 bp, Gossypium hirsutum
  Clone ID: LIB3828-022-Q1-N6-C9
agaaaaaaaaaccccctttttttttaaaaaagaaaaaaaaaaaaaaaattggaaaaaaacaaaaaaaaaaaaaaaaaaaagggaaaaggcccctctaaaaaaaaaaaaaaaaccaaaaaatgtttgttaaaaaaagggaaaaaagatgttcccgggggggccgcaaaaaagaaaggggggggaaataaacacccccttttggaaaaaaaaaaaagggggggccccaaaaaatgaaaaaaaaaaaaccccccggtgaggggggggggaccaaaaaaaaaaaagggggggaaaaaaaaaaaaaggggggagggggggaaaattttaaaaaaaaccaccccctccggggggggagacaaaaaataattcccaacccccgggggg

SEQ ID NO: 7914 - DNA, 382 bp, Gossypium hirsutum
  Clone ID: LIB3828-022-Q1-N6-D1
gaagaattcaatacttaataccctcataatattttcagttcccatatgaagaattgaaataagcagaggaaagtgagtgaaaaaaaaatggataaaacccagagtattccaaccattgatctttcagattttccagcacagtatgagaaactaaggcgatcatctgaagaatggggttgtttcagggtagtcaaccacaacatcccttttgaattgatgcaggaaatgaagcaagttgtgagatcattgcttgacctccccatccaaatcaagcaaaacaacgtcgatgtcattgccggcagtggttattgggctcccagtcctaaaaaccctctttatgaagctttgggtctctatgatatggcctcctcccaagctgttc

SEQ ID NO: 7915 - DNA, 584 bp, Gossypium hirsutum
  Clone ID: LIB3828-022-Q1-N6-D10
agagggtcaataaagcaaccaatttattcattattgtttcaatcatggtgaggattcaaacctcaattggacataagggcaaaaaaagaaaactacaaatacataaataaaacgaaaacaagctgaagaaataacctatctgacacttttgcagctcaaagacattcagctctccttgaagataagttttaccaatgttgcggagagaaagtatggcacttcttacttgggaagtccagtttctgggtcaagaagagccagtttgtcatttgaaagcagaatagggcctttcccaggtcttgtacagatgaagtaactgacatccccagggtatttctgagctgaaccattttcaggaggtggggacaaagcttccacatccttcaatccctcgagtccagcatctttaagtatcgtcttatcaccgagaaggtagctgtccagatcagtatcagactttggagggaagtagaatagcagccgctgaattaattgagcagctgcctttctatctcgtgcaattaaaactgcattcggcccagcgtcaaatgtatatgccacctgtcagtttttcatcataaatc

SEQ ID NO: 7916 - DNA, 381 bp, Gossypium hirsutum
  Clone ID: LIB3828-022-Q1-N6-D11
agcgtgttgaaggttctagcagaaatttatataacaaagaaaatcatatatattagcatgcacatgcattaattacatatggctacaaaacaagattcaaggaactttaggatattgcaaatcgaatattgttttgagctatttattcttcataattactctttttgtccaagaggattttatagcaaacccttctgcaacatcattacttcttattttgtataattaataagacgacaaccaactcttcctcgttatttcatcttaatatggtatcatctctctactttggtggactgggttcactgtccataacctcttctatccctttgctctttacagtttcagcctggcaacatcctgatgcgccggacgcgtggg

SEQ ID NO: 7917 - DNA, 574 bp, Gossypium hirsutum
  Clone ID: LIB3828-022-Q1-N6-D12
gagaaactctaaaatctactattcaactatatcaactccaacagccatgactaagtcagaaagcaacgacctccaacagctccctgacggtctcttcaccaaatgcaaaccatcaccagcaccctgtacccacttagccataaaatttgcagcaatattacaagctctcggcaccttctctagcttgacagtccagtgtcactaaagcatccccataatctatcgaacaagcgagcatacatgttcccctctcgatcctctgcatagtaattgtaaggcctcaatattatcactctccctaaccacctatcagaatcccttagcccaaggcacctttaatccatcaaacaccacccacagctctgagtggagcaccgacgtcattccaatcttcttggagaacccgacatcccagctcccataatagttccggaacaggccccagtccttgcctgacaagttctttccgacacaaccccgtcaacattcgtcttcacccatcctagctccagacagcgccatcgcaaatttccagtccccgttcgcctccgactctcaaaaacaatagcaacat

SEQ ID NO: 7918 - DNA, 607 bp, Gossypium hirsutum
  Clone ID: LIB3828-022-Q1-N6-D2
gtcaggcaacaattatttatttattataagagaacgatgcaccacgtccacattcagaaaaaaaaatttgaaaaccaaaaaaaaaaaacaggatagagttggctagcaagccggttcaggttgaaaatgagttcgtcggttttgagcaaacaccaaatcaatgctactagagactaggagatataccaaacaattacaccattaaaaaacaaagcagtgctaagactactacaagtaccttcaaacatgtccttatcatgtcgacgcattttgataacaagaagcaagctaaagtcacccaatagcaccaacagcttttgaggataccaagcagcaaagccttcctcacctaaacgagaaaatggtaaaactcagaggcttccgggacccttcatgttctgctttgccacctctaattcatgcctcgatggtatcttgctttgcagtgaagttattgttgacctcagcaaattatctccaactatcaatctcaactttttgacaaaatcatcacgagttatcttctttgccctgaacagttcataatgattagcaacttggtccatatccatacggggaatcttatttgagatagcagcaaacaaca

SEQ ID NO: 7919 - DNA, 598 bp, Gossypium hirsutum
  Clone ID: LIB3828-022-Q1-N6-D3
gaacaacaacattttctaagtatcatgatcacaagccaagtaagcattccctcgaatatagtgttttgcagataattataaacccaatgttgatattcagatgtaggatgttaggattccaaccccacaaagaatatccacattgaataaaatactatgtttttccaagttccaacataggaataccaagtttttcatctaatagtggctctttagagtgcagtaagaaacaaaaagggaagtctattcttccccaccacccacgcaagtagcacttacttctccctttaagaagcgacgtttggcacctggaccaacaatcatcacagagaatgctgaaatgatataacaaccaagggaagagatactgagagtgaaaacttaattaaaggtctcataagaaagtgtaaagaagcatgcacagcatagtttgtcactctgatggtaggcgtctcttcttcccatagtccacatcccttgatcgagacctgtgctcttcttctcgtgttgcatgggactgttccgagatcttgaagaaactgtcccctatcccagtcatcatagtaatccacgtcacgtccgcgatgtcgatgctctc

SEQ ID NO: 7920 - DNA, 613 bp, Gossypium hirsutum
  Clone ID: LIB3828-022-Q1-N6-D4
agataatatgtcgaggtctttcatcattcaaacacgcaccataaaagttcaacaagcaatgcactttacaaactaaaaagatcatgctttgaaacagggactcgttcggactcatgactgatagaatcttaaagttcctcacaaacgctaggactaggaaggttttataacttaatgtagactaacaggtttatttgctacaaacaccgacaaatggttgtgcctacaatgggaatttctagttcttgcttatagcagtagccttacgcactggatacgacttttttcagtagaacaaaaacaggcttacatgatgatctcctacccactccagcatcatgtcatctctttcagaaataataatcttcggtgtgtgggaaaagatcatgtatgatggtagctagttccggttcctgcatttttccatggccctcggagcgagtccaatggcatcagagcttttcatgatcctcaaccttttgcaggtgtcagtgaacatctcccatggaacatcacccacaagcatccagtcaccatctttatcctcgtaagtaagaacatattctgatccatgaagtagatccttgagcttgctttcgctcaacagctccct

SEQ ID NO: 7921 - DNA, 548 bp, Gossypium hirsutum
  Clone ID: LIB3828-022-Q1-N6-D6
ttttttttttttttttttttttttttttttttttttttttttttggtttttttttttttttttttttttttttttttttttttttttttttttaaaacaccaacaacccaaactaatgaacaaaaaacaaagcaaaccgggggattttaggggctaacccaaaaaaaaatgcgtccaaaaaaacagtcaaaaatccaaaaaaagggggtaacaaaaaaacaaaaatgccctattgataaaaaaaaaaatcttaacaaacttatttgccctgttcccctttttacccattttttaaccttacttggccaaaaaaactttgacaaacccctaaaaattgatctgcccaaaaccaaaaaaaaaagtttaacggataaattaaaaaacttcctcatttggaaacttttcacccaaatttgtcatgaaatggggaaactcaacagcaaatataaaaccattttggtccttggaaaaaaccctgaaaacccttttaaattcttcctcgaaaaaaaaaccttaattttccttgccattggggtaaggaattcagg

SEQ ID NO: 7922 - DNA, 534 bp, Gossypium hirsutum
  Clone ID: LIB3828-022-Q1-N6-D7
caaaaaattgaaaattatttccaataaaacataagcaatctaatatgaacatgcggaaagcagtctctagagcataaactgctgcttcctcgacataaatactattactttgaatctctgttttgtgaaagttcaaaaaaaaaaaaaaacatcacctataccataaaatatatagcctaaataaattcatcccctctaaggctcacagatctaactgagatccttaaatgttggtggagccaacccaacctgtgtgtcactcaagcttctgtggacaccaggccttggccctgaggatcgccaaagtcattaaatagctttgtacataactgtctataaactgtaaaatcgccatatgattttcttaattcaactacgtacaatgacggacttatctcaaacacctcagctgcaactgaaagactggcaagacgtttttggaccgtgtgctcttgcgttgctttcaactttccgtttctcatttggactcgaaatcccatctctgtcaccgtgtcttggatctttgcaagcaaa

SEQ ID NO: 7923 - DNA, 614 bp, Gossypium hirsutum
  Clone ID: LIB3828-022-Q1-N6-D8
aagaagcttaaaatgatccttttctgctcccttgtctcatgaagcattcaagatgacaaacacatgaatttccatcaaaaggaagtgatgaaatatacatgttaattattttacaggcatttcaaaacatataatctttggtaggcttttacattctacttttgattcaatatacaacgtttttcatttcatggaataattatattcataaattttcttttcgcaaaagctaaccaccatttatttggagttccattgggcctataggcaacactcaacaatctcccactcgtttcttctctgatttgcttcagataattcctgagtagttctgcttccttttgagactgtgggagcacaaaaagccccggaaaaggaaaaccagattctccaggtacaggaacgttttccaagcccaagttaatgattatcttggtcccttcagccaaggtcctacagccctcaagcctcttcaaagccacatttatgtagaaagtcaaatatataaggagcttatctgcagggctcttaacatcaaagtttctaaagaacacattggcacgaaagaatgtgatcgcttcatcaacaatatcagttttaccttgatctgaaac

SEQ ID NO: 7924 - DNA, 583 bp, Gossypium hirsutum
  Clone ID: LIB3828-022-Q1-N6-E1
ataacaacgaaatataattccagaaataaaataaataaatccgacatgatttagacatgaacaggttgtattgggtggacgataaatccagctttctgacatgctccggaaaggtctatagaaatcatgacacaaatccaaatgaacaaagattaattactcctccttggtaaataataaactgcacagtttccccaggaaatgtacaaattgggagctgacaacatacaaccagcctacctcaagagaggttgaagacataataatatttggtactagtagtactaacacaagctccatcaatcttcttcgtcttcatcttcaggaagcgccatatcgtctccaataccttcgagcagtttgtctacatcctcgcctaattcagataaccttgcactcaacttttccaccttgctctgctcttgtccgaggcacacgagtaaatcattcagctctgcttcgctttccttctgggcttcttccctagcttcagcttttattgcctcgatatcgggagatgttgatgtccctccactcttcaaagttttcgcctctttttctaggtggatattggtctgttcag

SEQ ID NO: 7925 - DNA, 565 bp, Gossypium hirsutum
  Clone ID: LIB3828-022-Q1-N6-E10
agcaaagaaaatcatatatattagcatgtacatgcattaattacatatggctacaaaacaagattcaaggaactttaggatattgtaaatcaaatattgttttgagctatttattcttcataattactctttttatccaacaggattttatagcaagcccttctgcaacatcattacttcttattttgtataattaatacgacgacaaccaactcttcctcattatttcatcttaatatggtatcatctccctactttggtggactgggttcactgtccataacctcttctatccctttgctctttacagtttcagcctggcaacatcctgatgcgcacctgggctgaccacactcagcacaagtcccaccgcaaccctgacggcaacactccccactctcacatcccgactagcctggcattagtgggatttgtgggacttgtgggatctgtgggattagtggaatttgtgggatttgtgggatctgtgggatctgtggaattcttgggatttctggaatttgaggaaatggtagaacgaaaccaccaggattacaattaccgg

SEQ ID NO: 7926 - DNA, 602 bp, Gossypium hirsutum
  Clone ID: LIB3828-022-Q1-N6-E11
attactaatagtttaataagcccgagtataattaacccaacttaaaaagtagcataaaaactacaacatgaggaattcaagccaaaagcagtgaatgaaaatttaaagccaatcaaaaacagaccacaaaaatcaaagcccaacaccccattttccttccctcaaagttcaacgtcatcatcaccttcattgctctatttacagtcctaatcaaaccccacaagagacaaattttgtatttactcttctacgcaactaaaagtcttccccccattaaaagctttttatggacatcgaaatggcatgctcttattgacccggatcggtttcacatcatctggaaggatatgttcactatatgttagctggtttaactcggggcggcatttcattgagactggtgcgctttcccttacacgaaatacggtaactttaagcacgaattcccttgatctgagcagctcgaagatacagacatctccttcacccaaattattctccaacgtaaactcgtaccatccctgactaaacttggctttgccacctctataacgacatcgaatgggccattgtctcccatctgggaagctgaagtttaataa

SEQ ID NO: 7927 - DNA, 594 bp, Gossypium hirsutum
  Clone ID: LIB3828-022-Q1-N6-E12
agaacacgattgtcaataaaaattaaacaaagcaggaacaaagagtagcaaaacattaaatcccatatgcagtcataaaattcattcatcaactaaacggaccaagctctgttttacttctaaactgtaacgaaaaagctataaaaccaaccttgtctgtttcgttttaaatagatttaaagtccaatttctgaacctactactttcaaactctagccctcttgctactgcagcttgggcacttgtactgcttgatgtgctcagcctttgcaggtgtaatcttcacacatttgccatggaaccatctctcgcagatatcacagcaaatccagaattcatctgttccatagctatctccacaagccccacaagtggcaccctgttcatcatcttcctcctcttcttccccactctcatcttcatccttggatggtggagacatctttaccatcttactctggggttcagattgacgagacttagcacttgatttgcttttgccactactgttatgattagcagattggtcctttgattgctttacatttccagtaacaacttcgaatatgcttggaagatcatttatcattagaa

SEQ ID NO: 7928 - DNA, 578 bp, Gossypium hirsutum
  Clone ID: LIB3828-022-Q1-N6-E3
tttttttttttttttttttttttttttttttttttttttttttttttttttttttttttttttttttttttttttttttttttttttttttttttttttttttttttttttttttttttttttttttttaaaaaaaaaaaggggttttggggaaaaaaaaaaaaaaaaaaaaaaaaaagggcccggatttggggggggggggaaaaggggggggattaggggttttggggaagggggggaaaaaggggggggggttaaaatggccaaaattttggggggggaaaaaaaaaaatggggagggggggggtaaagggcggggggtaaaaaaaaaaagggggggaaggccaaaatttggaagggggaaaaaaccggggaaaaaaaaattaaaatttttggaaaaaaaaaatggcccaggggggttttaaaaaaaaagggggtaaaaaaaaaatttgaatttttaattaattggggattaacccggggggaaaatttttgggaaaaagggggggggggaaaaaaatttttcaaaaaaaatccccaaaaagggaattggatatctcccaaaaaaaatcccgggg

SEQ ID NO: 7929 - DNA, 575 bp, Gossypium hirsutum
  Clone ID: LIB3828-022-Q1-N6-E4
atataacaaagaaaatcatatatattagcatgcacatgcattaattacatatggctacaaaacaagattcaaggaactttaggatattgcaaatcgaatattgttttgagctatttattcttcataattactctttttgtccaagaggattttatagcaaacccttctgcaacatcattacttcttattttgtataattaataagacgacaaccaactcttcctcgttatttcatcttaatatggtatcatctctctactttggtggactgggttcactgtccataacctcttctatccctttgctctttacagtttcagcctggcaacatcctgatgcgcacctgggctgaccacactcagcacaagtcccaccacaaccctgacggcaacactctccactctcacatcccgactgtcctggcattagtgggatttttgggacttgtgggatctgtgggacttgtgggatctgtgggattagtggaatttgtgggatttgtgggatctgtgggatttgtgggatttctggaattcttgggatttctggaatttgaggaaatggtagaacgaaac

SEQ ID NO: 7930 - DNA, 445 bp, Gossypium hirsutum
  Clone ID: LIB3828-022-Q1-N6-E5
acaaattaagatacaaaatttttttaatataatgaatttttaacattattttaaaaaagtaaggtcgtaagaaataaggcaggaaattgaaaagaagatacttcattccatttttatgcttttaagagaacagtaacaacatcgatcaaaaacgagagaacccaaaccaaacagtaacagagtaactttagaattaccaactaccaaacccaaaccaaacccataacaatataggcccaagcccactttgaaaccctaaatttaagacctccagttgccttcagatgcaccgccgcctcttgagtaacgagatccgccgtcaccgtatcctccttcacggcgtccacctccgtatccacctccaccataccccccaccgtttccgtatccaccttcacggcgtccgccaccatatcctccttggcgaccaccatatccgccgccg

SEQ ID NO: 7931 - DNA, 606 bp, Gossypium hirsutum
  unsure (1)..(606): unsure at all n locations; Clone ID: LIB3828-022-Q1-N6-E6
aaacataaacagagtttaaaggctaaattcaaaaatagaaaatgagaaagggagcaatttaaaacacgcacaataggaaaaggaccgaaagagaaaattaccctagctgcccaaaacactgcccatcattgagccaatttgaaacaaagaataaaatgtgcagtggaatttaaaagaagtaataaatttaatttaaacacattgtaaaaattagggggtcaattgcgaaaagggtccattttgaagaaataaatggatgctgccgtttttcaaatcaaataaaccccttttctcaaatcctaaaaaataattcccctctgccattcccaaaatgtgccgcagcagcacctctgctctccatcatttccgacccacttcgctccgacaaccgcgaaatgaaagggttttccaacgacgccgcgacggtaagtcttcctccgctcccttttcttgcgttttgttttaaacaaaaccaaagaggaaaatgaaataaaaaacagtaaacaggaaagggaaaagacaaaaccccagtggtcaccttcaaaagatcgnttctttctcttttgnattttttttctttaatttcggtacaaaaatttgctaaaa

SEQ ID NO: 7932 - DNA, 592 bp, Gossypium hirsutum
  Clone ID: LIB3828-022-Q1-N6-E7
aatcaaaagagcaaaccattgaccatatttatcaaagtataaaaccaaacaggaaaaagccacaaaagccactgcagaagtgagcttagctagacaaccgttcataagttcagataacatacggaacacctaagagtgttgcaacccaaaagtctaaagacatgaaaaagcagcataaatagtttttggtagccaaaatccaaaagccctatacaaaaacatggttcaacggttttcagcagaagaacatggagctgctgacattatccttcaacctgggaagctgaggtacagaaatggctcccggagcagtcaccccaccatggctcgatgatgtctctgaagcatcctcaaacttcataaattgccccaactgtgaagctgccaaatgagcgtagcaaataggggccacaacagatatggctgtggtgctcctttgatacacgtaggatagagaatgaacaagctcctgcagatcatcagctgaaaacccaacctggtctaagagaacatgatagtgggtcggccttgtggtccctatcattccagcatgagcacaaaggtaaaaatcattgttcttcggatggcatac

SEQ ID NO: 7933 - DNA, 582 bp, Gossypium hirsutum
  Clone ID: LIB3828-022-Q1-N6-E8
aaagcattaagaaaaacaataccaaacaaaccaaaactttaaattctatcgtatccaacaaaagtttagcaagcatttttctactcataatttcggtatcgagctgaagcattccaaatgtctaattgcatctactgaaacatctcaatgcaagtagatatcaaaataaaagtaatatgactatttgtatccatcccctaatgaagtttgtcgtttggaggattattttattgtcaccattgcctccgcaaccaaaaaacaggggtgtacaacccttgagcaaacagtacgaaattggattacatgtccttaattcagcctgaccttctatagtagctataagccacagcaacggttgccacagctccaaccaccgctgctgctgtaagaacatcacgttgatcccatgatcctacccaacttgtcaaaccgcacagccccttttttccatgagcttttgttgtttcttcagttttctttgtttcacttacttccgagctagcagtcatgcaacagctagacccattagcacacctgcagcaaccgccgaacattttccctggtctttttgaacagttggac

SEQ ID NO: 7934 - DNA, 582 bp, Gossypium hirsutum
  Clone ID: LIB3828-022-Q1-N6-E9
gaaaggaaaaaggcaaagctattcatagtacaccaacaacgaaccggtggttttaggtaagatacaaagaaaaaggaaagtggagacagaccttaccattgtaatttctataatgccagctcaaattagcattaagaaaaaagcttatggctcttcagcacgtcctggctcgcaaagttggttcttggttcgcctcgtcccagacagttactcaatttcacagctaagccaaaatcttctatgttttcagtgcatgaatctcaatacccagtagcacacgacttgaccttggagagcactaggacgacacagaacagctatgaaaccaaatcaatcaaacgactccaactaaaataataacaatgttgcaagcatgtaatgtttcgacatcaattggtcaccaacatgaacttaacatagtagaaacatcagtcaagatccaactgaccctcctcccaaggaaccaaaccccctatacataatttctagtacagagcaaacctttggagcatttaaaaggattccctaaagtagagactgttataaccactcactacaattttttttccatgttgtgacacc

SEQ ID NO: 7935 - DNA, 107 bp, Gossypium hirsutum
  Clone ID: LIB3828-022-Q1-N6-F1
gattgtaaatcaagaattggtatgagctatgcattgttgataattactgtttttaagcaagaggattatataacaaaccctagagaagcatgataacttcttatgag

SEQ ID NO: 7936 - DNA, 526 bp, Gossypium hirsutum
  Clone ID: LIB3828-022-Q1-N6-F10
gcccaaagtcacataaatattcatttcctttttaacttcaatctacagattatttatcaaacaaagttaaggtggaaagtcaaaggggaccaaaggaagaaaatcaaagctaaagggtttaaggaaaaaaaaatacaagcaattctactaacctcatctccctctccacttggctgaagccaaagaatatttacaggggaattcatcctacaacattccatgcaaaatccatatcactgtatctatcctaacaatccatgcatctcaactcccaacaaacctacaatctcttatttcttcttcactcaactcaacttgcctcttttggtatcacctcaaatctcaaaactggcacgatgtaccaagcctctgcatctgcttttgacctatggtaacagattttcgtttactgaaagccggcttcagcaactcctggaacttctccaagaataagatccattcctcttcattcaattcagccagcttcacaaagctcacacttgcagagaagttgctcatttgcact

SEQ ID NO: 7937 - DNA, 413 bp, Gossypium hirsutum
  Clone ID: LIB3828-022-Q1-N6-F11
acccccacccaagaattttttaaattaaaaaaaaaaaataagggggggggaaaaaaaaaaccaaccgggtaaaaaaaaattttttttttaaaggggggaaaaatggaaaacccaaaccgggggggatttggaaaattggggggggaaaaataaccttgaaaaacggggcccaatttgggaaacggggtttggatggtggaattcaaatgggggcccgaaacaaattttaaagacttcaaaaagggtgagaagggtgggaattaaaccccattttttttcctaggggataattaaaaaaaccctgtgtcattgtaaatttttttaaaaaaaattttttaaaaaaaacccttttccccgggacagggggggcgacccgagaattcagaaaaggacccgggggggacacaaaattt

SEQ ID NO: 7938 - DNA, 488 bp, Gossypium hirsutum
  Clone ID: LIB3828-022-Q1-N6-F12
aaaaaaaacaaaatttatttgcgaaataaatataattataagagttacaacgtcatcaaaaaaaatatacctctgctattgattaagcagtcggggtaggttttgctgggataggggcagaacatgcagctggattttgtttgccactaactttaggcttcacattcgaacattgtgatactgcaggtccagtcggtccactatgcgtaatttcaatgtctgcaagttctacattttcacaaggcaaagtagcactacaaataatcttgacagcttctggacgcgcagaagtgccgtgaatgtttttgaaactaatgttgcttagtttaactttcgattcttcatttattttgcatttgttccatgggcaatatttctgatcaattataataggagaactgacattggtcacggtaatatcctcaaagtgaatgttcgaacaagtgccaggttcagcacctggccaagttttgattctaacaccattg

SEQ ID NO: 7939 - DNA, 449 bp, Gossypium hirsutum
  Clone ID: LIB3828-022-Q1-N6-F2
gggggaaaagggggtaaactttttggggcaattttaaaacccaaaattaaaggggcaaattttttaaaaaacattcaacttaaaaggctaaaaggggaaaccccaaaaaaaaaaaaagggcccccttaattggccattcaaacaatgaaagcgccccccccgacaaccttttgaaaacgtaatctctcataaaaggaaacccccgacattcgagggcggccccccgatgacaacattggaaaacttttggatataaaacagcattttttcattatttaaagtcacaaagtttatggcaaccccttttttcccaaacctaccactttttccaattcggcggagggagttttctggttgagtaggccaatcgttttttataacaagggaaacttgctgcacataaataccacgggctaaaaaatcgggggggatgaaaacaccggaaaaac

SEQ ID NO: 7940 - DNA, 539 bp, Gossypium hirsutum
  Clone ID: LIB3828-022-Q1-N6-F3
aacacttaaatttgtttatttaaattatatctgtagtgggtcaaatttgcccgggcccattagaaacccaaatatacaataaataaataaataaataaacctcagtccattaaataaccctatcagacccaaacccaattttaaaacttggcccaaatttacaaggcccggtaggcccagaacattaaacaaagactgaagccctagcagcacgtgtttgcacctcagcatcctcggcctccgtaccgcctctgtaccctcagcagcgccatgctctcatacacgcgcaaacaccaccccataacggcagatacaaacaaaaatggcagaacaacaaatggaagggaacgggaattatatttggaatttattttccattttgtctttcttttttctcttcggtaaacccttttaaaacttgttcaagtgtcttcaacggggaaagcgggtgctttttgcatgcagatggccaccaaaataatggtgattcggctgctaaaaagaaacccaggaaacttagttcccaggctgtgtttttc

SEQ ID NO: 7941 - DNA, 567 bp, Gossypium hirsutum
  Clone ID: LIB3828-022-Q1-N6-F4
ggtaccaaaacaatgccgatatattcaccaatacggtactgattaataccatccaaaaattataatcattgctcatcaactataacttagcagttcatcaatctaaaatgaaaacataattcaaaaagaagcattggatgaaattcataacctgcatgaggctgccttcgatctttgaggaaatgttcctcagcaaaccatcatcgatatcaggaatctgtcatcggtgctcgaagatgagataacggaaaccaccagtcttacacgaatatgacttcgaacttcgcgcaagggttgttttcgatatggttcttaagatcagcatcccctttgaacttgaatgtatataaagcctgtctttgtgtcaacccaagaggatatattctgtatacttttagttcatctccacctcgaaggctttctggcctttccggtttccaaataggaacgtgtttccgaaacttgaaatgcgtgtgaacggcagcctccaaggcctttaaggtcatattccccggaccttaaaaaaatagaatccatctaaaacctccctcgttctcgtacgtataa

SEQ ID NO: 7942 - DNA, 506 bp, Gossypium hirsutum
  Clone ID: LIB3828-022-Q1-N6-F6
ggatggaattaggaggagatttttatttaaacccacgcgtccgcaactggcctttgaacgcgagtttacttactttcctggaccccctccacccttcttgcccaaaacgtataagtctttcacatttaacaccatctactggatatgtatgtatgtatgtatttgaggccttttataaatgggatgctttcgatgcaacagctttggctccgatgagtcgttgcctcgaaagaaacaacctttacttatggaacaaaaaaggcaaaaagtaattttgctggataaagaaattggcttcaacgaagctttgattgatgaaagaaaacagggtttcagaaaagttgaggatcaaataggacaagtaaatgaaatatttaaggaccttgctgtttttgtccacaagcagggggggggcattgatgacatttcatcaaacataaatgcttcctttgtttcaacaacccaggctagagggcaactagccaaggctttcaatagtgttaaac

SEQ ID NO: 7943 - DNA, 532 bp, Gossypium hirsutum
  Clone ID: LIB3828-022-Q1-N6-F7
aagaaatcaaattacagatgttactaattacaagaacatacagcacaactgcagggtaaatgggcaaatcaaagttacaaactatgtcaagatgctggctatttatacaacaaatccaggaaactatgaaattaggtttaaatactatgggatatagaaaatatcgtcgctttccatatcataaacatctgttatggaagttgatgatgttggttcatctgtattaacaagtttagcctgcaatgactgcattgtattataatcccttccaaaaattaaagctgctaaacaataacactcccaacttgtatgatttgggcttctgcttttaaagactccactaaaagtgtatcaaatcataatactttataatatatttagaagtttgaatctcatttaaatgaaccaaccgattaaattaggaattgaaaattgactttcaaactagttttaaaccgtttgtgactactaattactaatataaaaaattccagaagcaggtgattaggggataaaataggtttacttacct

SEQ ID NO: 7944 - DNA, 607 bp, Gossypium hirsutum
  Clone ID: LIB3828-022-Q1-N6-F8
aaaacaaaagtactaatgttgaggaaatagattgagtcaatgattgttttgaaacagaaagagttcgataaggacgatgtacaggaggtaagattaaagttgattgcctatccattgccaatagcggtccgcatttgttgtaccaaagggttcatcgttttattaccagagaagaatacaagctaaggagaattattagagaaagagaaaaaaaatgaaagagatcatgaaagcaaaccatacttgcagactttggtgaataaaatttggtagctgcatatccaatacgcagatcgttgctggtttagaccaccattggcatcaacaatcaagtaaccgctagaaccaggagactccattatgctcgttctgtacatggagaaatgatttctagccgtcaaatttggacaaggtttctatactttcacccttcttttgtatttccacacagaggacaacagcattaatttcattcattgcacgtttcacatgctcgtcaggttctatgtccacaataagtgtttgaacaatctcatacccataggcagacatagcctggaagaaaaaaagggggtaacagaattcaaaactatttaaatgtcagctt

SEQ ID NO: 7945 - DNA, 572 bp, Gossypium hirsutum
  Clone ID: LIB3828-022-Q1-N6-F9
aaaacattcatatgtttttcagtattcaaacataaacaaattcagacacaatcacttttacagtcactcaaatttaaaatttagtccaaagtccacaaaaaaaacacataaaaaagggtacatactaagaacctctgaaagcagtgcaggcaaggcttatgcatgcatatagcttggtttttacttcaacttcacaacagattttgaccaaattcatgttgctttatttacaaacactagttattatggaaagttcgttcagaaaacaccctccgccatggcagggaaatcatcaaagttccaaagatccatcgggtttccaccatcctgtgttgcatctccattgaggaaggcatcaatagtggcgtcccagtttccttcaataaatggtggcatttggaagtatttcatctggttgtccaaagccaacagctcgtccgacaaggtctttgcggagttctcttcagcatgcataagattgtcagaacttggtttcagcttcttgctagggttagcatcctcaaaaaactcttcacccactacagaagcttcaagaatggatgatatttcag

SEQ ID NO: 7946 - DNA, 426 bp, Gossypium hirsutum
  Clone ID: LIB3828-022-Q1-N6-G1
gcaaaaataaaaaagtaatttttcccattccttgatctaaaaaaaaacaaagcaaaaggatttagggacccacaggtcaattggacaaaaaaggaggaaaagggccgaaaaaaggggaacccctagaaaaacagggggagcgagaaaagcgggaccagggcaaaaacccggaggaaagcagacccaaggaacaagagagggccacacacaggggaccaggcagggatccccaaggcaaatattttccttaaccttcagaaaagggaaaccccccgccgccccaaaagggacgccattgaagcaaccccggctcccagctacaacgccccccttccagggattcctcgcaggccggccataaaaaatacaggttcagcctcaaccttgaaaaccggtttagcaagacggggaatccgacccccaaaa

SEQ ID NO: 7947 - DNA, 319 bp, Gossypium hirsutum
  Clone ID: LIB3828-022-Q1-N6-G10
tttttttttttttttttttttttttttttttttttttttttttttttttttttttttttttttttttttttttattttaaaaaaaataaaaaaaaaaaaaaaaaaaaaaaaaaaaaaaaaagaaaaaaaaaaaaaaaaaaaaaaaaaaaaaaaaaaaaaaaaaaaaaaaaaaaaaaaaaaaaaaaaaaaaaaaaaaaaaaaaaaaaaaaaaaaaaaaaaaaaatattaaaaaaaaaaaaaaaaaaaaaaaaaaaaaaaaaaaaaataaaaaaaaataaaaaaaaaaaaaaaaaaaaaaaaaaaaaaaattttaattatt

SEQ ID NO: 7948 - DNA, 584 bp, Gossypium hirsutum
  Clone ID: LIB3828-022-Q1-N6-G11
ctaaaaaaagtgctcattgtatcatactgaatacaactgtttttattttcaaaatacatcaataattattgcatgttgtaggtataaacaagttgattctatatatatatattaatttaaaagcttatttcattatcccatttctgttagatcacttttaatttaagttaacctattatgatattaaataataataacatataactaagtatataatatatgtgatgtttatattttctaacaatctcttaatatattttcacacatagtgatgaatctaaattactgtcctgttttctttgtaaatcttgtacatttcttgcccttcgcagctccagtgttttaataagttttaaccgtaggttttgggcaacttgtcacctccgcaaacaactgatttcagcttgtcataccattcatctcctggtgctattggaattgtagcagattgagagcttggtttggaatatgaatgtactctttatacttccttacatttatgtttcattggcttatccttggaattttccactgcacttttagttttcttgagggagaattgagtggttattctattagaatga

SEQ ID NO: 7949 - DNA, 586 bp, Gossypium hirsutum
  Clone ID: LIB3828-022-Q1-N6-G12
aacgaaataggagcttcttttcattcaatatgaatctgactcacttccttacattaattatgtaatagtcacaatatatcctgagatagcagagatgctcacactggacagaaaaacaagtaaatattagtacttcactctatctattggcaagcaccaagtaaccgtggcggcaacaggcaaaacctacgacaagccatggctactttattctaaaaacacaaacaacaaaacatattatttcttaaagacaaaggcgcctctgcttccagggagctttggctttggtctctaatcatttacaattgcaagggttgcaggtgcagttgtctccacacttgcagccgttctcagccccgaattccatctcagctccctcaaagtgtgctttctggggtgctacaccaagaaccagagtctcagttgtggtcatctcggcagcgtagaggtctggatacatcttgcatcctccacagccactgccacacttgcagccagtaccgcagccacagtttccaccacagcaagacatttttcagtgataaagaaaactggagtgattttgatgctaatgaaaggggctaaa

SEQ ID NO: 7950 - DNA, 602 bp, Gossypium hirsutum
  Clone ID: LIB3828-022-Q1-N6-G2
ggaaattcaaaaaccttttgaaattagactgaaatgggtttactacatccactgtttactacatgagtttattgcttctataaactcaaattagacattgttgaggaaatataacacattctgataaagtaacaggctaatggatattttacttctgagtagtgacttaattgatttaattcactaactgccattgaaggtggtctctcctcttcaacaggtctttcatgcaagaacctacctatgaatagtgacatcgttgaatcaactttagtttcagtgcattgatagctacaactgctttctccagctccagccttggcatatttttcagtcattgatcgtgcagaacctatgactaacttcatgctgtgcagtgtttacctcaaatcataaattacaatgcctgccttcatagaagaactcgaacgttaaaacccacgtgccaaaaccaacctggaaaaatgaattttcattgttataaatatttgaactttgattgtcaacttttttttccaatatttctttttttctcttcgctcttttcttgttgcaaataaatacaggcagagcaagaaaaaaaactgtgaaaaaagtaaaat

SEQ ID NO: 7951 - DNA, 185 bp, Gossypium hirsutum
  Clone ID: LIB3828-022-Q1-N6-G3
gaaaaagagcagagaaaaacaattgaattgcaacaaaattgtctgcaatagttttatatatttcactcatgtttcattgttcaaaacgggtgagtgaaatatataaaactattgcagacaattttgttgccattcaattgtttcttctctgcctctttctcacggcaataagtactaattacaaa

SEQ ID NO: 7952 - DNA, 605 bp, Gossypium hirsutum
  Clone ID: LIB3828-022-Q1-N6-G4
ccaccaagcataattaaatattattaataaatatttaataaacaagtgaaatcaaattacttctttttggatatataattaattgataaatggatcagatgcaatataactgcatcaatggcaactattatgattttatctaccacactgtcccaataccttatttaaaactttcccaatgaaagacaattacccccaaaactttcccatgacccaaacaaaaactcctacattaatcaaaaacctaacaatctaacaataattcagatgcaaacgatggaatcgtctgaatgtaccgttttcgttattgattctgcctcaaattctctcctcagtacctgtaatgaggaggcttataaggaccttcaattgggacactaatgtagtcagcttggtccttggtaagcttagtgagcttagccccaagtttcccaaggtgaagagcagcgactttctcatcgagatgttttggcaaaacgtaaaccttcttctcgagttttccggttgatttctccttccatagctcgagctgtgcaatcacttggttcgtgaacgaacaagacatcacgaagctaggatgaccggtagcacatcctaagttcatg

SEQ ID NO: 7953 - DNA, 327 bp, Gossypium hirsutum
  Clone ID: LIB3828-022-Q1-N6-G5
acagccaaaaaacaaataaaatatattaccatagaaaaaaatatatgtttttctacaaatattacagagcaccaacacatgtgatgcatggaagaagcttataaggtttatggggcaaggcaggcagggtgagtcagaatccgctcttaactttaagtggttctactttagatgtgttaagccgatgatgtctttgtcttaaatttccaatggatgatccatttccacatagaccttcttccctctccatccattcatccgtcattttttgctgatagtatcgaagtgccacaaatagcatgaatgcggcccaaatgcgagcaagag

SEQ ID NO: 7954 - DNA, 441 bp, Gossypium hirsutum
  Clone ID: LIB3828-022-Q1-N6-G6
ggatgaaatcttgattgaattcattcatttttttaaaatggcataaagcctatttatacaagcttacaacttgacaacttagttggaatacaactaagtttcatcattacctccacttaaaataaatcaccacctactaccactaacaaacttagttggaatacaactaagttacatcattccatccaaataataataataataataataataataataataataataataataacaataataaaacatgggattgctacatgctaaccattgcttaaataaattccctagtagactaaccaatatctatttacccaaatatccaattcgattactccatatagttgcattgcttacctgttgatctggacccaactttagagtagtaggaaccccccaaaatagagcccttttgcacaaactcaaggccctgtggacctc

SEQ ID NO: 7955 - DNA, 484 bp, Gossypium hirsutum
  Clone ID: LIB3828-022-Q1-N6-G7
aaaaaaattgaagtcatcaaattatccacgggaaaaaagccaacaagagtttgcctaaacttatacaagcatagttacaaatcatccagcatatccccccctctccctaaaaatttgataatctaacaaagggctcaaaagttgaagcataagtcagcgacatgaatcatgtttgtaagcaacaatgcccccagcatcaatacacatgcaaccccttggtcaatcgatgttccctccttgggggggggggcaagggtaggggcaagggcgggggactgggcttgaacagtaacaggcgaggcaatcataccaatagcgagagccgcttgaacaggcacaaaacaaaatctaaaaactgccatatttatttccccaataaatgaaaagaataaaataaatgggggatctctctctgggctgcctttcaaaaattgaatggcataggacagccgacccaaagagagtaaattggttatttttcccc

SEQ ID NO: 7956 - DNA, 601 bp, Gossypium hirsutum
  Clone ID: LIB3828-022-Q1-N6-G8
aaataaaattaagtcaaaaaaacagtctatttacaattggctcagatcagtttaccaaaaataataataatataccaagacccgaaatacaaaccaaacccatttataaatggcccaatgcaaacctaaattctagtctgaacacctgatagcccaactagcctaaacccaaacggcccaattacaatggcccgatacccctaacccaaaactgaaacaagcagaaaccctagggtttctggggtcttcaaccgccgccttccccgagccacttcctacgcacgtagcaccacttgcacgggcctccgtacgcacgcggccacgcccacccgtacatgccacatcctagaccctgcactccgtacctgcaagagacgcacaaaccagcaacacagcagactccaacagcacacaaaaaggaacagagagagaaaatgaaaaggggcagaacggggtgatttatttttgattttgtcattatattttgtaaaatagacactataaaagactgagaataggctacaacctggatttttttcgcaatcggaatacaaaaacaccaaaaggtgatttccggatctcttttttctttcgcagtttt

SEQ ID NO: 7957 - DNA, 587 bp, Gossypium hirsutum
  Clone ID: LIB3828-022-Q1-N6-G9
attgaacaagaaattgatgcaacagtaatataaatctcatacaagtttagattattaacgtggctgacagatgatttctaaactagggcaatctagatcgagattcgtataccacaaaatgaaaaagcaaggcaacactaaaattaaaaccaaagcataaatctcagagtacaaactgctaaacttacaaaatgcagcacctagtgctttggggctttatctcccaaatacttcatcagcacatccataacagaaccaaaatccgccttcacttgcatcggtgggttagcaaactggcaagccatatccggaatctccttcgagtggtagtcaaccttggactgtgtaaacttcaatccatgagctgtactaaccacaacagttctgtctccagctccgataaccccactcttcctaagcttcattaaagcagttaatgcgactccagtatgagggcaaatgaacattcctgtagaatccgcctgtgccattgcatccattaactcctcctcagtcgcttcctccacaatcccatttgaatttttcaaagcattacacggctctatcaatagaaacagggtcaccaa

SEQ ID NO: 7958 - DNA, 534 bp, Gossypium hirsutum
  Clone ID: LIB3828-022-Q1-N6-H1
aatgtgcaagtgtgctcgtatatactcgtaagtcgcttccaaagaccggaagaaaataatactacaagaaggaaaattacaaatatgcattaaatcctcggcttgccccctatcagcagccaaaaaaatgcctcttgctacataaaaaaaaaagaatattacaagacatatcacacaccctaccagagacggacaagaaaaataaaatgaaagcttcgaagcgtgaaaaattgccactaatagaactacgtcagccttttaacctcaatgcaccatgggattccctgctgctaataaaaccttttgacaaaacagacttggttaggacttaatagctgcccatttgtggcataccgtatggtggcatcggaggcattcccattcctccccccataggtggtggaggagcaaaacctcctcccattcctggcatcggaggtgctggcaaggcaagaggtagcaactgcgcatacatgttctgttgtgcaatgacctccttctcttcttgctctttagcctttacgtccttttgag

SEQ ID NO: 7959 - DNA, 577 bp, Gossypium hirsutum
  Clone ID: LIB3828-022-Q1-N6-H10
gaataaaattcaagattaattcatatacccttcattgaatttcagaaggcaatatcaaaagcatccatataaatacatatatatttttatccatgcttaaaaagtctactgcttcaaaagtaactaggatgttttaggaaatgaaagttgccttctacaaagatgaaatctgacgtacgtaccccaagggcaaggcccctgtggaaccaaatacaaagacccaccttcagaaagtgattaggtaaaactgaaaatgcctgtaaaaggttggtgaaacaatcagggggaaagtgtatcgcaagagaaaagaataatcatgaagcaaattgacattcttgttttagaatggcatgcactaatttagtgccatagcttactacaaaatccatttcgaggcctcttgctagatatgatatctgaaaatgagtcaactaactgccctgccaagctatttggatcatcgatcagtgtttgaatgaatgtgttgaccaccctgcgttcttgctctgttgacctcaagctaaaccatgttagtaatttcagtctgaattcctggttgatatgaccctcgcattct

SEQ ID NO: 7960 - DNA, 555 bp, Gossypium hirsutum
  Clone ID: LIB3828-022-Q1-N6-H2
gaaactgaaataagctgtatattgcatatttgcatttacacaaacatttgtacattaaacaagtttccttatatatcagttattcgataacctaagagagaaggtagacacacggcaagaggccatacctcgtgtacaaggaagaccaagccaagctaatccctaagatactgccttgcaaactaatcgaataacaactcgagacacacccatgctcctatgagtattattcctatgtaaaactcaaacttctatatcctaatttctcctatttgcctgcttatatagtaaggatcactttcggttacaaacacgtaagttagatagtattcatgccttgggattcatcagtggaactgacctttgtaatggagttgtttattgatagcaaagtagccttatatcattatttttcttccgctgtggacatttgtccttatcaagcctttctttgagaggtttattatggaatttgctatgactctggcactggttttcatgtagccacctgatgtgaccattacaatagggatgtttctctcacgagcaaacctg

SEQ ID NO: 7961 - DNA, 278 bp, Gossypium hirsutum
  Clone ID: LIB3828-022-Q1-N6-H4
aaaaaaaattaaaaaaaaaaaaagggaaaaaaaaaaaaaaaaggaaaagataggaaaaaatcatttaaaaaagaaggaacacccaaaaaggaaaaaattacaaaagaggaactggttcaaacaaaaaaagaaatggaaagaaaaagaaaaaaagcaaaagaagagaaaaataaaaaaaaaagaaagaaaaaaatagaagcgaagaaaaaggacaaacctaaaacagacgaaataataatgaagaaaaaggaaaagaagaaaaaaaagacagggcggag

SEQ ID NO: 7962 - DNA, 587 bp, Gossypium hirsutum
  unsure (1)..(587): unsure at all n locations; Clone ID: LIB3828-022-Q1-N6-H5
aatagaacaagcactactgcaattttatcattaacaatcaggataacaaaaaagacatccaatccaaatgcatctctgatggatgatgaggagaaaccaatttatttataacaagtccaccctatcagcctctacaacctcagctctactaaaattcactcttggataaaaatactagccaccattacagcagtgaacaatgttcaaaaaaagcaaagaggtgcaaaattaaaagtttaagcgtcgttaagagcaaggacccctggaagttgtttgccctcaagaagctccaagctggcaccaccaccagtagagatgtggctcatcttgtcagcaagcccagctttttccacagctgcaacagagtcacctcctccgataattgttgtcactcccttcccagtgagttccgcaagcttcttggcaaccgcctcagtgccggcagcaaacttctcaaactcaaacacacccattggtccattccagataatggtctgggtagtgtccaaagactcactaaaggttttgatggagtcaggtccaatatccaagcccatccanaccatctgggatccctgacgctggca

SEQ ID NO: 7963 - DNA, 418 bp, Gossypium hirsutum
  Clone ID: LIB3828-022-Q1-N6-H7
aaaaggaaaaaaatggaaatttgacattcatcgaaagttcagttgaaatgcaaaacaaaaacttttcaatgtctcaaaaattcatgatttccaacatcaaataacataatttttgaaacattctcaattaaaaaaatgatttcactccatgcataattcaaaagatcctgtttgaaggtcccatggtactcttcaagtaaaggcacctcacattttgccagtttttcttcaacaatgaaacaaggaaattgacgctcatctgcacgttttggaagatctgattttcctccattgctacattcccaacggcgactcccatgcaaagaactttcttcaattggaacttcaccattgcctttgtctcattcactttggactccaaagattcctggtgagtaacaagggttgggaatttccc

SEQ ID NO: 7964 - DNA, 557 bp, Gossypium hirsutum
  Clone ID: LIB3828-022-Q1-N6-H8
agatacgaactcaccaaacttttattccaaacagaaggtttacttagattaacatgttacattaagagataagaaaataggcactttcctaaaggcttatttgtgaccatcttaagctagaacaaagacagaagaagaattaacttctcactgcccaccacggagacgaagaacaaggtgaagggtggactctttctgaatgttataatcagctaaagtcctcccatcctccaattgcttgccagcaaagatgagcctttgctgatctggggggataccttccttgtcctgaatctttgccttcacattgtcaattgtatccgaactttccacctccaatgtgattgttttcccagtcaatgtcttaacgaaaatctgcatgcctccacgaagcctcaaaacaaggggaagggtcgattccttctggatgttataatcagccaaggtcctcccatcctcaagctgcttccctgcaaagatcaaacgttgttggtctggcgggatcccttccttgtcctgaatcttcgcctttacattgtcgatggtgtccgaactct

SEQ ID NO: 7965 - DNA, 223 bp, Gossypium hirsutum
  Clone ID: LIB3828-022-Q1-N6-H9
aataggaaatagaacatgattataacatgaaaaaaaacacaaatacggggcgaatacaataattgtcaaggctagcagatatactaatagacagggatattttacatatagattgggcaatagctcaatcgtcgtaccatgaatatctggccgaccgaccttgtgagaaatattggataactagttatgcccggatctcggaacccgttaaatggaaatgaac

SEQ ID NO: 7966 - DNA, 591 bp, Gossypium hirsutum
  Clone ID: LIB3828-003-Q1-N6-A10
aaaataaataaataaatttaaaacccaagttttataacagtccaattacatggccaataataagtcctattacaagcccaaagacccaaaacagtccctctggcccaaaccagtggcccaatatttaaaacgagcccaaacggccctgaagccaagccaaatctcggcaaaccctagggcaaaggggtcctcgcgccgcagccttcacaagcagcaaccacatcgcgccacgcccaccctccgtacgatgccgacgtctcagcagccatgccacgcccaaaccatcgtacctgagcgcgcacccgtacctgcaagaagacaaacaaaataacagcaaataggaaaaagaatttgtattcgtatttttatttttatttttgggatctttttgattctgtttcggctataaaagccatgtaatagcctaggtattttttttgaagcaaccaaaaaaaaaaaacaaaaatacaaagacatattgtaagaacacgcatagaacacaatcaatcgaaaagcagagaaggtggttttccctcttcttttaatcccctgttcttatacctatttcagttgattcgttttcattttaca

SEQ ID NO: 7967 - DNA, 579 bp, Gossypium hirsutum
  Clone ID: LIB3828-003-Q1-N6-A11
ttttttttttttttttttttttttttttttttttttttttttttttttttttttttttttttttttttttttttttttttttttttttttttttttttttttgggaaaaaaaggcccctgggggtaaaaaggaagggggggggggttaaaaaagaaaaaaaaaagggttatccttagggggatccaaaaggggaaaccaaattttcccaaaaaaaaaaattaaaatttttccccaaaaaaaataaaactttttaaaaaccaaaaggggggacaaaaggggaataaacccggaaagggaccccccccaacaaaaaaatttttggggaaaaaatttcggaaaaaccttaatttaaggggcggctccaaatcccaaaaaaaaccccaacccccaaaaaaaaaaagaaccaacccccgggtttccctggaaaaaaaaaaaaacgggtttggggcaaacacagggggggaaaaaaagggaaaaaaaaaagggggggggcctggaaaaaatccccccaaggaaaaaggaaaaaaaaaagggggggggggttcggccaaaggggggggaataaaaaacaacggggg

SEQ ID NO: 7968 - DNA, 566 bp, Gossypium hirsutum
  Clone ID: LIB3828-003-Q1-N6-A12
aaaaaaaaattgatcagaattttgccattaaaacgggcccagctcaacatcaggctcatccaagtctcctgattctcacaacaaatactaaagacagcaatgcttattactgaattgatgaaactaagaaccctacacaacgaatagaaaggccacccttaggtgtgcttccggaaattggtgtatgagtaccggaaagtttgtgattgccaaggacaggtgataacccattgagaaagtcaaaccaaaatcatctaataacggttccagtaggtcctgcgtctgaaccagttgtagtcgggcaaaccctggaccggacccattgcagcaattgcaatatccttgtcatagataaatcggtctgcaactcgtttaatagtgcttggatcaacagcatcaatcctagcaaataattcagcaaatgggattctccgaccgtatgtaagtagctgacggccaatatcctcagcaacaggactagttccatcaatatgaagcatcaaggatgactttaactgattacgagcacgaatgacatcagcttctgaaacacgataagctagcgg

SEQ ID NO: 7969 - DNA, 570 bp, Gossypium hirsutum
  Clone ID: LIB3828-003-Q1-N6-A7
agttgggatgaaaaagaagaaaacatggcatttaagatgttcactattttttatgtctatcaaatgtgtcgtgtcataaatttatattcaaaattgtcaaatctataaaaaaaaatcagaaataagtatgaccagtttaaaagtaatttaaaagaaaacttccgtggaaattttttaaaagaagacaccacctgcttgtaaaaacaaaaaattacttacgcttaattacagggtgtcatagagccaaagccatatttgtcagcatccctccatagcgcagtgcagtgggctttctggttggcttggctatcaactgataaaacctttctctcaacacaataactccaccttctatgtagtatcgtgagtaaaatattgggaaaattatttgcaatagaataccaactgcattattgtcgaggctagttggaatgcaataaaaagcatttattgtggccataaccataactcaaccagacaaggttgctagcagcttttattgtcatgtgtggatccaaccatgatccacaagttgtttacaacatggtagtatccactggatagctccct

SEQ ID NO: 7970 - DNA, 567 bp, Gossypium hirsutum
  Clone ID: LIB3828-003-Q1-N6-A8
atagtaagatagcgcgcaagcatcacaaatataataagttcctgtgttacagagttcgcagtaactagatttgcaaattcccatgtaacaaccaggtagaaatagaacatgaaccattaaaacgtttttccagtttatttgatccaagcaaaccacacctattgtctttgttttacctatagactatatagtagcaggctcattatcagcgacttagtgatggtgtggcttctccaagtcctcaatactagtggggcggaaccacgccttttcctccaggaccgagtttgcaccactcgaatggatgccctgctccccacccgcagatgcgttaagttgctccgtagcagggccaaatacccctgtccgcgggtcaggagcccagtacttgtccgattgaggctgaatcacatcatcaggaaccacagccgcatggacctgatcatccaggttcttgtcgtatgccgacgcgtgaggactcctggtaggtgaagaagtggagatgaaaagagaagggtgcgagtggaggtgcggttaagaagtcgcttccccaagctggcgatccct

SEQ ID NO: 7971 - DNA, 567 bp, Gossypium hirsutum
  Clone ID: LIB3828-003-Q1-N6-A9
aatataaataaaacattaggaaaaaattgtttaacttaatcaataattgacaacatgattactaataatgataataaaagaatctaatggcgatggttttggaagtttacactccagggaccatgtcaggataacaaggagtgccggtttgcgaaatccatttgtcagtttcagtttcaagaaagacgccaggagtccatttcttggcttcatttatatcgattgtcttgatagctggccatttgaccctgccttcggttttagcccctggtcccctattttggaactctacaaagtaaccggtgtctagtcctacggttccttccatgggggagtaaccctctggtgtaatgatgtcatcaatattgctttgcattatgatggtcctcgccaaagctttccaaggacgaccaagatacgtcttgctcttgtccttcaccgggaggtagtcaggggcgcctgagatggtacaattttgaagcacaatagctgagtgagtgtatgggaatttccttccgtgggccgtaatcatgttgttctggttttcacctggcttcctcgcaatga

SEQ ID NO: 7972 - DNA, 564 bp, Gossypium hirsutum
  Clone ID: LIB3828-003-Q1-N6-B10
gtaagaataatacgaattttattttatttattgatatttattataacaaaaaaaaaaaaaaaaaaaaaaaaaaaaaaaaaaaaaaaaaaaaaaaaaaaaaaaaaaaaaaaaaaaaaaaaaaaaaaaaaaaaaaaaaaaaaaaaaaaaaaaaaaaaaaaaaaaaaaaaaaaaaaaaaaaaaaaaaaaaaaaaaaaaaaaaaaaaaaaaaaaaaaaaaaaaaaggggggggggcccccctttttttttttttggggggaaaattttttttagaccctaaaaaaaccaaaaaaaagggggaggggggggtttttttttacaaaaaatccaaaaaaatatttttttttaaaagggcccaatttggcgcccccgaaaaaaaaaaggaaccccttaaaaaataaaaaaaccccgcttttaaaaaaaaacccggggaaaaaatatttttttttttttaaaaaaacaccaccccccccaaaccagggggggggtttttttaccccccccccccccaaaaaaggggggggtttttcccggggcccccagaaaggggggagaaaaaattggggg

SEQ ID NO: 7973 - DNA, 572 bp, Gossypium hirsutum
  Clone ID: LIB3828-003-Q1-N6-B11
aatgttccaagcgaataatcataaaattaacatagttttaacaccaaggttcaacaggtttagtttaataatccatgcaaccccaaacatactagatattgttcgaaattccaagaagcaaagcccaacaaaacagatgttcaaaatacaagcactcccttaacagtagaacataacacgcttgacattttccttgagggcaggcagaggtctgacggcagcactagcaccaggtcctcttgtgctacgcccaccagcagctgcagctccacctccacgccctgcagctgtggcacttgtcattgatccactgtctgatgtttctggttccatataaaaccgagctcggaatgcagcaagatgtgcgtagtacgcagggggaacaatagacactgatcgtgtgcaccttgcatatgtatagcaaaggttatttgtgagagattgtaatgcatcagctgtaaacttgttctcatcccatagcacatggtaatgagctggacggcttgtaccctgaatcccacatggctgcataggtagaagtcaaactccgttgggtgacaaattttggagtc

SEQ ID NO: 7974 - DNA, 382 bp, Gossypium hirsutum
  Clone ID: LIB3828-003-Q1-N6-B12
aaaaacccgatacttgattcgggtaatagttaaaacactaaaaacctaaggggaaaacaaaaaatttacaatccaaatggggttcaaaaaaaaaatattcaaaaccgcaaggggacgattcggatcgggacatggtctcatggtccatggggggtcccagcaaagaaccgggaccaattaaaaaaacatcaactcccacagggggggcaaaattatcacaatcccctgggggacacccacaaccagaacaactttggttcaagaaaggcaaaaacatttccgcattacattcgttatggggatcgaccggtgagccccagttttgaaggtaaccaagcacataccttttccatttcctgtgggaggggaaagggaccaaccc

SEQ ID NO: 7975 - DNA, 607 bp, Gossypium hirsutum
  Clone ID: LIB3828-003-Q1-N6-B8
tcgcggggactgtcgaggttgctgtcgccgccatcgttggccccgtctacgagaaatataaggacgttcccgatcatcttcttgtttttcttgattccaaggtagatgaggcttcacagaaatatgacgagcatgtcccaccagcgggtaagcaaatggtgaaccaagccaaatatttggttcacatggcagcacaaaaggctcacaaattaatcgacgaggctcgaaccaacggtgcgcgcggcgctttgcactacgccgcgaccgagtacaagcagctggttctggttagctcaaccaaggtatgggtaaaactgaatcgcagttctgctttccactcggttgcagagaagatcgttcccacagcttcgaatttgtccgataagtataactgtttggttaaagacttgagcgggaaaggatatcctgtgtttgcgtatctgccattgattccggttggtgagctgagaaaggctgtcaagcaagctgaagccaaggacaaagcacatgtcactgccgacactcgtaaatcggattccgattctggttcgggttcgggttccgattcggattcaggttagggagctttttctttggtttgtctcgt

SEQ ID NO: 7976 - DNA, 482 bp, Gossypium hirsutum
  Clone ID: LIB3828-003-Q1-N6-B9
aaattaaaagggttccatttgctagtaaaaaccatggaaggaaatgaaatacaaatgaccagaaagaagaccggtgggtatgcaagataaacattaacattgacaatcttatacagccttcgcgatcatattcatgcgttgtcaataacaaagaggaactaaggtatctacttgaataacagctaatgccccttccttattatacattgctctgcttgtaaagcttggtgtcgagcacttgcttgccacacattgcacatacacctttggaataagcacaagtgtgacagtacttgccgtcttggtgcacttgctgcttgcaaatgatgcacttagtatttccataaggagtccaccttcgctttttagagaggagtttattctcgttaattttccggccaccgctttcgtttgtgttgctggcaccttccttccacttatccggcacgatcaccttcgacagcttcttttgacacttctcg

SEQ ID NO: 7977 - DNA, 61 bp, Gossypium hirsutum
  unsure (1)..(61): unsure at all n locations; Clone ID: LIB3828-003-Q1-N6-C10
gggggggggggggggggggggggggggggggggggnggggggggggggggggggggggggg

SEQ ID NO: 7978 - DNA, 568 bp, Gossypium hirsutum
  Clone ID: LIB3828-003-Q1-N6-C11
attgcaatgccaattgcagaattgagtgaaaaatatcaacataatggtctttacagtacactgaactatttgattccagaaatagagaatacaaacaatgtaaaaaacgaattatttcgaatcgaatctatgttctaatcttacaaacagcaaatgaaaatgaatgaacggatacaaaatcccgagtcttggaatattgcactctattcagctcgggattgaccggcacgagaagagaggatgataccgacgatgagcccatacagagccaaagcctcagcaaaaatgaggataagaatcattccaacaaaaagctttggctgttgggcattggctctaacgccagcatcgccgacgatcccaatagccatgccggcggagagaccagcaagaccacaagcaaggccagaggaaagatgagcatagccatcgaaaaggtaataagatttagcctttgggttaatcccagtactgataataaccgcaataatcaaaccataaatacccaaaacaccagccataacaacgggaacgatcgatttcatcaccagctccggcctcatcactc

SEQ ID NO: 7979 - DNA, 571 bp, Gossypium hirsutum
  Clone ID: LIB3828-003-Q1-N6-C12
gtacattaaaattgaaaatatatgggaagaagaggtaaagtttccacaacatgacaacagaacaattgtattacactgttgcaaaaaacagtacatgtcctgaaatcaatggtattgcagccagcacaagcgtactacaacctaacctgaagacaactttggactagaagtatggacagaaaaactagttgtagaagttgaggaattatgcactttcccatgtgtggctaatgcttggtttagtgaaccaagttgtatacagaaattgtttgtgaggccccacatggttgcatattagcctaatcttttgtctctctctcatccatctcagcacgatcttcatgtgcctcttgcttgtaagtcctctcaatgcaacctccttgactcgttcccaagtatcaccgacggtgaggggcccatgctccttaagaatgtcaaagatgactctggttatggtctgcgtttgctctagcgacgttttcaactcgattggcttcattttcggcttgggtttcgttgaaaataccggatcatactcccaaacatcttgtcttcccgggagtcgatctga

SEQ ID NO: 7980 - DNA, 532 bp, Gossypium hirsutum
  Clone ID: LIB3828-003-Q1-N6-C7
aaagccacacttgccatcacttatcaatacacaacattccaagaagagtacccaaaaagggcatggattcccttcatggtaaggtggcattccaccaagagttcaactactaaaacataccatttttcttaaaaaactaagcactaatgcattgttataaactacaaaaatctaattatttgtataagcatcatgacttattcctaactaaaaggaaaaaccgaaaacattgaccataatcggtcaatcaaggtatcctacagtgcagattggaaaatcatctctgcaagttcctgcttggctgaagcaaccttgggctctccccattccatggctttcttctcaagcatttcaaaatcagctttaccagcctcaatctgggcaccaagttctgtgtcaaagctagaatatcgtttactaacaagctcagccaaagaaccatcctcaatcagcttagcagcatttcggagtccacgagccaaggtgtccattccactaatatgagcaatgaacaagtcctcaacatctgtac

SEQ ID NO: 7981 - DNA, 576 bp, Gossypium hirsutum
  Clone ID: LIB3828-003-Q1-N6-C8
gaaagtgaaaacatcttttttttgattaattaattgaaaaccagatgcagcaaaactggactgcaccaatggcgaaatatcatctcccacacaatccccatcaccttattcagaccccatttggtcttcttcaagcagagacctcatttcttttccaccaaaacttaccatccatcccacacgcaaactcctatcaaaatcaaaatctaaccatctaaccacaaatcatcaataaattttagtaaaaacaaacaatcaaaccatcccgttgtatggttcctttttctagtccaactctctccctctctctctctcgtattctctcctcagtacctgtagtgaggaggcttgtaaggaccctcaatggggacgctaatgtagtcagcctgatccttggtgagcttggtgaggttagccccaagctttccaaggtgaagagcagccaccttctcatcaaggtgcttaggcaaaacgtacaccttcttctcgtacttgccggttgccttctccttccacagctcgagctgggcgatcacctggttggtgaaagagcatgacatgacaaagctagggtgg

SEQ ID NO: 7982 - DNA, 552 bp, Gossypium hirsutum
  Clone ID: LIB3828-003-Q1-N6-C9
ggaattcaacaaatgaatattatatataagcaaagtgggatctaattaacctgacatgaaacaatacatacatacacatatatatatatataataaataaggcaaaaaaagaaatgaaaagttaaaatttcatggcgtcaacgtcactacaggtttcgttgcgttaggtggcgtcaaatattaggggaagttgtgggcatggaactaaagatccgacatcttcccccgagtatttttgtggcatgttttgaagaagtaatgcagatgatgatttgttgtgtcatctatctatgtgaattgatgcacgcctggatttcttccaatgttttccctttagtttctgggacaaacttcactacgaataggattgttattatagagactcccgagtagatataaaatgtgccataggaactccaggtcatcatgaagttgaatgtgtaagaaactgcccaagcacctaaccagttcactaggaccaccaagctgcctgctactccttttacatttattgggaaaatctcagacattatcacccaaggagctgctccc

SEQ ID NO: 7983 - DNA, 558 bp, Gossypium hirsutum
  Clone ID: LIB3828-003-Q1-N6-D10
agagggattgattggacatatttaattaggctcaaaaaattacaagcaagttccatcttttcgcctattaattataaactcatttagttatagttgcaaatgcccaaatttgcctggagcccaacaaccaaaaaaacaaatattaaacaatccacttacatcagcctaaataaaaactaaacaggcccaaaactaaaaaccctagcccaaaaacttaaaaatttttcagaaacctaaccctaacacccccatgtgcgtcggtcctccttcggttaccccgcctgcgcctcgcccgaggcctggcattctagattgccaccacctgctccctattcgttgaccatgcctagccctgagtcatcgccgatgagaacccgaatacctcaaaaacgtgaaggttcgggcgagggatcgaacggtgttgaaacctcatttgttttttacgaatctcgctctttatttcttaaaataaacgtagtattcgaagttttttttaaataaaagaagggttggaaaggggtcaaaaagactcgattttggcacttccggccaccacca

SEQ ID NO: 7984 - DNA, 604 bp, Gossypium hirsutum
  Clone ID: LIB3828-003-Q1-N6-D11
atatgtaatattaataataaattttttttctatacatccgataataaaaaaaaccatcaatttaagcactaatccgactttttttagaacacccaacgcccgctatattattccattgaagtagctccttcaattacatttggctcagacacaataaaaaataataaaccggagttgttggaccgccatgaagagataagagttaagcgcagggcggtggcagctgctcgccgatgtagttaactttgacgttggtgcagttagaactgaagggagtgtcttcattatgatcgggatcaccggtatactctaagtgaatgtccttgagggtaatgcctttgcatggaaatgattggctgcaagctaggactacagcaattttgcttattgttgttcctctgatgtttgagaattcaacgtcggagatgagcacttttgagtccacactgcctggaatcgttgcatattcttgatcgatgagaatagggttcttaacatggtccatagtgagatcttggaaaataatgcccgaagctttagatggactttcatttctgtatgttttgattcttgcaccattttctgtgtaggctagtgagcaatt

SEQ ID NO: 7985 - DNA, 570 bp, Gossypium hirsutum
  Clone ID: LIB3828-003-Q1-N6-D12
gcatattatctgaatgtgattgatacttgcttaaactgaaacaactaaaaagcaaataaaatgccaacaatggcaaatgaaacttcaattgcagaaattaagcagtcagaccagaaaagaaaaaaaaagaaaaaggaaatgatagcttaaacagttgatgcttcatcatttttcctttggaggggccttctttgcagcctcggctgcttccttctctgcctcgatctcggctgcaatggcatcgatttcagtttcttcaagctgccgaagaccatgttcctttgtcatcacagcaacttcgatgttctttcccccactctcaacaacctcgagcaatgcacgaattgcaagcttaatggtttcttgcccagaagtttccttgtagttcttctctaaaaactctcgtatcgagtttgagtttctcccagttgcattagctttccaagcggaaaatgtccctgacggatcagtttgatatagtgccagtgtaccgctatatggatcaaagccaacaatcagagtcgagagaccaaatggtctaacacctccactttgaatatacttctgctg

SEQ ID NO: 7986 - DNA, 573 bp, Gossypium hirsutum
  Clone ID: LIB3828-003-Q1-N6-D7
aaaccttagctttaattttatataaatttaccgtacatgaggttttttttattagtttgtaaacaattggcatacgtgctgttattccatgcttcggtagtaaagggtaaaataataaagtaaaagaagtgtcaatcaccctattgttaagacggaacaggaaaaacacactgaaacaaaagacctctcgagttgcactgacatttaaacttatcaaatcacaccactaaatagacattaaaaaagaagacttttttttttcttttagattgatgatgaagcacgactactttgtccaagtgtagatggcccaggactgggagtttgctttaattcaagtcccttttcattctttcccctcagttgactaatccgaggactataggcattttgaaagatccctcggctgtaagaaggttttatgtcccctactgaagatggagttgtacttgatactttaggactctgtgtacgccggatttctccacggcttcttgtcataatttcatctagaatttctaaaccatcgatattagtagctgttgcctgcctttcctggtcttcaaatgtcat

SEQ ID NO: 7987 - DNA, 553 bp, Gossypium hirsutum
  Clone ID: LIB3828-003-Q1-N6-D8
tttttttttttttttttttttttttttttttttttttttttttttttttttttttttttttttttttttttttttttttttttttttttttttttttttttttttttttttttttttttttttttttttttttgggggggaaaccccaaaaaaaaaaaaagttaaccaaaaaaaaaaaggggaaaattttaacaaaaccaaaaaaaaattggggggggaaaaaaaaaaaaaagggggggaaaaaaaaaaaaaaaaaaggggaaaaaaaggggaaaaaaaaaaaggggggcccttttgaaaaaaaaaaaattttttttcaaaaaaaaaaaaaaaccccaaaaaaacaaagggtttaaggggccctccttttggggttttttggaaaaaaaccctgggggaaaaattttaaaaaaaaaaacccccctgggggggggaatttaaaaaaaaaagttcccaaaatttaaaaaaggggtttaaaattaaagttttttttaaaaaaagggggaaaaaaacccccaaaaaaaaaaggggcaaaaaaacttggggtccccct

SEQ ID NO: 7988 - DNA, 589 bp, Gossypium hirsutum
  Clone ID: LIB3828-003-Q1-N6-D9
agaactaaagattttttgttacattgaacgaaacaaagggttccacagcaactttgacattgaacgaaacaagggtttcacacaagttataaagcacgaaataaataaaaagaatgttccatatctttcccatatccaaagcacaatgacaagttactttaagaaaaaacacccccttccttccccaaaacacataagaaagctgataggtattacacaccaaccactgtcatcccatggcatacttctgggtccagctacgagcagtggcttcatacttggcccgatcagtcttatacatgtgagcaatctccggaacaagagggtcatcagggtttggatcggtcagcaacgagcagattgagagcagaaccttggaaatggttagtgcagggctccattgttctttgaggatatcaagacaaatgcttccattgctgttgatgttaggatggaagaccttggtcctaaacgtgaccttaggaggcttgaaaggataatctggagggaaatggatggtaactaaaaacaacctccagcataagggctatctgagggtcccatgattgttgcttgccaatgaaacatg

SEQ ID NO: 7989 - DNA, 430 bp, Gossypium hirsutum
  Clone ID: LIB3828-003-Q1-N6-E11
cgggttcttaaaaggcataaagatgtctgtaagagagcatttttgaactaataagtgaaggccttaactttggggacctgacccccatggcaaacgattagggaaaaacgggggaccaaggcttaattcttaagaaacagacgcttgctttttagcccctgaaccccaaaaaaaatttcaataagcgcccaatgggtacttgcccccaaatggtggggggagaatagaaaactgttgattaaacccggcagagtaaggttgaggcttttcctacgaccgctggggcaaccccgacaattccggcccggtaacgcctggcggaccatattttccgtttttggggtgttgataacccaggcggaattgtggccacaggttcccaccaggtgaaaaagatggagcattgcaattcacaggaacagaataggcc

SEQ ID NO: 7990 - DNA, 577 bp, Gossypium hirsutum
  unsure (1)..(577): unsure at all n locations; Clone ID: LIB3828-003-Q1-N6-E7
aaacaaaggactaagnattattataaccaagacaacatgcatacttgatactgcctctcctaataaccatacaagcaaaacaataaacataagcaaagaaaggtggtttgggacccaagaaacccatccctttacagataacagatgacccataaaaattcccccacaatggaacttgaagtatgtcactctttgacatatgcaaatgcatgttaacctagccacattgcaggactactatcggtgggcctccatcagccacattactacatccttattgacctacatagaagaaaactagttgacttgacatgcaaacttatcaaactgtagccatttgaaacacacttccattgacacccgcattttcatcacaaaagctttattatttactcagtcttctctgctggatcagcttctgtttcaactttctcctccacttcagctggttttgcttcttcttccttcttaacttcctctttgggtgcttctgctgctgcctcactagactctgtagtttctttggtttcaacggtttgttcagtggtttccttgatctcctcggcaactggttctg

SEQ ID NO: 7991 - DNA, 415 bp, Gossypium hirsutum
  Clone ID: LIB3828-003-Q1-N6-E8
cggaacacagtctgtgaatttacataatttagacaaaccctacaagaaggatcgatgcgttttccaaatcacctcagtgggaagacaaataccttcttttccgtttacttggaaacggaaacacagatccaatttcccatcattttttcgagagcatattgcaaaagcttgccagtcacaaatgaccggccttataacatcttggattccccgtatgttccaccttaacaacaacatgcctattttcacctactctagtcctgttggatgaacctcaccacacattcgaccctatttaaggcatatcctcttggttcttgcaggcattactcaaatctgggccttaaccttagtcccatttatgaacaactgaaacggacgaaactcacctcccatgcgtgactctaaatttggg

SEQ ID NO: 7992 - DNA, 587 bp, Gossypium hirsutum
  Clone ID: LIB3828-003-Q1-N6-E9
gtatgtatgcgatcttcatacgggatcaaggatgaagcccttgactaaacgttgaggattacattgtttatttatgtacaacgaaaaaatatatgcatggaagtatgtttattttgttcaaacaatttatcattattggagctgatatatatttaaacaacatatatagaatagtatatatatgatttacaacttacagatgttacggttggccttaacccttcagtagtaatatctccttcggattcttttcttgctcacaggggttggtgcttctccactaccagggaattcccacttaaccacatctccatcccaagaagagctgaccagcatcgggtagtatgggtgccaactacagtctcttaccggtgatgtatggtgcttgagtactgcaacttgggctccggttgccacatcatagatataaaccctagagtcatgagatccagtgtaaatgtacttctgacccgtactgtattctggggaaaagtaacagcgaataagagttcgcaagaccgagtgaagctttataagtagcaatggattggtcagatgggtgcttcaaatctctagcctgtggcggg

SEQ ID NO: 7993 - DNA, 584 bp, Gossypium hirsutum
  Clone ID: LIB3828-003-Q1-N6-F10
gaaagctcgaaccaattttgcagggatcaacaaagtcgatgagaaccatacaaagtccaaattcgaaagcatctgaaattgatgtaacccaaacgccaaaaccccaaatccttaacaataatgtaacaaatttaacacattcctaaaggcatcaccatcggcaaccgcaacgctatcggcaaagttagatcttatttctaaaccaaaatacacctttgctgctctgctcaccttcgtctggttcaacgtaaatacactcctttgcctctctaaatatcgctttataaactggtgtaccatcaaatgaataatactctcccaatattggttttattgccttagttgcttccattgcgtggtaatgcggcatcgtcgaaaacaaatgatgagcgacatgagtatcagttatgttatggaaaaccttgtttaatatcccataatctcggtcgaccgtcgcgagggctccacgtaaccagtcccattcggatgagtcgtagtgtggtaatgcggggtgagtgtgttgcaagtatgtgatcatgacgaggaatgcattaacgatgagcaatgggacaccgtaaacgcaa

SEQ ID NO: 7994 - DNA, 538 bp, Gossypium hirsutum
  Clone ID: LIB3828-003-Q1-N6-F11
aaaccaatccccaaaacttataaaattaatatacaatcctttaaaatatatatggcgagatcctgaaatgtttgaaggactcaaattgtgctatgcaaagtataaagcctatactaggagaaatttcttctttacactataccatgcatttcccttgttccctaatggatagaaatgaaaatagtgaaagatatatgtttgtctggttcgaatcacgttcttcaggcgacgaagtcaggtaataattgggctacaaacctttttctgttctgaaggttgatgctctcatacccagccgaaaaatgaggtgtgggagggtttatggcaccaaactcatttggttcatcaatgtctagccttctccccatttgcattgtttggtttgggagaaagttctgatgggttccagataaggaaaggttttcacagtgcggaaaaccgagtgtgagggaaacaccattaccaggaaacctaggagcgaactgttctgcatcgaaccgtccgatttctccgataggatactgccctaaacctccca

SEQ ID NO: 7995 - DNA, 260 bp, Gossypium hirsutum
  Clone ID: LIB3828-003-Q1-N6-F12
cccacccaagggaagagggaattaataacaatcaaacaaaagaccacactgtaacaaaccccacggagaaacccaacaaaatacaaatgggacaaaataaggggggaagggacactttaagaacagggaggagggcaaacaagggggcacgaagcatgaataaaggaaagccggggccgggcgagcaacaaaaacccaagcccgggaaaaaagaaaaaaaggttaaggggggggaaagaaaacgggaaataaggagggaa

SEQ ID NO: 7996 - DNA, 541 bp, Gossypium hirsutum
  Clone ID: LIB3828-003-Q1-N6-F7
aacatcgaatcttccagtttgttcgaaagaaagccaaagcataaaaatattgacactaacaacccagcactactgaacaaaaaagcagagcaaacaagcataatactaagggccggcccacaaaaaaagcaaacatgaaacaaagaaccatccaacaaaagcttggaacttaaaaacattgatgccctattcattaatagatattttagcaaacttatctgccctggtactttcttccttttttttaaaccccattttttaatcctggttatagttggagagggcctttacttggccatcatgactttgacgaactcctcgtagttgatctgcccatcaccatcaacatcggcttcgcggatcatctcgtcgacttcctcatttgaaagcttttcaccaaggtttgtcatgacatggcgcagctcggctgcaaaaatgaacccattctgatccttgtcaaacaccctgaatgcctctttaagctcctcctcaaagtctggatccttcatttttcttgccatcaggttaaggaattcaggaa

SEQ ID NO: 7997 - DNA, 575 bp, Gossypium hirsutum
  Clone ID: LIB3828-003-Q1-N6-F8
atcccaatgatagcttgtaaaaatataattcctcttcattttgaaaaagtatccataaaatcttgaaacttcaattaataatatatcaaattccgggttttagggatgtatattccaaccactatgaagaaaatattaattgcgtttcaagaataacacatcacggttgaaaaaacacaggaaaataaacgatgtattagaatgtcagctgaacaacaggatcttgatgaaccccatgtccacgaatcaccaatgaatatgaatgatttatcacctaccaacatttccaacaagctgactgctatatgacttataccagtatgctgaagaagttaaacaagaagaatactaacccttctaagcggtcgcactcgcactagtcaattctttggcagcagttgctaataccattttctgtggcgcggccaactcttcttcatgtttgggaatgaaagcagtgtcaacctttccatttctgaagtcctcaatatcaaggatgagtttatgggattcaatagttggaaggaacccctgtaattaccagtgtcatcaagaaccccttttcatgccctcaa

SEQ ID NO: 7998 - DNA, 582 bp, Gossypium hirsutum
  Clone ID: LIB3828-003-Q1-N6-F9
agtatatatttataatttatggattccttgcaatcacgtggcttctctagccattttatttagcatatccagtgatattaagatccagaattataatacaactaaaatctgtgcacacttatggatggtgtccagcaaagcctcaatcggctttaggttccaaatcttgcaacccacaaaccatatttgctggcactgcaacatcaatcatcttaggatatgccaagttaagattttccatgatatttttgaaagtctcctcatcctttgtcaagcgtggattatatagcatctcctctcccacagtggttactgagaatcctttgtagtcatgagctggatatagcaatgtctctttcggtaatgtaaaaatctgtgaatgcactgacttgtagagttgctgtgaacttccaccctcaaaaaagagatccccaaaagagattttgtcaccagcttcaacaaaaacatcagccttggaaccactggcctttgaaataacggatttgacaccaggcaccttgcccttgatgaggccagttccagtaacatgatcagcatgtacatgagtgttcatagcataaa

SEQ ID NO: 7999 - DNA, 582 bp, Gossypium hirsutum
  Clone ID: LIB3828-003-Q1-N6-G10
aaatacttagcctactacgtattaattttggttgtaaaaggcccccaagttagcttcacttgaaaaataaaaaccgtttttcccccaagttattagagaatctggaaccatatttcagactgaaatagactcgacatttcttttcatcgaaattgaataaaaactcaaacagaaataaacttgcaaaaatttcaaactcagtaaaaggaatgccaaaatcccacaaagatagaagcaattaatacgtctgaaagtaacctactaaactcaacggtaacgacgaagggaaagggtgttgtttctcttccaggtagcccttcgagatggccgattcttgtggtgcaagtgacccttcccatgcagacccctgtttttcttacctgcagatgtgagtcctcgaagttccctgtgcttgtgaacgggattgcagatccagttaattctcgggtcgttgcggattgcattgtgtgcaacatcaacaaggataacctcaaagtacttgtaagtagaatcctcgttgatccagtatgagttaacaactctgagacctcctaattttcgaccagctcgctcctctgcaac

SEQ ID NO: 8000 - DNA, 488 bp, Gossypium hirsutum
  Clone ID: LIB3828-003-Q1-N6-G11
atataacaaagaaaacatatatattagcatgcacatgcattaattacatatggctacaaaacaagattcaaggaactttaggatattgcaaatcgaatattgttttgagctatttattcttcataattactctttttgtccaagaggattttatagcaaacccttctgcaacatcattacttcttattttgtataattaataagacgacaaccaactcttcctcgttatttcatcttaatatggtatcatctctctactttggtggactgggttcactgtccataacctcttctatccctttgctctttacagtttcagcctggcaacatcctgatgcgcacctgggctgaccacactcagcacaagtcccaccacaaccctgacggcaacactctccactctcacatcccgactgtcctggcattaatgggattttagggacttgtgggatctgagggacttgaggaatctgtgggattagtggaat

SEQ ID NO: 8001 - DNA, 582 bp, Gossypium hirsutum
  Clone ID: LIB3828-003-Q1-N6-G12
gatcaagcaagctcgagtaatttattttttaaaaactataaaaataaaactcagttaaagtcaaaccagatttcatacgctagcttttggactctactccacaccctaaacaaaactcaaacctcaaaacacaatagaggggggtcaaaagtacaatagctgggcagtatcatatattaaaacctattaaaaaaagcactcaatttgtacaacattccaaaatcatcccaaataatattaagaaacaaaaagaaccaacttattccatcctcgctgaaccgatgacactggcaagccagatttctgccagttgttttaatctgttgtatctgtaaaacactatcaatccaataagggctcctgattcatatatcagattcagagcttttctcctctttagggggtgcaaactgcctgctaagccgggatcttgtccaaggatccagagaaggtctttgtggtggctgaggagtaggtggcttcgactgtctaagctcattttctctatcaatgaactctatatagggcattggtgcagcatcaccaactcgggtgcgagttggaagcagcttgtatatccac

SEQ ID NO: 8002 - DNA, 269 bp, Gossypium hirsutum
  Clone ID: LIB3828-003-Q1-N6-G7
ataaacatgtgaatacacattaaacttgttctcttcaaaacaacatgaagctcccatatccataaactaacaactgtaagtacaaatgggggtaagaataagaacccaccaagcgaaattctagattaacaaggaaattgatcttaatataggaattctctaggataagtcaccaaggtcataatcacatgcacacaaaaaagtttctagaaaaaatttaaaagcttcaaaatcacttgcgataattgaccaattattccagataacca

SEQ ID NO: 8003 - DNA, 434 bp, Gossypium hirsutum
  Clone ID: LIB3828-003-Q1-N6-G8
gattgaaagtagaaactaaagattaaaaaaaaactaaacaaccgttgtcaatacgaagggtttatcattctatttccaaccaacaaagagcttggcagttgaaaaaacataagcaaaacatgttcctcacaagtgaacaattgttctggagtgaaccatacaaaacaatcaaaacacggtaaccttcagagtgaagcagtacagaaattatacctcagtagtccgatggagaaatgacatcatcaattttcaaaatcatttttacaacttgcgttgccagtaaaatctgttgctgcttcccgatcagtgtttcaaagacgtcttgctcccgcatatcattaggtcccaacatcattgcagtctattccatagtggggattattggccttaatttgctgagatttcactggctgaagggtttcaaggggttggag

SEQ ID NO: 8004 - DNA, 576 bp, Gossypium hirsutum
  unsure (1)..(576): unsure at all n locations; Clone ID: LIB3828-003-Q1-N6-G9
gttctaatagggatataataatttattaattaccacaaataaatataaagctgatctgatgaaagtgataaatattactatnacataaaattcaagcctttctaattatggaaacgtgatcaaacccactaggcttgaattgttgatccatgatcaaagcgaggcaagaggggcctcacttttaacttcttccttgcttggggcatcatttgatttatgctcaggctcttcagcctcctgttttggggtagcctccaccttatcttcagcattcttgtcgtcggctttagcgtcatcctccgctggtttcacgctcttaccagcgtctgtttctgcagaaacagccgtttgagccttcttttccggttcagaaccatctaccgcaggtttctcaatctgactctcacctccgttagtgctgctctgagcagtggtgtcagagcttataggagcgtcggcagggccgtcgaactccttaggtttgctcgcacagcctcccatggtaggtttggagtttggggattaaagggtgcgcgagtttctggaggtcgtcggaattgtattggttgaggatgc

SEQ ID NO: 8005 - DNA, 578 bp, Gossypium hirsutum
  Clone ID: LIB3828-003-Q1-N6-H11
aaattaaatgctaaatttattcggataataacttaaattcgggtctactcttaatgtaccaaagtaaccaaacctaaatgataatatttggttattaattattattggtataataaacaataaatatatagtagtaacaattaaatgaatacacatttttctcttactaacaatttactgtgttttcattattgccctcaactctcatcccatcacatctattttcacttattcaacaactattcaagttcaccccatcaagctccggccataaaccgatcatctcgaacctcaaacctcatcgtaatctagctattgacgaggcattccggaggaggcactggatatcgtttctggtctgaacaataatcataattcatatatttttttcttacatttttgaagtttgtcttttgtttcgagtctaacgtccaatatttcttcgaattccaccaatgctcgggtaaaaaacagagtttgttattattattgttgttgttggagtcggtttttcggcaaccgctgatatcgaaaccttggaaatgagctttgaaaggagccatgctccaattaatctt

SEQ ID NO: 8006 - DNA, 535 bp, Gossypium hirsutum
  Clone ID: LIB3828-003-Q1-N6-H12
caaggcaaggttgattcaaagacaaggcaaaagtcaaaataaaatataaaaattctaagaaattgcatgacacatgattgtacaaaaaaaactgagttgcagagtgtatttttagtctcacctatttgaacaaattaccccaaaagtcgggggggattctccgttccgaaaaaaaaacaatcacagatcgccgttttcaatatgaagacaaccctcaaatataccaaagccgacctgattcctaaagataccttttcttttccctttttggttatcttggggaattggaggatacaatcccgacttgaatcgaaggacggccaggaagttttgttagttctgaatttgaacttccctgtaaaaaagctgctctttgggggtttaaaagcaaaagctgctgcatgtcgtttggaagtaccttgaacactgcctgtaaatcacccttcaatttctgacacattgctgcagagtcccatattgcccttccaaattgctgcagctgcatttcccccaaaagagcctctcgatagcatta

SEQ ID NO: 8007 - DNA, 581 bp, Gossypium hirsutum
  Clone ID: LIB3828-003-Q1-N6-H7
ggggaaccaaagatttaacatatatacatagatagataaaagattaaaaaatctgtttaattaattagtaaaaaacgacataattagaacaatgatatgataataagcatactaatggcgttggtatcgataataagctgtctagactccagggaccatgtcgggactatagggaatgccggaactcgggatccaagtctcagattcaagatagacgcgaggagtccatttgttggcttcatttatatctatctttttgatacctttccatgctaccctacggctggtatcggcaccgggtcccctgtttccaaactcggcaatgaaagaagtgtctattcctatggtgcctgtcatgggggcataaccctctggttgaatgatgtcgtcgatctgagattgcattatgatagacctagcgaattgtttccagggacgccccaagtatgccttgttcgtatccttcactgggatgtaatcaggggcgcccgagatggtgcagttttgaagcacaatggctgagtttgttccaagatcattccttccctgtgcagtaaccatgcaattttggccaggccctg

SEQ ID NO: 8008 - DNA, 584 bp, Gossypium hirsutum
  unsure (1)..(584): unsure at all n locations; Clone ID: LIB3828-003-Q1-N6-H8
gatgcggaatggattttatgtattcctctgtccatgaataagcagacagatcacataatccggcgtggagagccgaccgtggaatacacggttcgtagtggacacaaattgattttacaagagggacatactaatacacactctaattacaagcatttttacaaaagaatttggagcttagatctacctcctaagattaaaattacaaattggaggctttttcgcaacttcttgcctactttttgtaatcttcactacaggagactgatgggatctgctatttgccggaggtgtcataatggaccggaatccagtgagcatgtattcaaggagtgcccaacgatgcaggttcttattagtcgatgggatgccccaacggatccttgggtaaagatcaactttgatgcttctacttttgctgctgaagcgatggcgtgcctctaggcaatccatgttgggatacttanaaggctgcgaaaggtagaagttgaaggcgactcccgaataattactcggaaactgcaagagaaagtcgatgacagatcaaaaatcgaagcttttatacaagattcaaaatatctaag

SEQ ID NO: 8009 - DNA, 517 bp, Gossypium hirsutum
  Clone ID: LIB3828-003-Q1-N6-H9
cagaccaaatagccatttaattcttttcaaaaataataaattttaatatttttaagaaggaagtattttatttttatttttatttgggggagaaaataaaaacttaaaaggttccaaaaacaacgatggggggatggtatcactcataagctggtctttatcaataaaaccgggagaccactccaggaggacagcaaacacttgcatatgggctttttaaatcaacgcttgcttagctagacaatccgcaacttgattttgttcccttaggataaatcttaaagtccactgagtttcttgagataaaagggtatgaatatgcctgattagagcagagttagaagatgtagatgaacttccaagaagggctttaacaacttccagacaatcagaaagaatgataacttgatcatgtcctcgtctttgaacaagtttgagtccatctaaaatgtcccaaaggtccgcatcaaaaactgagcatttaccgagaaattcttcaggggggcgggtttcaaaa

SEQ ID NO: 8010 - DNA, 423 bp, Gossypium hirsutum
  Clone ID: LIB3828-004-Q1-N6-A12
aatccaaccctcacttgaattcgggtaacatacaatcaaaatatttgttagttatacaggtggttaaataccaattaaatacacaaaaggggtcaatatcacacataatagcggggggattaccctatcatctattggcaattggggggaccagaatgggttaactttgtaccattaatgggtaattacttcagaaatttgcatttaaaatatgggaacaaagagttgcaataagcaatcataaggggttggggggtgctacctgaatggaagtcgtcgcatccccttccgaaagttgtttgccttcaacaaggccttttactaagggggcaaaataatctttgctaggagcacataaaggaatcttttcccacttaaagctttcaatcacagggggggggcccgttataggcagggtggggg

SEQ ID NO: 8011 - DNA, 572 bp, Gossypium hirsutum
  Clone ID: LIB3828-004-Q1-N6-A8
caaacaaacgattatagtattgtaatcactttactaatcgaatttaaacactttccgggtttcaacattgattaacattttgtgaaaagaaaagaaatttttataggatgaatagtattcacaaagcagttgttgttcaggtctcatcattctcgccgagatgaattacccaacaagctgtttgttgaaggtgagctctgtccacttgaccaatgatcttgtactgatataggagacctattttttacgtcttctaataaggtggttaaacattctccttccctttgcttcaacttcatcagcctccggcttcccacatcggacatctccgttgacttgttgaatgatttctcactttcttcgtctgaggaagctgcaggagactcgatgcacatgcctggaacccaagcgctgagtctgatgtgttctagctcttctgcgacttcgatcatggttggcctcatgtcccgatgagaagcgaggcatctaaatgctagctcggccacattatgaattgatgaaagtgtccaagcatctctatgtggatcaaggtatggatcaattatctcatc

SEQ ID NO: 8012 - DNA, 262 bp, Gossypium hirsutum
  Clone ID: LIB3828-004-Q1-N6-A9
aatcaagtaagaatcagtaattattgattttcagtgaactgatgttaagcaaacaaatacatttatttccatcctaaattaaccataattcttatagtacaaattacaaaccaatatattgtaaagaagcaaatggatcagaactgaggtgtgggatggcaaggtaatgaatggccgaaactcaaaactctagttctttgcacttgattccgggatgcaccactcttacggatctaaaatcaaccttcatcgggtctatttg

SEQ ID NO: 8013 - DNA, 574 bp, Gossypium hirsutum
  Clone ID: LIB3828-004-Q1-N6-B11
gctaaattcaattcctcgttcatgaaaaatatagcaaagattattgaagttccaaaaacaattaaattaaaatacagtatttaaaacaaatggcgacaatgagatcaaacgatgccattaactattaagtgcttaaagaacaccatatccctcggaaaacattacattagaaaaacaaaattccatactgtcttaaaaggttcccaacaacatgacatgacatgaaataaataaacaccatttagaaaagagatgttcccttccccttcttgtcgccaccaatttcaaaatgcttgcacctcttgattggatgttgggatacatgcttgcaaccctggcattgcagcctcagcacaatcttcttggtggtcttggccttcttgtggaacactggtttggtctgaccaccataacctgattgtttgcgatcgtaacggcgcttcccttgagcagccaaactatctttgcccttcttgtactgtgtaaccttgtgcaaagtgtgcttcctgcactccttgctcttgcagtaggtcttcttcgtcttaggtacgttcaccatggctgcggctgaacc

SEQ ID NO: 8014 - DNA, 235 bp, Gossypium hirsutum
  Clone ID: LIB3828-004-Q1-N6-B12
ggaaccccccaagaataaaaacaaaaaacaaaaaaaacaaaggggcaaaacaaacattatgggggccggggggggagagaaaaaaaattccaatttcagggcggaagggcaaagcccaaaaccaaaaaaatgggcggtttattcaagaacccaaaaatttttaaaaccccagacgccaaggcccaagggaaaacccaaaagagggccgggcccccctccccccaaggcccaaacc

SEQ ID NO: 8015 - DNA, 577 bp, Gossypium hirsutum
  Clone ID: LIB3828-004-Q1-N6-B7
gtccataacaagccagtaaattaaagaaaacgaaggcaaaccaaaccaaacaatgtctagcaagtattaaaaaccctattaaccgacaaaaacaaagcaaatatataaaggttccaaacttaaagcctaataaacaaagatagcccagttttgataaaggatttagcaacttctctgccaagaaactggacccgaatttagtcactcaggaaacgaggttatcattcagggacaatgaagccaattggtcggcttgattgttggcctgttgctgagcagcaacactcctcaacacctccatggcttcagctactttggccttcaaagcttctggtgattccaggagatgcaaaacctctgtttggtccatctccagaagcatgcctgtaaccttggcagctgcatcacgctcaagccgttccacaagggggtacaagctttcaccaagcatcgtcctttgctgttcaggtgtcgcatttgcaagagctgtagccaaagctggaatcggcataggctgtccgataccagcatctcgcaagggcatgccacccatgtcgtatggaacagaaagctgcct

SEQ ID NO: 8016 - DNA, 575 bp, Gossypium hirsutum
  Clone ID: LIB3828-004-Q1-N6-B8
ggagataacactgagattgaattcattatgggaaaattttcaatttaccttgtttcatcacctatctttgttcactaccatggcagaggcagtccttttttcttacacaacatcaccgttttctttgcaaacaggtcctttcactatctctaccaaattctaaggaatatctatcaagttttcccatcactacattcttgaaactaatagcttcttgagcttgtgaacatgatctttgcatcctaacaccactcaaactacttctagactccgtcgtttcgaccaacggaagctgcttttttggtcccggttccggcctttgtttcggggcactatgtgacctcaatttagccttgaatgattgtgtgttagccatgtaattagggaaattcaagttcccaatcccatagtgcctaaaaaagttatcagcacatacactcttggctggtgtgaccggtgcattagacacacaacaattgatgaaccgaggtgtactttgtgctgttgagaacctacattcatctccggttagtccccaatcagtgtgactatccggaacagataaacgagccgga

SEQ ID NO: 8017 - DNA, 580 bp, Gossypium hirsutum
  Clone ID: LIB3828-004-Q1-N6-B9
aataataaatcactgttttagtattatatttaagaactcactgcatgttccagttgaattctttcaacaaacaatgaatggaagcccaagggaaggagtcgttcagccacaccgtattctggttctgtatctgcactgtacacaccttttctttcttaccactatactaatattatatatataatataatataatataatataatatactaatttcttgtttttatctgttttaaaagtccattcactttttaattaatagcagtgagaggaagtctagaatctttcaattgttgggatggggattggggagctgctgatgctgcttcatattcccccaacatgtgttttatatctccattggctaccttcgctgattttgcttcccaaaacaactttaatagttcctcgaatggaggcgttttcagttcctctattgatgacatgcttggtaggttgaatgccctcttcgttggtgttgaacacgatggcttgtccaccatgtattcctcctccagactttccctgcattgtctgtgatttctacaatcttgtggtagtgaccaccctttcattccctc

SEQ ID NO: 8018 - DNA, 253 bp, Gossypium hirsutum
  Clone ID: LIB3828-004-Q1-N6-C10
ggacgaaaaaaattcctgctttcattcccagcttggggcatgagtcgggggcaagggacccaaaacataaaccaggggtcccggaaagggccaaaccctttaaatcaagaacctaatagttctctccatgactagttctggaaaagagtatgattttgggagaaaccccaacttagtcgggatgaagcccgtaatgcccaccgtagaaagaataaaccccgccaatagaacatttgaaaggcttcaatttgcc

SEQ ID NO: 8019 - DNA, 522 bp, Gossypium hirsutum
  Clone ID: LIB3828-004-Q1-N6-C11
ggaaccacaaacagggcgtccattgacattactcggggtatgagttaacactacaactaaaagagttggcagaaaaaacatattttctacaataaagaagggattagaaatgtagacgtatctatagactaatcttaagttaaacataaaaaaaactgcaatcctttgtaaccccctaaactgtttacttttcagggatgcttcaaaattgttcttcgatggggttggaagatgcatttccttttgaaacaactgtactgtaaacttctcaagaaatcagccaacatgcatgcaaatcaggaaaaaggagaacacttttttaaatcccgtcatgcctgcgatggcacaactgcagtatttgcatgagttgagctgtccttgacctttttatgtgagcgtgaatggtctccaaatttgggagatttcctttttttcccagaggcctttggtttctgctcttcggaaacttgcttttgatcttcttctgcattatctgttaaaagtgcatcttcctcatttttc

SEQ ID NO: 8020 - DNA, 374 bp, Gossypium hirsutum
  Clone ID: LIB3828-004-Q1-N6-C12
atctcaaaaaaaagagctacgtaaatttaatccatgtgataaaattcacaagctctttatctagaggcatttcagggtcatgtcttcataccagtttgctatttaaacatggacatatctactttggactcaaaaactcgttaattattgaagaggcgcccaatcatttaaaacaaatggcaactaaagactcatgagcttcaagatctttacacatttaacagcaaaaagcaggtagaaagaagagatcagggaaattaaaagaatagccttcgttgagatgatccggacggaacagttgaaggggaagatggtttgaggggtaaggggatcccctttctttcttgtcccccgcaactttgtgattctgtttt

SEQ ID NO: 8021 - DNA, 489 bp, Gossypium hirsutum
  unsure (1)..(489): unsure at all n locations; Clone ID: LIB3828-004-Q1-N6-C7
aaaaaaaaaccaaaacccttgggtttttttttttttatttcttaaaaaaaaaaacacaacaaataaaaccgggttaaaacaatttttaagggggaaaatggccccggattctccaaacccctttaggaaaaaacgggaaggcccggccaaaaaaaaaaatgggaaaggggggggggggggcaaaaaggggagaagcaaggggcggggttcctgaaaacggggtttcgaacccagaaaaagcaaaggcccggggctccccaagggtttttgggaaaggcaaaaatcctttagggaaaaaaaaaatttcccccttttggaaaggcctggaaaaaaaaacatgggggggggggaaaaaaccaacccttaattttccttccaaaaaaaaagcaaactttaaagccccnggatggggggggggaggggtgaccccaccaacgggatagtcgaaaccaaacagggaaccccaggggggtcaaaccggggaatttt

SEQ ID NO: 8022 - DNA, 287 bp, Gossypium hirsutum
  Clone ID: LIB3828-004-Q1-N6-C8
gtaattctggaattcgcagatcttcatttaatatttaagaaatacaaataaatagttcaagcactcctccatgcaccgtcttagctcaattaaaaaaataaaatgtgaagcttaacccaagctgtgtcgaagcacgcattcgtttaggcacatttgacttggacggccaaagtcttcctgagatgggtacatgcgccatttgggtcactgaaatgaatgctatctagtgggatttggcagctgggcttccccaagcaatacttctcaacaacttgcttggattctgg

SEQ ID NO: 8023 - DNA, 592 bp, Gossypium hirsutum
  unsure (1)..(592): unsure at all n locations; Clone ID: LIB3828-004-Q1-N6-C9
aggtaaatatgcaaattccattcaaagagaaaccatacatagatgcaaccggtaaacaaagactagaaattatttaaaaggccatcaaagggcacaatccttcacgtaaaaccagaaaacccacattaaggaagaccttaaggcttagaacccaccacgaagacgaagaacaaggtgaagagtggactccttttgaatattgtaatcagccaaagtccttccatcttccagctgtttcccagcaaaaatcaacctttgctgatctggtggaattccttctttgtcctgaatcttcgctttcacgttatcaatcgtatccgagctctccacttctaaagtaatggtcttaccggtcaaagtcttgacgaagatctgcatcccacctcgaagacgtagaaccagatgaagagtcgattccttctggatattgtaatcggctaaagtccgcccgtcctcgagttgctttccggcgaagatgagacgttgctggtctggcgggatgccttccttgtcttggattntggctttcacgttgtcgatcgtgtcagagctctcgacctcgagagtgatcgtctttccggtaagcgtctta

SEQ ID NO: 8024 - DNA, 566 bp, Gossypium hirsutum
  unsure (1)..(566): unsure at all n locations; Clone ID: LIB3828-004-Q1-N6-D10
atctaaatcgtggattctatttccatctagttttgcacatcaaaanacaggtgttacagttgtttacattccaaatatacaagccaagtgttaaatggcattgagattcatcatactccaaagatatcagcagattgagctacaaaatcatctagcagatgggactaggctgccatttgacaaatcagggctctcaatttcaagaaagctagcaagcaaagttttcctggaagattgtcccctggaactaccacaagctaactttgcattgccctcatcccctttctctatcttcattgcatcttgtatagccaaaatgatttcctgcatcttgggccgggagtatccatgctgttcgacacattgaatagccacttctgcaatcctccagattgactctattttcacatttcctaccagaaatggatctacaatgcttattacatcgcctttgcgtattaaggatcttgcccagtgaacaatgttcagttcaggaccaaaatcttctactgataccggtttctttccagagataagttccagaagaacaaccccgaaactataaa

SEQ ID NO: 8025 - DNA, 574 bp, Gossypium hirsutum
  Clone ID: LIB3828-004-Q1-N6-D11
acacaaacattaattggtattttacattatccaatcatagtacatcatcaaatcaacaagtccaaggtttaatgaaaaacttacaccaccgcaaactatgtttgctttatttaggctaccactgccatacacaatcatacatgccaaacgggcttagtagaaactataacatacaagaaacatggttctgtttgtggaatgccagttcctactgcagaacaacgcattcttgtgtcccacccaccatagcgcggtgggaggttttggtgatggcgctttcttcttcagtggattcagctttagtatcgggctccttaggcagactcttagcagcatgttcaatgccatctttgccactggcaatgacttcaaagatgagtgcattcacttcccggaacctctcatcagagagagaaacctcagccaggagcctccaagcattttcatcagacgcctcatcatagtccttcctcctttttaacaccatatgcccactaatttcccacacagctgggttcacctgggtatccagaagctctggactcacttccccgagagcttgtttctcagcata

SEQ ID NO: 8026 - DNA, 445 bp, Gossypium hirsutum
  Clone ID: LIB3828-004-Q1-N6-D12
aagagttgaatatagtattattattattataaaaataggacaaagttgttcagattaatcaataatcgacaacattatttcaaataatgataataaaagaagactaatggcgatggttttggaagattaaactccaggggtcatatcgggatcaaagggaacaccagtttgtgccagccattcgtcggattgcaaaaatacgcgaggagtccatttcatggcttcatccatatcgattttcttgatagctttccatgtgaccctgccctcggtgttggcaccgggtcccctattttggaactcggcaaagtaaccagtgtccagtcctacagtgccttccatgggggagtaaccctctggggtaatgatgtcatcgatttgacattgcattatgatagttgtcgcaaattggttccagggacgaccaaggtacgtgttattcttg

SEQ ID NO: 8027 - DNA, 563 bp, Gossypium hirsutum
  unsure (1)..(563): unsure at all n locations; Clone ID: LIB3828-004-Q1-N6-D8
atcataaaacgatgctcaaaaccagcaataatatgtgatgataaaacaaatggtcaaaacactaaataaactctcaaaatcaatccaaaataacagaaacccagatctcaaaaccttaactttgtgaaaaaccacctgtttttcccagtcttaaacctctcctcgagcttctgcttggtagccttgcaagcagagactttcttgtccttgctttggagggagtcgacggtgaccacatccttcaagtccacatccaaggtgtaacgcgtcggcatcacgtgctggtaattgacgagcttgaggaagcatttcacgcgggatttcttggccgttttcttggaagagtcctttcggataactttgcttgggtatttcttaatccctgcaaccaaacagtgaccgtaagggcggtcgcgggttccttcgtcgaaggatttgacgatcaccgccttacgaccggcgtagcgaccctgaaggacaaccaccgccttgtttggcttcaggaacttcaccattgttgctgctgttgctcctcactgtccgcttttctttgntggtttcgt

SEQ ID NO: 8028 - DNA, 588 bp, Gossypium hirsutum
  Clone ID: LIB3828-004-Q1-N6-D9
aatagaataatttttttttataaaaatatatatatttcaattaagtggatctgaagaagacaccaacaaatatataatgacgaaaaagacagataaaattgcaagtctagcaaatcacttatgtaaaatattttatgaagatgcaaaaagaaaggtgcagctgttgtttgaatcatagattgaagtgtactcgctgtgtaactgcagtagaaacttgtcacctattattacagtcgttcatcacacaacttgataattctctgtaatcaaatttgttcgctgggagaacttcgggggaggagctccaccgcctctcaggggaatgatgttcacaaccttcaggtcactgtatgtactcgttgctgaaaaacggacagaaatggggaagaacacagatgaatctgctggaggcacaacaaactccattgatccactgcggttagagttatcaatgagaagtatggaccattctaagacagaatttctggagtcatatctccattcaccatcaatctgcctaacatttggggcctcccgaagagctgggagaggtacataaatcacaacgtttcgcagatcaaacatggc

SEQ ID NO: 8029 - DNA, 555 bp, Gossypium hirsutum
  Clone ID: LIB3828-004-Q1-N6-E10
acattaagggtttaagatgccatcatgagagatggatatgctgttgcaaattcagtttcaggacgaagcccactcgaagtagtggcagcgggcacctcggttgacagtccagtttccacaaccgaagaacacacttccttgcttcggtccgggctcccgaaccattcctttgctactcttcaccccacagaaacaataagggtggtaatggaataggggcatttgctgatcctttggcttgtgggggtgatgtggaaagaaggccatgttctcggggaccgggttccaaatcaatggaccatcactagcctgccacaacagtgagttcgtgatcacaaatttaaaacctttgcgcatcatgagggtaagtaagtgagcagtgtttttggcatcatcgaggccgcaatgggcacggccctgccaggctagaccggccatctcaactgcctccttcagattgcatctcatgccaccgtaaacctcacggaagggaacttttaagttaatccatcggttaaagtaaggaggtttacgaatcttcttgaaccggcactc

SEQ ID NO: 8030 - DNA, 434 bp, Gossypium hirsutum
  Clone ID: LIB3828-004-Q1-N6-E12
gaaaataaagcctatcttatttatggcagttaatggaaaaagctacatcaagcaacttcttgaaaaaacaccaaaacccagtagccatagaagcagcatagcataaaaaaaggagcctaaaaagaccagatgttgaggagggaaacacaattcaataagccctttttcaaagctgtccacagtcagcaatatacaacaggcttggaagtcctcccaccggtagaccccaccttctcaatcgctttaaccacatccatgccttcaactacctgtccgaacaccacgtgctttccgtccagccactccgtcttgggcgtgcagatgaagaattgagatccgtacggtccgggtccagcgttcgccatggaaaggatgccaggacccgggtgcttcttgaagaaggtctcgagcggggaacgtggggtgcatagatg

SEQ ID NO: 8031 - DNA, 581 bp, Gossypium hirsutum
  Clone ID: LIB3828-004-Q1-N6-E7
gtatctctaataacatattattacttttaattctataataagaaaataattacagattgcaacttccataataatgatgaatttttccttttattctcgaatcggagaaggatatataataataataataataataataataataataataataataataataataataaaagactaatggcgatggttttgaaagtttacactacagggaccatgtcagtataataaggaatgccggcttgtggaacccattggtcagatccaagaaagacgccaggggtccatttcttggcttcatttgtatcaattttcttgatagctggccatgtgaccctaccttcagttttggcaccaggtcccttgttttcaaactcagcaaagtaggcagtgtccaatcctttggtgccgtccatgggggcataaccctctggtgtaatgatgtcttcgattgtagattgcattatgatggctctcgccaagggtttccagggacgaccaaggtacgtcttactcttgtccttcaccggaaggtaatcaggggcacccgtgatggtacagttttgaagtacaagggctgagtc

SEQ ID NO: 8032 - DNA, 384 bp, Gossypium hirsutum
  Clone ID: LIB3828-004-Q1-N6-E8
ctcagtccaacacatcagtagcatatacaccacagggttttcaacattttatacaagaaatactagccaaattatacaatttagtattatagagaagttatataaagctctccaccattgtcaattcaaaactcataatcggtttcataactaatcaaaccaaatctacagcttttggttttttgttgtacaagagagagagggagagaacctgcgcactgggctaaaaaaattcttatgaatcaaaacttgcattaaatggcaacactgcagcatttaccagctaagtcactgtctctttttgagtcttacacctgttgcattgagctcgagatgcataattgggattgttgcattttgcacacatccaatctccactacgcc

SEQ ID NO: 8033 - DNA, 587 bp, Gossypium hirsutum
  Clone ID: LIB3828-004-Q1-N6-E9
aaaaacaagattattacttaaatttcattgatttaattaattatcgaatattttaaaaaaactcaaaaatttataaaaacaatttctcaagcaaaattttaacaagaaattgaaaaggtccccatattcatatctcaattgagccccaaagggattacatatataaatataacttatatatatatatagtaatcagtttacagtataaatataaagctccatgttcttcatctttaacctccggttatgcatttcttcatccatttatcaccttagtggagaatgtaagaaaacaaagaaacaatggaagccccgaccaatgatccaagaacaggcaaggtagcagcagcgacgctggagtctggtccaggtgctggaccagattcaggagaggagataggcccaggcccagtaccacttgcggaaggtgaagtagctggtgcactggcggccatgacggcgctcattgaggcagcggcaacaatgatggcgggggagatcttcttcatgtccatggggctatgaagggattattaaacgtaaaggaaatgaagaagactgcttttatttaaaggcgaatggggttt

SEQ ID NO: 8034 - DNA, 579 bp, Gossypium hirsutum
  Clone ID: LIB3828-004-Q1-N6-F10
aaataatacaactcatagctaatgtaccttattgctaaataaacagcagtttcatcaagttgaaacaacatcaattacccaaaaaaaacttccgagatagaagccatagcttaggtttatataattggtaatagaatttgtaagaaaaaaagttatagaagtcctctaaacgtagaaataacggagcaattcacataacaaatagcagacaacatcatatttcatatgcaaataaatccaaaccaacacactagacatcctcctcatcctcctgatacatcttcatcatctcagcacagcctgcttcaggctcgtcaaccatgaagcccatggcattggcataacgggtggtggatgaaatgccattgaagttggtcaagataacacgggcacgttcacgaccgggggacattgtggcacaaccaagctgggagctcttcacaagaactgcatcacagatctgatccaagtgatcctcggatacacgaatctggtattttccggttttgtcggtgtatccctcctttttgaagacaacttggccgctcttcctgtcggagcataccaacctaaccatgg

SEQ ID NO: 8035 - DNA, 578 bp, Gossypium hirsutum
  Clone ID: LIB3828-004-Q1-N6-F11
tttttttttttttttttttttttttttttttttttttttttttttttttttttttttttttttttttttttttttttttttttttttttttttttttttttttttttttttttttttttttttttttttttgggggaaaaaatagggggaaaaacattcttttttaaaaaaggggaaaaagcgattttaaaaagggtaaaaaagggaaaaaaaagggggaaaaaaaaaaaggtcaaaaaaaacccccccaaaaaaaaaaaaacccccttccaccaaaaaaaaaatgggggggaaaaaaaaaaaaggacacttttccccccaaaaaaaaaaaaaaaaaaaaaaaaaaaaaaaaaaaaaaaaaaaaaaaaaaaaaaaaaaacggggggggggaacagggaaacaaagggaaaaaaaaaaccccaaaaaaaacaaaaaaatttttttccccaaaaaaaaaaagggggttaccccaaaaggggggctggctcacctggggggggggccccccctggagagaggagaaaccccccaaaaaaaacgcgttttgaaaaaaaaaaaagagggcgggggggggcgtt

SEQ ID NO: 8036 - DNA, 324 bp, Gossypium hirsutum
  Clone ID: LIB3828-004-Q1-N6-F12
agattgcaattaagtgatgcaaatttcatttttttttaaatatcccacacaagtaaaagaatgctatccgaatcagtactccaaactctcaaaacaaaactgaaagagaaaatttaacaaatctaaaaaactcaatacttgctttgaagcacaatcgcagggcaactcacttctttttctctccacctccagctgacctcatcttgcggagaacgctagacatctcctcacgcttcttcttggcccgcttgggagtgcctagctttctcttcgccaccttcaaagcacgcttatctttcccaactttgagaagttcagttatcc

SEQ ID NO: 8037 - DNA, 562 bp, Gossypium hirsutum
  Clone ID: LIB3828-004-Q1-N6-F7
gaaaaaaaaaccttccacttggaaaaaaatctgaatcaaagatggttaaaaatcgacataggctgacatccatatatctaactcccctaaatatttaaatatgaaacagtctaaacccgaggattgaacacccatttatggagtttcaaaacaatccaatctgaacaccagccgagcccggtggttagccctttatgagctcattccagcattagatcctttcgcacacaacaccttatttcaagacatggtgatcaccatgtactactgcgtttaattgtattacctcctgctacaaaacataaatgttggcttgagaaatcacctcctccccccccgggttaagaatcaatctatcttgattcatgtttaagaaaagaaactgcctgaactggttttgattatggagcagcaacctacgataccgatctatagcaagttctctttgcaggacggactatatattcgacctgaggcacagccattctctcgagatagctgcatatggcataggaacatcagctccggcgattctctcaaccggtgcatccgagaatgcaaa

SEQ ID NO: 8038 - DNA, 588 bp, Gossypium hirsutum
  Clone ID: LIB3828-004-Q1-N6-F8
gaaacaagcctttcaaatattaatttggagtaaatgtgagggcaaagcatccttttttgctttacaaaggtagggtaagttcataatgctacaactgacaccccttcttacttaatgtaaatatttattatttaaagcacatgaaagcttagctcacatgagaattgactgttccagaccctctctatgctaccaaataatccttcaaccatatatatatatttttatataaaagactatcaatgcatttacagtgtagcaatgaagatggcaaccaacctttcttgttcaagcttagctccagatgaagtttcacccagatcttgaaaatgactgggaaagaggttaaagctcgcaatgtatgcctccaaagggaatccgaagcctcttgtcttgatcaacagcacataacagccacttgctctcaactcgaataaagcacaaaaggcacaattagaaaaatagctatcagtaaagcaagtgtaagttgcaatgagcaactaaattgcaagtgcaccggactttggagatgtctcaataacccactgatccagccaaagcgctgatagaataaattaaaagcacctt

SEQ ID NO: 8039 - DNA, 353 bp, Gossypium hirsutum
  Clone ID: LIB3828-004-Q1-N6-F9
tttttttttttttttttttttttttttttttttttttttttttttttttttttttttttttttttttttttttttttttttttttttttttttttttttttttttttttattttttttttattttttttttttttttttttttttatttttttattttaaaaaaaaaaaaaaaaaattataaaaaaataaatgtaaaaaaaaaaaaaaaaaaaaaaaccaaaaaaaaaaccaaaaaaaaaaacaactgaccaaaaaaaaaaaacaaatcaggatagaccaaaaaaaaaaaaaaaataaaaaataagaaagaatgggagaaccacacaaaaaaaacaaaaaaaaaggtggaacg

SEQ ID NO: 8040 - DNA, 571 bp, Gossypium hirsutum
  unsure (1)..(571): unsure at all n locations; Clone ID: LIB3828-004-Q1-N6-G10
gaatacaaacaaatggtccaaaatattttatttcattaaatacatttgngaactcaagctttctcaccctctctctccccatacaccagaattggatacagatttataagcttatttaaattaactgctgaaaggtggaggccttggcatgccttgcacgatgccgcaagtcaatacaccttccggcaagttgtactcatccttgagggatcggttaggggaaataacactagcataaagctgttgcccaaggtaatgcctgtcccatatctccgacctcaggttccacatcccgcagttgtcgaatgtcaataggattgctgaccaggagttggggaatacctgtatggtgtgtctgctcacggcgtcgagaagattgtagttcatcctcttctcagggctccatttcccaatgtccatgcccacggcaaagaatgagtagccagacaagtggtaagactgaatggcggtctcgggattctcgaagatgatttccacaaagtttctgtgtgtcatgttgaggacaataggtgccaaagttaccttagtgttgtcacttggtggctcatcg

SEQ ID NO: 8041 - DNA, 588 bp, Gossypium hirsutum
  Clone ID: LIB3828-004-Q1-N6-G11
aatagcaaatgaccagtatcgatccaaaaaaaaaaaaaaaaaaaaaaaaaaaaaaaaaaaaaaaaaaaaaaaaaaaaaaaaaaaagggcgggccgcccttttttttttttttttttggagtttaaatcaattttttaaaaagcaaatacttttgttacatacagctgaaaaaaggacctaaataatcctaacatcagatcagggtaataacaatccccaaaaattcctccgagtgatgtccggtaatagcaacagcaagctaaatccgattcccctaccgtaaatcctaaaacctattaaggcagatacaaaaagtctttaagtcctagccaccaggtaaaccctagccttcacaacaaaaccatttcctagcttgaacccagggctaactgggaatccaacaatctgacctgtaggtactcgcccaccaaatattttgccgacactttccatatagggtggatgaaactctgctccccgacttgcttcgaattggcttggggaagggtcaagtgagaaaagccagcaaatgaagcaaccaaattgccttgggcagccccaagaacttcccataaaactgactctttg

SEQ ID NO: 8042 - DNA, 441 bp, Gossypium hirsutum
  Clone ID: LIB3828-004-Q1-N6-G12
ccaataaatgtcattagctccaattttcaaggaatcagtcagtaacagattaaaactatataacaatgacatgacgattaaatcaaaatttgatcatataatcctcaaacacattacttggaacaaataacactaagaaaaagagagtttagggccgggtggggggggcgcgggaactcagtagtctactcataaatagttgaatttatgaaaatcaagaacttcaattcttctagtgccttccattacctttgttttatgttgtcaaaaaaaaaaatcatctggtcactttctcagtcaattatgaagaaccaaatcatggtttcgccgcggcacctgcaccaccttgacggccacctcttccattctgattaactcgctgatagttatctccattccaaccacctaaaccctttggtgcggcctgaaaactccccctgg

SEQ ID NO: 8043 - DNA, 585 bp, Gossypium hirsutum
  Clone ID: LIB3828-004-Q1-N6-G7
gatataaatataaaaattttctattaaaattctttaactttaaaactaaatataaaaattaatgaatttaaatttaatacataaacattgattcaatatgtaatttaatacataaaaaacacacacacagacacactcataaagtattacttgaaaagaatgccaaatcatcatcaactctcattaatcaaaggaaaaagatcagaaaagaagaagaaacaatatacaacagagggctggttcaagcttagatgaagccaaagtattgcaatgcctgcatataacttagagaagtcctttgctgctttcaattcaaccgccagagaatccaaaacactagaatagaaagccaaatatgcacctgagttttagcactaatccatgagtcttcccatacatatatgccatgattgcggacaagcacagcagttgttttaggataggcttcaatagctttagcaagagaatcaataagctcgttttcataagccgtgttctcgataattgggttcacaagttcatcgtagtaaccatgtccttggattccttttatcatttccatatgagtgatagtcaacaataact

SEQ ID NO: 8044 - DNA, 575 bp, Gossypium hirsutum
  Clone ID: LIB3828-004-Q1-N6-G8
ataaaaatgatattattttataattaacaaaagtacaaccaacaatcaagcaaaattacatcctttacaaaaaaaaaaaaccttttttaatctaattatctgaattgctcgtatatctcgatatttagcatcgaatttcacaattattttctagggacctccaactatcattacataaccataaatttcaacagctttcatttcttacattattgtcctcaacacatgcagcaattgtgtcatgaatacttttaatcaaagcttcaatctaattccacgcctagcttatttcaatcactttaaactcatctttatcaacaatccgtagtactttcccaagcatttctcctttcaatcttaacatatattgaaccataatctagacttactttcctggtgggagctcgatgcatggagaataagatgatcaagatttctttttctctttcttttggggaacagaaagatgaaccaattctttcatcttttataattaaattcaataatcctttaatgcccacatacttagtctaaattgatggatagaatcgagcttatccactaagcttgctttt

SEQ ID NO: 8045 - DNA, 554 bp, Gossypium hirsutum
  Clone ID: LIB3828-004-Q1-N6-G9
aaagagtataatatataatatatagtttaactctgagagcaacctatgacccgatagagtcacatgatgaatccaggataaggataatgttatttaggtaaatgcttatacattaaacatagatatcaagtagattaattagataaatcgccaaatatcttctaggactttgattgagttgggaccttcagaggctgaaatccatgcttgagacatgcttcccaaactttgtcaatgttagacatggtgtaaccacattcgtgctcttcccatccttccagagcatgcagtatcccagctatgcgccatacgctcatcactctccttggcaaccagttctcgcaagaatccacattctcaagggccgtcggagtctgcatcgctggtgttgtgtgatagaagcagtccttgcgcaatttttttggtggaagttgcgaaaagggaataaatagtgttcctttatttgcctttctttgctcttcttcggtcaagtcatctccaactaaccataccttgcaagagctataactcttagaggtaaccaatttaccctc

SEQ ID NO: 8046 - DNA, 535 bp, Gossypium hirsutum
  Clone ID: LIB3828-004-Q1-N6-H11
gaaggaattcaactaaaattgacacgggaaaaagcaaacacacaatccgtatgcagatgacagtctcaaccaaatgaacacacatcaaaattggtctaaaaaactgcaagtaccaaactacaaagataaccaaaatcaaaaggctctgatactatcaaatgcaatctcatttcttcttggcagcagatttggtgaccttagcacccgttgggtccttcttctcaacgctcttgatgacaccaacagccacagtctgacgcatgtccctgacagcaaaccgtccaagtggtgggtactcagagaaagtctccacaaccataggcttggtgggaaccatctttatcatccctgcatcaccattcttcaagaacttgggctccttctcaagctcctttccagatcgcctgtcgatcttggtcagcaattcggaaaatttcacagcaatgtgggaggtatggcagtcaaggactggggcatatccgtttccaatctgcccagggtggttcatgatgatgacctgagaggtgaagctggc

SEQ ID NO: 8047 - DNA, 488 bp, Gossypium hirsutum
  Clone ID: LIB3828-004-Q1-N6-H12
gccaaatagttaataacataacataaaacttcaaaaagtcttaacagttatgttttttttaatacaatttcctacttttaagttggaattgttcattggttttgtgccatgtattaatgcaagttatgctttatatatgattagaacattagctatacaacatacatctaaaacactaaactctaccaaccttcatctctttcgtaacggcacctggggctactgcacgttctgcattgcgcggttttcgtgcggggggtcagcataaacctgtccttgctctctcacatctctaaacatggaaagaaacgaactaagaccttcagacgaagcacctcccaagatccataataataatgaactgaatgaactcatagttctgggattaggtccagcttcagcttgctgtagatcgggtcagcataaacctgtccttgctctctcacatctctaaacatggaaagaaacgaactaagaccttcagacga

SEQ ID NO: 8048 - DNA, 577 bp, Gossypium hirsutum
  Clone ID: LIB3828-004-Q1-N6-H7
gtgctaaaaatattatttcttatttatgagtagaaaaaaacgatgagtaattttaagtattgtgtaaagaaatagatatgatcataatctataacgaaattgttcaagataaaaacctttcactctcacttccacaatactaaaaacacacacaaaaacactcttcactttatgacataattaacagcttttttttggtttaatatttctttgtctataactcaatgagcagagcagcaaatgttatttgataccatttaaacagctaagctataaaactaagctaagctctttaaagcaatctcgaatacgttctctgataatccattggcagacattatcgtctccagttgttgcttggctagtgtttgacggctttcatcgaaacgcctccaccttgagaaggctgacaccatgcgagaggccacctgaggatttagcttgtcaagttgtagtactatttcacccaagaacttgtagccggaaccatccttggcatggaaattcacaggagatccacaaaatcctccgataagtgagtacaccttgttttggattacgaaagtcaaatgctgga

SEQ ID NO: 8049 - DNA, 544 bp, Gossypium hirsutum
  Clone ID: LIB3828-004-Q1-N6-H8
ggaagaaaattgcagccattaaccatacaagataaagcatatcgagtttacaacttggattatgttaaaaggggctcagatgatataagacaacagttttgtatgattaaatgaaacagggcgaagagttagatggtaggaaccctgatacagccacgtcaaatgcagcgtaagatctgaaatatatattacattcttttacagacagaaacttgagtgctgaccttacagagctttatcatcagatacctatgccattttagattccggtgcttgccttcccatctacacatatgctggcaagctcacatacttgggacatgaggtctttgaagccaaacagttccgaggcttgaaatccttaaagaagcatagacgaattttctccacagcttgttttgagcaaatcacttgtggtgttgcccggaaagaattctcaatggaagaaacaatgcctccaagaggataccttttactattaaaaggaacatatacagcttcattcaatattttcgagacattatatttgaagtaaacattgagg

SEQ ID NO: 8050 - DNA, 587 bp, Gossypium hirsutum
  Clone ID: LIB3828-004-Q1-N6-H9
gtaaaggtcgacgcgttaatcaacagtaatgagagaatatggaagagagataaacaatatcttttcaacagatgatgctaggaaaatcctccgtattcctttagcacgcacacctcacgatgatctcttggtctggggaggagagtattcaggtgagttttcggtccgcagcgcctataaactattacaaactttggaggaaattcctagagcttacgctttacaaatcggctatacgaatttctacaaaaaaactctggctcctaaatctaccaaacaaaattaaggttacaatatggagaatctcatggaattatctgccgacgagggctaatatgcagcaccatcagattgtcagtaatacaaattaccctcggtgtggtgaaagagctgacatagtcgaccatgtttttcgtgaatgtcctggatttttgagcagttctccccgtaccagaggcgcatcttcagttgtggactgtgggctatcataaatctacctcaggggttgtggtcagaaatgaagaaggcttgtcctattttcctgctcagagatccatcacggggtattttctgcttttgcaactgac

SEQ ID NO: 8051 - DNA, 520 bp, Gossypium hirsutum
  Clone ID: LIB3828-005-Q1-N6-A10
agcaaagaaaacatatatattagcatgtacatgcattaattacatatggctacaaaacaagattcaaggaactttaggatattgtaaatcaaatattgttttgagctatttattcttcataattactctttttatccaacaggattttatagcaagcccttctgcaacatcattacttcttattttgtataattaatacgacgacaaccaactcttcctcattatttcatcttaatatggtatcatctccctactttggtggactgggttcactgtccataacctcttctatccctttgctctttacagtttcagcctggcaacatcctgatgcgcacctgggctgaccacactcagcacaagtcccaccgcaaccctgacggcaacactccccactctcacatcccgactgtcctggcattagtgggatttgtgggacttgtgggatctgtgggattagtggaatttgtgggatttgtgggatctgtgggatctgtggaattcttgggatttctggaat

SEQ ID NO: 8052 - DNA, 574 bp, Gossypium hirsutum
  Clone ID: LIB3828-005-Q1-N6-A11
gaataattgtaactacccattaatagaagactgttctttgttctcgacctcgacttcctcagttacataatgtcaaacaaatctgaaaacaagctgaaatgtacaatggacaagaagacaaaacgaccccgcattagcccgtttctcactgtctgttacctaacaaagcttcacgtgaatccccgacagtctcagatgactaccaaaaaaattagtaagaggcagcaaccggcaaaaaccacattgtcacccaccgccgctacccaaatagtaaacccaaaatgatagggggcagaaccgggaacgtaaaagacgcccacgacggtggtgactttggtgaggacgactgagccttctcgaactgaagagaatcaactgctaagggcatgttctcttgatcagggctgcacttagactcgtgagggtgcgcactgtacattatggccctcagcacggctgaaacggtaggtatgtaggccgttttgttgcgtgcaagaagccatgtcagccccatgagctggcagtctcggttgaacatcttgctggctctgtcggtggggctcttgtcttgcgt

SEQ ID NO: 8053 - DNA, 508 bp, Gossypium hirsutum
  Clone ID: LIB3828-005-Q1-N6-A12
gagcactcgtcaagcagtcatatccattcatttaaaggcaactaggttttcagttactgataatcaatcaatgtccagtcaattgaaagaaatcttgggcaagcacagcacagttgggatagcaaactataaccatgtccaattcggctcccgaggccagaaactgacataataaaccaaaataaataatgaaactaatataccaatgcgatggcaaggattgcactcacaacaatccacgggtgaaattagaatataaatacataatttgagtctggaccaccagattactgaagcctctcaaaagagagaccaccatctcctacccctgctgcccctttggtttagtgatgatgcatttgcaacctgaatttgatgctggccccatgacggtattgatcctcttcttccaattagtggcttgcctaaccataagataagaacaacaccaataataccagcaacgggagcagcagcacggaaaagccagtctctaccaatcctccct

SEQ ID NO: 8054 - DNA, 582 bp, Gossypium hirsutum
  Clone ID: LIB3828-005-Q1-N6-A7
cactgagccaatccttgttttatggtcatatttgcttacggttttctgcaaaagtagggcccaaattttgcccgggcccaaaagcacaaacaaaaaataaaccaaataataaaaacccaaatataaaattataacagtccagtattacaagcccactaaacgtcagtccaaaaacacctaaccctagtccgatagcccaaaacaatttcaacacaaaaaatcagcagcaaaccctaaatcccctggcgccgcaagctcccatgcgtggcctcctcccacgcgcacctccgcacgtacgccgccctccacgtcaccgtacggcctccgtacacctgcagaaaatcaacacgcaaagagcgcaacaaacgagcaaaagacaagcagaaacagcacaacaaaaggagaaaaaaaattgtaatagcgaagaaaaaacagaaagaggggcgatttttgtatttttcttttggctatataaagccataacgaaatctgtaaaatgatgaaaaaaaagagaaataaaaagatcgattttaaggtgattctttttctttgcgtttttctgttctttcatttttttatttt

SEQ ID NO: 8055 - DNA, 513 bp, Gossypium hirsutum
  Clone ID: LIB3828-005-Q1-N6-A8
acaaaaactgaatatactagttatacatcaggtaagaatcatatgatcgaaaagttgagaattcatatttaaccttatcataaaggtagcaacttcaagaattaactgaaacttatgcgtccttggaaataatatgtgaacccacacttatatattatcgacgttgaaaaagaaaatctagtaataattagagaaaagaagaaaagcttgtcctacaataatggaaaagagaaagtgtacgagaaattatgatgggcatagaatagaaattgcttcattttaagcagtgaaccgacggcaacgggttaagacgctgcaccctctagtgtatggattagcaacttcaccaatgccacaattatagtaggatcgacctggttgattgcatggaacagcattcatccttaaggcggcgtagctaatgtactttcttgcgcttaattctctgcggggtatatccaaattggtttcttccaggcacttgccggggtgaccatgacatatttggtcact

SEQ ID NO: 8056 - DNA, 328 bp, Gossypium hirsutum
  Clone ID: LIB3828-005-Q1-N6-B10
aaaaaaaaaaaaaaaaaactaatgggtttaaaagggcccgacggtttcgggtaaaaaaaagagggccctcacaccaggaggggggtatcaagagggctgggaaagaaaagcaaacaggcgagggcccgcttaaaaaattttaatttaaaaaaaaactcggccacaaaagagcggggttggggtacggggacaacagcgaattgttggcaaaaaaaaaaaacaagaaagggggggcgcttttggtgcaccgttactgccaaaaaagggaaaaacagccccccccccaaaggggggctctttaaaaaacaccgcctttgaggtaaaggcc

SEQ ID NO: 8057 - DNA, 573 bp, Gossypium hirsutum
  unsure (1)..(573): unsure at all n locations; Clone ID: LIB3828-005-Q1-N6-B11
aaactcaaggcattgcaatccgatagccgggtacatttcaagttgaacacaaatccatcttgtgagggagagagtcctcgaccgaaacaaaaacacaatttttgaagaaattcaccaacaatacaactttaaacaatactttnacagacaatagaaatgggagcagctggtttgagatgctccattaatctaatcctacgatcatacttctattcccacatcattgctccaaaaaaattgagttgaatgccacaaggaaagaatcttaaatgactgaagaactagcaaagctacgaaaaaaaaaactaaaaatcccaaacacattaaaactttctgaattcaaacgaatagtacctttcgatgtcaacaaggtcagtctatgaacaacccaacaaataggacagggcaaggtgtagatcagcaaaatttgtatcataatgttccattactttcaccggcagatattgaagggccttcagatttcaccaagtgtgaatctctgctactgatatcaagcccctgcaatcggccaagaggatcctgttgcatcatatccgcaaaggcatgtgggcc

SEQ ID NO: 8058 - DNA, 460 bp, Gossypium hirsutum
  Clone ID: LIB3828-005-Q1-N6-B12
attcgggaaaaaaacaaatcaattaatggcataaaatgagttttgggggagaaaatgatccagcgacaaagcagtaacagaggtctcttctcctccaggtacatatttcgtttatttatggaaaatgattgtttgttgtttcgttcatggatcagggataaggtgccaaaaagaagagaaaaaagcaagcattgaacaagtgctaaaatattgtcataaaacagaacaaaagcaatggcagagaacaataactcactataaacatcatgatttaaaaaaaaaaaaaaaaagcagacttagaagagcatatcgttacgaagactttacattacctggggatgaccatcttaaggaaactcacaggaggacaaaacagacccgaaactgtcaacctttaatggagttttgaggaaataccttcttgaatgaattccacgaaccgctgcgaggaaaaagtagg

SEQ ID NO: 8059 - DNA, 592 bp, Gossypium hirsutum
  Clone ID: LIB3828-005-Q1-N6-B7
agccgaactactcgtcaaatctattgcagtccatatagtcttgaacaaagcttagaagagtcgaagttcacacaatagaataagcaaaaacacacgataaaaggaaacaaatcattgggtagcaaaatgcaagccctccactcaaacattacttatttagtactcatcttcaccttcctcatcaccctcgcctgactcagcaccgacttcttcataatccttctcaagtgcagcaaggtcctcacgagcttccgagaattctccttcttccataccctcacccacgtaccagtgaacaaaggcacgcttggcatacatgagatcaaacttgtggtcaatgcgggagaacacctcagcaacgctggttgagttggaaatcatgcaaacggctctctggaccttagcaagatcaccaccaggaacgacagtcggtggctggtagttgataccacacttgaatccagttgggcaccagtcaacgaattgaatagttctcttggtcttgatggtggcaacagcagcattgacatccttgggcacaacatccccacggtacatcaaacagcaagccatatacttgccatggcgagga

SEQ ID NO: 8060 - DNA, 554 bp, Gossypium hirsutum
  Clone ID: LIB3828-005-Q1-N6-B8
aacagaaaaaagatcatatagttttattgccaaaaacaaaatgatgaatgaactagttcttacacactgctctctacacacttttttaatcctttgttttttacaacctaaattatcagcatttgcaagcacctaaatgttgctctaattttaaccatttttcttttaaaaaaaattgattaaaaaaatctggatatatatggccatcaatgcaaaaacaaagctccctggaaagagaagcagctaaataataatgtagtgatgctatccctttcacttcccaagattttgcaagaagtcttcttcaacccgcaaccttgtttgcttggatctgaaaaaaagcaaatgcaccaaggaaagcgggagttaaaacagttgaagacccattttgagcttgttttgtttccatttaggcaacttgtaaaattcaacttttttcatcccgaacttctccttgaactcggtggctgataggtaagtctctcgtttggtcacgtctatatcggtgacgggatctgttgatgatgttgtaagacgttcgtaagggtgtatcg

SEQ ID NO: 8061 - DNA, 564 bp, Gossypium hirsutum
  unsure (1)..(564): unsure at all n locations; Clone ID: LIB3828-005-Q1-N6-B9
gtgaatataatatacatatatatataacatatagatatgtccgtgtgtgtgtgtgtttgcagattacaagaaaaatgcacatgcaatgtgccggtcgaacttggctgataaagttttaaataggagccgaactaatggccaatctttattaaatattgcgttctaacagtgacgactagcattagttttgaacttctggaaaactgcgattaaccactgaaaagcctccatcaactgccaagttttggccactgatgtaaacggattcatcagaagcaagaaacaatacagcctccgaaatgtgtctagccttcaacacaatacctttcaagttgctcctagaacaagtattggcctctacttcactaggttccatatcgaaaattttacaagcaagaggcgtggccactccaaatggagaaacgcaattcactctgatcccgtaaccccctagctcactacatgctcctcgaacaagtcctacaacagcatgtttcgatgtcgtataaccaatcgttgcaattnctcctatacaagatgctacactcgcagtgcatatgatgg

SEQ ID NO: 8062 - DNA, 230 bp, Gossypium hirsutum
  unsure (1)..(230): unsure at all n locations; Clone ID: LIB3828-005-Q1-N6-C10
aggtacaggttttgngatggacctagaagagctgattttgctgcaatgttggagagcatcgactgacacttctcctgctgctgtttaaatctatctaacttctcttgtaatgccatcactcaagaccttcttaaccttcacaactctcaaatcccagagacaaaaagaaagaaaaatcaaagcttggtagctggtaagggctttcaacgagctttcggcttcaatttccg

SEQ ID NO: 8063 - DNA, 433 bp, Gossypium hirsutum
  Clone ID: LIB3828-005-Q1-N6-C11
accaaacagaagttgaaggcgtttgaacatcgaagttgacgattcataatagcgtccaaagacaaacttaaaatattaaaacaaagatctaatagctgtaacccatgaaagttcgaaaaccacatagctaataataatcccaaataagcttccacacacattatttaaagccaaaaaaggccaccaacaacggcaaacaatccttacttaaaaaccaccgcgaaggcgaaggacaagatgcagagtagactccttttggatattataatcagccaatggcctgccatcttcaagttgcttgccagcaaatatgagcctttgctgggctggggggatcccttccttgtcttgaatctttgccttaacattgtcaatggggtctgaactttcaacctctaaagtgatagtgtttacagtaaaagggttaacaaaa

SEQ ID NO: 8064 - DNA, 550 bp, Gossypium hirsutum
  Clone ID: LIB3828-005-Q1-N6-C12
aacataaaacagctggctgcattcaacataatcgggggaaaaaaccaaactattttaaacttacattcatgatggagctttgagtttactaaaatacactcttttttcctttttcttggcttggttgggggaacagaggaggcaaaacaaataagcataaactaagtcataaaatgggattttgcagtaataagaaactacgatgatatgagattgattccgatttcggttttgattcagattcagattcgaatttcacagtttatagaacttggccatacctggctcctactgtacaagcatctcagcagcatctcattatgtgtatgcaactttcgtcacgaaccaatcatatccagctgcttcgagttatttgcagcggcaacagtcactgctttgtcacaggataatgactaggtcacatcatgccaaataccggaatgtattggggttatctttgtccctctcaagatagtctccagtaatcaggggttttattcgctttttaatggccttgaagtccggcttgaacatgcgggccaattgctca

SEQ ID NO: 8065 - DNA, 584 bp, Gossypium hirsutum
  Clone ID: LIB3828-005-Q1-N6-C7
gctgttaaatcccacacttaagcagattgatacatgtaaaaagaaaagcttttgtgattagttgtgcccaaagcacacagaatagtctaaaacagtaccaccataaaaggagacaaattgccaccatcccattgatttgctaaatctcacgataagtagtgttgctgtatcctggctcgattttcatcccaccacatccttgcctgcatttctccaaacctttctcggctgcaatgcatcagtcatacatatcaagaagcaaaaattgatttctttttattactattaacacttgaatcaaatattaagctctcttctactgtttgcaaatggagccgtcgagaagcggaaaaattggactcctggctcttcaaaaggaaaacaaactcatagcgggataagcagggtcagggaggtgaggggatcagcatccaactcatactagcaataatatggactaggtttttggatcatatgcactacacaagttggttgcactcccagagtaaccaaactaatctatctaatcgtttgctcctgtcagcattgttccatttcttcactcaaagcaaggaaggttgggg

SEQ ID NO: 8066 - DNA, 274 bp, Gossypium hirsutum
  Clone ID: LIB3828-005-Q1-N6-C8
agagcgctatattaccgtagaaaccaatactctttatttggtcatgccgtcgcccatgcaccggataagctgacttaaaaaaaagaaaatgggaaggtacaccccagctgagccgaagcgcgcatttgtacaggcacagaacactgggacggacaaagcctttctgagaagggtgcctgcgcaattgggggacctgaaaagaaagctttttaacgggaaaaggcaggggggctaagggggcaaaaatacctagccgcccgcttggattatggcc

SEQ ID NO: 8067 - DNA, 589 bp, Gossypium hirsutum
  Clone ID: LIB3828-005-Q1-N6-C9
aaatgaagaaatttcgaaagatatatattagcaaattaatatttgaatatacaaatgcctagcaataaaacaaaacaaaataaaaagataccatctaaattgtgagatatgtacttatcatagttgttgcagttggatccttgagcaagtgcctaataagcaacattttcatatccattggtgctgtaacgaacatagaaaaggcaaatacgacgagatcgatcgaagaaagagtcgaaccgagaaacccttgccacatccaacttggcaaacggaagaatatgcggaagaatgttcgactgccttcggtatccagctgcaataggagtgctaaccctaagagaaagaatgacctttgccgtttcctttcttgtggccaaagagtattccaagcttcaattgacatattccaattatttcttttaaaagtaagaaagcctttcgaataatctctcttgaggattttctcaatcacggaagcgtaattcggagcctcagataatgatctggcaattgaataaccagtagcaggatgcaccatgcttgcggcagcaccgaatgcaaggttcttctgtttcatgttcggcaa

SEQ ID NO: 8068 - DNA, 565 bp, Gossypium hirsutum
  Clone ID: LIB3828-005-Q1-N6-D10
gaatcacaaaaaacttgaacattttattgcaatactacaagtcacaaaccaaacaagtttatgaaatcaaatcaataaacaaataaagttggattcctataaacctcgaaaagaacagtataaacatgcacatcgaaatcagtagtaatattggtaaactgcatatcagaatgcaaatacaatacatattcattggtgcttctgcctgagagaatttaaatgtgcggccaaagtatcataatcaggaagcttggggtgaacataacttggcctctcttcggttgaattttgaaccttcgaactttctgcgctacttgatgatacaatcattgggacagaagtagacggctgttcattttctgatgactttgaagatccatcagacgaattcgttttggtctgtggtgccaactgggagttttgaaagcttttcctgttatctgagttccttttatgagactgaagctccggtagtgcttcatcagcactacaactccttgaggaggaattcttctccccaccataatcggaaactaccgctggctacaaagacactgtagtttta

SEQ ID NO: 8069 - DNA, 416 bp, Gossypium hirsutum
  Clone ID: LIB3828-005-Q1-N6-D12
caaaaattattaattaatgaaaaaaggggggtccaattcaaacaaacataaataataaagtaaacataaaaaaaattaaactattaatttcgacatcctaaccttatcctccataaaaaaaaagcatcccaagggcttacaatgcatcttgggaggcatcaatttgagtgttgatgctcttatcttgaataaccactttatgttccttccctgcaaatgccgaggcatttatttggttgttgttgttgatgatgatcttatttggcatttcttttggattttcctcttcaggggtggcactttccaagggattaatttggttgttgttgtggtcgaagccaatgaggttattttgcatctaattgggggtgtcaaccttccttgtgccttgggcatcaaattgttccccttggcta

SEQ ID NO: 8070 - DNA, 559 bp, Gossypium hirsutum
  Clone ID: LIB3828-005-Q1-N6-D7
gaacaaaaataaactcttcaatatttgaactcaaaatggaaaagggaaaaattcatacactgcaagtgggagttttcccattgaaccaaacttcaaactaggcagcaggagaagaaacgggatagagacaacatgggggtcactcccagaccgccaatccatccgggcagttaaaacttgtattacacccttccatataaaataacatcaagtatccaagtctactgaaaaatttgtccgatgtaggattcaatgcgagttcttgctccttttcttccccttatttttctctcttttacttggtggcttaggtctgtgtttagcaactctcttgaagggtttacttttgctcacaggtaaggcgagttttttatcaactttatctccgactgatctgagcatcgtagtttgagtctttgcactagtgaaatcttcttcctcatgagaaatctcactagtaatcacagtgactgtcatgtttccaccatcatacatagttgtcccagaaactgatgcacttggctctctttgttcatcatcttcgttgttctcatcaatt

SEQ ID NO: 8071 - DNA, 580 bp, Gossypium hirsutum
  Clone ID: LIB3828-005-Q1-N6-D8
attgaatcaatgaacttggatatatgatggatattattacataattttaacttgatatgatggaaattttctacataatggcaaatatcaacatcctaactattaataaaaataagactaaattctgcttcttattgacatttggctatttgttaaaatacaagccatgggaagggaaaataaaataaataaaataaaatggatggctagttatttccacccagcaaagaggtagacgagagtctgcttgaattagcaatactgtgaggatatgttgccggcatgaaaaagttgggaatgaatgaattatttaggtactgtcggaggaggaagcaaccatttggtaccttcaacgtagtcaagaaccaagaatggtttagcttccgcatccgatagttgtttgacgaatttctctcgtgtagcaggagtcgcgcctttccccgtgcatttgtattctccgtagtacacagtgtcggctcgttcaggttggcgattactagaccatccaccaggatggacgatttcgtccatttcagtataagaataaacaaccctcggactgctcttccaggccctgccc

SEQ ID NO: 8072 - DNA, 518 bp, Gossypium hirsutum
  Clone ID: LIB3828-005-Q1-N6-D9
gacaatgaaaaatgaaacttttattggcaatttcatatatagaaaacttatgtcacacgcatttaaacaggcaatatcggctttccttaccgaagttaacccatcaacctgggagattctcattctttctttaatctttccgacccaaaattacaaatgaaggggcaatttcttaaaaacttcatgctgaaagcaatggcttacaaaaacaatttgttaacctacaaaaccgaaagagccccgaaaatatctgtttcataggcattggttcagccacttagccaccctccgttattttggcttgcttgacttacgaataaatctatggaattcgccgggttttcctgttaatcatcactattaatatacaggatggcctcctttgctatttgcatctggcctttatcttttctgctatttgcttgggtccgatctggttgcccacccttttttaaaacaaatgcaagggataaaaaagctgcctcccattcatccggagaaaatgggctctgggcttg

SEQ ID NO: 8073 - DNA, 567 bp, Gossypium hirsutum
  Clone ID: LIB3828-005-Q1-N6-E10
atgcaattctgatataggttcaaagtaaaactaatttatgcaatgccatccttaattatcatacttgacatttggtactatcaatttctggatgtttttcaaaaaaattgtaagacatgaattctaatttcatctgtcaatcttgcttcaaggcctttgttatgtaggctcttattagtactattgctaaataagccaagactgtgacacttatacctccaagcagaaccactcggtcatatgcagcttcctggacggtgtatacccggagaccaatcgtattccaattgctctccgtccagacagggtccagcatccccataggatctgaggagttcggaggcagcactttccatgttccagagtccaacttcaagcgagttgaatatgccgggacgtacctggttgtggagttaacacaaatgcctttcccatcggtttctgctctaatgcacactccaccattgttgctacaatcctttgagcaaacagttgtagtgccctttggagttgatgttctatctgccagaaagttccacacgaacctggaaatgtcatccacctgat

SEQ ID NO: 8074 - DNA, 575 bp, Gossypium hirsutum
  Clone ID: LIB3828-005-Q1-N6-E11
aatagaaccagcttcagaatttttatttttcatctattacaaaatacaatacttggtggtggatttttctttctaatgttatttaggactttacatgcctatcctacgattcagattgtaatctattagactctctctacaagatctatggctagacagttttagaaaaaggaacaagaattcaccatctagtttcctcaaatgcaaaaactaaaccttgcttgcaagctctactcctgcatctccttcagatccactgtctttgccatggatttgaatcggcttatacgtatacagcttagcacaacagatgtagtaaataagattaaccacttgcaaggcagtgatcaaccagtaaaagtactccaatttgccctcgttcaagttgttatctggaagccaatttgatccatcagctcttgcgctgaatttgtgtactaaagaaaccagcagcgtgctcatgtaatttccgactgagattgcagtccaaaacagtgcggtagctgtgctcctcatgctttcaggtgcctgatcataaaagaatccaagtgtccaatcgacatgaatgcctctgc

SEQ ID NO: 8075 - DNA, 380 bp, Gossypium hirsutum
  Clone ID: LIB3828-005-Q1-N6-E12
atataacaaagaaaacatatatattagcatgcacatgcattaattacatatggctacaaaacaagattcaaggaactttaggatattgcaaatcgaatattgttttgagctatttattcttcataattactctttttgtccaagaggattttatagcaaacccttctgcaacatcattacttcttattttgtataattaataagacgacaaccaactcttcctcgttatttcatcttaatatggtatcatctctctactttgggggactgggttcactgtccataacctcttctatccctttgctctttacagtttcagcctggcaacatcctgatgcgcacctgggctgaccacactcaggacaagtcccaccacaacc

SEQ ID NO: 8076 - DNA, 489 bp, Gossypium hirsutum
  Clone ID: LIB3828-005-Q1-N6-E7
aaaaaaaccggaaaaaccccaaaaattataaaaaaaaaaaaaaaaaggggggggaaaatttggggttttcaaaaaaaaaaaaaaggggggggtttaggggttaaaaaaagggggggggaaagggaacccggggggggggggtttggccaaagggaagggggaccgaaaaagcaggggggaaaaaaaaagggaaataaaaaaggggggcctggacggaaaaaaaaaaaaaaaggggggggaaaaaaacaaaaacccctggaaaaaaagggaaaaaggggttttgggggcggcaaccaaggggggggggaaaaaagccaccaaaaaggtcaaaaaaggccctaagttgggaagggttaagggggaatgtttgtgggcccggggggggggggggagaaaacggggttcccgggaaagggggctaaaaaaagggggggggggggggctaaaaaaaagggggggagggggggggaaaaaacggggggggggggg

SEQ ID NO: 8077 - DNA, 428 bp, Gossypium hirsutum
  Clone ID: LIB3828-005-Q1-N6-E8
ccaacaaaaattgggggccatttttttttttttaaaaaaaaaaacagggttttcaaaaaaaaaatgaaaaccttttttttttgtttaaaaattccggcccccgggggcccccccgaaaattccgccccggcccctgggggccacccatttttcctttaagggggttttttaaaacctggggaaaaaaagggaaaaaccttttccctgggaaaaattttttccccccaaaaatccccaaaaaaaaacaccccgaaaaaaaaaagggaaaccccggggggcccaaaggggggcccccccccccattattgggggggcccccccccccccttttcaaagggaaaaacctttcgccccccttttttaaaaaaaccgcccaacccccggggaaaggggtttttttttttcgcccccaggggtttttttttttt

SEQ ID NO: 8078 - DNA, 600 bp, Gossypium hirsutum
  Clone ID: LIB3828-005-Q1-N6-E9
caagcttccaattccaaataaacacattcagaaacatgatttacatattcagacatattcataatacagagttaaagtttgttcttaactttttttcctagtaaagtctactacaaaacaatataattgacacataatatcatttctgaatcttcaagatcctgatcccaacacaatcattgaaaccttaatagcaacttgcatttagattcctccatccggaagaccactcaagtcacccgactcttgtttctctctccagattgcgtgcacctcatcagtacgaaaccgttgggtgaatgttgactcctcgagtggtgttgagtacccatgagcaaaggcaaggagacctgtatgtgctatcatcgctccattgtcgatgcagtacctgtcatcggttgcaaacaatctcccacctcgctcggaacacattattcgcatcatctcttgtaaccgctcattgcaacccacgccaccaacaataagaacatctttcgagtcacaatgagccattgctcgttccgtaatctccacgagcattgcaaatagagtttcctgaagggagtagcataaatccgcaggggtgcattcattattttt

SEQ ID NO: 8079 - DNA, 456 bp, Gossypium hirsutum
  Clone ID: LIB3828-005-Q1-N6-F10
aatgataattttcaatcaagcttactttaaatctcttttattcatgtaataataataaataaataaaaaacagctagcacattgtaattcaatcatatatcaagctgcttggttattctttattttctttctctttgtatagaatccgtagtttctataatctatatataaatctatgaagatttctatgaagattctggcgccatagcttgtatattcatggccttctttttccctaaaagaccattggcatcaagtttcatggtaaggtccttaatcgttcgtttgagttcatccatataagcaataccaccaccacacccattattgaacctgcggtaagggcatccgtaattgcaggcgccgcaaaagctgccgcccatgatatccacatcgtcgcagtcgatacagtaagggcttctttcataacctatacctatcccagcaccgaatccg

SEQ ID NO: 8080 - DNA, 531 bp, Gossypium hirsutum
  Clone ID: LIB3828-005-Q1-N6-F11
gggctgaaattgttattgaatctaaaataagcacaacacaacaaacaatagagtaaattgtagtcatgcgccttattacatgatcaagaagaaaactatttttatttatggaatctaaaatcatacatacaaccagcgaaaattgatgtataaaagattataatatgttattccacatcaaccatatgccattgggtgtccacctcatgggtttagaaactgaaaacaaaatcaagggttgattctctctgatgtccagtttttcactccattcatatcaagggtagatacaaacttaactctctcattattcttcaaattcaaataatcaacctgatcaggatcaagaacaagcagacaaaaagcagcaaccgggccaattgaaggatctaaacgaacttcctcctcactttggggctcacttatgcggggcagaccaggattaggtcccaagtattgtagccttgatttaacagagctagcaaaccaagatttctccctttgctggagtttgaagttgtcaggattgga

SEQ ID NO: 8081 - DNA, 151 bp, Gossypium hirsutum
  Clone ID: LIB3828-005-Q1-N6-F12
gagaagaaaaaaaagataaaaaaaaaaaaaaaaaaaaaaaaaaaaaaaaaaaaaaaaaaaaaaaaaaaaaaaaaaaaaaaaaaaaaaaaaaaaaaaaaaaaaaaaaaaaaaaaaaaaaagggggggagaagatgggggggggggggggggc

SEQ ID NO: 8082 - DNA, 563 bp, Gossypium hirsutum
  Clone ID: LIB3828-005-Q1-N6-F7
aaaaataggctcaaaaaagaacgccgttttcgaggagagccgaaggtagttcagtttccattccccaaactgttaaaaagcaaaaatcattcttttgacctttcttttttttcattggatctttatgagagggttgtagtttaaatctgtgccaaggtttcaggcaaaaaggaaataggatctttatctgaataccgtctgttaaccagttttttggaaattcggtttcggataattgaacaccattataagtgcatttaacatgcatttctcgattccaatccgttaaatcctcagaccactcaggaaattgaaataataacatacgggcaatgtttttaactattatcagtgaaggtaatataatatattttctaagaattgattgggttattaacacggagccccttattacttgagcaagtaaaagactatcccaagcttctgctatttctatcctcattttctcttctcttttgtatttttctcttttggcctcgtcttttttctcgatctttttttctgtataatcagaaatttttgattctttgtttttacatatc

SEQ ID NO: 8083 - DNA, 556 bp, Gossypium hirsutum
  Clone ID: LIB3828-005-Q1-N6-F8
aaaaacccaaaattaattaataaattgatgttcaaatcacatactaacgcaacatcattcgtacaataccccttccctttatttaataataatttaatatagcagcagctgccgccgctcacggccggaatcttgaatgacataaggtcatcgaccaccctgcgctgccgcttactcttttaaacatcttacttactactactactacttaattgacccattgaaaaacttttaaaaagaacgatatatatatttacatgcaaatcctgctccttcagtagcagcaaccttctgctagtggttttgctaccctccgccgccgtcagccatcgcccaatcagcggtgatgcttgctccgggtctccccgctgtaaagccagtcataaacagtaggagagttaggttgaggcttgtcgaaaacttcagcgccaatacctttggttgcaaggttgctacctggattgaacacgctcctccacacgttgtccctacgagccgacaccggcgtcgacggtgtcccaggtgtcgtcggactcgtcggcatcgccattgatga

SEQ ID NO: 8084 - DNA, 585 bp, Gossypium hirsutum
  Clone ID: LIB3828-005-Q1-N6-F9
atgggttgatacctaaacgtttatttggatgcaattgcatagtgttcacttaacaatttatttagcacttccctgaactcattttcttcggacagagaaggttcaggtttcacgtggtatggatatatttaaagtgtggaattgctaggtacaatgaacggagccggttagtagatgaaacccttggtcgaacaagaagtaaggacctggttttaagtccgacatcggtgaaatgcacgaacatgaaggcccccgtctatatgaagattgatcatcgtcctgtatgtcactgctctattctcatcactcaatttgaatacgaagcaacggagaagaacagctgagaaaatcttcatctgtctataggcaaagtccttacccagacacactcgaggccctgcctggaaagctgtaaacttgaaagggctttctgatcggaacatgccgttcttgtcgagccatctctcgggtctgaactcctctgcatcatcaccccaaatgaacttcattctacccattgcataaggttgataaacaatcaaatcatctttcctcacactaaaaccatctggcagagtatcatca

SEQ ID NO: 8085 - DNA, 571 bp, Gossypium hirsutum
  Clone ID: LIB3828-005-Q1-N6-G10
aaaccaaaaaacagcatgtattgcaataaaaaacagtttaatcacagcaaaagttaaatcattcatacaattcaaggccagggttttaatagatattggcactttggaagagttgaaaacatatgaatggtttgaatctgacaattgattcagtgtttaccagacttggctccaagaaatgtcgagtcgtattcaagctctgatatcgtatgcaagtgagaacgatacgctgttaaggatggaaactcatgccattagccaccaaagaactaacatatggtttcaacaaacttgacaggacatacaacaaataagcatattttcttccttacttcttaactaagaagtcctggattagttgtacgaattgctcatacctcgtgatccatggccatgaatgcagggtttgccgggtgcatatactaacaggcagatgctgaaagttattatccttatttaatcttatcttccgcatttgccatattgggtctcatttctatcatatcttccatttttccattaacaaaagctagcgattcaaagattagagggcataaatcctatcgacttc

SEQ ID NO: 8086 - DNA, 437 bp, Gossypium hirsutum
  unsure (1)..(437): unsure at all n locations; Clone ID: LIB3828-005-Q1-N6-G11
gngacgcataaaagaaaattactgacaatcattcagaaaagaaccaaatgtactatgcttgggtatcaaatattgtacgtaaaaaagggaggacaaatgcatataaaaatagcatttttagcaaggacggccgattgtgcagcttagtggtccggcatactttgtgagctcggggaccatttgaccaggtttgaaaggaatcattttgtcggcgccaaattgcttgctggcacttggattacctgatggtgtaaaaaagcaccgttctcgaagtggtcaccttgtgatacccaattccaattcttccactgtcccggttttaagaggcccctacaggtcacctctttagccccaaagcctggcgctgaatacctatttccctgaatgataattgaaggggtgctgtagccgccaatggtatacataaaccaatgatt

SEQ ID NO: 8087 - DNA, 244 bp, Gossypium hirsutum
  Clone ID: LIB3828-005-Q1-N6-G12
aagtgaatggaaacaacaacttcggaaccaataaattcaacatatatacatagatagataaaagattaaaaaaactgtttactaattagtaaaaatgacataattagaacaatgatatgataataagcatactaaggggggggggattgataataagctgtttagactccaaggaccatgtcgggactatagggaatgccgtaactcggaatccaattctcccattgaagatttacgctaggag

SEQ ID NO: 8088 - DNA, 576 bp, Gossypium hirsutum
  Clone ID: LIB3828-005-Q1-N6-G7
gaaatcgcaataactttatttaaagatttaaaaatataaagaagaccgtctctaaatactgcatttactccatctaatgaatgcaaaatttcaatgaaattggtttcttcctaaggaaacaaaaatgaactcttttcttaagcccccaaaggcccaaccaataacagaaatcaccaacatcattcattgcttggctagagcgcaaaagatgaacatggaaccaagcaagacagtttttcttcatcatggcctgcaccacccaatttagttgctcaaaaatccccgtttggttcatttcaatacaacaacagatgcatgatgtgtggtgatagatatatcagatcatttttactcctcagcaatgtcttcagctttccagaccacatctttcaatcccgatgaaaattgtttgtagaacttgtgaaactccaatgtgtcacccccggttttccggagctctatcatatgtaagcagggagccacctcaaacacctcggtggccactgaaagttggccctttctcccacttttgtcacctttcaacttcatcttgtagttttgcttgtgaacgttaaa

SEQ ID NO: 8089 - DNA, 524 bp, Gossypium hirsutum
  Clone ID: LIB3828-005-Q1-N6-G8
gaaagttaaaaataagttgatattttatttagtggaatcaaattacaaggggttgatttatacataattttatgaaatccatcattaggggttttttattcattctccatactcttgcttttcacatttcccagctctctcttcatatcttggaacaatcagtagcgggggtgatgggaggaaagaaattcttgataccacatttctggccaagaagaggcactcgattagggtcaaatggcccaagtagtggcaatattgctttcaagcacaggcatagttctatcctatcttctttggcctttagttcgttaataagacgtttagcaccaacacaacattccggtgccggatcggctccgccttttatgaagccctcgcaggggcttaagtaaaagataaccacatcgcacaatggtgatgctgctgcagtttctgtaatatcccgactaaaattaaggaacaccagcatggctataaagttgattgagcgaaacatggtggccaatcactttttcttttcg

SEQ ID NO: 8090 - DNA, 580 bp, Gossypium hirsutum
  Clone ID: LIB3828-005-Q1-N6-G9
ggaactgcaacctagtttattattggggcatttcaattacaaaatgcacttcacttagttataaccaaacaaagagatattgtgaagtacaagagtaacataacctaaaaacaactagcttaatgtattgtaaccccaaaacattttaccagacaccaacctccatgaacccatcctcagtggcacagcccctgaacatcccggtggtgttaaacccacaagcaacctcaccgttctttgaaacagcaatcagcccagctttgccttcatccaacctattgttgatcacaaaatccacagcctcatgcaggttcaatcctttgtactccatcactgcgcctacttccctcgccaaggtgcttcggatgattgcttctccttccccagtgcatgacaccccacacaagtcacaagcgtaggttccggagccaataagcggggagtcaccaatccttccggtcatcttgttcatgagcccacctgtggaggtggcggcagcgcaccgaccctccttgtcaaccaccacgcagccaaccgtctctggggcgtagacgctgatggggagcccgttcatctgcaa

SEQ ID NO: 8091 - DNA, 561 bp, Gossypium hirsutum
  Clone ID: LIB3828-005-Q1-N6-H10
ataacaaagaaaacatatatattagcatgcacatgcattaattacatatggctacaaaacaagattcaaggaactttaggatattgcaaatcgaatattgttttgagctatttattcttcataattactctttttgtccaagaggattttatagcaaacccttctgcaacatcattacttcttattttgtataattaataagacgacaaccaactcttcctcgttatttcatcttaatatggtatcatctctctactttggtggactgggttcactgtccataacctcttctatccctttgctctttacagtttcagcctggcaacatcctgatgcgcacctgggctgaccacactcagcacaagtcccaccacaaccctgacggcaacactctccactctcacatcccgactgtcctggcattagtgggatttttgggacttgtgggatctgtgggacttgtgggatctgtgggattagtggaatttgtgggatttgtgggatctgtgggatttgtgggatttctggaattcttgggatttctggaatttgaggaaatgg

SEQ ID NO: 8092 - DNA, 530 bp, Gossypium hirsutum
  Clone ID: LIB3828-005-Q1-N6-H11
gagctctcaaaaatctgggatttattagtagatgaaagtcccaaaaaatttataagctgacaccgaacaagattgtaaaaggaaagcaaaaaaagtaaactctcctgtcagttgcatgatgaaaaaatagaattaagaaacagttcctggggtttgcacaaagcaaatactcataacaattaaactcagatgaagcatccatcatcaatcacacttaaactcctctcatttggcctttgaatctcataaccatatcatgagcaccactctttggcattttggaacatttttaaccatggactagggcctttcttgtccacattccagtcctttggataccaagggaactgccacatcaggaaacaccgctctggatgaggcattatggcaagatgtcgaccatcaggagaacaaattgcagccactcctaatggaaaaccattcaagttgaaggggtatgcctctgttgggttcccatcatcggcgcaatatcttaatggagccaaatttgaatgtaatacacgatccaa

SEQ ID NO: 8093 - DNA, 420 bp, Gossypium hirsutum
  Clone ID: LIB3828-005-Q1-N6-H12
attataaatctatcatcattatatatatgagcttgcgcacttatctagaacagatcaaataaaagaaagaatttcataaaacagctagatgtgggaattattggggcatgtatatgaatgtgatacaatgtgctttgctttgtccaattctgagccacttgtttgaatcccagctgtgatttccattttctgctcaataatggagtcatatatcccttcaacacaccctgatgtcccataacacgaaagattgaagccccattttgggtcacaatcttatgggattgatggggatgtcattcaatcttccaggcataaaggaacaagcaaaattctgatgagccaccatggttaagcccttctaatgaaccactgctccctgtttgagatgacagtgatgatgatgatgatgataatggt

SEQ ID NO: 8094 - DNA, 577 bp, Gossypium hirsutum
  unsure (1)..(577): unsure at all n locations; Clone ID: LIB3828-005-Q1-N6-H7
acaatgggttcttctttcttagtttcttcacttttcttttcagccaaaacaataacctcatctccttcttcttcttcttcctttttcttttgcttttcagcttcaaccattgtttttgcctcaacaatgacatctgctttctttggggcctcctttggagcctcaacaatggcttcttccactttctttggcgcctcaacaatggcggcttcttctttaatctttggttcttcaacagttattgcctccaccttagtttcattgctcttttcttcattatcaagcaatgaaccaagagaattcggcttggtttcatcagcttccatcacgaccaccggttcgtcttttgtttcaaccggctgaacggattcttccttgaccggttctggtgcggggacggtggccggtgagttttcatctttcaaaacctttggtttagtagcacaagcacccattatctatttcttgatcttttacctttctctttcttgggatttttttatatatatatatgcagaagaaaggttgaaagaagaagaagaagatnatgggaggaagccaaaccccacgcgtccgc

SEQ ID NO: 8095 - DNA, 469 bp, Gossypium hirsutum
  Clone ID: LIB3828-005-Q1-N6-H8
attgaaaaatgttgtttgttttttttattgatcatcatactcaataaaaaaaataatgggttagtgatccattttgttggatacaatttcaagtgcctgttttataatcacttaagctgtttgtatagaattgattgtttaaagccaatgatgaagcttaagtgaaggaaagttggaaaaaacaaaacgcctcttttatggatagaaaggagcaaaaactaccactgaagggggtccaccaaatccaaatgaattggggtagggaacacagagtccatgcgagttcttaacatgggggaccggatataattgaaactgcagggtcggagtgatcttattaaacggaaggatgcagtcaatcactccaaatggcttttacggctgctatgggctacaatcctcaaatagctccaagtacatgtccaagaattgactttgtccgatgcatcaaaaacaaaaagggttgttg

SEQ ID NO: 8096 - DNA, 608 bp, Gossypium hirsutum
  Clone ID: LIB3828-005-Q1-N6-H9
tcgcgaactagaacctttgtatttttccatttatttcttctctcttagaaaaccccattcttgttcactcttcatcaatgccttgacagggataacaatggcgatgggactgttttattatggtcttcgagacacaacagcaacatattccaccaacttcctcaacataattcccattgtcacctttgttttctccatctttttacgaatggaaaagctgggattaggcagcaaagcaggcaaaatcaagactgtgggtgcaattatatgtgttggaggagcgctgacaacgagtctttataagggaaaagcgttctatctcacgcatgatcatcatccccattaccactcacctgctgttgctgctaccatggcagtctcgagtcctcactggactcgtggtactttcatgcttgttggtagttgcttgtgctatgctacttggtacatattgcaggtgaagttgctggaagtatttccgtcgagatatcgggcaacgctgataacatgcatcatggcgtccgtacaatcaacagccataggcctgtgtttagacaggaataaggctgctttgcagaatagagtgggaacttgcagctagttactat

SEQ ID NO: 8097 - DNA, 532 bp, Gossypium hirsutum
  Clone ID: LIB3828-006-Q1-N6-A10
agttcagaagcagaattattatgggaaaaaacattttccattataacttaaactacaacgaaatatcaagaaataaaagaaaagaaaaaattgaagatttttgaacaaccggtggttagccagttattggaaaaacaaaaatccctaagattttgggcaacaactatccttgagatttgccaagctcaacgtccttgagtagtgatgagccgtccacttgctttataagtacctttacatctgatgtagcatcttttcggtattgcattggcttatctccctcaactgcccaactatatattatcatcccattcacagctatgctcatccctagtatgtttttcaatgtcagctctgaatcaaacagcatccatcctaatatcaacacgcatactgttttcatgtgtcctagcacttggaaagacactgccgagaatcgtccaatgcacaggtactggcttatgttgcagaaaacagctaaggaacatgacagtactatgaaaaaaaagcagctgaggagatcttataactt

SEQ ID NO: 8098 - DNA, 476 bp, Gossypium hirsutum
  Clone ID: LIB3828-006-Q1-N6-A11
gggaaccaaagggggggttttgggggtattaaaacaggagcatggggggggggggacaacttggggggaacccagaaaaaacacccctttgggggggggggggttaatttagggggagggggcaccctggggggaaaagggggggcccggggggaaaaaaaaggggtttttgggggggaaaaaagcccccatgggtaaaccaaaaaggcctggggggggtttggccccacgttccatccttagggaacctttttaaccccattccggcccccagggggttttaaaaaaccaggactggggcccacccagggggggcccaaaccccagggggggtcccccggggggaagttttggcccaaatttcccgggggaacccccccggggggggaagggggaaaccaaacccccaaaaaaaaaagccactgaaaccggggggggtgcaaaactttaaagaaaagatcctccggggggggggg

SEQ ID NO: 8099 - DNA, 562 bp, Gossypium hirsutum
  Clone ID: LIB3828-006-Q1-N6-A12
agtcaccaaacaaaaacaattttcaatttcatcattaatattttcaacaattggtttttttaatcgcttttccattaaataattaaagaacgctgacatggcctattttattggcctaatcacaaacttttaataagttgttcctttaaaagtggaccatgtcgagaccaatggtcaaggggttgctaatgatctttccaagcattgcatccatctttttcatcggcgattcgagcttagcctgtttgaatgcattgtcacagcctagtatgttttccacattagcgcctagctctgtgctcaactggacaaggttaccattggagatagcttcaaaggatttctgatcactgttaaaaatgttattgtagacgtcgatgcatgtttgaaggatgggaacaacattcttaggtgtagtagggtccattgagagctttgtaacctcagctaatgcatctttggtctggttatccattgcttcaatcccagctttaaggacagaaagaggctcaataggagttttctcatctaggaatggcatagttgctattatacattcgac

SEQ ID NO: 8100 - DNA, 474 bp, Gossypium hirsutum
  Clone ID: LIB3828-006-Q1-N6-A7
gaggtgattgtacttggattatacaatatttattttaatacaaacactttgatagacattaaaatttctcccccttgttcatcgctatatttccctcctcctggcggtgcagaccaagtagataaagagaatcatggcaatggctcttgtgagtctcccaagcgagacaaatgaagatatgcatcagtcccatatccttccatggagataacttgaagatctcctccgaaaactttgcatacaagcggcttataggtattccataaccgtatcctgccattgttattctatcatctgttccaagatctgtatgctcatccaaggggtttttggcagtgctataaaggtaagtgaaaattttgggaagaccacttctttttatgccacccccctcatctgaaatctttatagttacatccttcgattcccctcggcaactatttattcgaacaggtgggtgcaacttttattctg

SEQ ID NO: 8101 - DNA, 556 bp, Gossypium hirsutum
  Clone ID: LIB3828-006-Q1-N6-A8
gaatataaacaaatggtccaaaacattttatttcattaaatccatttggaactcaagcttttctcaccctctctctctccccatattatgtatttataccagaattggatacagatttataagcttatttaaattaactgctgaaaggtggaggccttggcatgccttgcacgatgccgcaagtcaatacaccttccggtaagttgtactcatccttgagggatcggttaggggaaataacactagcataaagctgttgcccaaggtaatgcctgtcccatatctccgacctcaggttccacatcccgcagttgtcgaatgtcaataggattgctgaccaggagttggggaatacctgtatggtctgtctgctcacggcgtcaagaagattgtagttcatcctcttctcggggctccatttcccaacgtccatgcccacagcaaagaatgagtagccagacaagtggtaggattgaatggcggtctcgtgattctcgaagagatttccacaaagtttctgtgtgtcatgttgaggacaataggtgccaaagttacc

SEQ ID NO: 8102 - DNA, 530 bp, Gossypium hirsutum
  Clone ID: LIB3828-006-Q1-N6-A9
cgaccatgcctttctagattagacatcttcagaagttttactacaagttgctaaaccaaaactggaacaagctacacaattcttgcaagcataatgaacacaaatggacatgcaaaaagaaagacttaagagattcaataattcagcagggagtacttcactctcaaaacaattttgcctttctcaacaccaagctttccaccagtgaccaaccaatgacctggaggatcttgcggtcctttgctcatctcaaacatgtcgacaaattttgccaacttgtttacaatgtttccttccgagccagaactacccgcagtagccacaactttctttggtttgtcatctggagtgtgatcccaaaaagatcttcgtaccgtgcagcctggaatcctagaatacaacagcttcatgtataagacgtttcttgacccaaaatcccacactccaagttgtgctccagtgacaatgtagacaccagagaggtcacctatagaggattcagggttttcgattggtgcagtactaacatg

SEQ ID NO: 8103 - DNA, 580 bp, Gossypium hirsutum
  Clone ID: LIB3828-006-Q1-N6-B10
gcttgtgaacatcaaattcatttataacaaataaaagaattagaagacaatgaaacccctcgctttctctcaatgttcaagacgacaaaacaaatagatgaaataagaacggtagaacaaagcagagctgcactaatagcagtcattgctttctctttttgattattttctcccattgaactgtttagaaacatttgcggtgaacgattgacggaccggattcgtcgtactctgccttggcaatccacatttgttggaaggtgcttagggaagccaagatcgagccaccgatccagacactgtacttcctctcaggtggtgcaacaaccttgatcttcatgctgctgggtgctaatgaggagatctccttggtcatcctatcggagataccgggaaacatggttgtaccaccactgaggacgatgttaccgtacaagtctttcctaatatccacgtcgcacttcattatggagttgtatgttgtctcatgaatgcctgcagcttccataccgatcaaagatggttggaaaagcacttcagggcatctaaaacgttcagcaccgatggtaataatctgacc

SEQ ID NO: 8104 - DNA, 345 bp, Gossypium hirsutum
  Clone ID: LIB3828-006-Q1-N6-B11
cattgaatatatattataaggggaagagtatatatttgcattagggacatgcttacattttttaccaaaaaggaaaaaggggactaaaagcactacactaagaggaaggaaagttttgtgggagtaccaaacacattaaggttcacaagttggccggttggctggcttcttccatcttcaaaattgaaacggtcgcattgcgagtgacaaaacttactcaagctggcatgtcggtactgacaaaagctggaaaaaatcgatatagtaaggtggcaagatcaaatttgtgcatctatgaactgaccattctatggcacttgattgaatctttttataagtggtgtc

SEQ ID NO: 8105 - DNA, 221 bp, Gossypium hirsutum
  Clone ID: LIB3828-006-Q1-N6-B12
attaaaacattaatcgtttaaaaattataaaatgatttaaaatcacttgagttttacactgaaataattggatccttccccatattcggactcataaaaccactggctcgtgttggtaacactggttccctgggcaccttggcactgaagttgttcttggatgatggaatgctggagcaaaatatctacttgaagttgcgaaccccttctttgttataagg

SEQ ID NO: 8106 - DNA, 556 bp, Gossypium hirsutum
  Clone ID: LIB3828-006-Q1-N6-B7
attaagtccatgatttttgccaaaacaaaaacattgatgtctgggttcaacaaaggaacactacaaaacataaatagaaacaaacggtccacgactttgcgacttctctgtttaaacacatcaaggattactctcttatgcagaaacggcagtctctttaaagatattattagcaaaacacatctgtggatgaagacggccttgccattgcaacctgtatggaaactggctcccattccgccacatctttcctgcaatcactgttcttaactgcaacgatgtccaactggttcgcaccacccacagaaaccgatgattcctccatacctaatcgctttgctgctactgctttcaatcgatatcgttcggccctagatccgataacctgtcctaatacagacgctgcaatggtaaatgccatagctgtctttggcatcaacactgatttccggagcatggctatgaatggaacagctgcatggatagccacaaaccaagatggtgagaatttttcagtgtgttcccgccatatccctaacggaacatttgccgccat

SEQ ID NO: 8107 - DNA, 583 bp, Gossypium hirsutum
  Clone ID: LIB3828-006-Q1-N6-B8
gatcaaaaacttccatacataaatttaagcatagaaaattcgacatacattatggtatattagtatagaatacgagttgcaaatatcagactaatatataatctaatatgctcacaaggatggtccaaagctcacaaaatcaatgccacctactccaccttcatcatcaatacaaaaggggaagtaaatcaacacgagagggtagcctagtacatagaggttaacataattatgaagcctaagataagagatcccattgaagcagaaacaacttgagagcctgagctgccgggagatggtgccggtgctgcctcatttgctcctcctgagaatgctgccggcgcacctgctattgctgacggtgccatacctggtgcaccagtaggactgagagacaatgcacattgagtggcagaaggagcagagactttgcaagcagcaggcaaagtcatggccttggtgacattcaaagtgacacccagagaagcactgctcttaaaagcctcacacaagcattggggtccagctttcaacacagttttcaagccagaacaacaggttccttccggcttcgacgttttgc

SEQ ID NO: 8108 - DNA, 186 bp, Gossypium hirsutum
  Clone ID: LIB3828-006-Q1-N6-B9
actattaactaactgggtaaactcttgtataacaagacatggggagcatcaaatgttaaaaataaacaaaagtttggggaggtttagacgagggcaaagatagtcatgggaagagaaaagtgtcgtgccatgcaaatggtgggtgagggtcaagaaactcaggagggagggggtagagggatgcca

SEQ ID NO: 8109 - DNA, 511 bp, Gossypium hirsutum
  Clone ID: LIB3828-006-Q1-N6-C10
aatgggaaataattccgaacacttttttttattattcccaaaaagaaaacacctgaaaaccatcctaggggcttttcgagcaacaacggcctagcaattatgtttcgttcgagaatttattttttaaaaaaaaaacgaggttttttgggggggcaaaggtgggtggctctcgttcctactttgggaaccaaacggctttggtttagtcatcagcaaatcctagctcagagggccttaagggagcattagcgtaatcagcaaagaattcatcctcatcagcagcatatttttaaacgaagggacggaacactgggtcaaagacgaaaactttgtcggagggcagctgcataatatctgcccccgttccggataatagctccttgaaataaaaattatcgaaaataagggggtgggtagtccatgctccctaaaatccagaccggtccttagggcaccttcccagggtatgggcaccagaaggggcaacaatgtccttatcggaaaaacccat

SEQ ID NO: 8110 - DNA, 574 bp, Gossypium hirsutum
  Clone ID: LIB3828-006-Q1-N6-C11
gactcaaaaccgaattcgcatttcacaagaatctgatcattcagtcgccttcagaaactgtttaaaaaaaaagtcagaactcctaataacaaaattgaaattgagaagtaaataagctaacctaaacaaaaaagaaattaacttcaaatagttctttatagaacagtaaaaacaaaagcaggtaaacaagttcagtatttttcgaaatcagcatactacgttcaatcctcatcttcggaatccgcaccagcagcggcattaagggtgtgtaatcgatcaatcaacttagctttcctttcctcgtacgtcagcttcttcaagttgaacctcttgtgttgcttaggaggagccttttcagacttctttgcagagggatctgcacggatagcagcgtgaaccttcttgtacaaggactcaatgttatctgcttcgattcctctcttaatatactcgctgaagtgagactgatacttttctggctcgtcttccatcaaaatcctcatatatgcggctacgtgaccaccgtaaatgtagttgcggtgaacttcagcatcgagctgcttactatccttgg

SEQ ID NO: 8111 - DNA, 515 bp, Gossypium hirsutum
  Clone ID: LIB3828-006-Q1-N6-C12
gggttcaaaaacattaacaagagaacttttcataatgcttgatcaaaacgttaacataatcatttttgaaaacccaatctaatgactcccatacattttcttctaaaaggaaaatctttgaaacttctgctgaataaacaacatgatgttcactttaagaaacttcaactacaagcatactacaggtacttatcagtttaattccagcagagctttttgattgacctgctccaaacctgcataagggcttgtcagttgaagctgctgcacccatgatcttacctcaatgaaggcgttaacaaccattcctgcagcagagtaatcaaataacagttcctaggggttccagcctgaggagtccaagatcctaaagaagatgggccatcaaacatgggaccatgtccatgtctatcacccccataggaatacggaccccggcctacgttatggggacccatgtgacccatgccatgcaaaaagggggttggggaaccaccttttgggggggaccaaca

SEQ ID NO: 8112 - DNA, 434 bp, Gossypium hirsutum
  Clone ID: LIB3828-006-Q1-N6-C7
aatataatattcgatgaattgacgttcaaaattacatctggtaatttcagtcaaattcatactagtggatatacatacataagtaaacgcaaatagtttagcagctaagcttatgtcttaattagtagtaaattagaaagagagagatagttcttacaaatcacaaggcttgagctaagcacacaacatgatcgacgaaataccaacatgatcgacgaaatactccaaagaaagaaagatcttgtatagcatcatgagcaatcagccttacaacttttttttaattaaaaaaaatcgaagagtgactgctcatgatgttatatcatttttcatcaatgatgagatctcttgtgtttttaatcttttttctttttattttttttcatcttctaatagttctaaataaagcctagtaattctcctatcggaaaaat

SEQ ID NO: 8113 - DNA, 367 bp, Gossypium hirsutum
  Clone ID: LIB3828-006-Q1-N6-C8
ccaaaaccaaaaggaaaaaaaaaaaaaaacttccctttggggcccctaaaaaaaaaaagggggggggggccccggaaaaaaacctaaaaaaaaggaaaaaaaggggggggaaaaaaaaaaaaaacccccaaaattaaaaaaaaacccccccccccccaaaaaggttaagggttttgggggggggggccttgggggggaaaaaaaaaaaaaaacccccccgggggggaaaacccaaaaaaaaaaagcctaaaacccccccgggggaaaacaaaaaaaaaaaaaattccttgggaagggggggggaggggggcccctttaaagaaaaggggcaaaaaaaaaaaaacggggggggaaaattttttaaaaa

SEQ ID NO: 8114 - DNA, 548 bp, Gossypium hirsutum
  Clone ID: LIB3828-006-Q1-N6-C9
cgagcctccctcttctcctctttgactttctttttattctcttttctagcagctttcttgtcaacttgtgccgaactgtcagataacggacccttaccttctgagccactcaagttctcttcatccccatctgtttcagaaccagatggggactcagattcagactcgctctcctgagaattagaatggccagatagatttcccatagacccttctacaggtcttgtgttagtatccccttgctgcttctccattggtgaagattgatctttagggagagcctcctttagtcctgtaattgtcttataatataagtctccggtgtccttgccactggttatccgtattacatcctcctcgacattcttgacatgatccaatgtcttgggaatatatgtctgaagaaaaggaacaaaataaccatgaagttaatattcaccaaaagaatttagacaaccggatcttctatcttttattgaaagtatgatgcattccctttcagaatacacatttaacccctcaaaaccgaaaatttcaatctgtaatat

SEQ ID NO: 8115 - DNA, 430 bp, Gossypium hirsutum
  Clone ID: LIB3828-006-Q1-N6-D10
aagaattggagagaggaaaggtgggggggggggggggggggggggggtgaggaagggggaaaaaagagaaaaggagggagggaaaagaaggagagagaggggaaagggagggaagggaaaaaaaaaaacaaaataagaaaaaaagaggaaaaagtgaaggagttatggggggggagggggaaagaagtaaaaaaaaaaaagaggaaaccgaaggaaacctaattgggccaaaggggagaaaaggaaaggaaaaaaaaaaaaaattaaaaaacaaggaggggtggagaaacaaaaaagggcaaagatgggggggggaaggaagaaaaacacaaaagcaccctacaatccccgaaagcaggaggaatgcagaagggggagcggggggggaagaaaagaaaaaaacacgagaacaaaagagaagcaaaagggg

SEQ ID NO: 8116 - DNA, 547 bp, Gossypium hirsutum
  Clone ID: LIB3828-006-Q1-N6-D11
acaatatagcttgaaatatttatttaaaaagttggaacaggtcaacatttcaagagattaagaatgttcaaaacaatgattaacaacactgcatttaataaataaacatatcatggttaatccccttcaaagaattagggatcacttccagaaccctgttttccctagcaacatatgcaatctcacaagctccagacaacaagggactggagatgttaccgttagcatactacacgcatgattgcaaatttatgaacattcaactacaacaggccagaacctaccaaaatttctaagcaaatacctcataatcgatttgttgaatattggggaaaattagtttcagggtagcattgtagttaggagactgcgcctgatgcccctactactacctccccaatcacaatagcttacaatcaactttttaagttgccaaactcctcgcaatgccatctgacaaatgaaatcgattctcagagaagacgatgagtgtctagacacgaatgaaaagcatccaactgtgcaagggaaacactgaaagaatcgg

SEQ ID NO: 8117 - DNA, 374 bp, Gossypium hirsutum
  Clone ID: LIB3828-006-Q1-N6-D12
gttcttaaatatcgaatctttttttctttccctggatctcgtactgagtccatgaagaactcagttgctacacaatcctttcccaagcttgtttccgttttcgcctccttgttgcttctctttcacctcgttttagctgctgactatgtcccaaccgaaaaattctcttaaattgcggggaaaaatccgacctatccgataacgataatcggaaatggacaccggatgtcgggtccaagttcctcaccggaactgaaaaatccggcaccccccccccctgttagcggaaaaaaaaaaaggaagagcagggaagaaagtagagatgtagggaagagttacactaaggggcggcccggccccataggtccacccgg

SEQ ID NO: 8118 - DNA, 65 bp, Gossypium hirsutum
  Clone ID: LIB3828-006-Q1-N6-D7
attatgagttttattagagcgcgggggaagcacgggaaaagccgggcccggcgcgaaaggggaac

SEQ ID NO: 8119 - DNA, 293 bp, Gossypium hirsutum
  Clone ID: LIB3828-006-Q1-N6-D8
cgattggcagagtgtggtggttgtgatggaagaagctttggagaacttgagattattggacgatgaggaggaagcgtttcaagaggttgaatgagcgatgggttacggtcatcaactttgtttggtgggtcgatgtctaacagatagtgttgtttattttccctcactgcgtaataggggagaaacaacacctttttcaattttttatgaagtggatattgaaagggttgttgcgggtataccgtggttttttaataaccatttaattatcttacaaaaagcggacgcgtggg

SEQ ID NO: 8120 - DNA, 537 bp, Gossypium hirsutum
  Clone ID: LIB3828-006-Q1-N6-D9
tttttttttttttttttttttttttttttttttttttttttttttaatttaatttaatttttttttttttttttttttttttttttatatataatttattaatttaaattaaaaaaaaaaaaaaaaaaataatagtatcagaaaaaaagaaaaaaaaaaaaaaaaaaaaaaaaaaaaaacaaaaaataaacaaaaaaaaaaaaaaaaaaaaaaaagaaaaaaaaaaaaaaaaaaaaaaaaaaaaaaaaaaaaaaaaaaaaagaaaaaaagaaaaaaaaaagaaaaaaaaaaaaaaaaaaaaaaaaaagaaaaaaaattaaaaaaaaatagaaaaaaaaagaatagagaaaataaaatagtgactaaaaaaaaaaaaaaaaaaaaaaaaaaaaagaagaaaagataataaaagagctaaaaggaaaaataaaaaaagaaaaaaaaggtagcaaaagaaaaaaaaaaaaaaaaaaaaaagaaaagagaaaaaaaaaaaaagaaaagtaataaaaacaaaaagaagaaaagagaggaggt

SEQ ID NO: 8121 - DNA, 421 bp, Gossypium hirsutum
  Clone ID: LIB3828-006-Q1-N6-E10
ccaaagctccatttcaatttttcattattcatcacatatttcttacaaataaaataaaaaataaaataaaatattcgttcacatgttgatttttcatacatgtagcatgtaagaaaacaaagaaacaatggaagccccaaccaatgatccaagaacaggcaaagtggcggcagcgacgctggaatccgggcctgctgctggggcgaaagcgggagaggagctagggctagaaccacctgcggaaggggaaggagcaggtgcatctgcggccatgacggcgctcattgaggcggcagcaacaatgatggcggtggagaccttcttcatgtccatggcgtataaagggattattaaacgcaccggaaatgaatgagacctgcgtttaataactggtgaatggggatccgccggtgattgttat

SEQ ID NO: 8122 - DNA, 570 bp, Gossypium hirsutum
  Clone ID: LIB3828-006-Q1-N6-E11
atcaaataaggttaatagttcattttaaattataatacaattattctttccttcttggcctttaattagtgtatattaataaatggtaaaacttaaaaaaaaatataagaattaaagtctagcatttttttactccattaagtaatgaattgaatctttcaaataaagaacacaagttgtcacaaattggagtccaaccctgatcaacttcggaataattggatgttacaccacaaaaaagcagggttgtagcaatcagtttcgaagaaaaccccaaggccccgtaccagtgcctaccctcaaaagaccagcaaacacacgcaaattcataaagatagtcaaagcaatccagataccaatatagccagtgctggaggacagtatgaacaagcaaaagatgctcacaacagcaaccaaaaccatggagtaagctgaataggcaaaatctgaagctccatagttaactccatcgaaaacaaaggctaaagtattaataggttgagttactgcaatgaaaggaaagctgaggttcatgagttgcataacatccctgtcgttcgtaaatagttg

SEQ ID NO: 8123 - DNA, 574 bp, Gossypium hirsutum
  Clone ID: LIB3828-006-Q1-N6-E12
gcaccaatacctaattaatatcgatcaataatgatacatgtcggtaaaaaccaaaaaaaaaaaaaacatacagtacctgtatcattttggtttacctcaattagtacgtataggctgaacgaccggcagcttatggtaccaatcaccagagtttaaaggataacaccttatctctgcagtcctataggtctctcagtccttaatcctttgacgcggttgagtttacatctgatgaagaatctttcttgttgggggaaggcattgaacctctagctctcatctcccctgtttgctcctgttgatgatgcagttgatttggtgaaaactgatgctgatgctgatgctgatgcttctgtgagtgaagctgaagttgctggaactgctgtgctgccagaagagtatgcttggcatggttatttgggtagtactgctgactagctccaaaagatgcaaagttcatcattcctccaccattcggcataggatgaacagtcagcatcttcagatgctggatttcctctttcattgcatcatttaatgcgtcttgcaagtgaacttgttgctccattgcttg

SEQ ID NO: 8124 - DNA, 543 bp, Gossypium hirsutum
  Clone ID: LIB3828-006-Q1-N6-E7
gtatataatgaacaataaaataaaataagattacttattttttacattagattagaattcactaactatttaattaattatgagtttattcttacaggattaaaacactagttttctcgataataaactttagaaaaccccctctcttccaagttggaagttccaactcttcctacttctttggtctttcatattccctcaactctcatggaaagaagaaaggaaagaaagtcttcatgtcctttttttttagcatcttcaattcctgcctgctccaactcaactgtcctgaatttctcaatcttcaagctctcttcagcccgcttttgtgcaaccaaagcctctccaagctttttgttcgcttcttcagctgctttctgtgcttctttcagttcatcaattgcttccgccttttctttctggatcaatgacatttgctcctttgctatcattaaatcctcctcgaccaagttcaatttagcctgccgttcccatcccttaccaaccccgtgtttacgatttctagatatcgaaaccatttca

SEQ ID NO: 8125 - DNA, 584 bp, Gossypium hirsutum
  Clone ID: LIB3828-006-Q1-N6-E8
aagagttgaatatattattattattattattattattattattataaaaataggacaaagttgttcagattaatcaataatcaacaacattatttcaaataatgataataaaagaagactaatggcgatggttttgaaagtttaaactccaggggtcatatcaggatcaaagggaacgccagtttgtgccagccattcgtcggaattcaaaaagacacgaggagtccatttcatggcttcatccatatcgattttcttgatagctttccatgtgaccctgccctcggtattggcaccgggtcccctattttggaactcggcaaaataaccagtgtccaggcctacggtgccttccatgggggagtaaccctctggtgtaatgatgtcatcgatttgacattgcattatgacagttgtagcaaattgtttccagggacgaccaaggtacgtcttgttcttgtccttcaccgggaggtagtcaggggcgcccgagatggtacaattttgaagcacaatagctgtgttagtttcttcttctttctttccatgtgctgtaaccatgttgtgttggttttcacctggct

SEQ ID NO: 8126 - DNA, 573 bp, Gossypium hirsutum
  Clone ID: LIB3828-006-Q1-N6-E9
gaaactggtgaattgaaagagttgtaattttcaaagttgtaacaccaaaatatccttgtacagagaatacggctaattaactgtatggatacatttccatttctgtgttctcctatctaactctatgtccagatctcatctttttatttttaactccttgaatgaaacaaaaataatcggtaatgaaactcagagaatactgttactgcaatatcagaaaaatggggagcccttcttcgagcacaggtaggagttggtttaaatatttccagtacgaagaagggcgagactctccaagcgacgctcgcaacgttcttttggtagtggctggtctgatagccgccgccaccttccaagcaggtgtcatcccaccgggcggggtttggcaagacagtgaatgtgggcacgtcgcaggcagggccatttacgcctctcaaaagcatgccttttatattttcttgatctcgaacaccctcgctctttcctcctcgattctagtcatcatctctctgacgtataagttcccatttcatttcgagatctttacggcttccatgatggtcacctacgcat

SEQ ID NO: 8127 - DNA, 447 bp, Gossypium hirsutum
  Clone ID: LIB3828-006-Q1-N6-F10
cagcaaaaataggccattattgctacaaatcgagggaggcctgaaaaatgacaatttttatggacccctaagaacaataagaataacaataataataattataaaggactcccccaaggatctttaatacataaattaaccatatatgcttaccctctaaaccgggttcttccaggaaagccatctttctcctatcaaccccaattaacaaacaaatcacaaggaataacgccccttacatcccatgcccctaaacaattagactgtaactagaaaacgcataaccaatactatgaaacaccggcgctgataatgcaccactacggctgatccaaccattaccagacccaaacccaaaagcctggatccgaaacccgagtccctttataaaaccagataaccaaacatgaactgcagccccaagttaccaacatgcccaacaaatgg

SEQ ID NO: 8128 - DNA, 561 bp, Gossypium hirsutum
  Clone ID: LIB3828-006-Q1-N6-F11
cattaacataagcttttcattagataaaactagggattacaaataaacgagtacgtagattacatagcatgaacgtctgcttaactatttgattcatagttcatgactcagcaatgggttactaaaacccaaagcaaaccatcaatgtaaatagacaaaccaaggcaacacttggaatcccagtcttctcctttttaaccccattttcgaaagcaacgttttccattgagcccctttggttggtgcccccaaatggctgactgatactagaaaacggctgattaaacccggcagagtaaggctggttcgtagccgaatacggctggttcaaccctgacgatagtggctggttaatgccttgttgtggatagtttgggtctttctgctgttgataacccagttgggattgtttcccgttgttcccaacaagtttagcaaatggagcattgttgctcacaggttcagcattgttcgcttcgttttcagggaggctggttgtagttgcttctgccttggttaatgcgattgggatagtgaaacagagtaccacaagacataaaa

SEQ ID NO: 8129 - DNA, 346 bp, Gossypium hirsutum
  Clone ID: LIB3828-006-Q1-N6-F12
aaattaaaaatttgtaaaaaaaaaaaaaaaagaacaaaattaaaagggggaaagagaaaataaaaaaaaaaaaaaaaaaaaaaaaaaaaaaaaaaagaaaaaaaaaaaaaaaaaaaaaaaagagaaaggaaaagggggaaaggggagaaaaaaaaaaaaaaaattggaaaaaaaaaagagaggggaggaaaaaaaaaagagaaaaaagggttagaaagggggaggagaggaggaaaaagaaggagggagaggaaaaaaaagaagaggtgatgaaaaaagaggaaaaaaaaaaaaaaaaagaaaaaaaaagagaaagaaaagaaagaaaaaaaaaaataaagaaaaa

SEQ ID NO: 8130 - DNA, 581 bp, Gossypium hirsutum
  Clone ID: LIB3828-006-Q1-N6-F7
aaaatgaaaaagactgtttttatgtaatatgaataaatatattaattacaattgcactgaatctgttggtatggtttaagcggtggcacttagggtttttgggacagggctggaacatggagtcgggtttaatttgccactagttttaggcttgacattcaaacattgggatgttgcgggttcaggtccggtgtgcttaatatcaatgtctgcaagttccacattttgacatggcgaagaaccgctgcaaataaacttgacagcttctggaagcgcagatgtgccacggatgttcttgaagctaatgttgcttagtttaactttcgattcttcatttatcttgcatttactccatgggcaatatttttgatcaattaggataggggaagagacattattcacgataatatcctcaaaatgtacatctgatactatcccaggagattcgcctggccaagttttgattcgagctccattcgaagtattagtaatggtgcagtttgtgactttaactccctcaactggctcttcatttgggtactttccaagactaccgatacttataccatgtcctggtccac

SEQ ID NO: 8131 - DNA, 528 bp, Gossypium hirsutum
  Clone ID: LIB3828-006-Q1-N6-F8
tttttttgttttttttttttttttttttttttttttttttttttttttttttttttttttttttttttttttttttttttttttttttttttttttttttttttttttttttttttttttttttttttttttttttttttttttttttttttttttaaaaaaaaaaaaaaaaaaaaaggggggggttttttttttttttaaaaaaaaaaaaaaaaaaaattttttttaaaaaaaaaaaaaagggttttaaaaaaaaaaaaaaaaaaaaaaaaaaaaaaaaaaaaaaaaaaaaaaaaaaaaaaaaaaaaaaaaaggggtttaaaaaaaaaaaaaaaaaaaaaatttttaggaaaagggggggggggggggaaaaaaaaaaaaaaaccccccccaaaaaaatttgggggaaaaaaaaaaaaaaaaaaaaaaaaaaaatgtttaaaggggggcctttttaataaaaaaaaaaaaaaaacgggcaaaataaaataaaaaaaaaaaaaaacggtggggggggggattattaac

SEQ ID NO: 8132 - DNA, 568 bp, Gossypium hirsutum
  Clone ID: LIB3828-006-Q1-N6-F9
gctaaaatggaggtggtgttgtttgcctcttattatataaaaaactcaagttgaaaagtgacatttaacagagaaattcaagcatgactttctacttgtgctctaaggattaaccaaatattcactagtctctggctctagctctggcactggcacatctacagggattgtctctttttttcggaaccgggcagagctcattgatcggcaaactcgagcttctgtatgtacagaaaccggctcctttattttggttcatagttattttccattatgaggatacagagctagcagttgcctcatgctgtttctcttcaagctgagatttgaggaatgccagcactgaaaggcgccttggctcgagaccggcttcttcggatttcagtgtcaaagattctaacaattttatgccttcttgaaatccatcgaccgccacatcctcttttccaagagttctgtctacatctgcaacttttgcaagagaaacagctacatccagaatctgtgaagcaacaccgggatggtttttgataacatcacggcggacacccagtgatcggaagtagta

SEQ ID NO: 8133 - DNA, 311 bp, Gossypium hirsutum
  Clone ID: LIB3828-006-Q1-N6-G10
ggaaaaaaaagtgtaagacaatgatattaaaaatctgtagcaatgccaatcagaagttattacagggagacggttaattcttgtgcctacctcagttaactgctaaaacaatgagtgaaaaaaatctcattattcattagatcttaaacgccacctgaacttgccatgagattttcttcttccccactctttttccattcatcaaacggttttgcgacttcttcccctttctagacaccgcctgaacatctacttgacttctcccactcccttcctcatgaaccacatttggatctaaatcaggaagagaa

SEQ ID NO: 8134 - DNA, 579 bp, Gossypium hirsutum
  Clone ID: LIB3828-006-Q1-N6-G11
gaagatcaaaattgttgattcactaaaattatagtgtaaagaggaatcacagaccaactcttccttctatttttttattaattatgatttaaaaaagtaaaattatagattttcagcagataacaccataaacttctttctatggccatgatttttgcatttcaatgtcttcaatatcttaatccagcagtgaacggaacgccagtcaaaggcagccaattttctttgctatgaaggaatgcttcgacagtgaatttcatcgccgtagctttgtctatcttgtggtaacccttccaattaactcttgcatcgaggttagcaccagggccacgattattgtattctgcataatagagggtatcttcgtgattttgagtagcaaagggcatccatccttcacgcctaatgaagtctcctaacgtagactccatgataatagttgtagagtacggcttccatggcctgcccaagtatgtcgggaacttaaatctgtcgatgaagagcttttgctcagggacaatcctgcagttttggattacagtaccggtattctcatcaatccgggtcttaccctgtgca

SEQ ID NO: 8135 - DNA, 584 bp, Gossypium hirsutum
  Clone ID: LIB3828-006-Q1-N6-G12
aaatcttcggcatgtgaaattgaaaatgttatcgcacaaccgataagttaaatgaaacgtactaaaatttaagaatagcagcaccacttgaaggctttgaagcaaacacatagagaccaaggtcattctgatttatcacacctttgtcaatcctagacttgtagaattgttccttcaaattgaggatgaactgtggtacgatactctcttttaccaaggccacggcacaaccaccccatccagctccggtaagccttgctcccatagcgccattgtctcggcatacttttacaatttcctccaactccgggcagctgcattcataaagaacactacagctgtggtggctttcattcataagattgccgagtttcttgagcttttcctcctcgcttaactttgatgccacagtatccttgaaagcataaacacgcttggcttcagagtagacatgagcagctctctgatgcaacttgaaatgcttggccgcttttagcacatctaaagaagttgggttatcacgcaagattgatggaagatccttctgagtaattttctcaacctcttgagcagtatacggctcc

SEQ ID NO: 8136 - DNA, 533 bp, Gossypium hirsutum
  Clone ID: LIB3828-006-Q1-N6-G7
atataacaaagaaaaacatatttattagcatgcacatgcattaattacatatggctacaaaacaagattcaaggaactttaggatattgcaaatcgaatattgttttgagctatttattcttcataattactctttttggccaaggaggattttatagcaaacccttctgcaacatcattacttcttattttggataattaataagacgacaaccaactcttcctcgttatttcatcttaatatgggatcatctctctactttgggggactgggttcactggccataacctcttctatccctttgctctttacagtttcagcctggcaacatcctgatgcccacctgggctgaccacactcagcacaagtcccaccactttccactttcacatcccgactgtcctggcattagtgggatttttgggacttgtgggatctgtgggacttgtgggatctgtgggattaggggaatttgtgggatttgtgggatctgggggatttgtgggatttctggaattcttgggatatctgg

SEQ ID NO: 8137 - DNA, 328 bp, Gossypium hirsutum
  Clone ID: LIB3828-006-Q1-N6-G8
gagacaaagactaattttgttgataacttttgctgcttctgtacattacattggtttacagcttttttttttctctttcacaaatggagaaagaaaaaaaagaggaatcaaaattgtgaacgagtggccctttgaatctcttattaggcctgcaatcgagaagtgagatttaggaaggcatcttctctgcaaggaattgttagaccacccatgggatgattgaacccgaactcttcctctgctcgcttaagcaagtcgttgaacgaaggatggttcaacacagttattggaactacgaacctttttctttgcgtctcccccacataaa

SEQ ID NO: 8138 - DNA, 417 bp, Gossypium hirsutum
  Clone ID: LIB3828-006-Q1-N6-H10
gagcaatatatgcataggatagcagtttgattcccttaaacaagatgagaccctttgtagcattcaaagccgaaaagctacactgtcatataaaaatcaacaaaattttcgggtgagaagaccaatgattatatacatacagacatgcatgttggaaggccgttgctagaaacgggaagaaggtaaaccattaatgtgagaggaagtcagccaaaataccaactagaggggccttaatgattggggtggggctcaccgtgtgcaaaatctgctctaaaaaacagcgcacaaatccttaatatcaggtccttcaacaacagctccagataacaaattagggttaggagggccacattataaagaagcggctccggcggggcattcaataaggaggggatgaaaaataatggaaaggaa

SEQ ID NO: 8139 - DNA, 562 bp, Gossypium hirsutum
  Clone ID: LIB3828-006-Q1-N6-H11
aactcttaagaccccaccaaatccatccattaatttaaattgttcatccacaattttgctgaaacctattgtgacaaaactcaatctaccaaaaacagaaaagtttaaaaaggccgggcaatggagattaaacatcgatactaaacatttggcatcgaatttcgggtctcgaccttggcataccggattctagtgcttgtcgctcggaatgttgaggtctttaaatatgggactgtcaactccgatacccattgcattcaaaccgttatcgacatatatgacggcacctgtgatagccgaagccaatggtgatgccaagaaagcagcagtattccccacttcatctgcggacagttctttttggagaggtgcattggccttcgagtactcaatcatcatgtcgataaatccgattgctttcgcagcacgacttcttagagggccggcggatattgcgttgacccggattttatgttttcttcctgcttcgaaagcaagtactcttgtgtcactttcgagagctgctttagcagaactcatacctccaccatatcctgggaat

SEQ ID NO: 8140 - DNA, 574 bp, Gossypium hirsutum
  Clone ID: LIB3828-006-Q1-N6-H12
catgaaatgggtttatattgagaaaggaagtaaaaacaattagtgaatgaatatacatatgaatcaagtccctgtgacaggaaattttagactatggattaagcatacagagtgctaatgaatggtttgacttttgtttttgttcattcatcggaagaaatagatgatttttgtttgttttttgttcattcatcgagctaaataaatgatcatgaataagatgaataaagattcgagccggatgctaatattttcccggagaatataatctttggagttgcaggtataatacaaatgctttcagctcttcatcttattgggtggtactgttcagagacccgcttcggaggcaattttcgaagaatgaacagtaccaaagctgatggaaggatttctacgaacatgtaatagataagatttaggattggatgatctagaacatcaagaccagcattcatgttggccgagagtgtggacacaatgcatcttatcaagcaacaagtacagcagattcctgttacaaagccgacctcgaacagctttttttgacgaccttttgattcgatagggaacc

SEQ ID NO: 8141 - DNA, 554 bp, Gossypium hirsutum
  unsure (1)..(554): unsure at all n locations; Clone ID: LIB3828-006-Q1-N6-H7
aanacataaaaatcactccgttgatagcataaaagggcattagacaaatcttacaactatgaaaaacagaacaatagcttgtaaggctattcatgttcttatggagcatcataagtaaaagacaagcatttctaacaacaaaaaatgacaagcaaacacgactctaaatttattccataggcataatttgagaaacctcacacgaataagaaagaacaggataccctcacagggtgaacccatcatcttcaaaataaatgatattgcgatagtagcatcaatattcttcaccttcctcttcatcatctccaccttcagcaccaacttcttcataatccttctcaagagcagccagatcctcacgggcttccgagaattcaccttcttccatgccctctccaacataccaatgcacaaatgctctcttcgagtacatcagatcaaacttgtggtcaatgcgtgcaaacacctctgccactgctgtgttattgcttatcatacaaacagctcgctgcaccttaacaagatctcctccagggacaacagctgggggc

SEQ ID NO: 8142 - DNA, 586 bp, Gossypium hirsutum
  Clone ID: LIB3828-006-Q1-N6-H8
agtaggaaactcacccagaaaaaaagaaaattgcaagaagtaaatagttctcaaaattttggtcacaacttcataaataaacaactccagctaatctttagaaaaactactgcagcaatacatatctggatgtcttatgctaaagtttaggcagcattttgggcagcaagcctcttcctagcttcctcaatgatggataacttgatacccttacccttaggaagggacacccatggctttgttccttttccgatggtgaagacattgccgagacgagttgcaaactcatgcccagcagcatcttgaacatggattgtctcaaagctgcccttatgcttctccctattcttaattactccaactcgccctctgttcctccctccagtgaccatgacaacattcccaacatcaaacttgatgaaatcaacaattttgttgctttcaaggtctagcttgatggtgtcattagccttgatcaaaggatcagggtaacggatagtacgaccatcatatgtattcaagtatggaataccgttctggccaaactggacagatcgaaccttgcagagcttgaacttggtttcat

SEQ ID NO: 8143 - DNA, 491 bp, Gossypium hirsutum
  Clone ID: LIB3828-006-Q1-N6-H9
ctcacttcatttcatgaaaaagtagaagttaaaaatgtctcaaagggataaactttaatagtgaataaaaaaaaatgtatataatacgataagaacattgatgtgaatgaaggtgctagagctaagcccagtctttacggatgtcaaatgtgtagttgatctccaagtgacatttttgatcatcgtcaagaaattttgattttgcagtatatgatcctctagccataaaaccagaaggggctgtttcttctggcatttcatgcgtataaggctctagctgaggactaaaagttccaatcatatcttttgtgctataaaccttaacacctgttttccatacagtattagtgtacctgagaccagatacaatgttgttgctgacttgaaaggtgaacttcaagcgatattgactaccttctttcagtgtaaaccataagccatgcggcttcccatcttcagggatcggaagaaccatgtcctgcctgtccgcc

SEQ ID NO: 8144 - DNA, 619 bp, Gossypium hirsutum
  unsure (1)..(619): unsure at all n locations; Clone ID: LIB3828-007-Q1-K6-A1
gcagttccaaaatgtattccaagggagggggcctgaaaatcgggnaaagaaaagaacaaagaactcaaggagtcatttaaggaactaactaaatggtggaagaacgcacttgctagtgataatgttgatgaagtgaaaataagcaaccgtttggacaacactccttgtgtggtcgttacatcaaaatacggatggagtgctaatatggagagaatcatgcaatctcaaaccctatctgattctagcaagcaagcttacatgcgtggcaagaggatcctagagattaacccaagacacccaatcatcaaggagcttcgtgagagagttgccaaggactctgaggatgagggtgtgaagcaaacggctctgcttatttaccagacagctgtaatggagagtggtttcaatctacccgatcccaaggactttgcttcacgcatctacagctcagtgaaatctagccttaatatcagtcctgatgcaacaattgaagacgatgatgatgtagaagaaaccgagatagagtcggagacaaaagaaagtgcaggcaaagatgagttgtagattgcctgaaacctcggggatatattgcctgaaacctcggggatatatactcttt

SEQ ID NO: 8145 - DNA, 513 bp, Gossypium hirsutum
  Clone ID: LIB3828-007-Q1-K6-A10
attcaagctctttaacttttttttttccttttctgggtgaatcaagttctttaaccattagtgaccgtagcagcatactaaaatatgggtcgtggtctgggatccaacaccatgtctccggtaatggcacgattgctgttgttgagtatctgcataggaatattggcgaaggcggcatcagcccaagtgaatcccccaaatgcgttggcctcaaaactggggggctattgcggcaagagtaccatgtcctgctccatgaaatgcggttatctcggctgccttgcaggctgtgtgacatctccctcgataggatgcggctataagtgctttttcgaaaacaccagttgccaatttggctgcaccccctttgatattcgaggccaatcagcccgtgttaagacctagagggatatatatatatgtgagcgcgcgcgttgtttgtttattattaagtgtttgttattattattacaaaacaaaaaacatgatgatacacaatgaataatgtcttcg

SEQ ID NO: 8146 - DNA, 590 bp, Gossypium hirsutum
  unsure (1)..(590): unsure at all n locations; Clone ID: LIB3828-007-Q1-K6-A11
gtattattcaagctcaanaggaactacttcgggaaaaacaatggatttgacacctaacgttgtggtcgctaaggatggtagtgggaaatatgattgcatcacagaggccttagctgaagtcccgttgaatagttgcgatcgatttgttattcacattaaggctggtacttataaggaaaaaatcctcgtgaccaaggagatgactaatgttatgttccttggtgatggcccaactgagaccatcatcaccaactgcgttaactgctgtaaggataatgttaaaacattcaacactgcaactgttggtgtggatggggctggtttcatggctaagggcattgggttcgataactcagcaggacccgaaggtcatcaagcagtggcttttagggcatcctgtgataaggtcgtcatgtttaattgtcatttcactgggtaccaagacaccctttacgctcacaaagagaaacaattttatagggactgtctcattagtgggacagtggacttcatcttcgggaatgcggcgagtgtattccaaaactgtcagatcgtcgtgaggaagccaggtgagaaccaacacaacatgg

SEQ ID NO: 8147 - DNA, 424 bp, Gossypium hirsutum
  Clone ID: LIB3828-007-Q1-K6-A12
ttttgcttgtactctctgtttttttggctttacttggaaaaaagccgctctacttggtgacgtttctgtcattcatctatgcatttggtcactttttgactgaatacctcttctatcaaacaatggccctctcaaatctgacgactgtaggcatatttgcagggacatcaattatatggatgctattacagtggaattcacgtcaaccgacacatgtcaagcgtatctgaaaatgaactcctttggtttcagtttgtttaatcttatctcaggcatggggatttatcagtatccattttacattcttgatgagtactaactgataacatctgtttgcaattagattctggagttactgtctaatagactcgcaatgaattgagaacatatatagtttaaaaaagagacatgattttaagcttca

SEQ ID NO: 8148 - DNA, 587 bp, Gossypium hirsutum
  Clone ID: LIB3828-007-Q1-K6-A2
cccagcgtccggcgtccgtacgaaacacgtgaagaatcgtctcgtcaggtaatcgagcggtactactctcgcatgacccttgatttccacaccaacaaaaagttatagaagaagtagctattatcccatccaagaggctccggaacaagattgctgggttctcaacccatttgatgaaacggatccagaagggtccggttcgtggcatttctctgaagcttcaggaagaagagcgtgagcgtcgtatggatttcgtccccgatgtatcggctattgctgttgattcaatagaagttgataaggaaaccattgatatgctttcacttcttggaatggccgatcttcccgggattgttaaggttgatccggttgctgttcaggttcctcaagtcgggttcggacgtggtggaggacccggaaggaggttttaagtggtgggttttccatggatatgatgggttcttaattttaagtttgatatgttttcttttgggattttgtgtttttgttgcaaccattttagttatgtctaatgctactgaaaatttattaagtttgataagaactacctttcgaaggtttttgga

SEQ ID NO: 8149 - DNA, 595 bp, Gossypium hirsutum
  unsure (1)..(595): unsure at all n locations; Clone ID: LIB3828-007-Q1-K6-A3
ggttgctgctaactcatggnaatcaccattttcggtttgccatttagcctttgaaacttttatgtgggggtaatttacattatggtccatgtagatcacaagcctttaattttatcaaatttaaccattaaacttctattattaataaattaggtcacttatgctaagtccataaagtaattctaatggaaaagttggttaatcgtgcataccttaccgagcatgaaattccaaagttggttatgcgtggaaagcaagtcatatgtgcatgctaagacagcttttgcagtaaaattatttaatggaattagaataagtgacctaatatgttagttatagaagttcaatgatacactttgatgaaatcaaaggtttgggacttgaatgaaagttgataaactcaattgtgttggactgttctttgggttttttcttgttaaatttgcaggtctcaactgcagttgtggagccttacaatagcgttctgtccactcattcgcttcttgaacacacagatgtggctgtgctcttggacaatgaagcaatttatgacatatgccggagatccctcgatatcgagagaccaacttacacc

SEQ ID NO: 8150 - DNA, 609 bp, Gossypium hirsutum
  Clone ID: LIB3828-007-Q1-K6-A4
tggtgctttgtttgtgaaggttagcatggatggtgctccgtatttgaggaaagtagacttgaaaaactacactaaatatcaggagctgtcttctgcacttgagaagatgttcagctgttttaccataggtcagtatggatctcatggaacctcgggcagggagctgctgagcgaaagcaagctcaaggatctacttcatggatcagaatatgttcttacttacgaggataaagatggtgactggatgcttgtgggtgatgttccatgggagatgttcactgacacctgcaaaaggttgaggatcatgaaaagctctgatgccattggactcgctccgagggccatggaaaaatgcaggaaccggaactagctaccatcatacatgatcttttcccacacaccgaagattattatttctgaaagagatgacatgatgctggagtgggtaggagatcatcatgtaagcctgtttttgttctactgaaaaaagtcgtatccagtgcgtaaggctactgctataagcaagaactagaaattcccattgtaggcacaaccatttgtcggtgtttgtagcaaataaacctgttagtctacattaagttataaaac

SEQ ID NO: 8151 - DNA, 592 bp, Gossypium hirsutum
  unsure (1)..(592): unsure at all n locations; Clone ID: LIB3828-007-Q1-K6-A5
ggcagcacaagnagctgatgaggccaagtcggttgttgaaatggctaatcaagagctaagcaaattaaaggaagaggctgagcaagcaaaggctggagcaggtaccttggagagtagattacttgcagttgaaaaggagatagcggcagttaaggcttcaaaggagtcagctttagttgctatcgaaacattgcaagacatcaataatgtggattcatcagatagtgtagttctttccttagaagagtactatgaccttagaaaacgtgcatatgaggtagaggaacaggccagcatgatcgcggcagctaccgtttctcaaatcgaggaagctaagcaatcccagtcaagaagcttggtaaagctggaagaagtaaatcgagagatggctgaaagaaagaaagcactagaaatagctttggagaaggctgagaaggccaaggaagggaagttaggtgtagaacaggaattgagacaatggagggctaaacatgagaagcgccgaaaggcttctggatcaagtcatggaggaaaccctccaaggtcaagttttgagggaaagagacaaagtaataaggttgaacctgtaacc

SEQ ID NO: 8152 - DNA, 593 bp, Gossypium hirsutum
  Clone ID: LIB3828-007-Q1-K6-A6
tcttgatgctttgctcaactctggtcgcaaagaagaatttttgccagtataaaagcctcactttacaattgtctgtcagagactaatcttcaattgacagtccctggtctcaaatccaaaaccagaggcaaggttagggacatttatgatagtggggattatcttgttttggtcactactgatcgtcagagtgcatttgataggattcttgcctctatccccttcaagggccaggttcttaatgagacgagtttgtggtggttcaatagaactcggcacatgattccgagtgcagttttgtcagtaccagataaaaatgttacaattgctaagaaatgttctgtttttcctgttgaatttgttgttagagggtttgtgaccggaagtactgaaacgtcactgtggacagtttacaaaaatggagttcgaaattactgtggaaatgtacttccgaatgggctggtaaaaaatcaaaagttaactgcaaatatactcacaccaacaactaaagctgaggatcatgatgttcctgtaactcctgacgagattattgaaagaggattgatgactcaagatgagtttgatgaagcaag

SEQ ID NO: 8153 - DNA, 617 bp, Gossypium hirsutum
  unsure (1)..(617): unsure at all n locations; Clone ID: LIB3828-007-Q1-K6-A7
ctcatcaaagtttcaatcctttctccattttagatctactccatttgttttttcaattatacgtatataaatgtaattttgaataaaaaaaatccaagctttaagtagcatttaaatggtggggtggtattttccaaatatatantggaaaaagttagaatccgaggaatggtgtaggagagggggacaagcaaagcatagagttcttgagagtaatatggattccatttgaaccctacagtaagctgtattgtgaaaaaaaaaatcaaagaaaagaaaaaagagagggaaatggtggaagtgttggttccttttccagggatttaagagtgtttttttttttcctttttttcttttaataaaggggtgagaaaggggctgcctttttagcatatgccacttgggttttttaataaaagggcaagggagcgtcaataagagataagtgaaagcaaaaacaaaagtttaaaaaaaaatgcaggaaacaaggaagaagaatggtggcaatgaagattccaagaagaaggagcgtcatatagtgacatggacccaagaggaagatgatatccttcgtggacaaatcagtttacatggaaactgaaaactgggctatcatt

SEQ ID NO: 8154 - DNA, 582 bp, Gossypium hirsutum
  Clone ID: LIB3828-007-Q1-K6-A8
cccagcgtccggtcgaccaccatccataaacttgcagaatctatggcgtagccgaaaagttttcaagtatgataccattcccgatgagcctccaagtgacaacactaaggtaactttggcacctattgtcctcaacatgacacacagaaactttgtggaaatcatcttcgagaatcacgagaccgccattcaatcctaccacttgtctggctactcattctttgctgtgggcatggacgttgggaaatggagccccgagaagaggatgaactacaatcttcttgacgccgtgagcagacagaccatacaggtattccccaactcctggtcagcaatcctattgacattcgacaactgcgggatgtggaacctgaggtcggagatatgggacaggcattaccttgggcaacagctttatgctagtgttatttcccctaaccgatccctcaaggatgagtacaacttaccggaaggtgtattgacttgcggcatcgtgcaaggcatgccaaggcctccacctttcagcagttaatttaaataagcttataaatctgtatccaattctggtataaatacataata

SEQ ID NO: 8155 - DNA, 597 bp, Gossypium hirsutum
  unsure (1)..(597): unsure at all n locations; Clone ID: LIB3828-007-Q1-K6-A9
cccagcgtccggcagggttcagtcaagnattctgtaaaggaagagaaactgaaagataaacctggatacgaacatcttaatgagccactgcatgtgctggtggaggctgaatttcccgaggatatggtaaattctcgtctggagtatgctgttgcgatactagataaccttctgaagccagtggatgaatccttggatagctataagaaacagcagcttagggagttagctttgctaaatggtaccttaagggaagagagcccaagcatgagcccaagtatgagcccaagcatgagcccaggtatgtcgcctttcaacagtacgggaatgaagcgggcgaagacgggaagatgaagaaatcccttgttttctgctggttctgatcatcaattgaaatcgagatggcttggcttggcttttgtgatggatgatgtatttcaccttaacttagggaggctgagttaggaagatctaagtcaaaactcccatcagtttttgggctgcatatgggttttcttctccactgatattccttttcttttccttcttttatgtattattcattgcccctcccataaggtttgacgtcagtctcta

SEQ ID NO: 8156 - DNA, 579 bp, Gossypium hirsutum
  Clone ID: LIB3828-007-Q1-K6-B1
ctgactccattgcttcttaatctttggatcagctttattccagtcgctgttgctcgaagcttgtgggagaacagtgaaccctgtgaacggagccgtggggcttttgtggaccggaaactggcacgtttgccaagcggcggtggaaaccgtcctgcgaggaggatctctacgttccatgcctgaactcatgtctccgacgccagcatccgacaaaacgtccgaagccacgtgcacggacatgtggaaattgcgagagacatccacgaatctcaactccaactgtcgattctcaaattcgagatccagggtttcacccaagcgtaaaagagtcgaagaagaattcaagaaactacagccctctgatctagatcttggcttgaccccgagctttacaggcaagcgagctaccgataatcgacgaccagggactccgtctatgaactcggaggaatctgtgacgacgacgtgcttcgaaagtgtttttgcagatcaacaagggcaaggcagcagaggaactgataaaaaattactcaagttgtttgtttgaagaggagggtttttttttttttggaatgatct

SEQ ID NO: 8157 - DNA, 591 bp, Gossypium hirsutum
  Clone ID: LIB3828-007-Q1-K6-B10
ggcaaactttgatgtcagtgagctctcattgtcacttcatagagcgattattctttgagtcttccaaaactgggattccgtaaacttaaatatgctgatttttcaacgtcatactcgatcactggaacctttttgaggaatttgggaaatggcggtggtgggagtctactagaggttttaatattaagggattgcatgcatctcaaagagatggaagttgctcggttcttgacagctgttattgcaggagattttaagttccttaaacatcttgacatatctaatagggaaggtttagcttcagaaggtgactggtatcagagatcttacaactccagtttgattcctttacagcaggttttggaagtaagacctgatatttgtctgctagctgagtttccatcggaaggatgcttccttgacatagaccacatgattgatagtgatattaacagtgagctcagcctgccattccagcagagtggccaaacttctgacggtgcattggttacgagttcattagagagcagttataatagtgatcagggtagcggtaatgaggagtatcaagattcaggttttgtaatttac

SEQ ID NO: 8158 - DNA, 601 bp, Gossypium hirsutum
  Clone ID: LIB3828-007-Q1-K6-B11
cccagcgtccggtttcttcccttttagatttctttctctccgttttctttccttacttgtatggcagccaatttgaagagtggtggagggatcgccagcttggggaagcgacttcttaaccgcacctccactcgcaccccttctcttttcatctccacttcttcacctaccaggagtcctcacgcgtcggcatacgacaagaacctggatgatcaggtccatgcggctgtggttcctgatgatgtgattcagcctcaatcggacaagtactgggctcctgacccgcggacaggggtatttggccctgctacggagcaacttaacgcatctgcgggtggggagcagggcatccattcgagtggtgcaaactcggtcctggaggaaaaggcgtggttccgccccactagtattgaggacttggagaagccacaccatcactaagtcgctgataatgagcctgctactatatagtctataggtaaaacaaagacaataggtgtggtttgcttggatcaaataaactggaaaaacgttttaatggttcatgttctatttctacctggttgttacatgggaatttgcaaatctagttactgcgaac

SEQ ID NO: 8159 - DNA, 593 bp, Gossypium hirsutum
  Clone ID: LIB3828-007-Q1-K6-B2
gcgtcgcttatctcaaattcactgcccagcgagacaggggaggagacctgcaaggtgttatcgccaaatcaagaataagccataccccaaatctcgatacctgccgaggtgtcccagatcctaagatcagaatttatgacgttgggatgaagaaaaaagtgttgatgagtttcctttctgtgtccatcttgtgagttgggagaaggagaacgtctcaagtgaggcattggaagctgcccgtattgcctgcaacaagtacatggccaagtttgcagggaaggatgctttccatttgagagtgcgggttcatcccttccatgttctgcgtatcaacaagatgctttcatgtgccggtgctgataggcttcagaccggaatgaggggtgcttttggaaaacctcaaggaacatgtgccagagttgacattggtcaggttctgctctctgttcgttgcaaggatagcaacagccatcatgcacaggaggccctccgtcgtgcaaagttcaagtttcctggtcgtcaaaagattattgttagcaggaagtggggatttaccaagtacaaccgtgctgattatctgaagtggaagtctg

SEQ ID NO: 8160 - DNA, 601 bp, Gossypium hirsutum
  unsure (1)..(601): unsure at all n locations; Clone ID: LIB3828-007-Q1-K6-B3
cggncgcgtgggcggacgcgtgggcggncgcgtggggggaactttaccttaaggattatgtatgagcaatttcaaaacatactcaaatgggtccaattgggcaggttttctcaatgcttccaggatttagtgctgaactaatgccaaaaggtcgtgaaaaagaaagccaggcaaagatcaagcgctacatgaccatgatggactcaatgacgaatgaagagttggatagctcaaatcccaagctcatgaatgaatcaaggatgatgcgaatagcgcgggggtcaggacgtcatattcgagaggtaatggaaatgatggaggagtacaagcggctagcaaagatatggagcaagatgaaggggctgaaaattccaaagaagggtgaaatgagtgcgttgtctcggaacatgaatgcacagcacatgagcaaggtccttcctccgcagatgttaaagcaaattgggggtatgggtgggttgcagaacttgatgaagcaaatgggttcttaccaaagacatgatggggatgtttggaggtggtggggacaagtaatgtaattttccacacccattccaaggctctactttggactgctaatgca

SEQ ID NO: 8161 - DNA, 585 bp, Gossypium hirsutum
  unsure (1)..(585): unsure at all n locations; Clone ID: LIB3828-007-Q1-K6-B4
caaacctgaccaagnaggaccattaacatggtacaagggatattttgatgcaccagaaggggacaacccagttgccattgttatgactggtatggggaagggtatggtttgggtcaatggtagaagcattggccgatattggaacaattaccttagtcctcttaagaagccaacacaatccgagtaccacatcccacgggcatacttgaagccaaagaacctgattgtcctccttgaggaagaaggaggcaatcctaaagatgtccatatagtaacagtcaacagggatacaatctgcagtgctgtgagtgaaattcacccaccatccccgagattgttcgaaaccaaaaatggtagtctccaagccaaagtgaatgatttgaaaccaagggctgaattgaaatgtccaggcaagaagcaaatcgtggcagtggagtttgcgagctatggtgatccatttggcgcttgcggagcctactttattggaaattgcacagcgccagaatccaagcaagtcgttgagaagtattgcttggggaagcccagctgccaaatcccactagatagcattcctttcagtaacca

SEQ ID NO: 8162 - DNA, 596 bp, Gossypium hirsutum
  unsure (1)..(596): unsure at all n locations; Clone ID: LIB3828-007-Q1-K6-B5
gttacattgctccagagtatgcgtatacgcttcgggtgaacgagaagagtgacatatacagttttggagtagtaatacttgagttagtcacaggcagactcccaattgacccggagtttggcgagaaggacctcgtaaagtgggtctgcaccactctagatcaaaaaggagtggactatgtcctcgattccaaactcaatccatgtttcaaagaggaaatgtgtaaggtcctcaacatcggtctcctttgtacaagtccactcccgatcaaccgaccgtcgatgagaagggtggttaagtttctgcaagaagccggtgccgagaaccagctgaaggctgccaaaaaggacgggaaattaactccttattactacgaagacggctcggatcaaggaagtgtagcttgacaaaaaaatattttttcacccccatagcttgttgcaaaaacaaggtcacaaagtgagacacacagccactaattgtttttgctgtcaagtttttgcctttcattgttaccctacttgatgttttgcttttacaggcttggtttagtggggaagaaaanagagttggggatgaaattttcacagtgaaaa

SEQ ID NO: 8163 - DNA, 593 bp, Gossypium hirsutum
  Clone ID: LIB3828-007-Q1-K6-B6
caaaataaaaaaaaaaaatactatttccagtcccatttcttctgcttccacttcacttacctcttctcatcccatatcattcttatttcatctttcttggaagtcacaaaaacaagccttggtaaatatcaattttttttgaaaaccaaaaaccctaatcccaaaccctagggtttaccttaaccggacccaaacccagatccaggaaccactctgtgctctgctcagcaagtgtgtttctgttttttagcatagttaaggcagcaatggaggtggatagtttcagtccagttgaaaagagcatctgggtatgttctgtaatggaagctttgttggctgagactttggttcttgctggaaaatctcttgcttgccttctcatgctgacaggatcgatgctgaatgataagaatgcatctcttaatttgactgcagtggatgagaggtttccatttgatgaacttctaaaaatggaacgtcctggtccagaaaacaaagatgctagtgatacagaggatgatgatgatgatgaagatgaagacgaggacaatgcagatgatcaagatgatgatggaggtgatgaggatttttca

SEQ ID NO: 8164 - DNA, 590 bp, Gossypium hirsutum
  Clone ID: LIB3828-007-Q1-K6-B7
atcccatcttcttgcttagataccataaggtcatggacaacaaaactggctaataggctaaatgtttgtgggctcatgaactgtcagtatgcaatcacagcttctggtgatgttttcttacttgaggcaaatccccgtgcttcacgtactgtaccatttgtttccaaggcaattgggcacccactggctaagtatgctgctcttgttatgtcagggaagtcactttatgatctagatttcacaaaagaagtgactccaaaacatgtgtctgttaaggaagctgttcttccgtttgagaagtttcaaggctgtgatgtgttgttaggtcctgaaatgaaaagtacaggtgaggtgatgggcattgactttgagtttgcaatagcatttgcaaaagcccagattgctgcagggcagaagcttccactttccggcacggttttcctcagtttaaatgacttgacaaagccctatcttgaaagaatcgcaaaagctttcttggggctgggattccatattatttcaacatctgggacagctcactttcttgaactaaaaggtatcccagtggaacgggtgctgaaaatgcacgc

SEQ ID NO: 8165 - DNA, 597 bp, Gossypium hirsutum
  Clone ID: LIB3828-007-Q1-K6-B8
tccggaaagaagaactccagaagctctcactcttcgaggcatcggcagccacggcccgagctgtcatcctctcccgcatcactgccctttcagtcaaacctctatcaccttctctctctcgcttcctccctagccctcgcaaccgtcctccttcagccttgaccgtgagctgctgcttaaaggacggcggagcctacgacgactactccgtttcgacgcagaaatcgaatttagatcgtggattcatagtaatatctaacatgttaaagcacatcgaaccactcgacacttccgttatttccaaaggggtttctgattccgccaaggaagctatgaagcgaactatctccactatgctcggaattctcccttctgatcagttctccgttttggtttccctctcgaaacctcctcttcatcgtctcctcttctcatccatcatcacaggggtttcattgatgagaaatctggaaagagcggcaccggcggaggacctagtgaaggagacggaggagggcgctagtcaccggcacggagaggtggtgaagaataatattgaggagggagagggtggaaatggtgaatatgaagaactag

SEQ ID NO: 8166 - DNA, 449 bp, Gossypium hirsutum
  Clone ID: LIB3828-007-Q1-K6-B9
cggccgcgtgggctcatttggccgatttttacccctctttagcaccaagcctcaaagaccctaccgcctttgaccaccccaacggtgatcgacggagggtgatctgttcgctagttaaccccacttggatccctacctcaaggaccgccgattttacccccaaaatcccctctataactccgatctcgacaaaggaactagggacttcgatggcgcgttcgaaaggtaagcccttcgccttttttattcgtgtcttcaaataaaaataaaaaaaacaacaagaactaaataataaagccaaagagaaagaaaaaaaaaatatagaataaaaaagtgcccagcgatttaaatcggaaatcacctcttgattttgatagcctttttctctattacaatatgcgaagtgtgcctcccttgattacattctttggctttggcttttgaagccg

SEQ ID NO: 8167 - DNA, 591 bp, Gossypium hirsutum
  unsure (1)..(591): unsure at all n locations; Clone ID: LIB3828-007-Q1-K6-C1
gnaaaaatacgaggtcattttcttcacggatccagttgacgaatacctaatgcaatacctgatggattatgaaggaaagcagttccaaaatgtatccaaggatggcctaaaaattgggaaagactctaagagtagggaactcaaggattcatttaaggaactaaccaaatggtggaagggtacacttaagactgaggatgttgatgaggtgaaaataagcaaccgtttggacaacactccttgtgtggtcgtcacatcgaagtttggatggagtgctaacatggagagactcatgcaagctcaaaccctaactgatgctagcaagcaagcatacatgcgtggcaagaggatccttgagataaacccaaggcacccaatcatcaaggagcttcgtgagagagttgttaaggaccccgaggatgagggcgtgaagcaaacggctcagcttatttaccagacatctctaatggagagtggcttcattttatccgaccccaaggatttcgcctcgcgcatctacagctcagttaaatctagcctaaatatcagtccggatgcaacaattgaagaggaagatgatgtggaagaaac

SEQ ID NO: 8168 - DNA, 623 bp, Gossypium hirsutum
  unsure (1)..(623): unsure at all n locations; Clone ID: LIB3828-007-Q1-K6-C10
gtttctagttcagctctatttttttttttcgtttttctgtaatctcgtgataccttacaaaaccacactgttctccttccgatttttcattttttcttttatgggttctcnaccggaaaatcgtacttgggtctcaccggccgccngagaaaaacaaagcaaatatagagtgaaacccgactatttttcctcatttctttcttgtgttccattttttcaagtgaaatcccaaaatggttgtaaattttagctttgtttttttagtttcggttctgatattgtgtttgggagtgacctcagagccagttcaagacaagcaagctctccttgcgttcctttcaaagaccaaacactcgaaccggatccaatggaactcatcaacttcagcctgcaattgggtcggcgtccaatgcgatgcgaaccgctcttttgtttatactcttaggctcccagctgtgggtctcgttggctcgattccgcctaacaccatcggtcggttaaaccaactccgagttttgagtctccgagctaacggtttattcggtgagatccctgccgacttctccaatttgactctcctccgtagcctttatttgcaagataacgcctttacaggcccgttc

SEQ ID NO: 8169 - DNA, 594 bp, Gossypium hirsutum
  unsure (1)..(594): unsure at all n locations; Clone ID: LIB3828-007-Q1-K6-C11
gccgagttagctggtttcaagggccagnaactcttgctaccgatggtggcggtttctttagcggtcccttggttgttgataatgatgcaactgctactatcggcaaccaaggtggaactaccgaggtgacggttgggaagcccgaagatgataccctcgttgcgtctctagacaatgatggaattagatatgcaaatttgattgaggctgcaactacgtttaaaggaagttgggaattgttccttgagaatggcggtgtttctgccatgcatttgatattgcttcctaagatcaatcaagctttggtgtttgacgccacagtatggaagatctcgaagataaaattaccgggaccgccatgccgacacgtcgagggaaccaatgaagaagattgctttgctcattcggttctcatggacattgaaacaggaaagcttaggccacttaggttgaactatgacacttggtgttcatcgggtggtcttgatatcaatggtcgattggtaagcactggtggttttaacaatggctccgacactgtgagaatcctcgacttatgcgatacttgtgattggaaagaatatcccggtgcaa

SEQ ID NO: 8170 - DNA, 605 bp, Gossypium hirsutum
  Clone ID: LIB3828-007-Q1-K6-C12
cttctttcctcctagcccaaaaaaaaaaaaccctctttcctttctctcgttctttttcccgttcaatcatgtcttgcttcattagcaaatatgccgatgagttggctaaaaacgctgcttacattggaacccctggaagggtatccttgctgctgatgaatccactggcaccatcggcaagcgtctttcaagcattaatgtagagaatgttgaagataacaggcgtgctctccgtgagctcctattcacaactccaggagctcttcagtacctcagtggtgttattctctttgaggaaaccctttatcaaaaaaccgcttcgggcaagcccttcgttgatgttttgaaggaaggtggtgtcctccctggcatcaaggtcgacaagggtaccgttgagcttaacggaaccaatggcgaaactttcacccagggtctagatggccttgcacagcgatgccagaagtactatgaagctggtgcccgctttgctaaatggcgtgctgtccttaagattagtgctaatgagccaaccgagcttgcaatccaagaaaatgccaacgggctagctatgtatgctgccatctgccagcaatgtggccttgtcc

SEQ ID NO: 8171 - DNA, 587 bp, Gossypium hirsutum
  Clone ID: LIB3828-007-Q1-K6-C2
attttcttgttccttccttcgccgtctattgctttttgttacctcgatttcaagtgaatcagaatgggtaagtgaaaagactcacattaacattgtggttatcggccacgtcgattctggagaaatcaaccaccactggccacctgatttacaagcttggtggtattgacaagcgtgtgattgaaaggttcgagaaagaagctgctgagatgaacaagaggtcattcaagtatgcttgggtgcttgacaagctcaaggctgagcgtgagcgtggtatcaccattgatattgccttgtggaaatttgagaccacgaaatactactgcactgtgattgatgcacctggacaccgtgactttatcaagaatatgattactggtacgtcacaggctgactgtgctgttttgattattgattccaccactggtggttttgaggctggtatctccaaggatggtcagactcgtgagcacgcattgcttgcttttacccttggtgtcaagcaaatgatttgctgttgcaacaagatggatgccactacccctaaatactcgaaggctaggtatgatgaaattgtgaaggaagtc

SEQ ID NO: 8172 - DNA, 592 bp, Gossypium hirsutum
  unsure (1)..(592): unsure at all n locations; Clone ID: LIB3828-007-Q1-K6-C3
cttgggtttcgaccctgccttggggagccagattggagggtcatcggcgcttcagcgcctctgcctccgatgtcggttccagaaataaacccaagttcgtgatcgaacgtgccactgacgtggcatagtggagaggcgcacgacgcgaagggacgtgcaacgtgcggcgcctagaggcttgctgtttacaaacggcgcaaaaggggctactagggtttcccttgtcgaaatgttttgggtttgtgggccaattgggccgtatttgtaaataggtatttagggtttggggtaaggtcttattttttgggtttgagtctgtttttgttggattttagtttctagtagtttgggccggacaaattttggaccccacagctggtcttctttgctctttgtcgtgtaacgagaacagagcaaagacttcaaaagggccaaaattgcctggacctgtcgagtcctgatttcttttggccacttcaagtagctttgctttaacccactgcatctctagggttataggaactcgtcttcaatctgctccactactttttaggggagatttgtatcttctaaaanaaaaaaaanaanaaaa

SEQ ID NO: 8173 - DNA, 469 bp, Gossypium hirsutum
  Clone ID: LIB3828-007-Q1-K6-C4
tccactcttactaaccctcatactaacctaccatggacatgaccaggacttgtgcgccgtcttaggcgccgtcgtctctatgagcgcggttctggctgctggcgctgctgcaggtgcatctccagcttcatctccagctgcagctgcagctgcagctgcagcatctggtccaggctcagatcccagcctagaaatcagaacaatgcctgtaatagagcccgtggttgaagccacacttggagctccacttgcctactttttacactacgccacacagaaaaatggatgaaaccatggatgattgcataatctattgaagaatggtggatgaataggtggataaatactacttgaggtgctacctggggtgctgtccatcgttgaagacagcgttgaagactgcacttgtcagtacacttgtgagatctgttaggatatcaagtggtacttcgcgctctactttgcactc

SEQ ID NO: 8174 - DNA, 485 bp, Gossypium hirsutum
  unsure (1)..(485): unsure at all n locations; Clone ID: LIB3828-007-Q1-K6-C5
gggatcgaagggaaggcaatcggaatcgatcggttcggggcaagtgcaccggcaggtagattatacaaagaattcggtttaacaccagaggctgttgttgcagcagcaaaggaactttgctaggcattattaggtgcctttggtgactgtttttgtttttaataataaaaggaatcatccaattttcttaaaaaaaaaaaaaaaaaaaaaaaaaaaaaaaaaaaaaaaaaaaaaaaaaaaaaaaaaaaaaaaaaaaaaaaaaaaaaaaaaaaaaaaaaaaaaaaaaaaaaaaaaaaaaaaaaaaaaaaaaaaaaaaaaaaaaaaaaaaaaaaaaaaaaaaaaaaaaaaaaaaaaaaaaaaaannnaaaaaaaaannaaannaaaaaaanaannnnnaaaaccccccanaaacccccccncaaaaaaaccccaaaaaccccaacccccaccacacaaaccaaaaacccccaaaaaacaccaccccc

SEQ ID NO: 8175 - DNA, 600 bp, Gossypium hirsutum
  Clone ID: LIB3828-007-Q1-K6-C6
atttctagagagagggagcaaagctgaactttatgctctttttctttctcaaatttcagctaactgtaaaaagtaataattataatactaatattccataatgtcttggctgttgaagtctctccaatccgaagttcctcgttcgcccacgtcttcaccagatcacagtcccaccaacctaaacggcggcgtcaaggacgatctttctctcatcggggaaacaataggccgccaactacgtggagtcgctgcgttcttagcaccgcctccttcgcagccttccgtcaccgcctccgagggaggactagaacaggaacaagtacaagagccgcagtcagataagctcctggggatccgcaacgatttggcggagatcggtggcagcttcaagagcgggctttcgttattatcaagtaacagagcggtgacggagatctctagattcgcttcgagtttattacagttcccggatcaagatgatcatggtggtcatgatgaggatgatgacgatgaagattacgatgacggagtgccgggaattaccgatgaggtgattaaatttgttgaagaaatttccaaccgaccagagctctggactga

SEQ ID NO: 8176 - DNA, 443 bp, Gossypium hirsutum
  Clone ID: LIB3828-007-Q1-K6-C7
gcggacttggcacggaggcgcagcacgcacggcgatttggtttggctgcggcgcaagggcagaaagttgctgaaggctagggtttcacttggaatcgggccctgtaaactgggttagagtattttgggctcggtttgatgtaattcgggttgttgggcttggtgggtctgataggtttagtatttgggttaaggagtgaattgggcttgtaactatggacattatctggacattttatttttattttaattatttttcatatctgggttttaatagttgggctcgggccgagcaaaatttgggtattacagggacgataggaaaattttgaccaatactctaaaatctgggatcgaagtgaaaatcgaaaggtttatgaggtatgtcctgacaagttcagttccgtcaataattttcgtaaccaaatcgaataacccatcgac

SEQ ID NO: 8177 - DNA, 580 bp, Gossypium hirsutum
  Clone ID: LIB3828-007-Q1-K6-C8
cccagcgtccgcactccctcacctttcaaagagaaaaattgtttgtaataatatttgcgttccttgtgtgtcaagctaacgcttttcgaccaatcctccttctaggcaaccagaatctgatagagagaacttgcaagcaaacacccttctatgatctttgcatttggtccctcaaatcaaaccccgaaagccgcgacgccagcgtgaagaagctagctcagatcatggtggattcactcaaaactaaagcgaccgagacacttgatctaatcgacgagctactacaggatggacttgcccttgaccctgaaatgcaaaaggccttaacatcttgcgctgaacgctataacgtcattataaggggagatgtacctgagatcaacgaagctctcaagacgggtgactacaagtttgcagcgaaaggcgccaatgatgcagccatagaggccaattcttgtgaaatagagttctctactaaatcaccgctgactgatatgaacaaagtggtgcatgatgtatccgtcgttgcggcttccattgtcaagataatacaaaccaagttttccttttgatgtgatca

SEQ ID NO: 8178 - DNA, 603 bp, Gossypium hirsutum
  unsure (1)..(603): unsure at all n locations; Clone ID: LIB3828-007-Q1-K6-C9
aaaaaagaaggnagaataaacaaaanaaatggccggccgacatttgtagaagtagaagaactaaagaagtgaagctttgaagaaaatggcggagctagggcttcaagatcgaaacacagtgagatcaggctacagagctggagctgcgagccctgactccgttatatttactttggaatcgaacttcagcctcttctcgtcggcttccgctagtgttgatcgttgctcttttgcttccgatgctcatgaccgcgattccattgcttccgaactctctttacatatggcaggacaagaaagtggagatcagaatgagagttcgagtggaccagatccagatccagatccaaacaaagctataacagtccccaagcacattcgtctctccagaaaaggagaaaaagtgaaagtaaaaacggaagaaagcggtccagctcatacagaggacgaaacgcaactcagagattcagcaagaaactcgttttccctagctcttaaagagtgtcaggacaggaagacgagatctgacgctttgttgaagaatcctgataggcgaagaccagcttcattagatctaaataatatctctggtttgtctccacg

SEQ ID NO: 8179 - DNA, 584 bp, Gossypium hirsutum
  Clone ID: LIB3828-007-Q1-K6-D10
acgccttattcataaaattataaaatactaagagatttaagccaacaaatggctccattgacgataatagtggtgttttttctctgggtaggatcactacttatggttcaaggtggagatcccaccattagtttcgagtggaaggtcacttatggcaccatatctcctttgggtgttcccgtaaaagtattctcattaacgggcaattccctgggccaaatatgaactctaccaccaacaacaatgttatagtcaatgtgtttaacaaccttgatgagccattccttttgacatggagtggcgtgcagcataggaagaatccttggcaagatggtgtgcttggaaccaactgtcctatcccccccgggacgaattacacctataaattccaggtgaaggaccaaattggcagcttcatctattatccagtgacggctatgcataaggcggttggtggtttcggtggccttcgtattaacagtcgtttactcattcctgtcccctatgctgatccagctgatgactatactatcatagcaggagattttttcaacaagggacacaccaccctcaagaaaattctt

SEQ ID NO: 8180 - DNA, 421 bp, Gossypium hirsutum
  unsure (1)..(421): unsure at all n locations; Clone ID: LIB3828-007-Q1-K6-D11
gtcaaatgcacaaanatcagcttttaactagacacaatatcttatattcactcgaaaggtcgcatggtgctaagagatgccgatcctccgttggattgctcgtggcttgttacaaaatcgaagcacattccgttgggctgtaaatttagagcaaggtgtcccattgtttgccagaagcaatgccaacagcagctcggaatatatggtcagcttacacattcatgtacagttgtttttcttaactgagtaaaaaaaagacactcgagagcttctgttattaaagtcatgatttcatttctctaaagaaacagaaattcgtcatcaaaatacttcaagatttgtaaagagagctctttcacattgacgaactactttattccttttgttttgctgagaaatgcaagtaaatattgttctttgt

SEQ ID NO: 8181 - DNA, 568 bp, Gossypium hirsutum
  unsure (1)..(568): unsure at all n locations; Clone ID: LIB3828-007-Q1-K6-D2
ttcaacttattcgtcttcagagacggaggataattgtatctttngaacccatcgaaaatcagctcaaatgatactcagtttgttggtggcaaagtggatgcaagtgctgaaagttctaccactgataatccattaaatgctagcgtttctgagcagcaggagtctcagctcacttcacctgcaatttcacccgatgagatgtacagatctgtctttgctcctattgaggaagagatgactgtggagccttcttatctggttgccatcattcttgagttttttcgatgtgccaacttagaaagggtcaaagtgcatccaagcctatatgtgttaactattcaattattggcccgtagtgagcaatatgcagaacttagtttgttcatcataaacaaggttattgagccctcaaaagaagttgctctacagctgctagaatcaggtcgtcaaagtttgcaaattaggaagctgggttcggatatgctaagacagctttctttgaatcatgattatgtgttgttattagtgcaagatggatattatcttgaagctttacgttatgcacgga

SEQ ID NO: 8182 - DNA, 600 bp, Gossypium hirsutum
  unsure (1)..(600): unsure at all n locations; Clone ID: LIB3828-007-Q1-K6-D3
gnttatggtcatatcgagcaatggattgattttgcagccttggaaattgatgctaatattgccaaatggttgtatccaagacttggttacggtgtttaccttcctccagctgaggaagctgctattgctgcattgaagagagcccttggcgctttgaacactcatcttgcttccaacacatttcttgtgggacatgctgtcacccttgctgacattatcatgacatgtaatctctacttgggtttcttccagatcatgaccaagagttttacctctgaattccctcatgttgagaggtacttttggaccttggttaatcagccaaaaatcaagaggattcttggtgaagtgaagcaggcagtctctctaccacctgttccttcaaagaagcctgctgcccagccaaaagaaactaaaccaaaggctgaaccaaagaaagaagccaaaaaggaggttgagaaacaggcagcaaaggcagaggccgctgaggaggaggaggcaccaaagcccaaaccaaagaatcctcttgatttgctgcctccaagtaagatggtactggatgactggaaaaggctttactctaacacgaagaccaatttc

SEQ ID NO: 8183 - DNA, 293 bp, Gossypium hirsutum
  unsure (1)..(293): unsure at all n locations; Clone ID: LIB3828-007-Q1-K6-D5
gnaaaacttatagaggaggctctacgtcaaccgggttcatcgccgagagttcaaaatatgagctgacagctatggatacagctcttcaagagagatttttggcaacgtaaaagaatttgtattaaggtttgaattattttttattatttctacttaaaaatagtttaaagagtaaattaattattttattaaaaattctatctaattctactgttaaaatttggtttttgtacgttaaaatgttgtgcgtcaggtgtaattgcttaattattctattagtcatattaattttt

SEQ ID NO: 8184 - DNA, 599 bp, Gossypium hirsutum
  Clone ID: LIB3828-007-Q1-K6-D6
tggcaccacaccttaatattgttccttcctgtttgtgcttttattattattcatttcagcctctaaagttcaatcaggcgctattgatgttgttgccaagtttggcgcaaaagctgacgggaaaacggatctgagtaagccatttttggatgcttggaaagaagcatgtgcctctgtaaccccatcaacagttgtgattcctaaagggacatatttattatcaaaagtaaacttagaaggtccatgcaaggctcctattgagattaatgttcagggcactataaaggctccggctgatcctggtgctttcaaggaccctaattgggttagattctatagtattgaaaatttcaaaatgtccggcggaggaattttcgatggtcagggaagcattgcttatgagaagaataaagatccccacaatcgtgcatttcgtgtcaaactccccgttaatataaggtttgactttgtgaccaacgcattgatacaagatataactagcaaagacagtaaactattccacgttaatgtttttgcatgcaaaaacattaccctcgaacgtttcacggtagaggcaccggcagatagcccaaacacag

SEQ ID NO: 8185 - DNA, 583 bp, Gossypium hirsutum
  unsure (1)..(583): unsure at all n locations; Clone ID: LIB3828-007-Q1-K6-D7
gttttagtatttctgttaccatggnaaaaggcanaatcctcaagccaatctgccggnaaaaccaattcgatgcaaagctgcaatttgtcgcgaagcaggggagcctctagtgatagaggaaatcatggtggctcctccgtgtccctacgaagttcgaatccgaattatttgcacctcgctctgttacagcgacattacattttggaaattgacggtgcctcctgcttgtgtccccagaattcttggtcacgaggccgtcggggtggtggagagtgtgggtgagaatgtaaacgaggtagcaccaggagatgttgtcattccaacttttttgtcagaatgtggagagtgtgaagattgctgttcaaaaaggagtaatttatgttcaaaattcccattcaagatccatccttggatgcctagatatgagaacagcagattcactgaccttaagggagaggtcttatatcatttcctattcgtctccagtttctccgagtacacggttgtggatattaaccatgtagtcaagattgatcccgcaatccctccaaacagggcatgcctctttggctgttgtatagct

SEQ ID NO: 8186 - DNA, 301 bp, Gossypium hirsutum
  Clone ID: LIB3828-007-Q1-K6-D9
cccagcgtccggactccagcgtcgcaatctcaacaatgcctgttcttgggtccttggttggagccacccttgtttctttctttgcctactattttcagtaagccagcaagaatatacgaaagcatgaagtgttgaagaataaaaaatgggggattaataaatgtaaaatattactcggggttcaatccatttttacctgcttttcttcttttttttgttcatcacttcatttgtacgttcataaaaaaaagttgaattccatgtgatactttgcaattgaaaaaaaaaagttatatatttt

SEQ ID NO: 8187 - DNA, 591 bp, Gossypium hirsutum
  unsure (1)..(591): unsure at all n locations; Clone ID: LIB3828-007-Q1-K6-E1
ctttaatcctccttgctatcgaactctaccaagtatgagacctccaanaggccgtggtggtggtggtgggtttaggggcagaggtgatggggggagagggagaggaaggggtggtggtggtggtggaagaggtggcgataggggaggcaatggcatgaagccccgtggtggtggccgcggtggaggaagaggacgtggtggtggaagaggaggaatgaaaggtgggagcaaggttgtagttgagccccatagacacgagggagtttttgttgccaagggtaaagaagatgctcttgttactaagaatatggttcctggtgaggctgtctacaatgaaaagaggattgctgttcagaatgaagatggaaccaaagttgagtacagggtttggaaccctttccgatccaagttggcagctgcaattcttggtggtgttgataatatatggattaaacccggtgctaaggttctctaccttggagctgcttcgggtaccactgtttctcatgtatccgatgttgttggtcctaatggagtggtttatgctgtggaattttctcacagaagtggtagggatttggtcaacatggc

SEQ ID NO: 8188 - DNA, 608 bp, Gossypium hirsutum
  unsure (1)..(608): unsure at all n locations; Clone ID: LIB3828-007-Q1-K6-E10
gtttgtgcaaggagattccnaaatggtagaagcacttggcaacaacatgatgagaacaaagagttgataactttgaaagataagattcttaaggtggataccaacagtcaaacaagatgggacaattgtaatggaagattgaagtactggttagaccaatgggtagatactaaaagtaaagatgttgaagtcgaagatatagactcggtttggacttcgaaccgcaagcctacgaggctcaagactttttcgagacagtatcattgtgatgcagaaggggtggattctccggtacgggttcaacgacgacgatcatttcatggaaagcagagttctttaggagaagatagttcttttattacatctcctgtagttccaacttacatggctgcaacacaatctactaaagcaaaggtaagatcaatgagttcaccaaagctaaggccaggaacttgtgatactcaatccgaaagctattcaccatataagaacaagttgtgtcttatatcttctgttacaagcaagcctaacgcttatgagcagagatccccaacactaaagggtataaagtcaaagcaaaccttgaaggatcttagctttgactctaa

SEQ ID NO: 8189 - DNA, 554 bp, Gossypium hirsutum
  unsure (1)..(554): unsure at all n locations; Clone ID: LIB3828-007-Q1-K6-E11
ttcccctccgccacccttccttcttctcagaaccgtttcttctcacgaatcctccagacttaagacaatcttcctgagttattagaggtttatcctaacaaatctgtgaaggtttngagaaaaaataaacaactttttttaatggcatctagagtttcattaaagactaaaggcaaaggagggaaggggtctaagggctcggatgataaatcaactacgcagtgcttgaaagagtggagcacatgggctatgaagaaagccaaagtggtaacgcactatggcttcattcctctggtgatcattatcggcatgaactctgaacccaagccccaactttatcaattgctaagccctgtctgattcagttgcttatttcttaaccacccagatcttggtttaactatgtaatttgtttgttgcctatctgtcgaaactacatggtattatgttaggcatatgctttatatgatgttgactgttctattctatgtgcttgagaatacattttatgtaattcgaatcttatttgagtttctcaatattttcttttactt

SEQ ID NO: 8190 - DNA, 256 bp, Gossypium hirsutum
  Clone ID: LIB3828-007-Q1-K6-E12
cccagcgtccgctttaatgcgttgaaattgaatttaatgggaaatattatattatcgtattttagtcgtaaaaaaaaaaaaaaaaaaaaaaaaaaaaaaaaaaaaaaaaaaaaaaaaaaaaaaaaaaaaaaaaaaaaaaaaaaaaaaaaaaaaaaaaaaaaaaggggcgggccgttttaagaagaatcaaagtttacttccccgggcttgcaaaagtaatagcttttttatagggcaaccaaaaataaaattaatg

SEQ ID NO: 8191 - DNA, 590 bp, Gossypium hirsutum
  Clone ID: LIB3828-007-Q1-K6-E2
aaaacaagatcctctcgtctccgcagcatgacaataggccgtcgatggcgttcagaagtccagaagtgtcacctgatgacatgacaataacacaagttaacacccttcatatggtcatattcaagattcaagttgatgaattacctggacatgcggataactcgcggttgtgtcccctgcatctctgttctgtaatttgactgtacaatcaatatcttcaatcacaagaatggaacgattcgacacatgaagcaacaagtactcaagagaggagtccgagttgactgctgataagttcaagttgtaaatatcaaagttgagatgatttgccatggctgcaatcaaacttgatttgcctgttccagggggaccatatagcaagtaaccacgcttccacactttcccaattttcttatagtactccttgccattaataaagctgtcaagatcctccataatagtctttttgaggtcaccatccaaggctaatgtatcaaatgtcataggatggtctagattgacagcacttgagctccacctttcacgcctcacagtgtgaaacttcaccatccgattccggtctttcagtt

SEQ ID NO: 8192 - DNA, 593 bp, Gossypium hirsutum
  Clone ID: LIB3828-007-Q1-K6-E3
ctttcggaaaacctcaaaggcagaccaaccgcagatttatgaactcaacaatggaaccgtggttgttaagatcaccaactatggctgcactatcacctcattgtctgttcctgacaaaaacggtaaattagccgatgtcgtcctgggattcgacactgtcgaaccgtacgtgaaaggtgcttcaccttattttggatgcattgtgggaagggttgcaaacaggataaaaaatggcaagtttactcttaatggaacggagtacactttgccaatcaacaagcctccaaacagtctccacggtggattcaagggttttgacaagagaatatgggaggtagcagaatataagaaaggcgacaaaccctccattacttttaaatatcgcagcagcgatggtgaggagggttacccgggtgatgtttctgtgactgcaacctacactctaacttcaaccatgacaatgaagcttgacatggaagcagtgcccgagactaaggccactccaattaacttggctcaacatacttactggaacttagcaggccacaactcagggaacatacttgaccatacaattcagatatgggcatcag

SEQ ID NO: 8193 - DNA, 582 bp, Gossypium hirsutum
  Clone ID: LIB3828-007-Q1-K6-E4
cggccgcgtgggtggaagccaagctggaaaggttcagcaacattatcaatggcctatgctggagccattttcgctgatgcttgccttaagggactgaatggcgttcccgacgtagtggagtgctcatttgtgcagtcaactgttactgaactccctttctttgcttccaaggtgaggcttggaaagaacggtgtggaggaagttttggggttaggccctctctctgagtacgagaaagaagggttggagagcctcaaaccagaacttaaatcatctattgagaaggggatcaagttcgccaaccagaattaaacctgaactacttatgatttcttccattagcccaatccgaaattcttaaaaagttttttttttgtgttactgttgtatttcatgctgcaagcagcatcggctttactgaataggataggccctacataccatcaagttttcaagtaataattcccagtgacctgttacaaaggagggtttggttttaaaaaaaaaatctatttttccagtttaggtggggtgttccattcatttaactatataaattgtgaaatcacgtttgctctgggg

SEQ ID NO: 8194 - DNA, 590 bp, Gossypium hirsutum
  unsure (1)..(590): unsure at all n locations; Clone ID: LIB3828-007-Q1-K6-E5
gttttggtggggaggaacatcatgttcttcttcctctctgcgtgtttggttggagtttgaactgtcggaagctcaaatggtgccggcgttatttgttttcggggactcccaagttgatgttggaaacaacaaccaccttttcttttccattgccaaggctaattttcctcacaacggcgttgattttccgaccaagaaagcgaccggaagatattctaatggcaagaatgcagcagattttctggctgaaaaattagggttgtcaagttcaccagcatatctttctttgtcaagtaacacgcatgcatcatacatgaacggtgttagcttcgcctccggtggttccggaatcttgaatacttccagtcaagttctcggacaatccatacctctttcggatcaagtgaacaacttcttatcagtgcataaagtcatgctgcagaagatgggaactgatggtttagaaaaacatttttccaagtctcttttcgccattgttattggtagcaatgatatcttgaattactttgaatccgaagatgaaaaggacaccccggaacatcttgtgaattcaatggttnaacaacctg

SEQ ID NO: 8195 - DNA, 598 bp, Gossypium hirsutum
  Clone ID: LIB3828-007-Q1-K6-E6
gggttccatatgatgatcagcgtttgcaacaacttcgtgatcaccaacgttaatatatcggctccggatgaaagccccaacacggacggcattcacatgagcaaaacaaataaggtcagaataagcaacagtaccatcggcactggcgacgattgtgtctcaatgatccatggaaccaccaacgtcaccattgagaacgtcaaatgtggccccggacacggattcagtattggtagtcttggacactacgatgctgagttcgatgtttttgggatcaccgtgaggaattgctcactagcctacacagaaaatggtgcaagaatcaaaacatacagaaatgaaagtccatctaaagcttcgggcattattttccaagatctcactatggaccatgttaagaaccctattctcatcgatcaagaatatgcaacgattccaggcagtgtggactcaaaagtgctcatctccgacgttgaattctcaaacatcagaggaacaacaataagcaaaattgctgtagtcctagcttgcagccaatcatttccatgcaaaggcattaccctcaaggacattcacttagagtataccggtgatcccg

SEQ ID NO: 8196 - DNA, 535 bp, Gossypium hirsutum
  unsure (1)..(535): unsure at all n locations; Clone ID: LIB3828-007-Q1-K6-E7
gctctacattgttattggagcttgctttttcgtatctaaaacacctctaaaccaagtaaacatcacaaactcgggagctgaacttgccacaatcctcagagcttgataagctttgccgtcccgggggatgtcgttactccacccccccccccttttgatgatgaaatgtttgaaacttgaacagagatttcatgcattggttattctttcatatctggggcctggcggaaagctgacaatttgcagttactaggccgcatacaagttgtcatgccttcaaagttgagatggatactatctataagtataccgttgaagcttgatgaagacaggctatacaatacacagcacattgttctgtctgtgtatacatctctcttaggtgtgtttctcagttatgcccgtaattaagtagtggcagcaaatgagctacacatgtggtggtttgtttccctcttgtactgcagctatcaaaataaatgaaatcgttgttgttctttatttgccaaaaaaaaaaaaaaaaaanaaaannnnn

SEQ ID NO: 8197 - DNA, 520 bp, Gossypium hirsutum
  unsure (1)..(520): unsure at all n locations; Clone ID: LIB3828-007-Q1-K6-E8
gtgatccctaactttatgtgccaagnaggtgacttcaccgccggaaacggtaccggaggtgaatccatctacggatcaaagttcgctgacgagaacttcatcaagaagcacactggtcccggtattctctcaatggctaacgctggaccgggaactaacggatctcagttcttcatttgcacggctaagactgagtggctcgacggaaagcacgttgtgtttggacaagttgttgaaggcatggatgtggtgaaagccattgagaaagttgggtctagcagtggaagaacttccaagcccgttgttgtcgctgactgcggacagctctcttagagaagaaaaagagaactatgtgttaagctgggatgttgtctaatgtctagaatatttaatgtctgtcatttagactcttttatggtgctgtttttatcgtcactgggtttggtggttttcaagaacttgctttatgtagtttttatgattaactaccattaaataagatactctttttcatcatcat

SEQ ID NO: 8198 - DNA, 436 bp, Gossypium hirsutum
  unsure (1)..(436): unsure at all n locations; Clone ID: LIB3828-007-Q1-K6-F10
ggcacggtgctgcagnagttccatcgcgggcatgttgtttgggtgctcaaactattgcttacgaagcacagaccaaagatgaccgacgggctatctgcgagtgccttgttaatgcattagcaaatattggcacatctgactccttcactgcgcggatacctttaattgctacccaatgcggtgttgatgtttctcttccgccaattaccagcgacaaagattattgttccaagctcttcccttgacttcgtttgatataccatcgtgttgtgccacactagggaagatattaattatatctagctcaatccatcatcctttaaatttctttaagtaatttacattgtacttagtgaataacaaatcctagttgtggacaaataagatcatacatgacgttaatgtgaaatcatactttcttcgttgctcttttttc

SEQ ID NO: 8199 - DNA, 608 bp, Gossypium hirsutum
  Clone ID: LIB3828-007-Q1-K6-F11
gcagaatcttcccttgactatggacaatcttcaaagaaagatccgatcgactccacttccaatgagtccactggagagtcttgcatcctcagctgtacgaacagctaacaaggccaaagctaaactcatcgttgtcttaacccgtggtggaacgacagccaaattggtcgccaagtacagaccagctgttcctatcctatccgtggttgtcccagtcttgacaaccgattcatttgattggacctgcagtgacgaaggtccagccagacacagtctgatatataggggcttggttcccatcctggcagaagggtcagccaaggcaactgatgccgaatccaccgaggtcatcttagaagcagcaatgaagtcagctacggagaaggggttgtgcaagcctggtgatgccatcgttgcactgcaccgtatcggggctgcttcggttattaagatctgcatagtgaagtgatgatcaaaagctggctttttagatattgcatttaattatccctttattgttcttaaaaatctaagctggttcaactttgaatattcagctgaaacactgttttgtctcagcttctgatgacttgctagttaatcgttaa

SEQ ID NO: 8200 - DNA, 612 bp, Gossypium hirsutum
  Clone ID: LIB3828-007-Q1-K6-F12
tgctggagctgtggtgttgttggcgagtaaaggcaatagttcaaagattctagtgttcagtgaggacttgttcttcctttatttgcttcctccaatcattttcaatgccggattccaagtcaagaaaaagcagttcttcaagaatttcacaataattttgatgtttggaatatttggtacagtgatttcattctgcctcatatcagtaggtgcctttttgctgttcaacagaattggtgtgacatctttaaatactcaagattacttagctgttggtgccatattgtcagcaactgatactgtgtgtacattgcaggttctcagtcaagatgaaacacccttcctttacagtgttatatttggggaaggagtggtgaacgatgctacttctatcgtgcttttcaatgcagttcaatcactcgatttcaacaatatcgatgccatgatatccttgaaactgttggggatttttctttacctcttcttcaccagtaccattcttggtgtagtagcgggtcttttaagtgcttttatcataaaaacactttactttggaaggcattcgacagaccgggaagttgcactcatgatgatcatggcttatttgtcata

SEQ ID NO: 8201 - DNA, 126 bp, Gossypium hirsutum
  unsure (1)..(126): unsure at all n locations; Clone ID: LIB3828-007-Q1-K6-F2
ggcaattcagatcctagatgaaatggngatctcaggatttgaggtttcaaagctgggatttgggtgtatgggtctttcagatcactacgggtcagtgtcagatgaagttggcatagctatcattaa

SEQ ID NO: 8202 - DNA, 615 bp, Gossypium hirsutum
  unsure (1)..(615): unsure at all n locations; Clone ID: LIB3828-007-Q1-K6-F3
tcttcttctttcaacctttcttctgcatatatatatatnaaaaaaatcccaagaaagagaaaggtaaaagatcaagaaatagataatgggtgcttgtgctactaaaccaaaggttttgaaagatgaaaactcaccggccaccgtccccgcaccagaaccggtcaaggaagaatccgttcagccggttgaaacaaaagacgaaccggtggtcgtgatggaagctgatgaaaccaagccgaattctcttggttcattgcttgataatgaagaaaagagcaatgaaactaaggtggaggcaataactgttgaagaaccaaagattaaagaagaagccgccattgttgaggcgccaaagaaagtggaagaagccattgttgaggctccaaaggaggccccaaagaaagcagatgtcattgttgaggcaaaaacaatggttgaagctgaaaagcaaaagaaaaaggaagaagaagaagaaggagatgaggttattgttttggctgaaaagaaaagtgaagaaactaagaaagaagaacccattgtaaaagaagtgaaaactgaggcacccattgtttgatcatagggaaatgtaagggaaagtttatatatatatatatg

SEQ ID NO: 8203 - DNA, 607 bp, Gossypium hirsutum
  unsure (1)..(607): unsure at all n locations; Clone ID: LIB3828-007-Q1-K6-F5
ggggctcaaaaacagagaanaagaagaaattgttcagtgaatgaagctttgttgtttgccaccatctccatcattggtctgcaagtagatgtacacttgaaagaggctctgtttactctggaatcttccacactgcttctgttgagaaggaatatggtattgttttgaagaaagcaaaattgactaaacagggcagatgtgccaccaatgttgcgaatggcagtgttgtagagacgcttgtaatccttgctggtgatcttgttcaagtttttgcgaagggagtcccacttcctcttgatggctttgctggaaatttagcctgcggtaatggagaacctgctcctgaaattcccccttcttctgccaattcgctgaatgggaccaagaagttcaataagtctaccatggatgaaagaataagtaatacgaaaagaaattcagctcccaacgagaatggatttgttgatggttttatatccatgggtgctggaaaggaagatgaaggtcaaaagttgctagagaaacctatgggaaatggagaaggagttgaatatcacaaaagagaggagacaaacatcgagcagagagaagatgtttctggtgccac

SEQ ID NO: 8204 - DNA, 607 bp, Gossypium hirsutum
  Clone ID: LIB3828-007-Q1-K6-F6
gccaccttttgttttctaagtaccaacctaagtttcttctaatccgtagtcttttttctttttcatggctttcctcaagtgggttttactgattttcactcttcattcgtttatgcctacacccatttcttcaaatctttcattaaacaaggaagccttagcgcaaatcccactcaactttctcgaattttccaagaaaccagagattatggattggatggttaatattagaagaaaaatacatgaaaaccgggagcttggttatgaagaatttgagactagtaagcttatacgagctgagcttgatcttatgggcatcccttacaagtacccgattgctgctaccggtgttgtcggctatattggcaccggcaagcctccttttgtcgcactcagagcagatatggatgctcttgccatggaggaactggtggagtgggagcataagagtaaggttcctggaaagatgcatgcttgtggacatgatgctcatgttgctatgcttcttggtgctgcaaagatgcttcaacataatcaaaatgatttgcagggaacagttgttcttatttttcaaccggcagaagaagggggtgggggagccaaaata

SEQ ID NO: 8205 - DNA, 253 bp, Gossypium hirsutum
  Clone ID: LIB3828-007-Q1-K6-F7
gttccctaaagattgatgcatttccaaaagacttgggaagacacgtgcatctgctattactgcgttcgatagccagttttcaggaacacagtccattgctactaccctatttgcagcctcaccaacaattccaaatgatgtattgagcaaggcattccagattcatcctagagaggttgagagaatcaaggtcaaattgacacctaaaaaatagattaaatcaagtttaatatgttgtgttcttaataataag

SEQ ID NO: 8206 - DNA, 609 bp, Gossypium hirsutum
  Clone ID: LIB3828-007-Q1-K6-F8
ctcatctatgatggccaagtgtgatcctcgccatggcaagtatatggcttgctgtttgatgtaccgtggtgatgttgtgcccaaggatgtcaatgctgctgttgccaccatcaagaccaagagaactattcagttcgttgactggtgcccaactggattcaagtgtggtatcaactaccagccacccactgtcgttcctggtggtgatcttgctaaggtccagagagccgtttgcatgatttccaactcaaccagcgttgctgaggtgttctcccgcattgaccacaagtttgatctcatgtatgccaagcgtgcctttgttcactggtacgtgggtgagggtatggaagaaggagaattctcggaagctcgtgaggaccttgctgcacttgagaaggattatgaagaagtcggtgctgagtcaggcgagggtgatgaggaagatgaagatgagtactaaataagtaatgtttgagtggagggcttgcattttgctacccaatgatttgtttgcttttatcgtgtgtttttgcttattctattgtgtgaacttcgactcttcgaagctttgttcaagactctatatggactgcaatagatttgacgagt

SEQ ID NO: 8207 - DNA, 403 bp, Gossypium hirsutum
  Clone ID: LIB3828-007-Q1-K6-F9
tgcttactagttttatcccttcactttctttttctgacaattcagcttgtaagacctatcattttgcaaaacacaaaaagctttcttttcctgtaagccaaactcgatccaataatatttttgatcttattcatgttgacaaaaaaaaaaaaaaaaaaaaaaaaaaaaaaaaaaaaaaaaaaaaaaaaaaaaaaaaaaaaaaaaaaaaaaaaaaaaaaaaaaaaaaaaaaaaaaaaaaaaaaaaaaaaaaaaataaaaaaaaaaaaaaaaaaaaaaaaaaaggggaaattaaaaaaaaaaaaaaaaactaataccaaaagggaaaaaaaaaaaaaaaaggggggggacggcggaaaaaagaaacaaacatcgccgccccgttttaaaagaacaaacttttttt

SEQ ID NO: 8208 - DNA, 590 bp, Gossypium hirsutum
  unsure (1)..(590): unsure at all n locations; Clone ID: LIB3828-007-Q1-K6-G1
ctcattttcccttcaaanatccaccgtttttgaaccaagaggactgttttgtaccttcaaggaagccttgtttcgttgaagaagatgatggtttagcttcacttgcaggcatggagggtgttggatattcagatggaagctattacaaaaaccatagccaaaagggtttttctcaacacccttttgtttctcaaggaggaataatagtttaaggaacatgtcttcttcttcttcttcttcttctttttcatgtttgattccttcttctccaaggtctactaggttttatgatggcagatttgaagatcatcatcaaccccatttcttggatgcttgtttcctttgcaagaaacctcttgggggtaacaaggacatcttcatgtacagaggggacacacctttttgtagtgaagagtgtaggcaagaacaaatagacatggatgaagctaaagaaaacaatttgagcttttcttcatcaatgaaagcattgaggaagaagaaagaccaaaggaaatcatccaaatctccaaccaaagctgaagattatccttttagaacaagcactgttgcagctgcttgaaaccaacata

SEQ ID NO: 8209 - DNA, 264 bp, Gossypium hirsutum
  unsure (1)..(264): unsure at all n locations; Clone ID: LIB3828-007-Q1-K6-G10
aataaagactttcatagttggtcggcagagcatcactgtgtgatccttggcattataagaaacgaaacttgtggattgagacagaaaaataaaatatgagttcaatgaatttgagttttcaattctttatacaagctaccttggnnaagcagtggccttccttaaaaaaaaggaatgtggtgcagattacaagnnatggagtgtttgatgcctattgctgattctaggggtttctgagcnnccactacgggcattttaattaca

SEQ ID NO: 8210 - DNA, 611 bp, Gossypium hirsutum
  unsure (1)..(611): unsure at all n locations; Clone ID: LIB3828-007-Q1-K6-G11
gntggtaagcgggtcaaattgcaaatctgggatacagctggtcaagagcgatttcgaactattacaacagcttactaccgtggagccatggggattttgctggtttatgatgttactgatgagtcatctttcaacaatattcggaattggattcgcaatattgaacaacatgcttcagacaatgtcaacaagatactggttggaaacaaggctgacatggatgagagcaaaagggctgtgccgacctccaaggtcaagccctcgctgatgagtatggtatcaagttcttcgaaactagtgcaaagacgaatttgaatgtggaggaggttttcttttcaatagccaccgacattaagcaaaggcttacagagtctgataacaaggctgagcctactggactcaaaattaataagcaagactcagcagcagctagtcaagctgctcaaaagtcgggttgctgtggataaagcgaacaaaaaaaggcctgcagattcgaaatggaaggttcggcttcacagtcactctaaatgtaaaactaatcataacgacattatgggggtttgatgtatttatctcttattttctttccaactaccaggcttagcttgtga

SEQ ID NO: 8211 - DNA, 609 bp, Gossypium hirsutum
  Clone ID: LIB3828-007-Q1-K6-G12
ctggatttggaaatggactgcaaagctgaggctgatgccgccgtttcaaggttcaagagagttatctctcttctgggtcgaaccaggaccggacatgctcgtttcagacgagcccctgttcaacccgatcaagagcaagaaaccaaggtttattacgcaacaccgatccagcagattccgccaccagtgactactgcttatcctcttcctcctcctcctcctcctcctcctcatcatcatcatcgtgattttatgacggtgaaaacagggggtttagaacggattgattcgtcgaaaaccattaatttttcgtattcttctgctgggaattcgtttttgtcatccttaacgggagatactgatagtaagcagccatgttcatcgtcatctgcgtttcaaattactaatttttctcaggtttcctcggctgggaagcctcctttgtcgtcttcttcttctttcaagaggaagtgtagctccgacaacttgggttctggcaagtgtactagtgggtcttccggtcgctgccattgctctaagaaaagaaaactgagatcgaaaagggtggtgagggttccagcaataagcctgaagatggccgatattcca

SEQ ID NO: 8212 - DNA, 610 bp, Gossypium hirsutum
  Clone ID: LIB3828-007-Q1-K6-G2
attgtgctgaggctgcaatgccagggttgcaagcatgtgtcgcagcatccgatcaagaggtgcaagcactttgagattggtggagacaagaaagggaagggaacatctcttttctaaatgttgtgttcttgttcttgtgtttttgttggttttgagttcaatgctagtatggaatttttgtccaagttttgatttttaattttctcatgttataaaaacattaatgtgaaattcacattttattgttatgtttctagtgtttttatcttattaaaaaaaaaaaaaaaaaaaaaaaaaaaaaaaaaaaaaaaaaaaaaaaaaaaaaaaaaaaaaaacaaacaaaaaaaaaaaatataaaaaaaaaaaaacctaaaatacaattaactaaaccaaaaataaacaaacataaaaagggggggacatctttgaagataccaattttaatccccctggcttaaaaaaaaaatttttttttttggggcccccaaaataaattccaggcccatggttttaaaacaccggtactggaaaaaccctgggttttcccaaattaattgtttttgcaacattaccctttttgccagtgggggaaaatcccaaagggcccccc

SEQ ID NO: 8213 - DNA, 434 bp, Gossypium hirsutum
  Clone ID: LIB3828-007-Q1-K6-G3
ggcaagactacataagcgtggatatgagtcagacaaaactcgaagaaatggtgggagaagctaggttcaagatcctgattgaatcccagtttgaaatgatcatctccgttgattggagaattgttgccaaaattacctgtatcagttctcgggtacggttagttaacatttatggcaacgaacataaatgtttctggcagtccatggacagggagagagacattgtatttgtatatctcaccaatttttgctacttgttgggaggaattatcatgtgcatagacaaatagggattcctcgcgttgatactgctctcttcttcgagtagtttggtttagtttatgtatattctgttgtcaagttatgtaagatccgactttctagtttcttgtatacaaacgaaatgataattgttcatatgttttttccctttt

SEQ ID NO: 8214 - DNA, 594 bp, Gossypium hirsutum
  unsure (1)..(594): unsure at all n locations; Clone ID: LIB3828-007-Q1-K6-G4
tccgcttgatcggactcaaaagctatagaagnagatcagattatttttcccgatgaggctgtttttgagaaggttaatcaagcatcaggcagggtttacatattaaagttcaataccgacgaccggaagttctttttctggatgcaggagcttaaagctgaagatgactcacaattatgttgcgcggtcaataatttcatcaatcaaccattagaacttggtgtagatgagcctgatgcttctgagcctttgcaagcgtctgaagacatggttgaagatgatatttcatcaagagctggaaacttgactcttacaaacttaggtgctgaagcgattagtgatgtaacctcttcatcagggccagttaaattggaagacttgcaaagaatactgagcagtattggtccagcagaggtagctggtgagccagatggaggcttggggttggatgatattttgaagccagatttgataatgccattaattgagacattgtcgttggaagagcgattagcttcatatttaccagagggtcaatggacacctgaggatttgttagagttgctgcagagtcctcctttccgtcaacaagta

SEQ ID NO: 8215 - DNA, 445 bp, Gossypium hirsutum
  Clone ID: LIB3828-007-Q1-K6-G5
cggccgcgtgggcggacgcgtgggggcggatccccattcaccggtaattaaacgcgggtccctctcatttccggtgcgtttaataatcactttatacgccatggacatgaagaaggtctccaccgccatcattgttgctgccgcctcaatgagcgtcgtcatggctgccggtgcaccatctcctgccccttcagccggtggttctagtcctagctcctctcctggttccgctccagcatcaggaccggattccagcgtggctgccgctaccttgcctgttcttggatcattggttggggcttccattgtttctttgttttcttacatgctgcagtaagctacatgtatgaaaaatcaacatgtcaacgaatattttattattttattatttttgaaagaaacatgtgatgaatattgaaaaaaagaataaaatggagctttgaat

SEQ ID NO: 8216 - DNA, 305 bp, Gossypium hirsutum
  unsure (1)..(305): unsure at all n locations; Clone ID: LIB3828-007-Q1-K6-G6
caaaaggcattggcagcccagaaagcagctgctagtaccgcaattcccggccaaggaactaccattaatgtcactgatacantcaggaaacactaagagaggatgctgttctacttagaaaggtaataggttacatttgatgctgttctacttaaaaaggtgataggttacatttgagaaggtaaaaaatatttgctaggaagtaggcccttttcatgtttttgtcaatttttggctgagagagagacatgtaaaatacatatatatattttacttgaattgtgatatgaagcttgtgatgtttt

SEQ ID NO: 8217 - DNA, 590 bp, Gossypium hirsutum
  unsure (1)..(590): unsure at all n locations; Clone ID: LIB3828-007-Q1-K6-G7
anaaattaagaggccggatttcaaaaccctttctctttaaaatatagagaaaagaggaccaaatgaaatcgaaatatagatttgattttcaatctgcattttcagggtgtggaacaatgggtgcaggtggcagaatgtcggttcctccaagtcaaaggaaacaagaatcgggctcaatgaaaagagtccctatatctaaaccaccatttactctcagtgaaataaaaaaagccatcccaccacactgtttccaacgctcacttatccgttcattttcctatctcgtttacgacttcattttagtctctatcttttactacgtagccaccacttacttccacaacctccctcagccactatctttcgtcgcctggccaatttattggactcttcaaggttcagtcctcactggcgtttgggttatcgcccatgaatgcggtcaccatgcttttagcgattaccaatggattgatgacactgtcggtctcatcctccattcatcccttcttgtcccgtacttttcgtggaaatatagtcaccgacgtcaccattccaacactggttcccttgaacgcgacgaagtatttgtt

SEQ ID NO: 8218 - DNA, 604 bp, Gossypium hirsutum
  unsure (1)..(604): unsure at all n locations; Clone ID: LIB3828-007-Q1-K6-G8
cggccgcgtgggtttcctccacgctttgtgcncttgacaaccactgtcaccatgaacctcctccttgccaccgctattattctcctgttgctccaccgccaccctagcaccatcatggctgccacttttgcgcaccaccatgtaaaacaacctcatttcattctattttcttcccttcctctaattcttcttgttcctttttctttctcccattattttctcttgtacagcatccttctctttcttctccttctttgtcaagttttcgtcagatcgtcattgtcgccgtcatcgggccactacgcctctaccggtttcggtgacctttctatttttcttcattattttccaacctctttcatcctctttagtacttgaaatcctatatccctattttcctttatttttaaattattttatttgatttaaatgttgtatcttgactcactctttcaagtgatttttcactagactctttctattctccgactcaagactctggtgatccaacaccccttcccattcaattgagttaggaaagcatttgggagaaaaaggagcgaaaatcagacaaaaagagtagacttcaggaaccatatgggct

SEQ ID NO: 8219 - DNA, 599 bp, Gossypium hirsutum
  Clone ID: LIB3828-007-Q1-K6-G9
atgatatgggtttctttaattttagggtaaatttaaggtttttatctacgggtaccttaaatttgtgaagataataaagaggattcatttgtgatttaaaaaaaaaattaagggtttcttggagccatttgtgatggatgcggaaacatctgatacaatgaaccttgatttgaatctgggtccggcgcctgagaccgggtccgggtcattgttgaatgaaggtgtgaatttgaatgatttagtcgagaacccgttcgataggatccgggatgcggttaggcgtaggagatggagatggcatcaggttcaacttcctgctgcaactcagagcttatcggttgaatttgatcaatttacggggaattctgacggtctgaatacattacaagcaggtgagggtagcgttacggctgaggaaagaacgagtgatgtgccgaaagtgtgtgaaaccaccaatgggtttttggaagatgaggttctagaagataaaaaggatgttattgagaagggtgttagcaatgatgggagttttttcgattgtaatatatgcttagatttggctcgggaacctgttgtaacttgttgcggtcacttgtttt

SEQ ID NO: 8220 - DNA, 575 bp, Gossypium hirsutum
  unsure (1)..(575): unsure at all n locations; Clone ID: LIB3828-007-Q1-K6-H1
cttttcccgggacccancaactctaagaacaagaaatggcaccaaagctgagaagaagccagctgagaagaagccagcggaggagaagaagaggtagctgagaaagcccccgctgagaagaaccaaggcaggcaaaaagcttcccaaggaaggcggagctgcggccggagacaagaagaagaagagggtcaagaagagtactgagacctacaagatctacatcttcaaggtcttgaagcaagttcaccctgatatcggtatctcaagcaaggctatgggaatcatgaacagcttcatcaatgatatctttgaaaagcttgcccaagaatcgtctaggctcgcaaggtacaacaagaagcctaccatcacttccagggaaatccagaccgctgttaggcttgtacttcccggtgagcttgcgaaacacgccgtttctgaagggaccaaggccgttaccaagtttacatcttcttgaaaaagtgatttgtggttagggttagggttttcattttaaaatagnatcgcgttgtttttctcttccgttgtgaatcattctgctcttctgttatatgatt

SEQ ID NO: 8221 - DNA, 431 bp, Gossypium hirsutum
  unsure (1)..(431): unsure at all n locations; Clone ID: LIB3828-007-Q1-K6-H10
anaagagttgtcttacctgctgagattgttgggaagcgcactagatatagaattgatgaatcaaagataatgaaggtgtatttggaccccaaggaacgtaataacacagagtacaagcttgagacgttttctgcagtttaccggaagcttgctggaaaggatgtcgtgtttgagttcccagtgacggaggcatagatagtactttttgaagtgttgtgaaactttatttctggttaaaattttgacatttttaagagttggtaagcaaagtcatatggatttaatttccttcttatgatttagtttctggtatgcattgcgatggtgtgggattgagtttaaaatggttattgttgtttgacaaattttattctcaattcttatgctcttgtttaaagcaatgaaaaattccgatgaaagctttttcatcc

SEQ ID NO: 8222 - DNA, 607 bp, Gossypium hirsutum
  Clone ID: LIB3828-007-Q1-K6-H12
gtttaaatattaaaaataaaaaggcgttgttttggagagggcttattatattacctctcctatttgtgtatgcaagcagccattttatatatactaaacgacatttcgataaacccgaggtagtcgggtttaaggaccttgattacctccacggcgatggcggtggtttccttagtggccccatagaagccgatgatggtgtcaaagcttcgaagaccgtcgttgaagctgagagtgacgatgatgacaatgacgatgacgacggtgataagaagagtaaaaagaagaatgaaaagaagaataagaagaataagaaggagaaaaagaatagcaagaaagacaaaaaatacgatgaaagtttccatacattgccggtcgaaagccttgtaaacgaaaagggtggtgacgggaataccgacgattcgtctcaactcgtcggctataatgtagtgacggctcaaactacgtttaaggggagttgggaattgttcgttgaaaactctggtgtttccgctatgcatgtggtgttgcttccgaatatcaatcaagctttgatttttgatgccacggtgtggaaggtgtcaaagctgaaattaccgggaccacc

SEQ ID NO: 8223 - DNA, 590 bp, Gossypium hirsutum
  unsure (1)..(590): unsure at all n locations; Clone ID: LIB3828-007-Q1-K6-H2
cggccgcgtggngaaaagccctaatttgacagctctctcagtctctcattttgcctgaaaaccatgtcgaggagaaggttagggagcccaaggaggagaatactacccttgggccggctgtacgagacggcgaacatgttttcggggtggctcacatttttgcttcatttaatgacacatttattcatgtaacagatttgtctggaagggaaacaatggttcgcattacgggtggtatgaaggtgaaagctgatagggatgagtcttccccttatgccgccatgcttgcagcacaagatgtttctcaacgctgcaaggagttgggtattacagcccttcatataaagcttcgagctactggagggaacaaaaccaagacacctggtcctggtgcccagtcagcacttagagccctcgctcgttctggcatgaaaattggacgcatagaggatgtcacccccattcccaccgatagtactcgtagaaagggtggcagacgcggaagaaggctgtgattctttgcttcatatctgctactcagccgctgctgctggcggtttgacattaggaattctctttgcttttgaaac

SEQ ID NO: 8224 - DNA, 601 bp, Gossypium hirsutum
  Clone ID: LIB3828-007-Q1-K6-H3
ctttcggttcttcttctgctaatagctctctctgctttgaacctttgtaagtgaaaaaaaaatcaaaaatcaaaaatagttaaatgaagcttcaaaaatggcgttaatggcaactacacgaacccaattatctaggttcttaacccggacactaacacgaccgggatttatagccttcaacggctcgattcggcggccagatgcaccaccgcttcaccgcaacttctcctcctccgccgcagccgcagcggtggtgcctcaaagagagccgatgggagttaaagaatatgaggattatagacgatctctttacggagacatcactcataaagctctccttgttgatgctgctggaaccctcttagctccgtctcagcctatggctcagatttatagagagattggtgagaaatatggagttcagtactctgaagctgagatattgaatagatatcgaagggcttatgctcaaccatggggtaaatctcgtctcagatatgtgaatgatgggaggcccttctggcaatacattgtgagttcttccacaggctgctcagatgctcagtacttcgaagaagtttataactactataccactgaa

SEQ ID NO: 8225 - DNA, 579 bp, Gossypium hirsutum
  unsure (1)..(579): unsure at all n locations; Clone ID: LIB3828-007-Q1-K6-H4
atctttattatgtctaaaccttattagnaaatttagattttgaagactggtccttatcagatgaagaggaggctttcttgggtaacaaaacagcgttaatgttgggaagaactccaccactagcaatcgttactccttgaagaagcttccccaactcctcgtcgtttctcacggctaacagcacgtgccgtgggttgatcctattctttttgttatcacgtgccgcattccccgccaattccaacacctgctcaaaaatatgaaactatcagatttccggttacgaaaaaaaataccgaagtgatcgggaggacatggaaataaaaggttgagaaaagagatcagacacctcagcagcaaggtacttgaggacggcggctagatagacgggagcaccgccgccataacgctgtgcataacggcctttcttgaggtaacgggcaatccgacccactggaaactggagtcctgcctttgccgacttagaaaccgcttttttcctatctccccctctcctacctcccgctgtcgttgacgtcgaccccattacagcttaaaagacgttaatttactttaaag

SEQ ID NO: 8226 - DNA, 588 bp, Gossypium hirsutum
  Clone ID: LIB3828-007-Q1-K6-H5
gttttctcactcattcgctggctttcgcttcggttttccgtaaatcagctaactcgttggctccactcgcgattcgactcacccgagtccagaggaactaccactcctccatcttcagggctttgaaccatgggttacaatctcagaaaccggccgttaaccgtttttacccaaatagcttccatttctctaccgccgttgcttccaagaaaccctcttctgatgagtctcttgtccgagttcttgagtccgagattcaatttgctgagggtgataactctgagcaggttgtaggaactcctagtggattcccttttgaagtcgaagataaccctgggactcaaactgtaacattgaaaagagaatataatggtgagctcataaaagttgatgttcacatgcttgatcttaacgaagacgagcaagatgaagatgaagttgaagacaaggatggggataataccaatgctagaatcccgttcgttgtcaccgtttcgaagaaagatggtccgagtttggagttcagttgcactgcttttcatgatgggattggaatcgacagtttgagttttagaaatcccaaccctg

SEQ ID NO: 8227 - DNA, 595 bp, Gossypium hirsutum
  Clone ID: LIB3828-007-Q1-K6-H6
cccggtcgacccagcgttcgcgagtccaaatcgggacctgtcttgatccgagtaaacacttggtgattatcttctaaaaagccaagaaccaacagtcaacggtatgttagcaggggataccggagtaatttcaaggaaagggaagacaaaaactatgggtaaaggcttgaggaagagattgacaggctctcaattttctaaaaatattaataaggttgttcaagggaaggggagcaaattcaaggcagcaggcaactctcgggttcttttacgggaatcaataacctagttggttgaggccatttcatcacaggccaatggagtttttggcttaggtgacccaatcaagagggaggagcatcatgataatcgggaccctcttaaacagtaaacctttgatttttacattatttactttacttttattttattatttttatatgtttttaaatctgttttttcgtggaattatcaaagttgtgcaagtagtaaatttattaaggtttttcgggaatatgatttagaatttggactggacatagtgtgctaattggaattgagagttagtggtaaaaatgcaatttttatcattgac

SEQ ID NO: 8228 - DNA, 582 bp, Gossypium hirsutum
  Clone ID: LIB3828-007-Q1-K6-H7
cggccgcgtgggatgggagcctccctttcttcgtctgatgaagctactagtagcctcacatgtttgtttcctacgcctctcctcttcccaccgggattaatgagaagggaatgtattatggggtgaacctgagacaaacaaagattttaatggtgtgtgggaggctgcaaggcaaaaaccagcctatatctgatttatacgtggacgaagtccctattccttccagtgtcatgattggcacttcccaggaattatacgactacatagcagcggagctagtaaaatttgtgtcggcacatcccgagaaagatgatgaagccccagcaaatgataagaaactggggttcaccgtctcatctggagatgatcaatctacagccatatcaggttccaacattaaattgaagaatttcgctgcagataccacaggggtaaaagatctgatcactggaatgaatcgagctctggagaaacatggtctgaaattgcgagttcatgcgctagtcgatgatatcgttggaaatttagctggtggcagatactatgataaagactgcgtggctgcaatcaccttaggaatgg

SEQ ID NO: 8229 - DNA, 593 bp, Gossypium hirsutum
  Clone ID: LIB3828-007-Q1-K6-H8
ctcgagtcggttctcaaaactcttgatgctttccctccgattgtcttcgctggagaggctcggagtcttgaggagaagctcggggaagccgccatgggaaacgcttttctgttacaaggcggagattgtgccgagagtttcaaagagttcaacgctaataacatccgtgacactttccggatccttcttcagatgggtgccgttttgatgtttggtggtcaaatgcctgttatcaaggtgggaagaatggctgggcaatttgcgaagccgagatcggacccattcgaggaaaagaatggagtgaagctgccaagttatagaggagataatgtcaacggggattccttcgatgaaaagtctaggatccctgatccccaaagaatgattagagcttactgtcaatcagcagctactttgaatcttttgagagcctttgctactggaggttatgctgctatgcaaagggttactcagtggaatttggatttcaccgaacacagtgagcagggggataggtaccgtgaactagctagtcgtgtggatgaggcccttggattcatggctgcagctggacttacagttgaccatcctat

SEQ ID NO: 8230 - DNA, 610 bp, Gossypium hirsutum
  unsure (1)..(610): unsure at all n locations; Clone ID: LIB3828-007-Q1-K6-H9
ggctccttcaactctcacanagcttgcagggnaagggaaaccttacaggcaagctttgttcgtgatgaagatgagcgtcctaaggttgcttacaaccaattcagcgatgaaatccctgtgatctctcttgccggtatcaattatgtaggtgaaaagagggcggagatatgccagaaaatcgtcgaggcttgtgaaaattggggtatcttccaggtcgtggatcatggtgtcgacactaaactcatttctgagatgacccgtcttgccagagagttcttcgctttgcccgccgaagataagcttcggttcgatatgtctggtggcaagaaaggtgggttcatcgtctccagtcacctccagggagaaacggtgcaagattggcgggagattgtgacctacttctcgtacccaattaagagccgggactattcaaggtggcctgatatgccagaggggtggattgaggtgacaaaggagtacagtgataaattaatgggcctagcttgcaagcttcttgaagtgttatcagaagcaatgggattggagaaagaagcattgagcaaggcatgtgtggagatggaccagaaagtggtggttaacttctacccta

SEQ ID NO: 8231 - DNA, 590 bp, Gossypium hirsutum
  unsure (1)..(590): unsure at all n locations; Clone ID: LIB3828-008-Q1-K6-A1
gtgattttggattgcagnaaaaagcaacttgnaaactgaactcagattcactaaagagagcttaaaagataaagaaatggaagttcttgctgcacagagggctcttgcaataaaagatgaagagctcaaaaggttcttggaaggttggaggcaagagaaaaagaactacaaaggctgaaggaagaaatgattgaagatgctaatgatataaagaagctttatgctttggcacaagagagaattggggagaaaagtataggtgacttggccattgagaagctgcagctcgaggcagctcaactggaagttgaagctgccacgagtgctcttcaaaaactggctgaaatgagccatgaacttttgattaaagctagcactagtattgagtctgattctgataccagtatcttcctgcaaagtggttctgatccaatgattagcatgatgaagaacgatgaaagtttcactgaggttaaaacaggagtagccaagctttcagctttgacagagcagctagtgaaagatgctggaattgttggtgtacacctgcaaagttaaagctcctgacttgatgttgtagataaatatct

SEQ ID NO: 8232 - DNA, 592 bp, Gossypium hirsutum
  Clone ID: LIB3828-008-Q1-K6-A10
gttagaaaggttgtggagaaagattctcctcctaacagctttcatcgagaatgtgcataagatcccttttccttttactaaatacttatgaatggcaatgaactaaaaaaaaaacttatgaatggcagactgtaatattctccaccacgttacaggtggatccccgcatccggtggaggtagacttaatatcaaatacttcatctaaatccgaggatgaagaaggatgaagccatggcctattactgataatagcatctggggttcttctagaattccaaaattgctggtggtggattaagaagtagatttgttggcaggatattttaaatcagattggaggagctgttgagatacaatgtatcatgtaagcagtggagcctaaataaattgtttttatgctcactgcggaaatcttatgtattttaaagaggtagtagttcatctgagtaatgtgcatcgattgttgctctgattttaatctttcttaagagtatactttttgggacgtggtggtgatatgaccaatgatccttcaaatacttgggaaaacttcttatccgacatgctcaagtccaagtaacatagtgtaa

SEQ ID NO: 8233 - DNA, 597 bp, Gossypium hirsutum
  Clone ID: LIB3828-008-Q1-K6-A11
aaatagaaagggaagcgatagcgaagtagagaagacgcagcagaaggagaaggagaggaagaagatgttagctatagctcctatcgcaaaaccccttgctggcaaaaagctctccaagaaaacccttaagctcgtccgaaaagctctgagcacaaatgcttgaagagaggagtaaaggaagtggttaaaagtattcggcgtggtcataaaggattatgtgttatagctggaaacatatctcctattgatgtcataactcatgttccgatcctatgtgaagaggctgaaattccatatgtctatgtttcttcaaaagaagatcttgcaacagcaggagctactaagagaccaacatgctgtgttttggtgctaaccaagcccaccaaaggtgaactcgccatcgaggaacaagaaaagatgaaagccgattatagccagatagtatcggatgtatctgagcttacatcatcccttttctaattaactcggaaaaaatttgatgtgcttgtcatataagcattgttgttgacaatcttattttcctgcagctcaggtaatggtgctttgtctccggcatttgactgtctgttcaaaacc

SEQ ID NO: 8234 - DNA, 507 bp, Gossypium hirsutum
  Clone ID: LIB3828-008-Q1-K6-A12
atattctatgttataaagaatatttttcataaaaaaaaaaaaaaaaaaaaaaaaaaaaaaaaaaaaaaaaaaaaaaaaaaaaaaaaaaaaaaaaaaaaaaaaaaaaaaaaaaaaaaaaaaaaaaaaaaaaaaaaaaaaaaaaaaaaaaaaaaaaggggggggcccgttttaaaggaaccaaattttactccccggggttggaaaaaaaaaattttttttttggggcccccaaaataaaattaaggggccgggttttaaaaccgtgggagtgggaaaaacccgggggtccccaaatttaagggcttggaaaaaaacccccttttccccggggggggaaaaaaaaaaaaggcccccccaaatcccctttccaaaaagtgggccattttaatgggaaaagggaacccccccttagcggggctataaacccgggggggtggggggtttccccaaaggggcccctttccttttctaagggcctaaagccccgcttttttggttttttccctt

SEQ ID NO: 8235 - DNA, 597 bp, Gossypium hirsutum
  Clone ID: LIB3828-008-Q1-K6-A2
ggaagaacagggcaaggttgccaggtttctgtctaaacaggattaggcctcatgttagagtgaagtctcctccaattcaagccaagcctaatctggattcttctaaaactgatcaaaaggatgaaattagtggcaaagttggggaagataaatccagaaatggagaaaaaactgggtttttaattggaaggaaaatcatgatcgtggttgattccagcatcgaagcaaagggagctttacagtgggcactttctcacaccgttcagtgtcacgacactcttgttcttcttcatgtcacaaagccttcaaaacaagtgccaaatacaaatgaagatcatgacaagaacagagccccaagggcatgtgaacctgtttactccctccaaaacatgagcaagcagaagagacccgaggttgaagtagaggtggcagtggtggaggggaaagagaaaggtctaacaatagtggaagaagctaaaaaacaaggagtggcacttctggttttgggacagaaaaagaagtcgatgacatggcgtctggtaatgatgtgggctggcagtcgaatgacaggtggagtagtggaatactgtatccaaa

SEQ ID NO: 8236 - DNA, 580 bp, Gossypium hirsutum
  Clone ID: LIB3828-008-Q1-K6-A3
cactgagacagagagcaatgtttcagtgaaagagaatgattatatctgaaaatctgataacaaaacacttgaacaaagtgaaccagctgcagatctcaactatggatcagttgttgttggtgcaaccctttttccagacatgaaagatggatcatcggacagtgattccagtgctatcttaaatgaagacatcatcatcaacaccaaaaccaacaaggacaatagccctaacaacgcagctttttcatcatctggggtgttagagctagacagccaacaccaccttttgatatcatcttcttcgtcaccaacatcctccatggattgcttcaatttcacaaaaacaagctatcaaccccaccagtacgtgaagatggaagaacataatttcttcactgcagatgaagcttgtaatttcttttcagatgaacaagctccaagtcttcattggtattctcctgaacaatggaactaaaatgaagctccaagatttttgtaagatgggaattatgtaagaagttaaaaactagtacccaataccatgatcttcagcctgtgatggaagtcaataatgcagaaa

SEQ ID NO: 8237 - DNA, 583 bp, Gossypium hirsutum
  Clone ID: LIB3828-008-Q1-K6-A4
atttcctaccagtgaagagaagaaagagaagagacattgagaagatgaaccagtacgtctttctcctcctgtccctctcatgtctcttctccttctccgtttcagctgcccccgggcctgaaccctctttcatcaccttggatacccatatggcaaaaccggtttccataatgccaggcaactttcattccggccttcagaaagtctgctccgccaccgatgaacccgtcgattgtatccagctgctttctcccttgatgaccgacaggaccgccgtggatcccatttccatcctcagggtgggtatcgaggcgaccaaccagaaggtgaaagaagccttggacaaagctaatattatcatgaaagatccatccaccacccccgaatacggcgagatcctctggacttgcgtcaagaacttcgaggacatcatcgactcggatcagaaagccatggaagccatcaccgagcacaacgccaaccacatcatcgaagaactctccgccgattccgcgtctgtgtctccctgcgaggacgagttggaagcggctaacatcgagtcgccggtgagggatatcgttaa

SEQ ID NO: 8238 - DNA, 432 bp, Gossypium hirsutum
  unsure (1)..(432): unsure at all n locations; Clone ID: LIB3828-008-Q1-K6-A5
canataataacaatcaccggcggatccccgtaattaaacgcaggtctcattcatttccggtgcgtttaataatccttttatacgccatggacatgaagaaggtctccaccgccatcattgttgctgccgcctcaatgagcgccgtcatggccgccgatgcaccatctcctgccccttcagccggtggttctagtcctagctcctctcctggttccgctccagcatcaggaccggattccagcatggctgccgctaccttgcctgttcttggatcattggttggggcctccattgtttctttgttttcttacatgctacaataagctacatatatgaaaaatgaacatgtgaacgaatgttttattttattctttttgaaagaaacatgtgatgaatactgaaaaaaaaattgaataaaatggagctttgaat

SEQ ID NO: 8239 - DNA, 441 bp, Gossypium hirsutum; identical to SEQ ID NO: 7080
  Clone ID: LIB3828-008-Q1-K6-A6

SEQ ID NO: 8240 - DNA, 567 bp, Gossypium hirsutum
  unsure (1)..(567): unsure at all n locations; Clone ID: LIB3828-008-Q1-K6-A7
acaaggttncactagctgaagtggtaaggcagagaactgtttgctgaatgtgattttttttttcacttttcactgcttgcaatcagtgttagttacccgctgctcttagagtgggaacaacaaaacaaagtaactttgaatacctgtatatatatgtatgtggatgccataggatcctggttatcttggtgttttgattataacctactaaaaataatgaagtgatttgaactttttgttgttaaaaaaaaaaaaaaaaaaaaaaaaaaaaaaaaaaaaaaaaaaaaaaaaaaaaaaaaaaaaaaaaaaaaaaaaaaaaaaaaaaaaaaaaaaaaaaaaaaaaaaaaaaaaaaaaaaaaaaaaaaaaaaaaaaaaaaaaaaaaaaaaaaaaanaggggggngtggtttaaaaggaacaatttttaattaggtggtttggaaaaaaaaanatttttttttttggggacctaaatttaaataaagggcccggttttaaaaaccggcgaaatggaaaaaaacccggggttccccaaattaaaccccttggaaaaaatcccctttttccca

SEQ ID NO: 8241 - DNA, 592 bp, Gossypium hirsutum
  Clone ID: LIB3828-008-Q1-K6-A8
ggaaccgacttgaattttgttgtcaaagctgcgtcaacatagatagttgctgtcgtacttcttgtgttctgtctctgacgtatgttatcacctaagttggttcctggagctccatatcatccatgcagcacaacaaaaaagctgacacagttgactgttgcctatggtaaaaacccagggcactgtctaaacacatggttgctatcttcttctacacttcgacaccggggacatgagctatctaaagccactcttcttagtcttaaattctttagggtagggataaagttccatgaaagactccaaatagtgatggcaattttgaaggaaggcgtagactccataatttcctatagaaattttttgtttcgatctgtactaaataagcattaggatctgtagttgcctattgtaatagtttataggcacttctgactgtaaattggccagaatgttctcctcgccaaacttgaaagtcgccatgttcttcttctgccaaaggaatttgcagaatcttttgtggaatattttctaaaaagaaattcggtctcctttcccaactcgccaacataaaccatcttgcagtagtctt

SEQ ID NO: 8242 - DNA, 592 bp, Gossypium hirsutum
  Clone ID: LIB3828-008-Q1-K6-A9
cggccgcgtggggtacgaccaagctttccgtgcctgaggccagaccgccgatttggctgtcttgggtacaacaatgttcacttgcatcgtttggtctctcaattgccagattgccctcacaatgagtcacttcacatggatccagcacgtcacaatatggggtagcattgctgcttggtatatatttctcttaatttatggcgcggtatctcctagaatatctggcaatgcctaccaaatcctagtggaagcccttgctcccgcacccatctactggcagaccaccctcttagccacaatcgcttgtaccctcccttacatggctcatatagcttaccaaagatgtttcgagccagaggatcatcatatcatccaagagatcaagtactacaggaaagatgttgaggatcaacacatgtggactagagaacggtccaaggcacgacagaaaactaagatcgggttcaccgcacgtgtggacgcaaagatcaggcaagtccgagccaagttgaataaaaaacaatagccttttttgaagattttttagggcctcacctaacatttttaacattgagccacaattattttcttg

SEQ ID NO: 8243 - DNA, 598 bp, Gossypium hirsutum
  Clone ID: LIB3828-008-Q1-K6-B1
gattctccaactcatttaccttcacagctttgcttctgctcatctccctaatctccttcaagttcttgtctgcaaaattgaggcaaaaacagagaaagattaagtaccaccccgttgccggcacgtttgttaaccagctcctcaacttcaaaagattgcatcattatatgactgatcttgcagccaagtatcggacctacaggctgctttctcctttcaggaatgagatttatacctcggatcctgccaacgttgagtatatactcaaaaccaacttccacaattatggcaagggtgaatataatcacaacttgctaagggatttacttggtgaggggattttcacagtggatggggataaatggcgtcaacagaggaaggtatcaagccatgaattctcaacaaaggtgttaagagatttcagcagtgttgtctttcggaaaaatgtggcacgacttgccaatatagtgtcggaggcagctaattccaatgagacaatggatatgcaagacttgtttatgaaatcgactttggattcaatattcaaagttgcatttggggttgaactagatagcatgtgtggatccaatgaagaagc

SEQ ID NO: 8244 - DNA, 608 bp, Gossypium hirsutum
  unsure (1)..(608): unsure at all n locations; Clone ID: LIB3828-008-Q1-K6-B10
ggattttgaagctggngtggataagggaaattcgatgcacacaagnatgcagtttctcttctgagtgacaaattgactaacgcagagaatgaagttaaacttctcaaagagctttgcaacctaaaggtttcagcaggtactccagaatgtgttccaaatgaatctggaatgtctagttagtaaggtatgtctagtaagtttttatgtagtgcagaactactcttatttatatgtcaaacaatatgcatcatgcgcggcatctacgaatggaggcttttgttctagttggctcactatatggcagatttgatatgcaaagttagtagcagcaggacttcactggaaaatgctgagaaccgaaatggatgcttcaatctgtctcttcagtggataagttagatgaggactccgctggattatatgtcttcttatgaactggttattgtgctatagcaagtctgtcaacaatggggatttgggcagacatggtttgaaaggtttccttttcgattagtcggtttctaataaatatggaaatatgattcaatttttgtcttcaattaggggggaacttagtctagcagaaatttgagttgatcgaggaaact

SEQ ID NO: 8245 - DNA, 592 bp, Gossypium hirsutum
  Clone ID: LIB3828-008-Q1-K6-B11
cggaaagcctcaaaatcattctttaccaacaatctgtacagtcacccgaaggagatataagctatttgcagaagttctttttgatgtatgtgggtggaaggttgcctctgcatcttcaagaagatttctgtggcactgcacttcttagtacagaatggctccgaagtgatccaaggcggacagcttttggattggatcttgatctcgaggcattgcagtggtgcctggagaacaacatcaacaaagttggggctgatgggtattcgagaatatctctctttcacgggaatgtattaaatccgcatgaggcaaaattagtcagcttcaagcctcaagagctgataaggaacattcagttggaggaaagtgattataattctcagatgactgcaacagaacctaacataaacgagggttctatcactttgtcaaatgaagagtctgttaaggcagattccaaaatatctgcaagagacattatatgtgcttttaattacagctgctgctgtctccataaacgtgcagaactggttttgtatttcaagcatattcttgaagccttgtctaaaaagggtggtatatttgtgatgga

SEQ ID NO: 8246 - DNA, 589 bp, Gossypium hirsutum
  Clone ID: LIB3828-008-Q1-K6-B2
gcctttttcacaaaaactgggcatattattctctattttagggataaaatgaaaccctatctcttgaaattctgcctttttgctttggatgtctctgatgagtgctccaatggccaatttgtcaaaatctgtactttggcatttctttattacagtttttgagtctcccattatttctagattgtttaagcccatgtaaattcctaatctctgggttgtaatcttgtatgtgcattcgccgtaaacggagttgctatatcggagtgaacgaccgtctttgatgccaagatctcgctcctcacatctcgtactatcagacccgaagcagatttgaaagattgttggtcaaaggctacatcaaaaaagattgcaacctttgttcttcgattaacatgtttagggcctctgtcaacttgaaagattaaccaaagcccacaacagaaaagttgacactgttcactagtcccccgactaaaaacccaggacactgtcaaaatatatgattactatcttccttatattggcgacaccgagggcaataatcgtccacagccactttcttatgcttgaggttaataagagtaggaat

SEQ ID NO: 8247 - DNA, 588 bp, Gossypium hirsutum
  Clone ID: LIB3828-008-Q1-K6-B3
ggcaggcgcagcaaattgggtttccataaccttactgttttcagtatgtttatcggcgtcctatggtaagaggaccggaatctccaccatggctgacggagccgatgggtttcaaccaagcaacggttttccgcatgaagctgatcctgattcttcaacctctatcgatcctgatcctaccggattcggtgctggcataggtataggttatgaaagaagcccttactgtatcgactgcgacgatgtggatatcatgggcggcagcttttgcggcacctgcaattacggatgcccttaccgcaggttcaataatgggtgtggtggtggtatcgcttatatggatgaactcaaacgaacgattaaggaccttaccatgaaacttgatgccaatggtcttttagggaaaaagaaggccatgaatatacaagctatggcgccagaatcttcatagatttatatatagattatagaaactacggattctatacaaagagaaagaaaataaagaataaccaagcagcttgatatatgattgaattacaatgtgctagctgttttttttttatctttaattattatatgaataaa

SEQ ID NO: 8248 - DNA, 593 bp, Gossypium hirsutum
  unsure (1)..(593): unsure at all n locations; Clone ID: LIB3828-008-Q1-K6-B4
cgataagaagcagtcttctccaanattgaagaggaagttgagaagctcaagggttctaccgcgaggcatggnaaagatatancttgaaagctgctaaaagctgtttagagaaagtgctgactaccccaacaaggaaattgagcggctgcagcgcatgcttgacaagtcactaagcccagcaaaagctgatgaattcacgatcaagaagaacatcctatcaacatttgcatcttcttagatcaatgtatttcacctcgtctagtgctgcggtgggttcaagtttcatcgacgttttcaaggactgggaacatcttagcgttttatgttttgggtatctttcagcagcaaatcgctaggccttgattaggacttgagcaccatttgcgtgccgcagcaccagtaactagtaaaagttcttatgatggaattctctcctaaaactagttttgaccagtgatttcactcggcatttattcgaatttttgctcctgtttttactattatagatttcctggaaacttattttgaattaaaccaatatatagatgtgaaataacacgtttaaacagtaaaaaaaaaaaaaaaaaggcggc

SEQ ID NO: 8249 - DNA, 589 bp, Gossypium hirsutum
  Clone ID: LIB3828-008-Q1-K6-B5
tttagcctcattcccttcagcagttgttccactccacctcacaaaagggaggaacggagaattactttgcaattttgaccgtgttttagtttagatgctaaagaaacgaaacccgagtaactagtgaggaggaggaggagcaatcatgtctgattattccttcttaaacgatcagctctcgaagcgcacctcaattttcggtttgcgtttgtgggttgttcttggaatctgcgttggagctgctatcgtcattgttctcttccttatctccctttggtttacttctaaacgccagaacaaagccaccggtagcagccacaacggcagctttaagcctattcataactctactatccccactgtttccaaagagattcaggaaatccgggtcgacccatctcgtcattctaatcctgacgccaagcttcaccaagcttcaaaccctgacccacttccagaatccgaccatgtattggtgcttcattcagaagaagacagcagcgctatctctggccgcaacagaatccacattgagataggaaaggatcatcggattgcatatccggaacgtggagccgggtcgggtcat

SEQ ID NO: 8250 - DNA, 595 bp, Gossypium hirsutum
  unsure (1)..(595): unsure at all n locations; Clone ID: LIB3828-008-Q1-K6-B6
gggtagctcagtgtccggngttggagtcccctcaggtaacttagaagtaaatatcgagagggttgggtccaagaagaagaacctgcaatcaacttcgaaaaaagtggcagtcttgacacagtggttgaagtgttccatgaagctgatactgattaccagttatcaaggccgaaaaggaaaaacttagaacctgatcatgatttcttggtggaaactcaacttacaatggaaactcctgcggatgatcctcctgacatgatgactgagaacatcaagaagcatatgaaaacacattttgaaactccaggagctcctcaagtagaatctttacagaacttagcggccggattgaacaagaaaggagcagctcagctcttctatcggacatgtgtccttgcttctcaaggtttcttgaaagtgcaacaaaaggtggcgtttggagacattttcatctctaaaggagcaaagatgtgacggatgtaagcaactggtagttttaaggaaaggttattagtgatgttgtagtgtcgtggggcattaactttatttttgtacaacctcctgtttgatgctataacttgcaggtttaattcta

SEQ ID NO: 8251 - DNA, 602 bp, Gossypium hirsutum
  Clone ID: LIB3828-008-Q1-K6-B7
cccagcgtccgcttaatctcaaatctcatctgcaccagccgacgacatggggaggagacctgcaaggtgttatcgccaaatcaagaataagccataccccaaatctcgatactgccgtggtgtcccagatcctaagatcagaatttatgatgttgggatgaagaaaaaagtgttgatgagtttcctttctgtgtccatcttgtgagttgggagaaggagaacgtctcaagtgaggcattggaagctgcccgtattgcctgcaacaagtacatggccaagtttgcagggaaggatgctttccatttgagagtgcgggttcatcccttccatgttctgcgtatcaacaagatgctttcatgtgccggtgctgataggcttcagaccggaatgaggggtgcttttgggaaacctcaaggaacatgtgccagagttgacattggtcaggttctgctctctgttcgttgcaaggacagcaacagccatcatgcacaggaggccctccgtcgtgcaaagttcaagtttcctggtcgtcaaaagattattgttagcaggaagtggggatttaccaagtacaaccgtgctgattatctgaagtggaagtc

SEQ ID NO: 8252 - DNA, 594 bp, Gossypium hirsutum
  Clone ID: LIB3828-008-Q1-K6-B8
aaaaagaggcgtctgtaataaaatctgcaatcttaattctgtcggtgtttttatctgtaagcttcagttcgggtgttaggttgctccaggaacagcccaatgatgacctcaaaaacatggacgctattcctcccattgatgcactcaaccctaccgagttcaatggacccggtgttggcattcacgaagatcatgttgtcccaaaggttccgaaattggtactcttggttttggttttgaaggtggtcctgaaaaatgttgttcttctggatgttccggtaattgtaatcctggtggtttcgttctaccatttcctcaaattccagaaatcccaagaattccacagatcccacagatcccacaaatcccacaaattccactaatcccacagatcccacaagtcccacaaatcccactaatgccaggacagtcgggatgtgagagtggggagtgttgccgtcagggttgcggtgggacttgtgctgagtgtggtcagcccaggtgcgcatcaggatgttgccaggctgaaactgtaaagagcaaagggatagaagaggttatggacagtgaacccagtccaccaaagtagggaga

SEQ ID NO: 8253 - DNA, 600 bp, Gossypium hirsutum
  unsure (1)..(600): unsure at all n locations; Clone ID: LIB3828-008-Q1-K6-B9
cttatagttgctgttaacaaaaggntgctgtagattattctaaggaaagtttgatttgataatatcacagcttggggcatttctccgttcttgtggctttaaggattcctctgtctcttggattccattgagtgctgttgaaaaccagaacttagtgtctgcaccttcggattttcgactatcctggtatcttggacccaatctgttagacgcgattgattccttccaacctcctactagggagttttcaaagcctctaattatgcctatatgtgatgttataaagtcaccttcacaagggcaggtgtctgcatgtggcaagttggaggctggagctgtaagaagcggatcaaaggttttagttatgccatctgcaactatagcaactgtgcgttcgttggagcgtgattcccaagcttgcccaattggaagggctggagataatatagctgtcagcctaaatggaatagacggaaaccatgtgatggctggtggtgtgttatgtcatcctgattttccaattgcatttgcaaagcatttggagttgaaggtgcttgttttggacggtgcaactccaattttaattggttctcagttgga

SEQ ID NO: 8254 - DNA, 592 bp, Gossypium hirsutum
  Clone ID: LIB3828-008-Q1-K6-C1
gtccctccatcgaagccgccccgagaaagaagcagagggcaagtaaaatgaagaccattctttcttcagagacaatggacatccctgatggggttgctattaaggtgaaggccaagatgatcgaggttgaaggtcccaggggtaagctcatccgtaacttcaagcacctcaacctcgattttcacctcatcaaggacgaggagagcggcaagcgcaagctcaggatcgaggcttggtttggctccagaaagactagcgccgccatccgtactgctctcagccacgttgagaatctcatcaccggcgtcaccaagggttaccgttacaagatgaggtttgtttatgctcattttccgatcaacgcctccatcactaacggcaacaagtccatcgagatccgtaatttccttggcgagaagaaggtgcgaaaggtggatatgttggaaggggtatccattgttcgatcagagaaggttaaagacgagatcgtgttggatggtaacgatatcgaacttgtgtcacgctcggcagctttgataaaccagaaatgccatgtgaagaacaaggatattagaaagttccttgatggtat

SEQ ID NO: 8255 - DNA, 573 bp, Gossypium hirsutum
  Clone ID: LIB3828-008-Q1-K6-C10
gttggcctagtcatatcaatgctacttttaggagattttagcttagtgttgcttacattcctccagttgtattcagtatcattggtggatgtctctctggttgtgtttatcatacctctcggcattcttcttccatttcctgttggcataaacgctttattcagtcatgggccaaggcgttctgcaggtcttgcacgtttctatgctttatggaacataacatccttgattaatgttgttgttgcatttctttgtgggtatatcaaccataacagtcggtcatcatcgagtataagaaccccaagccttcagccgtggaatattaacatggacgaaagtgaatggtggatttttccttctggattggttttatgtaaacttttccaatcacaacttataaattggcatgttgcgaatctggagattcaagatcgctcattgtatagtgatgattttgagctattttggcagtcatgactcatcaagtcaaacacacacatgttaacaaggttcttttgttcaattttgttttattccattttttgcatgtaattcgaagtgtaacaaaatcac

SEQ ID NO: 8256 - DNA, 585 bp, Gossypium hirsutum
  unsure (1)..(585): unsure at all n locations; Clone ID: LIB3828-008-Q1-K6-C11
cgnagacaaattcgtgatgttcagaacatgaacaggcatatccttggagaggctctgagctcattgacctttaaggaactcaagaaccttgaaggcaggctggagaaaggctttgtagaatcagatccaaaaggtttttgttttggtgtatattaagatctttcatcctttccttctatcttaatctctttgtttgtttattatatggaataaaatatggttattcactcaccacattctccaactctaccagaacgaattactgtttgcagaaattggattcatgcaaaagagggtaaactttcatccctacttggtctatttatttataggctagttaactcaaaacccggtatatagctggtttagaagcaatcttgagtatgttgattcatccatcattagtttgaaaaagaaaaaagaggattgtatactttgatatcctcaaaccccattgtagtttcatcttcagaatctttagtttgttagacactatacaagatatgagtgatagcataaaggtcgtcgtcttaattattaacagctgtaaaatgggtatataatttctaggaagttgaactgcag

SEQ ID NO: 8257 - DNA, 596 bp, Gossypium hirsutum
  Clone ID: LIB3828-008-Q1-K6-C12
agcttttgaagacctggtcaagcgcttttggattaagggttgtttgggcgttgaagctcaaaggtataccatatgaagcaatagatgaagatctgtccaacaagagcgctttgcttcttcagtataaccctgtccacaagaaaatcccagttcttgttcacaatgggaaccccatctctgaatcccttgtgattcttgaatatattgatgagacatggaagcaaaatcccatattgccccaagatcctctacacagagccagggaacggttctgggccaaatttaatgatgaaaagctactaccatcagtatggggtgctttcaccaaagaagggaaagaccgagaggaagctatggctgcaacgatggagaacctgaaattcgttgaagaagagctgaaaggaaagaaattcttcagtggagagaagataggcctggtagatcttgttttcggttggcttgctaacttgatctctatttttgaagcggtaactggcttcaacatagttggtgagggatatccattgttatcggcctggatgcaagaattttcagaactccctgtgattaaagatacctggcctcctcgtgacaag

SEQ ID NO: 8258 - DNA, 583 bp, Gossypium hirsutum
  unsure (1)..(583): unsure at all n locations; Clone ID: LIB3828-008-Q1-K6-C2
gcattgcaagttgtcagttttggccataactttggaattttccctggttgagtaaattattctgaagagaaaaaacaatattaaaatggctacctgtgcagcaaataatttaagctattaattgctttacaaataggtangaaaacaagttggcaacttgggattcttaccctggcattgaaatggtatcggtccacaccattccaattatcaagatcatatgcggtgtaatgtttgcagcaggcagcgaccttaaggcggatccccgtcgtactctggaggccacggacgtagttggcggcgtatttgcctgctaaaacagggtcttcaccaggagtctcttggcctcggccccaccgtgggtctcggaatatgttaacattggggctccagtatgtcaaacctgccattcctccattgtacattgctcttgcttcgtctgacaccacctgcaatccatatcccaacagtttaatattctatgatttacaacatatttatttggtctttatactcccaacatattcccatggcaggagtaaataagtgaatttttttgtttttttcttcgagttacattaaa

SEQ ID NO: 8259 - DNA, 565 bp, Gossypium hirsutum
  Clone ID: LIB3828-008-Q1-K6-C3
ccccgcgtgcgtttttttttttctgcactccagcgttaaactgaagccccatattgatctttttctgctctgtggacgcccggtatgctgttaaagtagtttggaacgggttactcaattctgtctttatttcttttctgtgggcgggtagtacccaagcttatgacaaatagcggacatcacggctatccacggagtctctagcatatcttattcatgtctcgtactgtgcgccttaagggttgtgtgaatctaagcaacccttccacctcacgagctgcattggctctttaccttctcaaggtggaacaccttcctaactcctattccttgctgccggtcccttcgacatgtaaaaagttcatgctgcttatatatccttcttgtcaccacttccatgagtgtctcaaatatctccacttgagcatctgctttacatctcatctaatacacatataactatggcttcacatctttcttaggcttaagagcgttaccactcgttcacttacctaccacattgataatcacgttgcgctccttgtcatatgcacacaacctgctt

SEQ ID NO: 8260 - DNA, 593 bp, Gossypium hirsutum
  Clone ID: LIB3828-008-Q1-K6-C4
ggaaaggtcaaattgggcatagcaacccaaggaaacaacatgtatctctttccaggtattggccttggaactcttctgtctggctctaggatcatttcggatggcatgctacaggctgcagcagaacggtgtggttaatttatattttgtttttgataaatatttctccaaatgcttctgaatttttcacctgccaagactatgagtttattttgttgttctttggaataaacttttagccattattagtatatgtgaaatttaggtaatttatgagtatgcaaagggataaagacagtaccagtgactggatcccctcttcctcagagccacataaaaattttcttcaagaaaattagggattaggatctgtttgctgtacttttctactttctggaggcatttgtaagtaactagtgcattaagttctaataattgtaatatatattattaacatactaaaatattgttagttggttcccaaatggcatgccagaagctgtctgatatatggatttggatcattaatttatttctttttcccttaaaactcctcgagcaaaaaaaagaaaagaagaaaaagaagttaatgg

SEQ ID NO: 8261 - DNA, 582 bp, Gossypium hirsutum
  Clone ID: LIB3828-008-Q1-K6-C5
cccagcgtccggtgaggatgacattgaggacatccagaatgaaatttctgttttgtcacaatgccgctgtcaatacatcacagagtattatggttcctatcttcaccaaactaaactgtggttgataatggaatacatggctggtggttcagtcgctgacctactccaatcaggccctccactagatgaaatgtcaattgccagtatttcaaggaaagattcacagagatatcaaagggtgtttttcttcactcgtgttacccacttataagttataagatataggtgcacatagatacgaataattttagagcatttggtctacagacttgtatagttataccctgcttcaagtcattcttctcatttttcttttcagccatttgattttctaatgttgtttgtacctagcaatttactttgttcattactggaaacatttttgctatcacttttggcagcggcaagcattttattgactgagaatggtgatgttaaggttgcagattttggtgtttcagcacaattaacaaggacgatatcgcagagaaagacttttgtaggaacaccattctggatggc

SEQ ID NO: 8262 - DNA, 593 bp, Gossypium hirsutum
  unsure (1)..(593): unsure at all n locations; Clone ID: LIB3828-008-Q1-K6-C6
tggcttttgtcgcagaactggttgtcaagcctgatatgttgtttgngaaagcgtgggaagagtggtttggttggcttgaatcttgatttcgctcaagttactgcatttgtgaaagagcgcctcggcaaagaggtggaaatgagtggatgtaaaggacctgttacaacattcattgttgaacctttcatccctcacaatgaagagtactaccttaacatcgtctccgagcgtcttggttgtagcattagcttttcagagtgtggaggaattgaaattgaagagaactgggacaaggtaaaaaccatatttatcccaactgattcatctttcgcctcagaaactattgctccacttgttgcaacccttcccttggaggtcaaaggagaaattgagcagttcatcaaagtgatctttactctatttcaagatcttgactttactttccttgagatgaaccctttcacattggttgagggaaagccttatcctttggatatgagaggcgagcttgatgacactgcttctttcaagaacttcaagaagtggggtaatattgaatttccattgccttttggaagagtaatgagtgcaac

SEQ ID NO: 8263 - DNA, 358 bp, Gossypium hirsutum
  Clone ID: LIB3828-008-Q1-K6-C7
gcttagagctcaactcaatgaactcactcataggttacagtccttgaatgaaacatcagcttcctgaatgatgttcatggcgatgacgacgacgacgatgataaaacaagcattgacttcactcagcctgctgtagctgataatatcttcctgattcctttccatctggcttacttgaatcagcctatcatggcctctgctgataacacgtttcagcattaattttctataatgccacaattttaatgggatttttaatctcagtttatatatatatatatagttgtataagcagtagtatgaaataaaatatgtgaaaatcataaagctatggtatggttaatggtagatttttttc

SEQ ID NO: 8264 - DNA, 157 bp, Gossypium hirsutum
  unsure (1)..(157): unsure at all n locations; Clone ID: LIB3828-008-Q1-K6-C8
gacacggtttcagtattggtagtcttggccactacgaagnagagttcgatgtttttggaatcaccgtgaggaattgctcattatcccacacagnaaaatggtgncaagaaatcaaaacatacagnaaatgnnaaagtccatctaaannncttcaggc

SEQ ID NO: 8265 - DNA, 560 bp, Gossypium hirsutum
  Clone ID: LIB3828-008-Q1-K6-C9
cggccgcgtggggccaccatgactcgctcgttcaactttctacccatgctcctcttgcttactttatcagccctgactgtccaagaaatttcagctgcaccttcctgcactgaagttgccatagaattactcccatgcctcagcttcctgtctggcaacggtgctgcagatgttccatcgcgggcatgttgtttgggtgctcaaactattgcttacgaagcacagaccaaagatgaccgacgggctatctgcgagtgccttgttaatgcattagcaaatattggcacatctgactccttcactgcgcggatacctttaattgctacccaatgcggtgttgatgtttctcttccgccaattaccagcgacaaagattattgttccaagctcttcccttgacttcgtttgatataccatcgtgttgtgccacactagggaagatattaattatatctagctcaatccatcatcctttaaatttctttaagtaatttacattgtacttagtgaataacaaatcctagttgtggacaaataagatcatacatgacgttaatgtg

SEQ ID NO: 8266 - DNA, 599 bp, Gossypium hirsutum
  unsure (1)..(599): unsure at all n locations; Clone ID: LIB3828-008-Q1-K6-D1
gcaatcttaagcagatnatgctttgcaggacctaccagagcgagggatttttgaccccaactccacagcatttggcaggttgacccttcctgtagctgctcctggaatgaaagtagacaatgcaaattctctagatctagccgaacatctttatatgcactccaacaaccaactggatccattttcttcaggtaacccctctttttaccagcaagttttaggcaatgtatatgcttctcatcctggtgcaatggagagcttccatgctaggaaaaatgggcagctagaaaatagttggactgcaaaagagataccacaattaaatcttgaagcagaactgcaaagaagggagtctgaagttgattcaagtgcttgggcatcagctggaggggttaatgaaaactctaagaaggctttaatggaccttctttaccaaaaacttggtattcaatctatgcaatcatcagaaatcgatcgtcagaattctacttcatcttccagagggcgggaaaccttttggcctgtttctgagcaacaaacttccaattttccttttaatcattttccaaatcaggaagttcatgtgaacaacttgtttc

SEQ ID NO: 8267 - DNA, 604 bp, Gossypium hirsutum
  Clone ID: LIB3828-008-Q1-K6-D10
cttttctttcaaataattattgcatccgtcctttcccttcaaacaaaacaccccctacatatatgcatatcccaaagttgttctcttaatcggaattatcatgggacgatcaccctgttgtgaaaaggcacataccaataaaggtacctggaccaaagaggaagaccaacgcctcattgactacatccgtctccgcggtgaaggttgctggcgttccctccccaaagctgctggactgcttaggtgtggtaagagttgcaggttaagatggataaactacttgaggcctgatcttaagagaggaaatttcagtgaagctgaggatgaacttatcattaaactccacagtttacttggaaacaaatggtctttaatagctgcgagattaccgggaagaactgacaacgagatcaagaactactggaacacgcacatcaaaaggaagcttataagcagaggaatcgatccacaaaatcatggtccactcaatcaacccaccaacaccaataaatccactgaattggatttcaggaacgtacctaaagcttcaaaatccaactttgctccaaacccatctcgggatttcaatttcaatgaatttcaa

SEQ ID NO: 8268 - DNA, 523 bp, Gossypium hirsutum
  Clone ID: LIB3828-008-Q1-K6-D11
gttgaattcaaagaaaggctggtggaaccgctccccctagaggaagtgcagcagcagccgcaagcatgcgtaggcggagaaccacaagtggtgcagcctcaggaggggctgctgggaccatgcttcaattttacacggatgatgcaccaggtctgaagatctcgccgaatgttgtgcttgtcatgagtattggtttcattgcttttgttgccgttctacatgttatgggcaagctctattttgttcatagagagggttgaaaggaatttgttggccagaaaaaaaaatcaacagaatttatttaggagtctgagttgcaaagcaaaactgtttttttttttttgattaaaaacaagtctagtgtcaaaggtgcaattttgtttcaatggttaaaattggtttacattgttctacttgtttgaggaagatggtgcaaactcaatttcatataatgttatttagacaatgttatttctactcttcatttattttgaattatttgtaatcagcatttattttgact

SEQ ID NO: 8269 - DNA, 368 bp, Gossypium hirsutum
  Clone ID: LIB3828-008-Q1-K6-D12
cggtcctgatcggaatggagatcgatttggtgggcgcagcagggatgcaggtagtcgtgggggatctggaagtgatagatacaatcgtgatcgatctggaccctatgaccgtcgtggaactgggggtcctcgttctggttaagatgactgcttgtgctgatgaactaggttgctgctttttggcaaagcatgaagtttcttttttacagaatgtgctctcttcattgttgtctgggtggaacaatataatagttcagtcctttgaagtgtgaaacttggcacaaacctacaactatttatgtgttcgtaaaatgctgtgttcgatggagttttgtgctttcttgacatgcactttcaaatatggtctt

SEQ ID NO: 8270 - DNA, 468 bp, Gossypium hirsutum
  Clone ID: LIB3828-008-Q1-K6-D2
atttcctttattttaaatttaacccacaaaaaagaggctcgccaagttatgctcgtcgtcgcccttgttctcattgccgttgttggggcttatgcggcggatgtgcccaagacctcttcttcttcatcaccttcaacatctcccgcctcatctccctcctcctccattagcactagcagttcccctcctacaccagacggcggtgctctcgctccatcaccatctagtgccgtttctctcaaagcctccagcttcgttggtgctgttaccgctgttgccggactgggactcttttacttctaaggtttaacacgccacatgcatggcccgtggatcaacgctttttatttatttatttatacatatatatgattaaaatgtattttgcttgcgaatagccgcggcatagaatgtgtgaacagtcttgaataataataataataacaagactttggcgagtgtttattt

SEQ ID NO: 8271 - DNA, 468 bp, Gossypium hirsutum
  unsure (1)..(468): unsure at all n locations; Clone ID: LIB3828-008-Q1-K6-D3
attttgttgccaaaatgaagtagctgaggaagccttggaagcaaaacaaaaagtaacaaatagcttgtctactacctgttctttttctttttatcatgttttataattttgtgacaaattgttcttggtacactgaagatatttnatggaaaattaccctatgattctattgtatttaaaaaaaaaaaaaaaaaaaaaaaaaaaaaaaaaaaaaaaaaaaaaaaaaaaaaaaaaaaaaaaaaaaaaaaaaaaaaaaaaaaaaaaaaaaaaaaaaaaaaaaaaaaaaaaaaaaaaaaaaaaaaaaaaataaaatacacatacctaaaatccaatataactgcccattttcctgacacctatcctaactaccaaaaacacttaccttccccccatttacaccccctttcatcaaatttgaaaaaaccaccgattggcccaaattagaaaaagcccaaaaaaaaccccttt

SEQ ID NO: 8272 - DNA, 512 bp, Gossypium hirsutum
  unsure (1)..(512): unsure at all n locations; Clone ID: LIB3828-008-Q1-K6-D4
gnaaagcctaatccgtttgcctcaaccctcgagcattgatgtcaatggggttcttggtcaaatactttttgatgtctgtgtccccaaggatgtcgaaggttgggatatgaagtcatcagattcctcgagccgacacccttatacttcttctctgtggcggaattcccatttcaatccaatcaaatgcattcgtcggtccagactatagcatatcttgctgactactttcagcagaggcttgttcctgaatttgcggaacccgtaatcttaccggcatgagaattaaatggagcccaacccatagcaaaatgggaccgccaaaggtacaagaaggggcaatgtgaatggatggcgagatgtgatatataattctgtttcgtaggccactaatgattacttgccatgatttgagctgataagacctctgttccaacataaacaataaacagtcactttactattcatgctctaaatttgatgtggagtttcttagaatcaccatcataatgaaa

SEQ ID NO: 8273 - DNA, 589 bp, Gossypium hirsutum
  Clone ID: LIB3828-008-Q1-K6-D5
gccactatatttatcgtcatgtatggtttgacaagtatgtattttgctggtgttatggttcggttgattcttgttgctacacccgcagtttgccttattagtgccattgctgtttccgccactgtgaagaacttgactgtgctgttgaggtcgaagaacaaggttgtccaaactggttccactaagggaagtggcggttcaaagtcctcttctaaggctttacttgatcagtcccagcctttccagaaaaatggggcgattgcactgctctttggtgccttttacttgctcagtaggtatgctacccactgtacatgggtcacttcagaagcttactcatctccttcaattgtactggctgcaagaggtgcccatgggaatagagttatttttgatgattatcgtgaggcttatttttggcttcggcaaaatactcctcaagatgccaaggtgatgtcttggtgggattatgggtatcaaatcactgccatgggaaacagaactgttattgttgacaacaacacttggaataatactcatatcgctactgttgggcgtgctatgtcatcttacgaagatgaggcaattg

SEQ ID NO: 8274 - DNA, 487 bp, Gossypium hirsutum
  Clone ID: LIB3828-008-Q1-K6-D6
gcagaatgtcaatagccacgttccaaaatccagcacccgatgccacagtgtatccattgaagatcagagagggagataaaccaatccttgaggagcccatcacatttgctgagatgtataggaggaagatgagcaaggatcttgagcttgccaggctgaagaagctggccaaagagcagcaacagttgaaggagaaagaggctgagaatgagaagcccaagcttgaagccaagccattggaggaaatccttgcctaaaacttttaccctactgctggttattgtgttagcactgtttcgtcttccactatgttgtgttaattttatttcatttctacttttttttttgtggtgatacccgtttctatttattttctagcgagtaatgtatgtcatgtttcccacatttgatgcttgtggtctattatatactcgggtatcagtaatagatgaaaataaaatttcccacttcactttcttcctagttt

SEQ ID NO: 8275 - DNA, 609 bp, Gossypium hirsutum
  unsure (1)..(609): unsure at all n locations; Clone ID: LIB3828-008-Q1-K6-D7
ccgtccggcagtccctaggnaaccaattaaaagnaacccgaaaaaaaaaacacagattaagacagaagcatggccagccagctcgtaggaacaaagagagcttgtgtcgtgggtggcagcggattcgttgcctcattgctggtcaagttgttgctcgagaagggttacgccgttaacactacagtcagggaccctgacaaccagaagaagatctctcaccttgtaacactacaagagttgggagacttgaagatctttcaggcggatttaactgatgaagggagctttgatgcccctattgctggttgtgaccttgtcttccatgttgcgacacccgttaactttgcttctgaagatccagagaatgacatgatcaaaccagcgactcaaggagtggtgaacgttttgaaagcttgtgccaaagcaaaaacagttaaacgagtcgtcttgacatcatctgccgcagctgtgtctatcaacacactggatgggacagatctcgtcatgacagagaaagactggaccgatatcgagttcttatcatcagcaaagccaccaacttgggggtaccctgcatccaagacgttggctgaaaaggcagcttggaaa

SEQ ID NO: 8276 - DNA, 461 bp, Gossypium hirsutum
  unsure (1)..(461): unsure at all n locations; Clone ID: LIB3828-008-Q1-K6-D8
tggnaaattgtgngaaatgaactcaaccatgnagttgcaatagttnggctatggnagnaagtnntcttaataaaaagtacnntggatagtgaagaattcatggggtactgaatggggtgaagctggctatgtaaggttggaacgtggagtctctgataaaagggtctctgtggtattgcaatggatactagttaccctgttaagaagtgaacagctttttcagtgaaattggcctaggaattctgtttgcttattgaaatatttaacttccttttatatgttttataattataatttaagaatacatgttgaagaaaaatatgtgtggacttgcaaaacttgcgatgtgaccatgcatgaatgtaatatagagaggtagttagataatctttttcttcatttaactgatttaacgttttctttaattgattatacgcctattaataccataatatttattc

SEQ ID NO: 8277 - DNA, 606 bp, Gossypium hirsutum
  unsure (1)..(606): unsure at all n locations; Clone ID: LIB3828-008-Q1-K6-D9
gnaaaaaagcatttgtaattgtaattgtaaattgtttcgagatctctgtgtatagacagtctcaaatggcagcagctgcagcaccagatcacttgttccatttgaggaacaatttctacttgggttcctttcaggctgccatcaacaacagcgatcttcccaacctctcgcccgacgacgccgttgagcgcgactgcctcgtctaccgctcttacatcgctctcggcagctaccaactggtgatcaatgagatcgactccgccgctaccactcctctccaagccgttaaactgctggccctctatctctccaaccctcatgataaggaatcaacaattgcgagcttgaaagaatggttagcagatccagcgattggaagcaatgccatattaaggttgattgctggaatcgttttcatgcatgaagaagattatattgaagctcttaaacacaccaatgctggtggcaccatggaacttcatgcattgaatgtgcaaattttcattaagacgcaccggtcagattatgcagagagacaactgagggtcatgcagcagattgatgaggaccatacactgactcaacttgcaaatgcatggttgaatc

SEQ ID NO: 8278 - DNA, 608 bp, Gossypium hirsutum
  unsure (1)..(608): unsure at all n locations; Clone ID: LIB3828-008-Q1-K6-E1
gngnaatctgattacctacgatgcagccgactttaagtttgaggcatgccagccaacttcctcttcattaatggatgatttggagcaacctcagattgacaacagtgcatctgacctaaaacagacctctcaggagacaaactcacaagatcaaatgatgcaaagagaagcacattctgaaacggaggtcagttgtctttctagcaagccagaaatagagagtgagcaacccaaacgtactacgaaaagatttgcgtctgaacaactcgaaacagaggcaaagaaatttgtatttaaatctaggaagggaagtaatcctgcatttattggtgcacaaacaaaatttgaggagttgagttcaacagcctattcaagtatatcagtggattcatcccaccaagatgttggagttgaatcaaacttggatactgtgtcatctggggcagatacgagcaggtcgaaagaaccaagcatcacggaaaatgcagttctcaataataggaggggtcaatatggtgactctgaatgttggactgcagtttctattacttccactcttgattcacctgataaatcagaagttggaaccatagagtacaaacatggag

SEQ ID NO: 8279 - DNA, 609 bp, Gossypium hirsutum
  unsure (1)..(609): unsure at all n locations; Clone ID: LIB3828-008-Q1-K6-E10
gcggnacactgcattggtggttactgatgacgcaagttatgcccgtaatgcgctggaagcaatttggagttctgagaacgaanccagaacgcttggaccctctaattatctttcaaacttcttctttagctcgtctgccattgcaatcatcctatgtagaccaggtcattttcttcactaggtcagttgaattcccggttgatgagttgtatgccgaaatctttagagttatgactcctggtgggaaactggtggtttatcgaagttttcagattgagataagtgaagtagagacggcattgtctgctttggagcgcaagttgctattggcaggatttctagaaggggaacgttttcaacttaaaaaaattgctcacactgtagggattaaggctaagaagccatcttggaagattggatcttcttttgctatcaagaagaccgtgaaaagtccattgaaaattcagatggacgatgactcagatctcattgatgaagattccctcttaactgaagaggatttgaagaaaccccaattacctactgttggtgactgcgaagtgggaagcacaaggaaagcctgcaagaactgcacttgtggaagggctg

SEQ ID NO: 8280 - DNA, 599 bp, Gossypium hirsutum
  Clone ID: LIB3828-008-Q1-K6-E11
ggcgtctgtaataaaatctgcaatcttaattctgtcggtgtttttatctgtacgcttcagttcgggtgttaggttgctccaggaacagcccaatgatgaccccaaaaacatggacgctattcctcccattgatgcactcaaccctaccgagttgaatggacccggtgttggcattcacgaagatcatgttgtcccaaaagtgctgaaattggtactcttggttttggttttgaaggtggtcctgataaatgttgttcttctggatgttccggtaattgtaatcctggtggtttcgttctaccatttcctcaaattccagaaatcccaagaattccagaaatcccacaaatcccacagatcccacaaatcccacaaattccactaatcccacagatcccacaagtcccacagatcccacaagtcccaaaaatcccactaatgccaggacagtcgggatgtgagagtggagagtgttgccgtcagggttgtggtgggacttgtgctgagtgtggtcagcccaggtgcgcatcaggatgttgccaggctgaaactgtaaagagcaaagggatagaagaggttatggacagtgaacccagtcc

SEQ ID NO: 8281 - DNA, 603 bp, Gossypium hirsutum
  unsure (1)..(603): unsure at all n locations; Clone ID: LIB3828-008-Q1-K6-E12
ctcctcctgntagttatggccctaggacatctttgaagttgagctgttctccgcatggaactctttctagcagtccaccagttggttccctgccaaagtcatttccaccttttcagcatccaagtcataagctgttagaagaaatggttttaagcaacagaagtacctaaagtttcacaagcgctgcctgaatgacaggaagaagctgggaattggttgcagtgaggaaatgaattcgctgtacaggttttggtcatatttccttagggacatgtttgtcccttcaatgtacaatgagttccggaaacttgctcttgaagatgctgctgctaactacaattatgggttagagtgtcttttcagattttatagctatggtttggagaagaaatatcgagatgatctttataaggattttgagcaacttacccttgatttctatcataaaggcaatctttatggccttgaaaaatactgggctttccatcacttccgagaccagggagagcccttaaaaaaacatcctgaattggataggttactcggggaagaataccggggcttggaagatttccgtgccaaagaaaggaatgctggcacaag

SEQ ID NO: 8282 - DNA, 591 bp, Gossypium hirsutum
  Clone ID: LIB3828-008-Q1-K6-E2
cactcgttcaggctttggttggttttgttggtattgaaaatgcttgctcggctcgcgtctcgacgttttctcgagatccgtcaagctttccgtcaatcttctgaggcctctcgatctttgtccactgccctgaactatcatcttgataccccagataataatcccgaccttccatgggaattttccgaggcgaacaaacaaaaggtcaaggagatattatctcattatccatccaactacaagcaatctgcagttattcctttgctagatcttgctcagcagcagcatggaggatggcttccagtttcagcaatgaatgcagttgcgaaggttatagaagttgctcctattcgtgtatatgaggttgcgacattttattcaatgttcaaccggtcaaaggttgggaaatatcatctgttagtttgtggcacaacaccttgtatgatacgtggttcacgagaaattgaagaagccctattgaaccacttgggggttaagcggaatgaggtaacaagcgatggtttgttctcagttggagaaatggaatgtatgggatgttgtgtaaatgctcctatgatcacagttgctgat

SEQ ID NO: 8283 - DNA, 602 bp, Gossypium hirsutum
  Clone ID: LIB3828-008-Q1-K6-E3
aaagcttctgattcctccaaactgggtcagttgctgaagttaatgctcagttctatcagcaagaagctgacaaactccgaaatcaaatccggaatttgcagaatacaaacaggcacatgctgggggagtccgtagggggattgcctatgaaagagcttaagagcttggagagtcgtttagaaaaaggaattagcagaatccgttccaaaaagaatgagctgttgtttgctgaaatagagtatatgcagaaaaagtgtagatgtaagagttgttgcagtaggacttgcaggaggactttgatcatcactttggtcaccttgattgatgaagtcatcatctttattatcattgaaaagaaattgacttgcataacaataaccaacttcttcgagccaaggtctgatctctcttctttctttgcgctaatttagcattgttgtcgcggttgaaaaaaaacacctatatttcgctcgtccatttactgtatgttgcagatagctgaaaacgagaggaagcagcagagcatgaatttgatgcccggaggttcaagtaataacttcgaggccatacattctcagccatatgactctcggaactacttc

SEQ ID NO: 8284 - DNA, 342 bp, Gossypium hirsutum
  unsure (1)..(342): unsure at all n locations; Clone ID: LIB3828-008-Q1-K6-E5
ctgggccaaggacaagnacagcggtattgggggcatgttcgcttcttcaccatcatcctcaccagcatcggaaccagcaccaacaccagcaagctcatcagcgngaaacacccgaagtcaaggtttgagctgcacctgtagccacaagcttggtttaatatgggatatcaaagcatggttctcatcctataatatagagattgatgggaaaagcactatcactatcaccatcactactttatttttttttttattttttggatcaaacctttcatgtggtttgaacccattgttaataaaatgttataataataacaagaatgcaaatattattatcttttc

SEQ ID NO: 8285 - DNA, 601 bp, Gossypium hirsutum
  Clone ID: LIB3828-008-Q1-K6-E6
aaacaacaaaagatttgtggggaagttagatcttaagcctggccaaaagtcctagatgttggctgtggcattggtggaggtgacatttatatggctgaggaatttgatgttcatgttgtgggcaacgacctctctgtaaacatgatatcctttgctcttgaacgagctactggactgaaatgctcagtggaatttgaagttgctgattgcaccaagaaggtttatccggacaacagttttgatgttatctacagccgtgacactattctacacattcatgacaaacctgcactgtttagatctttctacaaatggttgaagccaggaggcaaactcctcataagtgattactgcaaaagttccaagactccatccagggagtttgctgagtatatcaagcagagaggctatgatcttcatgatgtaaaatcatatggacagatgcttgaggatgctggttttgatgtgattcttgcagaggatcgaaccgatcagttcttacaagttctgcggcgtgaattgaaccaagtggagaaagagaaggatgcattcatctctgacttctctaaggaagactatgatgaaatagttggtggatgga

SEQ ID NO: 8286 - DNA, 608 bp, Gossypium hirsutum
  Clone ID: LIB3828-008-Q1-K6-E7
gcaaatcaaagatgccgcttatatatgtcaagctttacacataccagatattcagggggcttgcatacctccacagtgttgttggagtttgccatagggatttgaagccacaaaatgttttggttgatcctctcactcgtcaggttaagatttgtgattttggaagtgcaaaagtgcttgtcaaaggtgaagccaacatttcctacatatgttcacgtttctatcgggctccagaacttatctttggtgcaacagaatacacaacgtcaattgatatctggtcagctggttgtgttctagctgaacttttgctgggccagccattgtttccaggagagaatgcggtgggccagcttgtagagattattaaggttttaggtacccccactagggaagaaattcgctgcatgaatcccaattacatggattttaggtttccacagatgaaagcgcatccgtggcataaggtttttcacaaaaggatgcctcccgaagcaattgatcttacttcacgactcctgcaatactcacctagtcttcgctgtacagctcttgaagcatgtgctcatcctttctttgatgagcttcgagaacctaatgctcgccta

SEQ ID NO: 8287 - DNA, 597 bp, Gossypium hirsutum
  Clone ID: LIB3828-008-Q1-K6-E8
gtcctacatcagagactccagttccatcttcacctctgaagcttcccgagtctctggagcctgatgccagggatgaggaggaaagtccactgatggcaacagttaggggcaagtgcatcactcagttattacttcttggtgctgttgatagcattcagaaaaaatactgggataatttgaaagcaactcagaagattgccataatggacattttgttatccttactagagtttgctgcttcatataattcgtattctaacctcagaacacgtatgcaccatactcctgcagaaaggccccctctaaatcttctccgtcaagagttagcaggaacttccatttatctggatgtcttgcaaaaagtgacatcaggatttaatgacaataatagacaaaacctagaatctaatggttctcaggacactgaagattcgaaactggaaggaatagcagaagagaggttgatttctttctgtgaacaggtactaagggatgccactgatctccagtctataataggggaaactaccaatgtggatattcatcgagttttggaattgaggtctccaatcatcattaaggtgcttagaggcatgt

SEQ ID NO: 8288 - DNA, 601 bp, Gossypium hirsutum
  unsure (1)..(601): unsure at all n locations; Clone ID: LIB3828-008-Q1-K6-E9
caagttgagaagaaacagnaccaaagcacaggccttgaagcagcgaaagcgtgaaatctggagccacatttaagaagaaggccaagaagatccgaaccaaggttacattccacaggccaaggaccttgaagaaggataggaccccaaagtacccacgcattagtgctccaccaaggaacaagcttgatcattatcagattctcaagtttcccctcacgactgagtctgcaatgaagaagattgaagacaacaacactttggttttcattgttgacattcgtgctgataagaagaagattaaagatgctgtcaagaagatgtatgatattcaggccaagaaagttaacaccttgatcaggcctgatggaacaaagaaagcatatgttaggttgacacccgaatacgatgccttggacgttgcaaacaaaattggtattatctaggctagttggtagctaccttgttgagcatttattttccttttgtttgcaaagagaaattatttcgagacattgagcaggtatttttatttttattagcacttaaaagtttgtaatattgcattgttgttgccaattagccatctctggttcaacttaag

SEQ ID NO: 8289 - DNA, 190 bp, Gossypium hirsutum
  Clone ID: LIB3828-008-Q1-K6-F1
cccagcgtccgattttattttattttatttatttatatttcctggattcatttgaatttagacttcatggaattgtgatcgaagaccataatattggctttgatgagctggataaccccatgatatgtcatggacgaattgttgtttctttctgctttataaattgccatctttatctatttgaattttg

SEQ ID NO: 8290 - DNA, 591 bp, Gossypium hirsutum
  Clone ID: LIB3828-008-Q1-K6-F10
gcacttcactgagttctcatatggaaaactcattttgcagaaataggatgggatgtaagggtagcacttagagtatgtggtgctttccatggcaaagagtatatacaggcccagaaaatgaggaaccgccagatgcaaattcataacaatatatttgccatggcagatgtcatagttgctccaacaacaggtcggactgcatactcgatagtcgatgatgctctaaagactggtgaagtagactgcataaatggagctgcccttatccgttatcagatagcaggaaactttttgggattacctgctgtgactgtccctgtcggttatgacaaagcaggtttgccgattggccttcaatttatggggaaaccttggtcggagcctacattaatgcatgtagcatatgcaatgcaggccttgtgcatctcggagtatagaaagccgaaggttttctatgatctacttcataagaactgagcagcgcagggtgggaacctccaggaaccgtgggaaggtaacctgacatcggaactatttggtagtttcttctcaatgatgaaatgaccggcaactgacttcccctggtatatg

SEQ ID NO: 8291 - DNA, 576 bp, Gossypium hirsutum
  Clone ID: LIB3828-008-Q1-K6-F12
gtaaacaagctttaaagccgtaattatctatcattagcatcgatacaaatttcatgagaaatacagactctaaagtaagaggcaatgaccacaaatcttaatctgaaaagctgacaacaaaagaaccattgattccctagctaaatggctaatcattcaataggaaagtgagaacaggattggacaaagtaccttaaatcttgctaagaactttctcagctgctgcaatggtcttttggatgtcttcctgagtatgtgccaagcttgtaaatccagcttcgaactgtgaaggtgccaagtatacaccttcctccagcattcccctataaaacctggcaaattttgccgtatcactcttctttgcatcgtcaaagttgtaaacaggtccttctgtgaagaaaaatccaaacatcccattgatataccccccacagattgcgtgtcctgtcttttttccagcatctaaaatgccttgaacaagttgtccggtgatcttatccaagtattcgtatgttcctggctctttcaaccgcttaagggtctgtatcccggctgtcatcgccaatgggttcccac

SEQ ID NO: 8292 - DNA, 588 bp, Gossypium hirsutum
  unsure (1)..(588): unsure at all n locations; Clone ID: LIB3828-008-Q1-K6-F3
cgaaaagcccaaacacagnagggnattcaacatgggcaaatcagagggggtcaatattattgcctctgacattaaaactggtgatgattgtatttctatcggagatggcactaaaaatatggtcataaaagaaaaacttgtggaccaggacatggtataagtatcggtagtcttggaaagttccaaaatgaagagccagttgagggaatcaaaatctcaaactgcaccatcactaatacttcgaatggagctcgaatcaaaacttggccaggcgaacatggtggggcagtatcagaaatacattttgaggatattaccatgaataatgtctcttcccctatcctaattgatcaacaatattgcccatggaataaatgcaagaaaaatgaagaatccaaagttaaactaagcaacattagcttcaagaacatccgtggcacatctgcgcttccagaagctatcaagtttatttgcagcggttcttcgccatgtcaaaatgtggaacttgcggacattgatattaagcacaacggagctgaacccgcaacatcccaatgtttgaatgtcaagcctataactagtggcaaa

SEQ ID NO: 8293 - DNA, 568 bp, Gossypium hirsutum
  unsure (1)..(568): unsure at all n locations; Clone ID: LIB3828-008-Q1-K6-F4
cggnagcgtgggctcgaaacggagagttggatggtgggattgatatcactcctgtggtgaagccaatccgggaaccacgtgttgttgttcagactgtgagtgaagttgatatactggatgatgggtatcgttggcgcaaatatgggcaaaaagtagtgagaggaaatcctaatcctcggagttattataagtgcacaaatgctggttgtcctgttagaaaacacgttgagagggcatctcatgatccgaaagctgttataaccacatacgagggaaaacacaatcacgatgtgccaactgcaaaaactggtagtcatgatacagcaggagcagtagcaatgtgtgggccatcaaggattagatcagaagaaaatgatgccattagccttgatcttggtgttgggatcagttccgttcccgaacatgcttcaaatgagcatcaacaattgcattctgaactggtccaaagccggccacggactggtggttcaagtttcaaatttgttcaaccaactatgatggcatattacggtgctctaaatggcagcatgaatcagtatgtttctag

SEQ ID NO: 8294 - DNA, 586 bp, Gossypium hirsutum
  Clone ID: LIB3828-008-Q1-K6-F6
attaatgcaaaactgagcaatgcttcctttacaggtcagtttcctgtttctttgtcatggatggatgtatttattggaatatggggctaagtaacttaatacaaagaaattttacatttgattttctatgccttttagatcacctctaattttagcatgaaagcagccctctttgctgggttttttcaccatttttgctgctatcgctttcatttaggtgtcaactttattttaacagatgttatgccttatatgatgctatatgagataaatatattccatagtttttcttatccttctatttttgcactgttatactctctaatcacatgatttccctaagctaccccccgtcaataatgattgattgctgatgtaacaatgtttgattgctaatcacatgattttcacttttgttttgtctccaataatgattgattgctaatgtaacaatgttttttttttttaccaagatgctatctaacaattgcataaccgagccatgttcttaagattgattgcgaatgactgatattgtgaaataacacttacataagataaagtagtaactgtggctttggtatgc

SEQ ID NO: 8295 - DNA, 593 bp, Gossypium hirsutum
  unsure (1)..(593): unsure at all n locations; Clone ID: LIB3828-008-Q1-K6-F7
cggncgcgtgggttttttcgtatttttttttttggtttttttcattttttcaaatgcatggataaggcgcctaaagtaaaagaccctttttggtaaatcggccatgtgaaaaaaccgtattacgggagaagtcaagtagattaaaccatggtgtttttaaatcaccactgtgctagtctatcagaggcacatatggatccaaaatatgtggtggtttgaccaacataccaaacaacgttgaaccacaattcattttgaaatgcaccgaagttatcgagtggctgaccaatcaatttgatgaagacgacattcactgatttgggaattttttttaaaaaatgcactttcacttgtgtcagaaagcacactttgattggccttacgtgcaattagctaaataacaatatcctcgcccaagtcatctgtaaaaatcatacttcaactggcataaggagtgactcctggttgatgcaccctttttgaaaagcttgtggagatgcggagggtacgtgcccatttatacggtttgtcccaccaaaggttatttcaaaagggcctatatttttttggaccactaaggggattttatgtac

SEQ ID NO: 8296 - DNA, 56 bp, Gossypium hirsutum
  unsure (1)..(56): unsure at all n locations; Clone ID: LIB3828-008-Q1-K6-F8
gggggggggggngggnggggggggggggggggggggggggggggggnggggggggg

SEQ ID NO: 8297 - DNA, 312 bp, Gossypium hirsutum
  unsure (1)..(312): unsure at all n locations; Clone ID: LIB3828-008-Q1-K6-F9
gntgatggtgctttagaacacgaggnaagtttactgggggagagagggatgctagtattgttggtaggagactgactggtgaagcccatattaacagcaagagaagaggctgataaccctttttaatccaagatgtacatatatatatatatcaaaaagcgtgtcctaaatgtaataagctgaataatttgaaatcttggtgactgatttttgttgtcagagaaaccaagtaatgtcagcaaacagcaactacataattttgtacgggcaaatgcaatttctaatttaagatgtcttggtttatattgatat

SEQ ID NO: 8298 - DNA, 584 bp, Gossypium hirsutum
  Clone ID: LIB3828-008-Q1-K6-G1
catgaaggcccaggctttgagggataacagcatggctggttacatgtcaagcaagaagacatggagatcaacccggagaaccccatcatggaagagctgagaaagagagccgatgcagagaagaatgataaatctgtgaaggaccttgttctccttctcttcgagactgctctcctcacctctggcttcagccttgatgagcctaacacctttggcaacagaatccacaggatgctgaaactcggcttgagcattgacgaggatgcaggtgaaggtgaagctgatgctgatatgcccccattagaggatgctgatgctgaaggcagcaagatggaagaagttgactaagcaccactcttcttgttggaactttttactagtttttttttaattattattgaagttatccttaggtttaatattttgttttgtgcctttttgggaggttttgttagtgattttggagaaagttcttaatgataattgctgttctgtttctggtatatttatacattttatcggtgccttatctttggtgcttgcttagaatggttgcgtttgccatatgttttcttaaatggtta

SEQ ID NO: 8299 - DNA, 573 bp, Gossypium hirsutum
  unsure (1)..(573): unsure at all n locations; Clone ID: LIB3828-008-Q1-K6-G10
gtngaaaacaaaaaaaatcaaatcttaaggaaattgaagaggtgatttttgagtttcttcttacttttcattccctggttgttatttagcttttctttttttcgttttgcatctgtcgatcgtttgttaaggaaaaaggcagtaaaagaaaggagaaacgtaccttgtgacgagatcctggccatctccgtcgtcatcggattatgggctaggttcgaaaaccgtttgtatgccctcagtacaaaacggcgcagagttcatctgattctatttaggtttttttaagaaaatgaaaaggattttttaggttattttggcctttaagcacgggaataaaacgctgttgtttggagtcaatgcaatggctttgaaacggcatcgttttgaggacccgatccgcatggtgacccgatccgggcaggatccacgcattatggatcgattggtctatttattcaacaggtccctctttggttcaaatagtttcaatttgatttcctttaatccttttagtttgtaccgcatatttgactttggtttcacttgaattcacacctaaacggcgctggtttt

SEQ ID NO: 8300 - DNA, 601 bp, Gossypium hirsutum
  Clone ID: LIB3828-008-Q1-K6-G11
aaatagtctcttctattttgccaggagccgaatccgaacaaacaaaagtgctaaacatggatgctgctggcaatcgaagttttaagttactattatttttatttgctgccataatcccagccctgcaaggtcacatcggagaatatgatgaatattggaaacaacgtgaattggaagctaaagaaaacaccgagcaggcatataaccccaatcctgaggaagttacccagcatgtcaaccaccttgtttccaggtcgctgatggggctaaatagtacaagacgacatttgagagcaagaaaaaaaggcggtccctgcgatccaaccaaccccattgaccagtgctggcgctgtgatcgtaactgggagaaaaacaggcagagactggctgattgcgccattggattcgcacgtggtactattggtggaaagtacggaagaatttacgtagtgaccgatccttcagatgatgattttttaaatcctaaacctggaaccctacgtcatgctgtgatccagaaggaacctctttggatcatctttgcacgagctatgatcatcaggctaaaagaggagctcattatgtcgggtaacaaaacaat

SEQ ID NO: 8301 - DNA, 575 bp, Gossypium hirsutum
  unsure (1)..(575): unsure at all n locations; Clone ID: LIB3828-008-Q1-K6-G12
gtcattttcatttgggattttctcagttagatattctttttctttaaattttcatcgatggcacagcagcaggctcaggtgaagttcacggcggtgaagccacagttgatggtgaagacgccaaagcagttgatgcagttaatttctacaagtccgcttttggcgccgtcgaagcaggccgatctgcttgctgccccccgccaacggccgaacagaacctccctaacatcctctgcgctcagcttgagctcgccggctgttccttcgtcgtatataacgacgactccgctccacagaaaatcgaagggatcggaaatcaactctgcctggaaactgatgacgtggaagccgccatttccaaggccgttagcgccggagcggttgtagagggtgaggtaaccgaaggaggcggcgcgtgctgcggcggtcgcgtaggtaaggttaaggatccatacggatatgtttggctcatctgctccccctccaacanatgcgccccagtggaagcttaaaactgccatcggctcttttggtgtaatactgctgtttgggtgtgttgtttggaaatggttttt

SEQ ID NO: 8302 - DNA, 568 bp, Gossypium hirsutum
  Clone ID: LIB3828-008-Q1-K6-G2
cgcgagcgccgcccttttttttttttttttttttttttttttttttttttttttttttttttttttttttttttttttttttttttttttttttttttttttttttttttttttttttttttttttgaaaaaaaaaggaaaaaaaaggggggggccccccttttttttttttttttttttttttttttttttttttgggggggggaaaaaaaagggaaaaaaaaggggtttttttttgggggggaaaaaaaaaaaggggcccccaaatttccccggggggggggggggaaaaacctggggggggtttggggttcaaaaaaaacccaaatttaaaagaaattttggggggggaaaaaaaaaaaaatggaacctttttaaggggggaaaaaaaagggggggggggtttttttaaaaaaaagggggaaaaaaaagggggaaagggggtcatttgggggtaaaaaaaaaaaatttttccaaaaaactgggccaaaggggggggccaacaaaaggggggttttaacccttcaacccccaattgaaaaacaaccaaaaggagggcctggggggc

SEQ ID NO: 8303 - DNA, 596 bp, Gossypium hirsutum
  Clone ID: LIB3828-008-Q1-K6-G3
caattttctcaccagggtaccggcacataggattcaattgcagtgcacaaattctctctgatatcagtggcttgtcggagtaaacaagagttatgtttctctgtagtttcactactgtggcacaagctgatagcagcgcccgaaacacaacccagtgccgaaagcacatctgcccagcagggatggagacaggtggttgatgcgttgtgcaatgtcgtatcagcatcaccgacaaaagcaactacagctgttgtacttcaggcggatagggaattgcagccttggattgccaaagatgacgaccaaggtcagaagatgtggagaatcaaccagcgaattgtaaaattgatagtcgagctgatgagaaatcatgatagcgcagaatcattggtcattgtggcaagtgcttctgatctacttctacgtgccacagatggtatgcttgttgatggggaagcttgtactttaccacaactggagctgctggaagcaacagctagagcagttcagccggtactcgagtggggagaatcaggactggcagtagcagatggactttcaaacctgttaaagtgtcgtctaccagctacgactcg

SEQ ID NO: 8304 - DNA, 585 bp, Gossypium hirsutum
  unsure (1)..(585): unsure at all n locations; Clone ID: LIB3828-008-Q1-K6-G4
ctcggattgcttggattttgngagtggcattggcgccccccttcttcatgtcgtcaatccaacatttgactatgtgccaccgaagcttgttagtctctttataactgataccggagggcataatccatcatacatgtaccgcctgattgcggattattactctgctgatgatcttgtactggaacgaagaactgcttcaggaaattaagtttatagtgccaagttataccgctctacttcagattgtttgtatgtggagaagatatgaattcaagtcggagattatgaaaactaactgcactgagcaataatatttctggagggaacttcattatatatcatcaatacaaagaattgacttggacaaacgcaacgatagaaaagtgggtttttgtgattgtggagagagataggagtaggaagtagaagagagagaaatgaagagaaggtcatatatctttaatctttgtatcgccatgaaaattcctcaacattcaactgtatgaaaactcatgcatggaactactgttgtattactgttggcttgaaacttgattgatgatggtggtactggggatgcatctc

SEQ ID NO: 8305 - DNA, 626 bp, Gossypium hirsutum
  Clone ID: LIB3828-008-Q1-K6-G5
cgtccggtccgattccggtccccacctcgcgggtgttaggttgctccagaacacccatgatgacctcaaaaacatggacgctattcctcccattgatgcactcaaccctaccgagttcaatggacccggtgttggcattcacgaagatcatgttgtcccaaaggttccgaaattggtactcttggttttggttttgaaggtggtcctgaaaaatgttgttcttctggatgttccggtaattgtaatcctggtggtttcgttctaccatttcctcaaattccagaaatcccaagaattccacagatcccacagatcccacaaatcccacaaattccactaatcccacagatcccacaagtcccacaaatcccactaatgccaggacagtcgggatgtgagagtggggagtgttgccgtcagggttgcggtgggacttgtgctgagtgtggtcagcccaggtgcgcatcaggatgttgccaggctgaaactgtaaagagcaaagggatagaagaggttatggacagtgaacccagtccaccaaagtagggagatgataccatattaagatgaaataatgaggaagagttggttgtcgtcgtattaattatacaaaataagaagtaatg

SEQ ID NO: 8306 - DNA, 312 bp, Gossypium hirsutum
  Clone ID: LIB3828-008-Q1-K6-G6
gtatttctatcggagaggcactaaaaattggtcataaaagaataacttgtggaccaggacatggtataagtatcggtagtcttggaaagttccaaaatgaagagccagttgagggaatcaaaatctcaaactgcaccatcactaatacttcgaatggagctcgaatcaaaacttggccaggcgaacatggtggggcagtatcagaaatacattttgaggatattaccatgaataatgtctcttcccctatcctaattgatcaacaatattgcccatggaataaatgcaagaaaaatgtataacattcttatc

SEQ ID NO: 8307 - DNA, 558 bp, Gossypium hirsutum
  Clone ID: LIB3828-008-Q1-K6-G7
gcgtactcagggacctccatttccagctactacttccgcagcaaacgcagaggtgatatcgttgtggatctttgaataagataacagaactctgccttcatcatctctggccacaatacctgaggctgagtatttctggctttctttgtatgctccgtcgaagtttatctttatgaaatcgcgattgcgcagtagaataaacaactttgccaatggttgagctattctaacacccagggcattctcgaaataggtggtccattgtttaagctctttcaccacatctggggcagtttgtgtttgctgataatttcctgtgttgtaaattcacttttgtaggcaaaaagttccatgatagtctccatattgtaatctttatctttgttggtaaattcaggctccaaagttttttgtagaatttcctgtagttggtttgtaaagcataagctctaagattttcatccgaattctataatagtttataggcacttcggaccgtgaattcacccgatgattctcctccccaaataaggaaatcctcatgaggagtacgtgcca

SEQ ID NO: 8308 - DNA, 592 bp, Gossypium hirsutum
  Clone ID: LIB3828-008-Q1-K6-G8
taagcctttccgttagatctgaaaaaagctccctcccggtggcgccgtcggggccgcaagccctctctcgcagaaaaccaccaccttcttcaagtccaggtgcgagcagagaagatcgaacagaaccttctagaaagagtctgacggtcgattatccattttggcaacagaattggtttatcggattactattcctgatggcgatgggattcttaggtttcgctctcttcctcttcctatctctcgatctcgatcaaggttccccttcctccgcatccgccgcctcctcctcctccacttcccaaaacgttgagattacttatgggacggttctaaagctaatgcacgagaaaacgaaatttaggctgcattcacacgatgtgccgtacggttctggaagtggacagcaatctgttaccggctttcctaatgttgatgattccaacagctactggattgttaggcctgaacctgatacatctgcaaaacaaggagacaccattcctagtggaacaattattaggttgcaacacatgagaactagaaaatggctgcatagccatttgcatgcatctccaatatcaggaaacct

SEQ ID NO: 8309 - DNA, 589 bp, Gossypium hirsutum
  Clone ID: LIB3828-008-Q1-K6-G9
gattaggaaaatggtttgagaaaaaggcatcagaagttcagatactaatgaatcgggctctgacggagtacctcgaagagtctctaatatcatccccaacatccatgataattacaataagttactggagcttgctgcatccttccgctcatctcctggtagcccagcaacacaaactatgagtgttgccagacgcgtcagaggtgctcttagacaggctgataagcccagatttgtatctgcattttgccagacaaattgtggtgatgttagtcccaatgtactcggagcattttgcaccgacaccggtcttccttgtgacttcaatcatagtacctgtggtggaaagaatgagctgtgctatggccgaggaccaggctatcttgatgagtttgaaagtactcgtattatcggagagaggcaattcagaaaagccgtggacttgtttgagaaagcatctgaacagttaaaaggagaggttgattatcgtcacacttacatagacttttcccagcttgaggtaacacttactaaagtgggaggaggttctgaggtagttaaaacttgtcccgctgcaatgggatttgcg

SEQ ID NO: 8310 - DNA, 132 bp, Gossypium hirsutum
  unsure (1)..(132): unsure at all n locations; Clone ID: LIB3828-008-Q1-K6-H1
naaaaaaaaaaaaaaaaaaaaaaaaaaaaaaaaaaaaaaaaaaaaaaaaaaaaaaaaaaaaaaaaaaaaaaaaaaaaaaaaaaaaaaaaaaaaaaaaaaaaaaaaaaaaaaaaaaaaaaaaaagggggtggc

SEQ ID NO: 8311 - DNA, 485 bp, Gossypium hirsutum
  unsure (1)..(485): unsure at all n locations; Clone ID: LIB3828-008-Q1-K6-H10
cacaaatcccacaaattccactaatcccacanatcccacaagtcccacaaatcccactaatgccaggacagtcgggatgtgagagtggggagtgttgccgtcagggttgcggtgggacttgtgctgagtgtggtcagcccaggtgcgcatcaggatgttgccaggctgaaactgtaaagagcaaagggatagaagaggttatggacagtgaacccagtccaccaaagtagggagatgataccatattaagatgaaataatgaggaagagttggttgtcgtcgtattaattatacaaaataagaagtaatgatgttgcagaagggcttgctataaaatcctgttggataaaaagagtaattatgaagaataaatagctcaaaacaatatttgatttacaatatcctaaagttccttgaatcttgttttgtagccatatgtaattaatgcatgtacatgctaatatatatgattttctttgctatat

SEQ ID NO: 8312 - DNA, 602 bp, Gossypium hirsutum
  Clone ID: LIB3828-008-Q1-K6-H11
ccccgcgtccgcaattttgtgatctttatctcatggagagggttattgacgatgaaagcgaaaaaatgttcttctggccttggaaaatgcaggattttcacctccggtggcttggtgaaggacaaggttctcttttgtagtacagagaatgggaggacatcttttgttcggcagctagaacctgattggcatatcgacacaaatcctgaaatagtttcccagttagctaggttcatcaaatatcagctccacgtatcccctgtcaaaactgaatggactacgggtaaagtgctcagttctccatccttggaaaaattctttgggtaagtttgacacttgaactgatatgaaaacatgcagatatgttttgaagttgttgtttgctcccttttggcccttgtatgcttcctttttggttaaagcctgatatttttctttcttttggcaccccttgtgctgatgtcagtttttaggataactataagggagaagatttatttgtttcaaaatttgtgaaacagggaggggttcacgtttgaactttttttctttttctttctttctttcttttttttttttactggaggaactacatccaatat

SEQ ID NO: 8313 - DNA, 610 bp, Gossypium hirsutum
  unsure (1)..(610): unsure at all n locations; Clone ID: LIB3828-008-Q1-K6-H12
gcgttcgctccctcttcctctanagggataaacagtataataaattatattggaggcgtggtcggcaaaaaaaaggttaagagatggctcgattaacattagtatcggtgctatttctctgggcaggatcaatgcttatggtccagggcggagatcccacccttttttttcgaatggaacgtcacctatggcaccattgctcccttgggagtgccagtaaagggtattcttattaacgggcaattcccgggaccaaatattaactctaccaccaacaacaatattgtggtcaatgtgttcaataaccttgatgagccattccttgtaacatggaacggcgtgcagcataggaagaactcttggcaagatggtgttctgggaaccaactgtcctatcccccctgggaagaattacacctataaattccaggtgaaggatcagattggcagcttcatctactctccggtgacggctctgcataaggcggttggtggtttcggtggcctccgtgttaatagccgtctactcatccctgttccctacgctgttccggctgntgacttttctctctttgtgggagacttttttctcggggggacacaccaggcct

SEQ ID NO: 8314 - DNA, 594 bp, Gossypium hirsutum
  Clone ID: LIB3828-008-Q1-K6-H2
gtgccgtagcttgtctctcatgtcctattagggtcctgtttgcatccaaccagttgtttccaagagctaggctttgatacttaaaataagaaccactatgggtatttctagttatagtttctttctgtttttatttgttgtcataatcccaaccctagaagctcatatcgctgagtatgacgagtactggacggcacgagaattggaagccattgagaacctggacaaggcctatcactccaacccggaggaggtggtccgccattacaatgaccacttctttaggaccatgctcgagttttatatcaccaaaagggtgttggcagaatcaaaaaagggtccctgtgaggttaccaaccacgttgacagttgctggcgatgtgatcctgactgggaaaagaataggaagaagttggccaactgtgcccctggatttgctcgaggtactaccggtggaaaggatggtgagttttacgtggtcactgaccctattgataatgctgctgaccccaagcctggaactctgcgtcatgctgtcacccaaactggaccactttggatcactttcaaagggtccatgaccatcaagctgca

SEQ ID NO: 8315 - DNA, 599 bp, Gossypium hirsutum
  Clone ID: LIB3828-008-Q1-K6-H3
gcctgacactgtttggagcatattacaagcatgaacggagcaatgcaatacttaacgagtggaggagggtcaaaagcatggaggggtgaccttaaacccgacgatgacgttaatcacagcgcgaagttcttgtacgacggccaaggtttcatgtcagtggagatgaatgagaatgaagccatgattttgttttatgatgttgaaggcctgattttgcaccaatggaagatctctaaacagttgcgttctgcagtatagcaagctttccttaatctggattttttttgtttttgagtaaatctgttggagatatttattagatttgtcaattttatctccggttattatatatttaatttgtacagagatgaagtgtgaatatgtaactaaattatttgcccacatcaaaaagttttgacggaaaaaaaaagtagatttttttaaaaattattttcatgtgatttatatggaacccttcttattttaatcgacttttttacctaaataaaggacaacttaagaagttgcctcctttaatgatgtaaaagggaagtggaacccaaatcactggtaaatggaataacttcaagtcataacct

SEQ ID NO: 8316 - DNA, 604 bp, Gossypium hirsutum
  Clone ID: LIB3828-008-Q1-K6-H4
cttttccaaaaacctccgatacttcctctctccctttcctccgattccatatctctctctctttctgctagggtttgggagttagtgaagaaggggttgttatttcatggggcaacaatcgttgatctacgccttcgtggcacgaggcaccgtggtcttagccgactatacggagttcaaccggaaacttcaccggcatagcttctcagtgtctccagaaacttccttcttcaaacaacaagttcacttacaactgcgatggccatacctttaactatctcgtcgataacggcttcacttattgtgtggttgctattgaatccgttggcagacaggttcctatggcatttcttgagagaattaaagaggatttcaccaagagatatggtggaggaaaagctgcagctgcccctgcaaacagcctgagcaaggagtttgggccaaaattaaaggagcatatgcagtattgcattgatcatcctgaggagatcagtaagattgccaaagtgaaagctcaagtttcagaagttaaaggagttatgatggaaaacattgagaaggttctggaccgtggtgagagaattgagcttctggtggatagaac

SEQ ID NO: 8317 - DNA, 598 bp, Gossypium hirsutum
  unsure (1)..(598): unsure at all n locations; Clone ID: LIB3828-008-Q1-K6-H5
gttttcaatctatttttcattcgatatactctccgaagactaaggttcaaggaacaacanccacaaagtgaaaatgatcaagccggacttgagctgactaacaagatttgtaacgtcgatgctactccaatcgcttgtcacangagaaaactttaacttccttaatgtgtttaatgaaaggttcaaagaaccgatttgtggcagcagagtaggcccgccgactcggccaaagattgcatcgattactttgtctccgagtaacagaagtagtgaggcaaatattgccgtgggtgtggagaaagatagaggaagcactagttcttctttaggtaaacgtaaaatgaaaaccgagaacattgattcagacccatcttctgaagcaaagacatttcgtaacattggttacaaaagcaaccttcaagggagtttgtggataactcggtttactcccaaggcttctagctcgttatttaaccgggataccgatggtgctgttgagtgcttgagtgactgcatgaaacctgatctttgcccccgaaatgatgttaatgtttccaacaagcccgaagaggaggcatccaccggtttacgctccctt

SEQ ID NO: 8318 - DNA, 603 bp, Gossypium hirsutum
  Clone ID: LIB3828-008-Q1-K6-H6
cggccgcgtgggaaaaatgaaatcctctaaagacttgaatcgtaaaaagacagaacagatcaaaaaaaaaaaaaaaaaaagaagaaagaaagaaagaaagaaagaaagaaagttgtttgaagaaaagaaaattattaatttagagaatgtctttaacatgtgtgaaaatgtctgaggatgtttggttaacttgtcttacacatgcattgtccactgaaactgaagagatcatgggtcttcttctcggtgatatcgagtactcaaaagatggaaatgttactgcattgatatggggagcatcaccacaatcacgatctgatcggcggaaggaccgagttgagacaaatcctgaacagttggcagctgcatcagctcaagctgatagaatgactgcatcgactggcagaacaacacgagttattgggtggtaccattcacatccccatattactgttcttccttctcatgttgatgtgcggactcaggcaatgtatcaacttctagattctggatttattgggctcatattttcttgttttagtgaagatacaaacaaggtgggaagaatacaagtcattgcttttcagtcatcagatgggaaac

SEQ ID NO: 8319 - DNA, 599 bp, Gossypium hirsutum
  Clone ID: LIB3828-008-Q1-K6-H7
ggcaatgcagcagcggcacttatggctggtcttgctcccaaaaccaagtcctaagagaggaaaatggtgcgagcaagaagctgcaattttggttccaggagatatcatcagcatcaagttgggagatattatcccagcagatgcacgtctcctagagggcgatgcgctcaaggtcgatcaatctgccttaactggtgagtctttgccagtaaacaagaaccccggtgatggggtttactcgggttctactgtcaagcaaggtgagctcgaggccgttgttatcgctactggtgttcacaccttctttggtaaagcagctcacctggtcgatagcaccaacaacgtaggccacttccagaaggtgctgaccgcaattgggaacttctgcatatgctcaattgcagtgggcatgctagttgagattgtggtgatgtatccgatccagcgtcgaaagtatagagatggaattgataatctcttggtgcttctcatcggagggattcctatcgccatgccaacagttttgtctgtgacaatggctatcgggtctcaccggctttctcaacaaggagctattacaaagagaatgacagccatcg

SEQ ID NO: 8320 - DNA, 600 bp, Gossypium hirsutum
  unsure (1)..(600): unsure at all n locations; Clone ID: LIB3828-008-Q1-K6-H8
ggnaggtccttagctttctcctttaattaaaaaaaaattcacacataaaagttttttaaaaaattaaactttgaacaaatttcaaagattttgattttcttctgcaatttctcatccaccaattgaatcaggttgtgaagtattgagggtgtttattatttgttgtttttttataattactgatgtctccgccgctgcttggcgtggaggaggaaggggttcagagcaatgttactttactcggttcttcaggctcaatggaaagtgtgtgccagaatagtgctgaattgaaggaacggaactacatgggcttgtctgattgttcttcagtggatagctctgttttttcccctccctccgaggaaagaaaggctagtttgaatctaaaggcgactgagcttaggctcggacttcctggattgcagtcgcctgaaagaaatccagagctttgcttgttaagttcttctcagcttgatgagaagccgcttttccctttgcatccttcaagtgatggtcactgctttgcatcacagaagaatgttgtttcagggaataaaagagggttctctgatgcaatggatgggttctcagagggcaagt

SEQ ID NO: 8321 - DNA, 520 bp, Gossypium hirsutum
  unsure (1)..(520): unsure at all n locations; Clone ID: LIB3828-008-Q1-K6-H9
ggcaaaccaacccaatagcacactgccaagnaaatcgcagccaagatcgatgccgccactaccaaccgaggcggtggcaaggctggattagctgaccgttctggggtggagaagggtggacatgccaagttcgaatgtcctcactgcaaaacaactgctccagatttgaagactatgcagattcatcatgatgccaagcatcccaagcttccttttgaagaatcaaagcttgtgaatcttcattctactcatggtgccgattcttccaagcctcgtcccggtgttaggggtagtttaaaaaagtgatattaataaataaatttagccgttttctttatgatttggtgctttgcggttgttttggaatcggggtttggtttcttaactattagttctagtaggtttgggtaaaaaaagatgatgatgataatgatgtatgttaacccaccttgaatatgatgatgatgttgactgtgttatagcttccttatttaattctaatgaagtgtttttggatcat

SEQ ID NO: 8322 - DNA, 605 bp, Gossypium hirsutum
  Clone ID: LIB3828-009-Q1-K6-A1
aaatctgcaatcttaattctgtcggtgtttttatctgtaagcttcagttcgggtgttaggttgctccaggaacagcccaatgatgacctcaaaaactggacgctattcctcccattgatgcactcaaccctaccgagttcaatggacccggtgttggcattcacgaagatcatgttgtcccaaaagttccgaaattggtactcttggttttggttttgaaggtggtcctgaaaaatgttgttcttctggatgttccggtaattgtaatcctggtggtttcgttctaccatttcctcaaattccagaaatcccaagaattccacagatcccacagatcccacaaatcccacaaattccactaatcccacagatcccacaagtcccacaaatcccactaatgccaggacagtcgggatgtgagagtggggagtgttgccgtcagggttgcggtgggacttgtgctgagtgtggtcagcccaggtgcgcatcaggatgttgccaggctgaaactgtaaagagcaaagggatagaagaggttatggacagtgaacccagtccaccaaagtagggagatgataccatattaagatgaaataatgaggaag

SEQ ID NO: 8323 - DNA, 410 bp, Gossypium hirsutum
  unsure (1)..(410): unsure at all n locations; Clone ID: LIB3828-009-Q1-K6-A10
anaaatggagttggttcaaattcagagaagttggtggactacacaaaatccttgtttatggagggtttcctggatgctcagttcttacagcttcaacagcttcaagatgatagtaacccagactttgtcttcgaagttgtgtcccttttcttcgaggatttcgagaaactcctcaatgaactgaccattgctttagatcagccaaatgtggattttaaaaaacttgatagccacgttcatcaattgaaaggtagcagttccagcattggtgcacaaagggttaaaaatgcttgcattgctttccgcaactactgtgatgtgcagaaacattgaaggtgcctaacatgtctgcaacaagtgaagcaagagtgttaccttgtgaagaacaagtttgaaactttgttcaggtt

SEQ ID NO: 8324 - DNA, 606 bp, Gossypium hirsutum
  unsure (1)..(606): unsure at all n locations; Clone ID: LIB3828-009-Q1-K6-A12
gccgctattcctcccattgatgcactcaaccctaccgagttgaatggacccggtgttggcattcacgaagatcatgttgtcccaaaaggtgnctgaaattggtactcttggttttggttttgaaggtggtcctgataaatgttgttcttctggatgttccggtaattgtaatcctggtggtttcgttctaccatttcctcaaattccagaaatcccaagaattccagaaatcccacaaatcccacagatcccacaaatcccacaaattccactaatcccacagatcccacaagtcccacagatcccacaagtcccaaaaatcccactaatgccaggacagtcgggatgtgagagtggagagtgttgccgtcagggttgtggtgggacttgtgctgagtgtggtcagcccaggtgcgcatcaggatgttgccaggctgaaactgtaaagagcaaagggatagaagaggttatggacagtgaacccagtccaccaaagtagagagatgataccatattaagatgaaataacgaggaagagttggttgtcgtcttattaattatacaaaataagaagtaatgatgttgcagaagggtttgctataaaat

SEQ ID NO: 8325 - DNA, 586 bp, Gossypium hirsutum
  Clone ID: LIB3828-009-Q1-K6-A2
ttgtagccaggggtgccagtattactaccactaagtaaagggtggagtcctttaatggttgcccgttcatggcgcaaaattggcttgaggaaatccttagcagtcagcctgaaggccagtcgcaagctcttccttcaccctttctgtctcttccccttatgagcattattagaattgctagagaatgtggatggaggactggtgattccttgttctcatgccaagatccatgtgctgtatgtctggacaggcagtgtacagtagctgcagaaggttgtgatcatgagttctgcacacactgtgccttatacctctgttctacaaatcacacgacaaatgtagctaaaggtccaactggctcaattgcctgtcctctttgtcggcacggaatagtatcatttgtcaagctccctggagcaaaaccaatagttaaggctgttgcaagaacaagtttgtccctgtctttctgcacatgttctagtgagatgttggagccaacttcaatgacaaccccgctttgcaagcctgtggtccattgcgctcgcatttctccccctggatcttcattctgcagcataagtggtca

SEQ ID NO: 8326 - DNA, 565 bp, Gossypium hirsutum
  unsure (1)..(565): unsure at all n locations; Clone ID: LIB3828-009-Q1-K6-A3
cccagcgtccganaaagttgcattctcttctcatcgagtatttcttcaaaaatcagcatcggtctgccccatgcatacaaggcatcgaagcatggcgtcgtagggttgacgaagagcttggctgtggagttaggtgagcatggaattagagttaattgcatttcacctcacgcaactgtgaccccattgttcctaacaacactggggatgttcgataagaagaagggagaggagatgattgcgacttcagcagtgttgaaaggcaccgttttggagcctgaagattttgcacatgcagcgctgtatttggcaagcgatgaggctaaatttatcagtggtgtcaacttgccagtcgatggagggtatagtctcagcaaccagtcatggaagatgggattcgcagcactttttgggtaaacctttactccttggacaaaatttccttgaataaggaaataaaagttacccaaaactgcgctacttgtaataagattgtattgtcgatcagtctcatgtaatgcttttgatgtgtcctttctttaccaatgccacttatatcgttttg

SEQ ID NO: 8327 - DNA, 602 bp, Gossypium hirsutum
  unsure (1)..(602): unsure at all n locations; Clone ID: LIB3828-009-Q1-K6-A4
aaagagnagctgatgaagtgtctatggctttaacaagtagcatagcttctgaggcattgcatggggatatatctcaacatcagagggagagaacattgaatggatttcggcaaggaaaattcactgtgcttgttgccactgatgttgcatctcgtggacttgatattccaaatgttgatttagttatccactatgagcttcccaatgatgcagagacttttgtgcatcgctctggacgaactggacgagcagggaaggaaggttctgcaattttaatgtatactaacagccaaaggaggactgtcaaatctcttgaacgtgatgttggatgtaggtttgagttcattagtcccccatctatggaagaagttctagagtcatcagctgagcaaataatcgcaactctaaatggagttcatcctgagtctataaagttctttaccccaactgctcaaagaataatcgaagagcaagggacaagtgcacttgctgctgcgatagcacacctaagtggattttcctctcctccttcgtcccgatctcttattagccatgagcagggatatgtaacactgcaattgacaagagattccacttattct

SEQ ID NO: 8328 - DNA, 595 bp, Gossypium hirsutum
  Clone ID: LIB3828-009-Q1-K6-A5
gtcgctctttgctctccagtcctgcatctgcgaaaggggtgatggctttgaatcccgagctgcctattcaacttctctacaggatttcgctgctacaggaaatgccaatggtcgtgtgtttgctccttatacgatatacaaggggaaagcttcactctctatttctcctgttctgccaactttcgttaagatggattccgacattggtggccttaaagttaatcgccgtggttccatgatgttgacattctgccctgctattggagagcgcaagtacgattgggaacagagacagaaatttgctttgtcaccgacggaggttgggtctttgataagcatgggtgctcatgatgcctctgaattcttccatgacccttcaatgaaatcaagcaatgctggtcaagtaagcaagaagttatgtattaaggcacttgatggcggtaatggctacctgatttctttgactgttaccaacaacattctaaaatcaaacgagcgctttaacatacctgttacaacagcggaattcgcagtcttgaagacagcatgcagttttgcattgcctcacatcatgggttgggatcggttgacgaat

SEQ ID NO: 8329 - DNA, 595 bp, Gossypium hirsutum
  unsure (1)..(595): unsure at all n locations; Clone ID: LIB3828-009-Q1-K6-A6
tttcctccagtgaaganaagagaatagaagagacattgagaagatgaaccagtacgtctttctcctcctgtccctctcatgtctcttctccttctccgtttcagctgcccccgggcctgaaccctctttcatcaccttggatacccatatggcaaaaccggtttccataatgccaggcaactttcattccggccttcagaaagtctgctccgccaccgatgaacccgtcgattgtatccagctgctttctcccttgatgaccgacaggaccgccgtggatcccatttccatcctcagggtgggtatcgaggcgaccaaccagaaggtgaaagaagccttggacaaagctaatattatcatgaaagatccatccaccacccccgaatacggcgagatcctctggacttgcgtcaagaacttcgaggacatcatcgactcggatcagaaagccatggaagccatcaccgagcacaacgccaaccacatcatcgaagaactctccgccgattccgcgtctgtgtctccctgcgaggacgagttggaagcggctaacatcgagtcgccggtgagggatatcgttaagtcgattcacaag

SEQ ID NO: 8330 - DNA, 606 bp, Gossypium hirsutum
  unsure (1)..(606): unsure at all n locations; Clone ID: LIB3828-009-Q1-K6-A7
ctaaatanaaaaagaagaactgaacanaagaaggaggaaaaggtttcaagattttgtcagatcaagctagaaaaaaaaaaccttgtaatggggagggaactcagaggtgttcaagtggacaataagccaaacagcgtagtgaaatcaaatagtgcggtgaataagaagtcaagtcccccagcattgaaatcccctggtgctggaaatactcaagcacacctcactttctccaaaactgctgcaaatggcatcgcaaatggtgactctccacctttccccaccaaggattctgagacaaactctccaaagactcctttgatatcaagaaagcatactgatgaagaagataattggtctgtcgcttcctctactgctgcatctgtacgaactgctagatcgagggtaactattgggactgctccaacttttagaagtgctgaacgagctgagcaacggagggagtttcaccaaaagttagaggaaaaacaccaagctctggaggccgagagaagccagtatgaggccaggctcagggaagagcaagaggcggccattaagcaacttcgaaagggcctgtttgtcaaagcaaacccggtacctagtttc

SEQ ID NO: 8331 - DNA, 602 bp, Gossypium hirsutum
  Clone ID: LIB3828-009-Q1-K6-A8
ctctcccttgtacgctagcttagtgttgccccaaaagcacacccggttgtacttaccggaactccccttaaccccaaagctaaccgcgtggaagatgactcaaatgatgtacggagacctgtaattcacctgctttgtctgttgccatccaggctgcgctctctctgtctgctagtggtcgaacaaccgggcttgtgtcggattcgggagatggcgttagccacacagtccctatgtacgagggttatgccctgccgcatgctcttcttggtcttgattggtctggtcacgatcttaccgttaacgtgatgaaaattctgaccgaacgtgggtatgcattcaccaccgcaagtgatcgggaaattgtaagggacgtgaaggaaaagctggcatacattgctctcgactacgaacaacagctagagacctgcaaaacagactcatcggtagagaaaacctacgaattacccgacggtcacattattaccatcggtgctgaacgttttagatgccctgaagtgcttttccaaccatctttgatcggtatggaagctgcaggcattcatgagacaacatacaactccataatgaagtgcgacgtg

SEQ ID NO: 8332 - DNA, 604 bp, Gossypium hirsutum
  Clone ID: LIB3828-009-Q1-K6-A9
cggccgcgtgggcggacgcgtgggcggacgcgtgggctgcatcagatccgatcagatttaactcagatccatccgtatcgggtcttctaaattccagatctttacttttctcgagtaaaggaagaaagaggaagggagagatgagagagattattagcgtccacattggccaagctgggattcaggttgggaattcatgctgggagctttactgtcttgaacatgtaatccaccccgatggaacaatgccgagcgacacctcaatgggcgtcgcacacgatgctttcaacactttcttcagcgaaacgggttcgggaaagcatgtgcctagagctgtctttgttgatctggaacccactgttatcgatgaagtccggaccggcccttatcgccaacttttccaccctgagcagcttatttccggcaaggaagatgctgctaataattttgccagaggccactatacaattgggaaggaaattgtggatctctgcctagatcgagttaggaagttagctgataactgcactggtctgcaaggctttatggtgttcaatgctgtcggcggtggaaccggttctggtcttggatctttgttgttgga

SEQ ID NO: 8333 - DNA, 596 bp, Gossypium hirsutum
  unsure (1)..(596): unsure at all n locations; Clone ID: LIB3828-009-Q1-K6-B1
cacccctggnatcgttgccctcctagnagctcacagtgtcggcagaactcactgtgtgaagctggtgcatcgtttgtacccagaggttgaccctgccctcaaccccgaccatgttccacacatactccataaatgccctgatcagatcccagaccccaaggccgtccagtatgtgagaaacgaccgtgggacacccatggttttggataacaactactacaggaacatactggacaacaagggtttgttgattgtggatcaccaactggcgtacgacaaaaggaccagaccttatgtgaagaaaatggccaagagccaagactatttcttcaaggagttctcaagggccattactctcctctctgagaacaatcctctcactggtagcaagggtgagatcaggaagcaatgcaatcttgcaaacaagcttcactaaaatgcctcgccaaagagaaagccgagtgtggccgaataaaatgtttgtttactcagtttcttttccaagagacgagtttgttaatgtgcaggtgagtaatggtgcaatggtactggtttgtaacgatcgatccattgcatttttcttttagcataagcca

SEQ ID NO: 8334 - DNA, 605 bp, Gossypium hirsutum
  unsure (1)..(605): unsure at all n locations; Clone ID: LIB3828-009-Q1-K6-B10
ctcgatccagnaattgcatacagtcactacaatacgctctgcacgggtacccctacaacatcctctccctctctttctctatcaggctgaggctggagctgattgaatcagaactggacaacaaaattatagaaatccaagtcataaaagctaagcagcngaaaagaagaggaaagaaaagaacaacgcactcaacggcattttcatgtatccgattcaatggtcattatctgtaatctccatcactggacttacattacaactcagcgccagggcaattgaactaccgacatccaaatgacggatacgaatctggatctacaagaatcgggttgggaggaactgaggaaagaagctcgaaagatcgaaggcgatctcgatgttaaactctcttcatatgctaagctcggtgctaggttcacccaaggagatgctgggtcgccaacgcttgggtcgagtagatcatggaagtctatggtaattgaaattcaatcattgcttgagaagctgctagacataaatgatgctatgagtagatgtgctgcatctgctgcaccaactacttcggtaacccagaaacttgcgaggcatagagacatactaca

SEQ ID NO: 8335 - DNA, 601 bp, Gossypium hirsutum
  Clone ID: LIB3828-009-Q1-K6-B11
catgagggctttcccagcgctttttcttgcatctcttgctttagtgttgggcgcctctcgtgctgatcctgacttgcttcaggatgtatgtgttgccgatctttcttctggaataaaattgaatgggttcccctgcaagcacccctcaactataggagcaaatgacttcttctttgccggtctggccaatccaaacttccctaacaacactttgggatcgcttgttacggcagctaatgtggaaaaaatcccaggtttgaacacccttggagtctccatgtctcgtatcgactacgccgtcggtggggtcaaccctccccacacccacccacgagcatcagagattgcattcgtgttggaaggagaattagaggttggcttcttcactacatccaatgtgttgatatcaaagcgtatcaagaagggagaaatatttgtgttccctaaaggattgctgcatttccaaaagaacattgggaagacacgtgcatctgctattaccgcgttcgatagccagttttcaggaacacagtccattgctaccaccctatttgcagcctcaccagcaattccaaatgatgtattgagcaaggcattccaa

SEQ ID NO: 8336 - DNA, 596 bp, Gossypium hirsutum
  unsure (1)..(596): unsure at all n locations; Clone ID: LIB3828-009-Q1-K6-B12
gnaaaccctacatttttatatcacccanaagccaaaanaaaaaaaaggaacaggcagccaaatctattgtttttcttgcatttgttctacttttcttcccttcatctggggtagctgatccattgacttataacgttcttaactatggagccaaacccgatgacaattttgactcaacccaagccttggttgctgcatggactttggcctgtggctccatcaatcccgcaactatttacgtcccgcctgggaggtttttggtgcgcaatgttgtttttcgtggacagtgcaagaacaatggtattgtttttcgtatcgatggcacgcttgttgctccatcggattataaggttattggaagtaccggaaactggcttctctttgagcatgtaaacggtgtttcgatttacggtgggataattgatggtcagggcactggcttatggacttgcaagaggtcaggcaaaggctgtcccagcggggcaacgtccttaggcttcagcaattcgcggaacattgtaataagaggattaacatcgctaaacagccaaatgtatcatattgtcatcaatggttgtaacaacgtaaaagtggaa

SEQ ID NO: 8337 - DNA, 368 bp, Gossypium hirsutum
  Clone ID: LIB3828-009-Q1-K6-B2
cggaagcgtgggttccctgggagcctgtaaccataaagagaaatattcatggattccgagacaaatattcgactacttgctgcaagaagatacatttcatatgaagcacttaagagaaacaatgtcccgtgctcccaccaaggacgatcttactacgaatgttccactgggaaaccggtcaacccttacactcgtggttgcacttacgcaacacgttgcagaaggtacactgcttaattaaaaatatttccaggggtgatgtaaactaagggagcaagttggcttcatgaactcagctagcaatctatgagcaaaagcaacagtgcaataagcataaagcttagtaataaaatcaagtgttcacttaa

SEQ ID NO: 8338 - DNA, 587 bp, Gossypium hirsutum
  Clone ID: LIB3828-009-Q1-K6-B3
ttacttcttaatcccttcttcctgattctgcaacactttttactttccattgcacatatcacctaagaagaaaagactttcagtggtacatcaaataacagcatggcttgagataagactgttcatgttattgatccattaacagctgatggcctattcttatcataagacttgcttaaaatgtattcattgccatggcgtgttggtgatgggaaactattgctcaatggcatattgtcctgtattgcaagccacacttctgatcaacttttcaaggaaactgccacttaccaaaataagaatgcaaaaccctcctctgaaaattcgaatggaacgggaaaggctcctagcaaatttacatcattcttctctggtacacaaaacaaatgcggagcctgtcagaaaactgcataccccttaaagaaggtgactattgaacgagaaaactaccataaatcatgctttacgagttcacatggtagatgagtgctcacaccatcaacatatgctgcattggaaggattcctttactgtaagcatcacttttcacaactcttcaaagagaaaggcacctatactcatcttac

SEQ ID NO: 8339 - DNA, 595 bp, Gossypium hirsutum
  unsure (1)..(595): unsure at all n locations; Clone ID: LIB3828-009-Q1-K6-B4
cggncgcgtggggcaagtcgtggcgngaagcggttgctggaccgtactgctggcaggacattgacattgaacaatggagccaacaatgccggcctgaaacccttgatcgaatgcttcaaatgctgataactagaagctcaggttcactccgaaagctttgtgttactggtctcgctaatgaccagagcttttcactcattgcagataatgccaaatcccttcagactttacggctgccaagaagtgaaataagtgattcgatagtggaacaggttgctgggaggtttttttcggtgactttcttggatgttagttactgcaggaacatcggggctccagcccttgaagcaattggtaagaactgtaagttactaatggggttgaggagaacaatgcacccattagaggtaattgacaagctgtctcaagacgatgaggcctttgccattgctacaacaatgccgaagctcaagcaacttgaggtggcatacctacttattagcaccgaagctgtgcttaagatactcgaaaactgccctgagcttgaattattggatgtgcgaggatgttggaacgtgaagctggatgaaaatta

SEQ ID NO: 8340 - DNA, 504 bp, Gossypium hirsutum
  unsure (1)..(504): unsure at all n locations; Clone ID: LIB3828-009-Q1-K6-B5
gttggtgcnatgtgaanattccacaaaacagcgttgtggatttgttcaatttgctgataggagttgtgctgaagaagcactccgaatactgaacgggactcagttgggtggacaaagtattcggctttcatggggtcgtagcacatcaaacaagcaggcccaagcagatccaaaccagtggaacgctggatattatggatacagccaaggatatggttacggctatggcgctgccccacaagaccccaacatgtactatggagggtatcctgggtatggaaattatcaacagccacagcaacagcaacaagtcggatatagctaagtgctgatattaacgatctttcgtggctgctgttctctctttactaggattatgaacttatgctacttgatttctcctttgtttcgctatagggggatataaacttaaggctgtgttattcacttgttaaatagcatatgcactgtataaacctccttttattacaaaaattttgtact

SEQ ID NO: 8341 - DNA, 478 bp, Gossypium hirsutum
  Clone ID: LIB3828-009-Q1-K6-B6
gccaaatccgttacttccgatatacatagagagaatacacagagataagcatgggagtgattcagcaacatatgatactgaaggaaggttcatgccagtgaacctggagaacatgttcaccaagtatgcactcacaaagcccgacaatttatcactcaaggagttgtggcagatgactgagggaaatcgggccgctttcgactatcttggatggttggcatccaagttggaatggttgttgttgtattatgtagccaaggacaagcagggttttctgtccaaagaagctgttagagggtgttttgatgggagcttgttcaagaccatttccaaaatgtacaaggactcagatagaaagagtaaataaaaacactacccatcacctttcatttcctacttatatcccaaaataaaggatttgtatttgataccatatttatgcttacgttcatacattaaactttaaccaatactgcgt

SEQ ID NO: 8342 - DNA, 603 bp, Gossypium hirsutum
  unsure (1)..(603): unsure at all n locations; Clone ID: LIB3828-009-Q1-K6-B7
gnttatttaggatggatttcaacttgcgtctcttatgttactttaaattgaaccatcaaggatttcaaagcttcattttgtaacctggcattaggcttttactgccagattgtgcangaatctttngaaaccaagatggttatcttcccgtgttgagcaaaaaaaacacttgctttgctaacccgtatgaaaaatacaaccgcaaggatttcttcaagcagctgctatcttgagaatggcattttttatataccctctctgacaagaaagaaatgttctttttaggagaatctagaggcgggagagtgtaccagttgcaaataaaaaaaatcagagaaccagagtgctttatggataatctggtcatacaaaaaattattaggattctaagacagcaatgttacatttgaaaaataacgattccgtaatcctcttataaaaactgctgtaactcatggagatggcagcaagcaaccctggttcatgagcatcccaaatggcttgaagtttgcagatcaagaagactagcaccggttatgaagctggtacttgtgttttttttctttggcatttgaatattttatggtggataagatataagtt

SEQ ID NO: 8343 - DNA, 596 bp, Gossypium hirsutum
  Clone ID: LIB3828-009-Q1-K6-B8
tttcaaactacctgcttctagctctccttttgaatcaatctccatttttagttttcgtaaagtgaaaggatgttaggcattttcaagaaagaaattaatgaatccaccaaaggagctgcatagcccagcttcactcacttcatcaaacaagaccaagcttcccaatcaaatcatcaaccatttcctttcttcaaatcccaacaatgctttctcaatggggttcggatcctcagcttgctttgcttatgctcccacagagaatcgtttccccaatcatcaaaggttgttctgtggagtggatgaaatatactgcatattcttgggggatttgaataatttgagcagcctgctaaagcagtatgggctgtcaaagggcaccaatgaagccatgtttatcatcgaagcatatcggaccctccgcgaccgtggtccgtacccggctgaccaggtccttaaggatcttgaaggcagctatggatttgtggtgtatgatagcaaagctggaagtgtatttgctgcactgggtgcagatgaaagggttaaactctattggggtgtagcagctgatggatcagtagttgtttcagataacttga

SEQ ID NO: 8344 - DNA, 597 bp, Gossypium hirsutum
  unsure (1)..(597): unsure at all n locations; Clone ID: LIB3828-009-Q1-K6-B9
cggncgcgtgggcggacgcgtgggcggacgcgtggngaaacctaccanaccgaagtgctgttggtagctcacccgcgggtgatatgtatatctcatccgtcgtcgtctccactatcctttcatttcgcttcctctgcctttttcaaatttacaattgcaacatcaaattcccacatattaggaatttccagcgtcttctctgactgttcatggcttctttgaacgtttcttctccttcttcaactgcatcactttctcgtcctcgggcatcaaagcttccaatcctttaatgaactacacagaaaaaatctagtcttcgcaaatggctacgcatccggtttagcctttgtgcgtttcggtggtagattgtcgtccgttattaaaagtgttggcaaaactagagctgcagttcaatcgggagaaggcaaaaatgttgtctccacaaatgatgctgtttctataagtaacggttttcccgttgataacgatgaattcaatttggaccgcgcgactgaaggttttgcttccattcctgaggcaatcgaggatattcgccaagggaagatggtagtggttgtagacgatgaggatagagaa

SEQ ID NO: 8345 - DNA, 594 bp, Gossypium hirsutum
  Clone ID: LIB3828-009-Q1-K6-C1
tgcagtgtcaagggttcctcagtcaagaaataaaagggttgatgttctctatgatcctgttggtggcaagcttactaaagaagtatgaagctcttgaattggggtgctcaaattcttgtcattggttttgccagtggtgaaatccctgtcatcccagctaatatcactcttgttaagaactggactgtgcacggactctactggggtagctactcaatacatcgaccagctgtgctcgaggattccatccaggagagtatctcctggatggaaaagggattgattaccattcacatttctcatacttacagcatatcagaggccaaccttgcattctctgcactgagagatagaaaagccatagggaaagtgatgattgtatttgatgatatgggaaggtctaagctttaagcgattaggatttatataagcattccttgctgaagcgccgaatctagaaataatatatatggaaaataacgagggtgtcaatggatgacactttgtttactttcaggatgcagatgattggcatgtaaggtgttgataatgagggtttcaatgatgcactttgtttaccttcagttttgtact

SEQ ID NO: 8346 - DNA, 619 bp, Gossypium hirsutum
  unsure (1)..(619): unsure at all n locations; Clone ID: LIB3828-009-Q1-K6-C10
gctaacaaaacaaaacaaaacagggnaaaaagactttaaaaattttcattataacaatattcttttttatttggcgctgctcctctatttagggtttcataaaaagaaaactttgcttttttctgtactgtagcaggttgctaagacttaatctcttgccttctcttcagaaaagaaataaataaaagacacattttgctaaaaaaaaaaaaaaaaaaaaaaaaaaaaaaaaaaaaaaaaaaaaaaaaaaaaaaaaaaaaaaaaaaaaaaaaaaaaaaaaaaaaaaggaaaaaaaaaaaaaaaaaaaaaaaaaaaaaaaaaaaaaaaaaaaaaaaaaaaaaaagggggggcccctttaaaagaaccaaattttcctcccccggcctggcaagttaaaattttttttttggggcccccaaattaaattcccggggccgggttttaaaaccgtggggcggggaaaaccccggggttccccaaattaattcccttggaaaaaaacccctttttccccagtggggtaaaaaaaaaaagggcccccccaattcccctttccaaaaattgccccccccttaagggaaatgggacccccccctttagcggcccttaaacccggggg

SEQ ID NO: 8347 - DNA, 596 bp, Gossypium hirsutum
  Clone ID: LIB3828-009-Q1-K6-C11
cacgtcgtttgggtctcttaacgcctctttcaacgaccagccagttcggtccctcagatggcaacttagccatcaaactgagctttgtgattcgaaagcagggagtgatattttggatatgattcttacaaagggtggttgtagagcagaacaagtagcgtcgtcgcccccatttttttgtgggtcgccgccgagtagagtagctaacccattaatacaggatgctcgatttggggatgagaagatggtcaacccgccgtctccaaatccgcctcctccttcgtctccgtcatcatcttcaaggaaaggagggtgtattcgggccaattttggtaacaaaccagcagtgagagtggaggggtttgattgttttgcactggcttagaacccatttctatcaacaaaagagtacatagataaaacaagaggagctaccaaaacagagaagggaattttgaaattgtaagtgactgaagagaaaaaacaaagaaccctttgttagtgtaaatatatggataaagggttgtttgtatgtaatgaaaaaagaacttggtgtcttgtaagtatgtgagagtaagttgaatagaaataaggag

SEQ ID NO: 8348 - DNA, 605 bp, Gossypium hirsutum
  Clone ID: LIB3828-009-Q1-K6-C12
ctcgcagcttcaaaattcaatctggcaaggctgttggtcattccattctggaagcatatgcacgagtcctaaataccttggctttcagcataatgaacaagctcgtctcgactgaagaagccggcagcttgtgccgtaatggctcttgaacgagtcccggctgatatccgggcccacggcggtgtggctcgaatgagtgacccacaactcattaaggaaattaaaccagctgctactatccgtgtcatggctaaggctcgaataggtcattttgatgaagcccaaatcctccaagccattggcattgattatgtcgatgaaagtgaagttcttacacccgccgactaagagaaccatatcaacaaacataactttaggatccctttcaacgtgggtgtcggaatttaggtgaagcacttcggatgatccgagaaggtgctgctatgatccgaaccaaaggtgaagctgggactggtaacattatcgaggccggtaggcatgttaagtccgtgatgggggatattagggtgctaaggaacatggatgatgacgaagttttcagcttctccaaaagaattcactctccttacgatttggtcatgcag

SEQ ID NO: 8349 - DNA, 462 bp, Gossypium hirsutum
  Clone ID: LIB3828-009-Q1-K6-C2
ctttgaagcctgttgttttggttggtggattgcaggatagtttcttggcaagtttcttgctgggttggggtatcacaataggtgctggactggcatcttatccaattgatacggtacgtagaagaatgatgatgacttctggagaagcagtgaaatacaagagctcgatggcagcattttctcaaatcatcaagaatgaaggtgccaaatcgctgttcaagggtgctggtgcaaacattcttcgtgcagttgcaggggctggtgtgcttgctggctatgacaagctgcaagtccttttccttgggaagaaatatggatctggtggcggctaatgtggaaggtgattctgctgccttaaagaatgatctagcgtcccaagtttgaataattttggaaggacaaagtgcttatgatggtccccgttcccagtaattaggaatttaatatgaaaaagttggctca

SEQ ID NO: 8350 - DNA, 598 bp, Gossypium hirsutum
  Clone ID: LIB3828-009-Q1-K6-C3
ctgcttctcactttaatcctcgcttttctctgccatcaaccacttcctcgttttctcaagttgtagaagatggcagagggcgaggatatccaaccccttgtttgcgacaatggaacaggaatggttaaggctggatttgctggggatgatgcaccacgagctgtgtttcctagcatcgtcggtcggcctcggcacaccggtgtaatggttggtatgggccaaaaagatgcatatgttggtgatgaagctcaatcaaaaagaggtattttgacattgaaataccctattgaacatggtattgttaacaactgggatgatatggaaaagatttggcatcatactttttataacgagcttcgtgttgccccggaagaacaccccattttacttaccgaagcccctcttaaccctaaagcaaatcgtgagaagatgacccaaattatgtttgagaccttcaacgcacctgctatgtatgtcgccattcaggccgtgctctctctttatgccagtggtcgtaccaccggtattgtgttggattccggagacggtgttagccacacggtccctatatacgaaggttacgccctcccgcatgcta

SEQ ID NO: 8351 - DNA, 601 bp, Gossypium hirsutum
  unsure (1)..(601): unsure at all n locations; Clone ID: LIB3828-009-Q1-K6-C4
ggaaccccctgnaactgtcctatgaagctcgagtgcatgcatcccaaaacaagcgcttgcctgtgcagattgttttgcacgctttgtactatgatcagctaaagctaaggagtgggggggcggatgaccgtaaccagccagacgccgtgaccaccaggaatcagttgcaggcagacgtgtcgctggtaaaggagaatgaggcattgcgaacggagcttttgaagatgaagatgtacatatcggacatgcagaagaacaatcaaactggaactagttcaaagagcattgggaccagaaagcctaccttcttctcttccatgtccaagactctaggcaagctaaatcccttccgacatggctccaaggacacttcccatatcgatgataaccttggagtggacgttaccaagcctaggaggagaaggttttcaatctcttgataccgcagctagctagctagcttggttgtttgtttgtttgtttgtaatgcttgatgtttacatatattgtttgatttctatatttgtgataaaccaatctaaatttcttaattataaaaactcattgtgagcagaaggttgtactagctactgcttctttt

SEQ ID NO: 8352 - DNA, 227 bp, Gossypium hirsutum
  Clone ID: LIB3828-009-Q1-K6-C5
cggccgcgtgggcaggtttcgatggtgggcattgccatggcttctttcgcagatgctattgcactaaaccttgttagatgagcaatctattaagatttcattatacttaaaagattgcctcatttccgcttgttatgtgtgtgcttgagagttgagagaataagatcaacaacatattggtgtacattgaattatattactattaaatatatctataatttttatgg

SEQ ID NO: 8353 - DNA, 593 bp, Gossypium hirsutum
  Clone ID: LIB3828-009-Q1-K6-C6
gttactttgtacatatcatctattgtgttttatttgcttggggggttctccacaacttcaataaattctacttcttctccttccaaatactgattcttatggagttttattgctttaacccgttgcttaatttctggtgtttattgttcatatttgaccatacttccaagttttctggcaatcttttttctttgtgcattatatagtagttttagttttatcttttcatttaattattatggttcatttattttatgataggtttcgaccccgcattcttattgatgttaacaagattgacatgaccaccactgtcctgggattcaagatttcaatgcctatcatgattgctccgactgctatgcagaaaatggctcaccctgaaggtatgaatgttctggttttttagtacccttgttatgagattgtttgagcaactaatgttcacatatcaaattgagcacagtcgtctttggttgctgagtatgcttagacttgcatgatgatttacattgcaactctggatatttcctgaaacagaacaaatttgtatacgaatgatttccagatgcgaaggagtgaataaaatgtaa

SEQ ID NO: 8354 - DNA, 626 bp, Gossypium hirsutum
  Clone ID: LIB3828-009-Q1-K6-C7
cgtccggtccgattcggtcccagcgtcgactgaagcgtgagcctgatgaaaggaaggaaaagttggctgaggagcttgaagagaatgctgttcaaaatagtgcactacatttggctgctttggagcaaaaaaggctgatgaaatgtaatgaaattggctgaagatcagaagaggcagaaggaggaacttcacaacaggataattcagcttgagaaaaaattagatcaaaaacaggcattggaactggaaattgagcaactgcgaggatcactgaatgtaattaggcacatgggagatgaagatgatatagaagttcttgagaaagtggatgcaagtcttaaagagttgagagaaaaagaggcagagcttgaagacttagaagcattaaaccaaactcttattgtaagagagcgcaagagcaatgatgaactgcaggatgctcgcaaagaattgattaatggattaaaagaaatatccacccgttcacaaattggtgtcaagagaatgggagagcttgacagtaaaccattccttgaagccatgaaaagaaggtataatgaggaactagcagaggagagagcttcagaagtctgctcattgtgggaagaatatctgaaggatcctga

SEQ ID NO: 8355 - DNA, 592 bp, Gossypium hirsutum
  unsure (1)..(592): unsure at all n locations; Clone ID: LIB3828-009-Q1-K6-C8
gnggatctctcagctactttttctctcaaaattctccaattagctctggtttaggcgatggcttcaaagcggatcttgaaggagctcaaggatctacagaaagatcctcctacctcttgcagtgcaggccctgttgctgaagacatgtttcattggcaagcgactattatgggtccacctgacagtccatatgccggtggagtgtttctagtcaccattcatttccctccggactatccatttaagccacccaaggttgcattcaggacaaaggtctttcaccctaatattaacagcaatggcagcatttgcctcgatattttgaaggagcagtggagccctgccctcaccatatccaaggtattgctctcaatctgctcacttttgacggacccaaatcccgatgatcccttggtgccagagattgcccacatgtacaagaccgacagggctaagtacgagacaactgctcggagctggacccagaagtatgctatgggttagtgtgctaatatgcatataataggagggctttattctatgtggctttgatcttcaatttaatatgtatgaatcaatgaaacagtatgtg

SEQ ID NO: 8356 - DNA, 609 bp, Gossypium hirsutum
  unsure (1)..(609): unsure at all n locations; Clone ID: LIB3828-009-Q1-K6-C9
ngacttcatttttctaccggttgtttgtttggttaaaacagatagaaactttcatcattttcttccaatggcaccaaaggccgagaagaagcctgnccgagaaaaagcctgtagcagagaaagctccagcttcagtggagaaaaaaatatcaaaggaaggcggggataagaaaaagaaaaagatcaaaaagagcacagagacttacaagatttacattttcaaggtcttgaaacaagttcatcctgatatcggtatctcaagcaaagccatggggattatgaacagtttcatcaatgatatatttgagaaattggctcaggaagcttctagattggccaggtacaataagaagccaacgattacatcgagggagatccaaacggcagtgagattagttttacctggcgaattggcaaaacacgccgtctctgaaggtaccaaggcggttaccaagtttaccagttcttagatttatagactttttgttttgagattttaatcccattgctacgatattaaattatatattatatttcttttgaatatatgttatacttaaatgatgctctaatgtcctagatgcaatagattaaagaatggaacttggc

SEQ ID NO: 8357 - DNA, 509 bp, Gossypium hirsutum
  Clone ID: LIB3828-009-Q1-K6-D1
ggaattctcactgttctattcccaatgaaagaggcccaaccctgcaagtagctatatcactgatagctaccttctatttcacaacgataggttgaagagcaaaatccgaactctactttatggggctggagcttttctattctcctggttgctgggaaaccttcttgatggtatcagtgattccacctattcctattcttaagggcccaaggagttttgaagtgctgacatcattgataacctatgtgctactctgggtttcatctacatatcttaagtagtgctaaagcaccaggttttcttattatagactcccaattttgaagtaatggataaccaaagattttcttggtagtagctcattgatcatgttattttagcttatgagagctgtgtcatatttctactttgggcattgatactaaagcatagtttgtggatgatttttttttgttgactggtaaaaaagtaaaaccagttcaaagtaaagataggttgttgattttctg

SEQ ID NO: 8358 - DNA, 515 bp, Gossypium hirsutum
  unsure (1)..(515): unsure at all n locations; Clone ID: LIB3828-009-Q1-K6-D10
tgagatcagactcaanaccgcatattggactatgccaatcagctttgtgatcgggtgccaanacccaatgggagaatctactgtcgactgtggaagtctttcttccatgccaaccatttccttcactattggtggcaaagcttttgatcttacaccagaagagtacattctgaaggtgggtgaaggtgctgaagctcaatgcatcagtggctttactgctttggatgtccctcctcctcgtggacctctctggattttgggagatgccttcatgggtcgctaccacactgtgttcgattttggtaagcttagagttgggtttgcagaagcagcataaaggggacctgaggttttcaatggccataaactatatatgtgtatgatttaaatttataaagatccaacgaaagcccaaaaccttgaaaagaaatgatgctgtgttgcctgtaaatatttgcgttcctgcactgtaggatttggttttagaagaagtgaaaaatattgtgtttgcattt

SEQ ID NO: 8359 - DNA, 410 bp, Gossypium hirsutum
  Clone ID: LIB3828-009-Q1-K6-D11
aaagactcttccgtttgagttccacataattggaacaattttcgagtaatacatttttttaggtggactcagatggacaaaagaaacacaaattttagctactgaacagaaaaacgccatctaaatggttcctcataattcttaacttcattcgtctcttaatgcattagtctatgaaacaagtgggccgctggctgcatcaccagtaagttgaagatctgcatctgctatagaagaaaagttgaaaatttttttactggattatagagatcttatatttcttttttattcatggagtgaaggacttggttattttaataaatccttcaaactcatggaccattgcatttgtgaacattgaatatgccttgaatattttgatatccaatcgaatgcactctacatttacc

SEQ ID NO: 8360 - DNA, 597 bp, Gossypium hirsutum
  Clone ID: LIB3828-009-Q1-K6-D12
gcttgactgaattaagcttgtgcgggaatttaaacatcctgatggcatgacagataaagagatggatgcagctggagatggtgatgttttggtggttttggatatacgtcctgatgagtcattgtttgaagctggtgttgcacgtgaggtggttaatagaattcaaaaatcacgaaagaaagctggccttgagccgacagatatggtggaggtctactttgagtcattggatgaagacaagtcagtcatccagcaagttttaaactcacaggaaaactacattaaggatgcaattggatctccattgctttcctttgacattatgccgctccatgcagtggtgcttagcgaagagattttccatggcatctataacatgtcatttaaaataagcttggtcagaccagcccttgttttcaaggcaaattctattctcgccttatatgcaggaaattctaaatttgcacaaggcctgcagatttaccttctgtcaagggaccattcctgtttgaagtcggagtttcagcttggacgtggcaagataaaggttgattgcattgagaacttggccgcagtggaagtgaagctgggagaaca

SEQ ID NO: 8361 - DNA, 520 bp, Gossypium hirsutum
  Clone ID: LIB3828-009-Q1-K6-D2
caaacttgacaaacaactcatttatattacaattggctaacgggttgaagaaacatagaagagctaaatgcccacagacctaggatgcttgccaagctcgggggctgcttgtacacacaagccatgctctggtccccacaagtgcaaggagagctaggcatggagccttatatcgcgaaacccattgaatgctgctcttacctatagataaggcatggctataaggatgcaaagcatgttatgggagacgggaaggtcatgactgataagacctatccatacagctgcatcgatggagggatcatctctaaaacaaatgaggactatcgtctactggtacgacaccaaaaggagagaatggactacagaccatcactggcaaagaaaccaagtataaactatgcaaaggctcgatctgttcaaacaggatccgaacggctaaccatactgtgaatacatatgatggaccctctataccccaacgctgatactctgatcagagctaatgacaccatcaatc

SEQ ID NO: 8362 - DNA, 577 bp, Gossypium hirsutum
  Clone ID: LIB3828-009-Q1-K6-D3
cttggggagggaggggggtgctagactatggacttctttagttatttgcactgtgaatggatgcaaatattataatccttctagttatatggcgttggctcagcatatttctctgtttgtatcggactgtggctgaatttaatgaatttatatcaattctacaacctactgaaagaaaatgagactgatagcatcaatggggttcataatcataatcatggccttgctttagttatggtggttatgcttttgtaccctcttctttagtgactggtacgtggattgggatcttgcaggagcttcaaatagaattttcccagtatgaacatcccgttgttttgacagttgaagctcaggcaaaatatgttgggaatttgggaggtgcattgagcaaaaatttgttcttgaaggacaagaaacataggtactatgttgtctctgctcttgcagatacaaaagtagatttgaaagttttatctcagaggcttggtttagggaaaggtggtctaagaatggctgcagaagaggcactggttgagatacttaaggttccacttggatgtgttgctccatttgc

SEQ ID NO: 8363 - DNA, 496 bp, Gossypium hirsutum
  Clone ID: LIB3828-009-Q1-K6-D4
ggatttgctcccattcagccgacgctttcaacatcacaattgatggatggcaccgttagattcccccttcctaatcacctattcatcttcaccggatggtgctcgtcgagcccggagaaatctcagcccgaaatccctcctcaacttcgatttcagagaagaaaggagaagaaatccatggcctgctcgcactgaacagccgtacggaggagtgaggaaaggtgtgcgtgaaagaggccgtgcggggaaatcgttcatgggagccggaccccttggtactattctggcacgttccagaagcttctagtgctctcggctgttgagattccccttttgggttctgtatttgggctaggtttaggatatgggtttatgactttgggttagaattgtatttggctagtataggttctttatttgagcctgaaattttgtaaaaggacattgatgatggacttttattggtttttatcttaatttatttttgtttttgttt

SEQ ID NO: 8364 - DNA, 593 bp, Gossypium hirsutum
  unsure (1)..(593): unsure at all n locations; Clone ID: LIB3828-009-Q1-K6-D5
ngagnacagtacaagaaagaagcttgttgatttctgttaatcgaggtcacccagaatacttgcaatttaagccagaaaagcgaccggtagagaaagttgttcaggctggtgattctgctgctagtgaaagccgttcacagaaggcgcttgaagtggtagaggtctataagtcaagtgtgcatgttaatcccatttttgcttctgttggagctgacactgggaaactgtactcagcttctgaagctactgatattgtcttcaagtacattgagaaagaaaatctggtgaagcaaacaaacaaagccactgtggtattagatgcaactttgtgtgatgcgttatttaagggagccatcaagaaaggatcaacatatccaactgagatccacaagaaagatttaggagcaacatttataaaccgtatgcaggcccaccacatggtgactagaggaggtgaatctgttgttcggaaaggtgttttgaaaacagttcagataatgactgaacggaggcaaggcaacaagaaggtgacaaaagtttcaggtttggaaactttcctcattgatccagaagcattggcatcagagttgcag

SEQ ID NO: 8365 - DNA, 586 bp, Gossypium hirsutum
  Clone ID: LIB3828-009-Q1-K6-D6
gcggctcgagagccggtgaataaattttaaaaggtgatggcattggcaggcagcctgccaaatcaaattacgcctcttctctctttgttctttaaactctctttgatcatcattctcccccatcttgttgaatcaaatctttatttaaaaaaaatgggaattccgtcagaaatgagggatgtttgggtacagagaagagcaaagttcttcataattccttctcccgctgaagaccagaagaaattgagagcccagcaatcctcccaagaaggtattcgtgccggtctcaaggctgctgccattaccggcgtttttaccgctgtgcctacattgattgcagttcgtaaggttgcttgggcaaaggcaaacctcaaccatactgctcaagcacttatcataagtggagcatcgattgccgcttacttcattactgttgataaaaccgtgttggaaagcgctaggaagaattctcgagctcaatttgacaacaaaactgcttgaatacctcatccgaaggtaatgcaaaatggactgagagcaactttactatatgtgttacagtttaatgatgtcggtcacattatgc

SEQ ID NO: 8366 - DNA, 177 bp, Gossypium hirsutum
  Clone ID: LIB3828-009-Q1-K6-D7
gaaaagcaaaaaaaaaaacaattaaacttttatattaattcaccactgttaattaaaataatcaagtccttccattagcgatttttttattaaccacgttgactgttaaaatatattaatggaccaatcaaatgatgacacgtggtaacttctagtttaatctaatatttttttcat

SEQ ID NO: 8367 - DNA, 592 bp, Gossypium hirsutum
  Clone ID: LIB3828-009-Q1-K6-D9
cccagcgtccggcggagcggatcagagccgttcaagatgtcgaagcgaggaaggggaggtagtgcggggaacaagttcaggatgtcactgggtttgccggtggcagcgacggtgaactgcgcagacaacacgggagcgaagaacctctacatcatttcagtgaaaggaatcaaaggtcgtctcaacaggcttccatcggcttgtgtcggcgacatggtcatggctaccgtcaagaaaggaaagccagatttgaggaagaaggtgttgccagctgtcatcgtccgacagcggaagccttggcgtagaaaggatggcgtctacatgtacttcgaagataatgctggtgtcattgtcaaccccaaagggaaatgaaaggatctgctatcactggccccattggaaaggaatgtgccgatctgtggcctagaattgcaagtgctgccaatgctattgtttgaaagatttttcacggtttttgtttgacattgtagttttaatgttatttttctgttacttataacatgtttctgagaggttttggcgaaacggtagtgaacctgtaaacttattttcttatatctagttgtctaaa

SEQ ID NO: 8368 - DNA, 515 bp, Gossypium hirsutum
  Clone ID: LIB3828-009-Q1-K6-E1
tgagaatcatacaattcaataatgaagtgcgatgtgagaatcaggaaggacttgtatggtaacaattgtccttagtggtggtacaaccatgttcccgggtattgccgacagaatgagcaaggagctttcggcactcgctccgagcagcatgaagatcaaggttgtcgctccacctgagcgaaagtacagtgtctggatcggaggctcgatcttggcttccctcagcaccttccaacaaatgtggattgcaaaggccgagtatgatgaatcaggtccagcgatcgtccacaggaaatgcttctaaatgttattggtatggggataggatgaaagagagaagtactgtttcattgtttcttgatgcagcttggaactttgctttgttctaatggctttgttatccttctgtgtgttttcatgttggagtgaaacaatgaactttgagaaagccagtgatttaatttttgttccaattctttgaatctcagacaaactttttctgttctttttactat

SEQ ID NO: 8369 - DNA, 496 bp, Gossypium hirsutum
  Clone ID: LIB3828-009-Q1-K6-E10
gtttcgctcaatcaactttatagccatgctggtgttccttaattttagtcgggatattacagaaactgcagcagcatcaccattgtgcgatgtggttatcttttattaagcccctgcgagggcttataaaagcggagccgatccggcaccggaatgttgtgttggtgctaaacgtcttattaacgaactaaaggccaaagaagataggatagaactatgcctgtgcttgaaagcaatattgccactacttgggccatttgaccctaatcgagtgcctcttcttggccagaaatgtggtatcaagaatttctttcctcccatcacccccgctactgattgttccaagatatgaagagagagctgggaaatgtgaaaagcaagagtatggagaatgaataaaaaacccctaatgatggatttcataaaattatgtataaatcaaccccttgtaatttgattccactaaataaaatatcaacttatttttaactttcac

SEQ ID NO: 8370 - DNA, 577 bp, Gossypium hirsutum
  unsure (1)..(577): unsure at all n locations; Clone ID: LIB3828-009-Q1-K6-E11
caaaatcctcattgctgngagcaacacaaacccagttaccttgatgacgcattgttccccaccgaagttcgggttgagaagttctcgccacattacttggacccgaacttgggtatgttccaacaagagatcattgttgaaaattccaataaccaggtgaaatacggtcagaaatttacagtgcaaatccgtggaaatgtcgaaattgaccaacaaaagcttcaagtgacgatttactcaccgccatttgtgacgcacggggttgctatgaatcaaagattgattcaattgggaattgtggaatttaacaaaaatgttgccataaatacaaacaacattgttcttcaagctcccgttaatagcaacattgcaccacctggttattacatgctctttgtgaactacaatggagtaccttgccgtcgatcaatgtgggttcgaattttaccttagatctttcacaacaagcattgaattgtcagagccactatatgtaatacgaatcattgttcacgttttgtttcacaagttgttatttgaagatcttatataaaatgtggataattagatttatttt

SEQ ID NO: 8371 - DNA, 590 bp, Gossypium hirsutum
  Clone ID: LIB3828-009-Q1-K6-E12
gttccccatgattatataccaacgtgtttgacaatttcagtgccaatgtggctgtagatgggagcattgttaatttgggtttatgggacactgcaggtcaagaggattatagcagattaaggccattgagttaccgaggtgcagacatatttgtcttagctttctcattaattagcagagcaagctatgaaaatgttctcaagaagtggatgccagaactacgtcgttttgcaccaaatgttcccgttgtcctggttggaacaaagctagatctccgggaagatagagcttatcttgctgatcaattggggtctaatattataacatctgctcagggagaggaactgaggaaacaaattggtgcagcagcttatatcgaatgcagctccaagactcagcagaatgtcaaagccgttttcgatactgccatcaaggttgttcttcagcccccaaggaggaaggatgtgacgaggaagaaacggcgccggagatctggctgctccatcgcgagcataatctgtggaggatttgatgcttaaatttggcaactgatgaaagatggatttcgttgttgaatagtattgcttccc

SEQ ID NO: 8372 - DNA, 579 bp, Gossypium hirsutum
  unsure (1)..(579): unsure at all n locations; Clone ID: LIB3828-009-Q1-K6-E2
gnaaatttgctggtgcagttgngaaatacaatgcccatattgttgcatatcctactgttatttggcctcaaattgcagaacagtttgtgacttctcttggattaaagtttaacccctatgttactcagattgagacccacgattatatggcaaaactttattatgcaattatccggtttaataatatattgattgactttgacagagatatatggggatacatatctttaggatactttaagcagataaccaaggcaggtgagattggttcatcaacaatgcctcataaagtaaaccctattgattttgaaaacagtgaaggtaatcttggtaaggctaatgaagacctaacttacctgagcatgaagttgcctatttcccgttggcagcgagatttgactgattcgacagtcttgaggaacatggggggaggacttggtcattcccttcttgcttacaaaagtgtgctgcaaggaataggaaagctccaggtcaatgaagctaggttaagtgaagacttgaaccaggcatgggaggtacttgcggagccaattcagactgtcatgcgtagatatggtg

SEQ ID NO: 8373 - DNA, 587 bp, Gossypium hirsutum
  Clone ID: LIB3828-009-Q1-K6-E3
gcgaatgtcatttgaaaacactcgtcctggtatcaacggtacagcgtttacgattttcatacgagaaacctcgaaacttctacgtagtgagaggaaagtttgagtacgtgcgatggctcgctcgtggagagcaagcggctctttggtggttctagctatagtcttgtccggatgcttctttgcaatcgcaattgccaaggaggaagccgcgaaattgggaacagtcatcggaattgatcttggtacaacctattcttgtgttggtgtatacaaaaacggtcatgttgaaattatagccaatgaccaaggtaaccgtattactccatcgtgggtggctttcactgacagcgagaggctcatcggtgaggctgcaaagaatcaggcagctgttaacgctgaaagaaccatctttgacgtcaagagacttattggaagaaagttcgaagataaggaggtccagagggacatgaaacttgttccgtataagattgtgaacaaggatggcaaaccttatattcaagtaaagattaaggatggagagaccaaggtcttcagtcctgaagagatcagtgctatggttctgacta

SEQ ID NO: 8374 - DNA, 586 bp, Gossypium hirsutum
  unsure (1)..(586): unsure at all n locations; Clone ID: LIB3828-009-Q1-K6-E4
cagggtgctnagaggactttcccctgaacggttctccanatgcaataccgaanaagaatctgtcgatcttgtgaagcaactaaagccaactgaagctgcattgctcaattgggctgttgatcttatggcggatgttgttgaggaagaggaatcgaacaaaatgaatgcgagaaatatcgcaatggtttttgctccgaatatgactcagatgtctgatccattgacggctctgatgcatgctgttcaagtaatgaacttgctcaagaccttgatcatgaggacactgcaggagcatgaagagagcgcaacaggagggagatgttcaccaatgtcgtctcactcttgcaatggccctaccgatgaggagtttgatagtaaccgagagatggaaacgagctgcgagctgaaaggaccaacatcagaatacgataatgccctttacaatagctacagcggagacgaagatgaagttcagtcattagatgaaatagaggaatgcttcttgaggcaactagatgagaataataagacggtcaccaatagtctttttggaggaaccagctaacgaattacaaagtgatcattc

SEQ ID NO: 8375 - DNA, 426 bp, Gossypium hirsutum
  Clone ID: LIB3828-009-Q1-K6-E5
aaactttccagtttctattttctaaaacaaactgaaaagtcttgctgcggaggaaactgtggctgcagctctggttgcaagtgtggcaatggctgtggaggatgcaagatgttccctgacataatagagaagactacaactgagactattgttcttggtgtgacaactcagaaaagcactttgagggatctgagatgggagttggggttgagaatggatgcaagtgtggagacaactgcacttgcaacccttgcaattgtaaataagagggggggaaaatgaacaacaaagagaagcagagaggcctttgtctttttaactaaataaattctattactttagtatgtatcagcaaatcttcatgaggatttggttcttaattatgtgtaatgtgggcttttctgctatgtcagaatgtattatgat

SEQ ID NO: 8376 - DNA, 593 bp, Gossypium hirsutum
  Clone ID: LIB3828-009-Q1-K6-E6
ctttgcttttttattttttttcctgatatttaaatccatgtaatagccaaaggaaagtcggtttgtcgtgaagcagtatcagggtataatggtccatactcaaaattagtcacagctcacagcggataaggtcacaagcatgaaaagcaaaatcaaaggagccaatgagattaattgaatctctataaaaaaaaactatacatcttctcataatagaaacagctccatttctcctcagtttccctacgttcttcattccccttaccaaaccagctcgcctatctatggctactccactaaggagcaacagcaggctgtccactgccatggagaggaccggccagtgggttttctcccaagagattcctactgatgttattgtcgaagttggtgaagccaatttcaatctccacaagttcatgctggtggcaaagagcaattacataaggaagttgataatggaaacaaatgaagcggatttgacaagaatcaacctgtctgaaatccccggaggccctgagatcttcgagaaagcagccaagttctgctacggcgttaatttcgagattacagtgcataacgtggcggctctc

SEQ ID NO: 8377 - DNA, 401 bp, Gossypium hirsutum
  unsure (1)..(401): unsure at all n locations; Clone ID: LIB3828-009-Q1-K6-E7
natgggccctcccggtgaccgtccagcggcccaccacgctttggtgacggtgagaggagatttggtgacagagatggctatcgcggtggtcctcgaggaggcggtgattttggtgataaaggaggagctccagctgattatcagccttcattcaggggccctggaacacggcctgcttttggtcgtggaggtggtggttatggtggtgctggacctgctggtcttccttgagagatgatttttcatgatggataattttgtcagtttaggtttgttatcatatggagttcatagaagtacttggcttatgcttcaatgttcggtaattttggtttgatgcttaaaaacgctgcttctctttggttcattcatggggaattctgaaacaatgttttctttgc

SEQ ID NO: 8378 - DNA, 578 bp, Gossypium hirsutum
  Clone ID: LIB3828-009-Q1-K6-E8
ctcctcacatcttattgataatgttgaaaacaaactggtagcctatacactgattgggatctcctcccaccaaaaaatcaaggatcctgagccaagagcctgaagattgggatgacaaggaatacatccctgatcctgaagacaaaaagccagagggttatgatgacattccaaaagagattcctgatcccgatgctaagaagcctgaagattgggatgatgaagaagatggtgaatggacaccctcaacaattcccaacccggagtacaagggccaatggaagccaaagaaaatcaagaaccccaactacaagggcaagtggaaggcaccaatgattgacaacccagatttcaaggatgatccagatctctatgttttccccaccttgaagtatgtcggtattgaattgtggcaggtgaaatctggaacaatgtttgataacatcttagttgctgatgatgtagtgtatgccaagaaactagctgaagaaacatggggcaagcagaaggatgctgaaaaggcatcatttgaggaggcggagaaaaagaagaggaggaggaatcaaaggatgacccaa

SEQ ID NO: 8379 - DNA, 595 bp, Gossypium hirsutum
  unsure (1)..(595): unsure at all n locations; Clone ID: LIB3828-009-Q1-K6-E9
cttcttcaanaaacgctcttttttttttccttttcttttcttgtctttctgggttttcgtttttgttcctttcactgtcccctcgccaggccggttgagttatttacacggttgggagcttttggaggattcttcatcatctttaaggctttttgttttcggtcaatggaggtatacggcaaaaccatggctgttgcccctgcaaatgttatttatttgtctactattctgggccgtgatggtcctatccctgttcacaaatgcgattggaaatgtcaaaacgaacatgtttgtggcaacatgtatcgctgcaaactaactggaattacacacatctgtgacaagaactgtaaccagcgaatcttgtatgataaccatagttccctctgccgggcgagcggccaggtctttcccctcactcaagtcgaggaacaggcggtcagaggcgtccggaggaagtttgatgccgacaattcctcgtcctctgatagctgtggttttaagcgcagacgcgatgcacagttccatccttctccgttcgaaagatctttctctgctgtaattttgtcattgcttgcgatggatagcggaacca

SEQ ID NO: 8380 - DNA, 592 bp, Gossypium hirsutum
  Clone ID: LIB3828-009-Q1-K6-F1
aaataatggcagccatggctgcgttgcaaagctcaatgactgctctttctctatcctcaaactccttcttgggccaacgtctctcaattcctccttctctctcccctcttcacatcaaaccaagagagaatccatgtctcattgtagtgaagcttaaacgatgggaacggaaggaatgtaaaccgaacagccttccagttttgcataaaatgcatgttaaggttggagataccatcaaagtaatatcgggtcgtgataagggcaagattggagagataagcaagatcttcaagcataacagcaccattgtagtgaaagatataaacctgaagacgaagcatatgaagagcagaggagaggatcaaccaggacagataattaagattgaagcaccaattcacagctcaaatgtgatgctgtattcgaaagagaaagaagtgacgagccgggtgggtcataaagtgttagatgacgggaaaaaagtgcggtacctcataaagacgggagaaatccttgacagtgacgagaattggaagaaactgaaggaagctgcaaaagagaaaactgaagtagctgcagctgctcctgctgc

SEQ ID NO: 8381 - DNA, 610 bp, Gossypium hirsutum
  unsure (1)..(610): unsure at all n locations; Clone ID: LIB3828-009-Q1-K6-F10
gtgaaggatgcatctttacaacctggaaatacccgaggtctagcacgttttttgcaagtaaagagttattacaatgagngctgccgatggacgattatctcaccttaaactgcgactatatggtgtctttgaagtacagggctggatctaccgttggatgctacctcaaggcatgcatgatcgtaacttcgagagagagagtacacatcacactggtgtgatggtcggtatgggtcaaaaagcaacatatgttggcggatgaggctcaatccaatacgtggtattataactctcaagaatccgattgaacacggcattgttaacaactgggatgatatggaaaacattgggcatcatacctttaacaatgaacttcgagaggctcccgaagaacattcggttcttattaccgaggcccctcttaaccctaaagccaatcgtgagaaaatgacacaaatcatgtttgaaaccttcaatgctccggctatgtatgtcgctatccatgctgttctctccctatatgccagtggcactacaactggtattgttttcgactctggagatggggtgagtcatactgtccccatatatgaaggatatgccctccctc

SEQ ID NO: 8382 - DNA, 585 bp, Gossypium hirsutum
  unsure (1)..(585): unsure at all n locations; Clone ID: LIB3828-009-Q1-K6-F11
naaaccctattttcctatctgtaatctttgtttcgctcctcgccatcgcctccgctaagtattcttcgaagaacgttttgatgagggatgggaaagtcggtgggtaaaatctgactggaaaaggatgagaacatggctggggagtggaattacanncttctggaaaatggaatggagatcctaacgacaaaggtattcaaactagtgaagactacaggttctatgctatttcagctgagttcccagaagtcaacaacaaagataagactctagtcttccaattttctgtcaagcatgagcaaaagcttgattgtggtggtggctacatgaagttgctcagcggtgacattgaccagaagaaatttggtggtgaaaccccatacagcatcatgtttgggcctgatatctgcggctatagcactaagaaagtgcatgctattctcacctacaatgggacaaaccacttgatcaaaaaggaagttccttgtgagactgaccaactcactcatgtttatacgttcattctccgtccggatgctacctacagtatccttgttgacaatgttgagaaacaaactggtagct

SEQ ID NO: 8383 - DNA, 106 bp, Gossypium hirsutum
  Clone ID: LIB3828-009-Q1-K6-F12
gtgatgaacagcataataccaaaccaaaccaagaccactttctcctcatacattgcaaaaggagaaagtggtcttggtgttggtttggtattatgctgttcatcac

SEQ ID NO: 8384 - DNA, 308 bp, Gossypium hirsutum
  unsure (1)..(308): unsure at all n locations; Clone ID: LIB3828-009-Q1-K6-F2
gnacaaggctaactgggttccggaccctgttacgggattctatagacccgaaacactgtgaatgagatctgccccgcagaactcagagccacactcttgaagaagaactaaatatacatgcatgcatatgatgtgagatgagattggtttcaaatgttatgtggtgcaagcacagggaagattttggtttttggtttttttgttcaatggctgaaatcgcttctttctttgtccttggtaaacgaaatgctaataaattgtaggaatgccctttttatttatataaattaagagttttcttttcattt

SEQ ID NO: 8385 - DNA, 598 bp, Gossypium hirsutum
  Clone ID: LIB3828-009-Q1-K6-F3
ttcaaaaccaataaaaactggcaccacaccttaatattgttccttccatgtttgtgcttttattattattcatttcagcctctaaagttcaatcaggcgctattgatgttgttgccaagtttggcgcaaaagctgacgggaaaacggatctgagtaagccatttttggatgcttggaaagaagcatgtgcctctgtaaccccatcaacagttgtgattcctaaagggacatatttattatcaaaagtaaacttagaaggtccatgcaaggctcctattgagattaatgttcagggcactataaaggctccggctgatcctggtgctttcaaggaccctaattgggttagattctatagtattgaaaatttcaaaatgtccggcggaggaattttcgatggtcagggaagcattgcttatgagaagaataaagatccccacaatcgtgcatttcgtgtcaaactccccgttaatataaggtttgactttgtgaccaacgcattgatacaagatataactagcaaagacagtaaactattccacgttaatgtttttgcatgcaaaaacattaccctcgaacgtttcacggtagaagcacc

SEQ ID NO: 8386 - DNA, 309 bp, Gossypium hirsutum
  unsure (1)..(309): unsure at all n locations; Clone ID: LIB3828-009-Q1-K6-F4
gnaaacaacaaattttcaaatgaaagtaaggtaaactctgaaactgtaacccccccanatgaaactgaaaatcccgacgaaaccgatcaacatcagaccaataataccatatgataacgatgatcatgttggtagatggattatagttcctaaatgagtgtaatatcaactgaagaaaaaataaagggcagttggttattaaatttgtgtttttttgaaatataggttaaaagaactaactctagggcacagtttaagtcatgtgagaggtttataactatacattaaaatatttgatgttgctttttt

SEQ ID NO: 8387 - DNA, 486 bp, Gossypium hirsutum
  Clone ID: LIB3828-009-Q1-K6-F5
gcatgaactagaattagcactcgtttttttttaattaattggactaatattttggaaaaaaaaaaaaaaaaaaaaaaaaaaaaaaaaaaaaaaaaaaaaaaaaaaaaaaaaaaaaaaaaaaaaaaaaaaaaaaaaaaaaaaaaaaaaaaaaaaaaaaaaaaaaaaaaaaaaaaaaaaaaaaaaaaaaaaaaaagggggggggcccgtttgagggggaaccaaactctgggaccccggggggggggaaaaaaaaaggtttttttttttgggccccaaaaaaagaaaaagggggggggggtttaaaaaaggggggggggggaaaacccggggggtccccaaaaaaaaggggggggggaaaaacccccttttggggggggggggaaaaagagagggggccccccaggcggcccttccaaaaattggccccccctgaaggggaaggggggccccccctgtgggggggcttaatggggggggggggggggg

SEQ ID NO: 8388 - DNA, 601 bp, Gossypium hirsutum
  unsure (1)..(601): unsure at all n locations; Clone ID: LIB3828-009-Q1-K6-F6
gcctctggttccaacanagatgaaagtctttgatggagcgtgtgaggcaagaactcaaacatgaactcaaacagggttacaaggagaagattgttgacataagggaggaaattttgcgaaagagaagggcaggaaaacttcctggtggcaccacttcggttttaaaagcttggtggcagtcacattccaagtggccataccccactgaggaagataaggcaaagttggttcaggaaacaggtttacaattaaaacaaataaacaattggttcataaatcagaggaagaggaactggcatagcaatccatcaacttcaactgtcttgaagaacaaacggaagaagtaaaggtaaataatgcatgccttgtcgtccttgcaaataagtaatgcagcagaggttcatgtaaatggttagacaatcacaacatcgttgaatttgcaaccatataggctttaaagtggaacagatttttggtttcaatatgagaaaaagggcaacacagagtacgagattgtaatttaatcgtgccatcttgaagatatggcgtagttcgaggcacgccagtttggtgatatatgctggccttgctacgctgttag

SEQ ID NO: 8389 - DNA, 596 bp, Gossypium hirsutum
  unsure (1)..(596): unsure at all n locations; Clone ID: LIB3828-009-Q1-K6-F7
ggtggctgcaataagacccttngagcattggatgacatgtactacttgcacacaggacttattgtacgagatgaaaggaagctagagaagttatcgttgagaaagcagctaaagcttaagtgtcaagaacaaaatcttagcaatcttgcacaagataaagctcttgttagaattgaagtcagcaatgacgtgaaccaacccattcctttatctagttatggccaaccaagaagagaaaattttccattaaaccaagtcttgcatcaaggaaagaagacatttcgagctaaggttactgagagcttcccacatggatatactattgagactattatagatgggaagccgcttagaggaatactttttgcaaacacacctagctctgtacatgtacacaatcataatcccagcagaaaaaggacttctgtggaagttgggggtactgtactaaacggtgattgcgacagtaaatcaagaagtgtgaggcaggattctggagatcataaacaagctgatgttcatgagaaggattatttattgcatgatacagaagttcctgctccaagtttgagggatccagcacagtctgatctatt

SEQ ID NO: 8390 - DNA, 582 bp, Gossypium hirsutum
  unsure (1)..(582): unsure at all n locations; Clone ID: LIB3828-009-Q1-K6-F8
gttctagatcgcgagcgatctagnaactacccacgcgtccgcccacgcgtccgcccacgcgtccgccacgcgtccgcagatgtcaggctcgtccccctctcccctcttttcttttctttatctatctgctcctatattgtaatggtaaacaaaaggaaagaaaaaaagaatcggaagacagaatggggaaaaaaacctttcgtattgatttttgttacagtatctctcttcccccattacagattcaatttaatggcctatatagccaaaaaaaaatacaaaaatcgcccctttttgttttttctttttctatatttttctttcgatttttgcctttttttctgccttctctgctttctctcgtgcgtggtttgtgtgtagtttctgtcctctttgtctgcttgcgttcggtgtgtgttttgcaggtatcctacgaggacgtggcacggctcggcttggcgcggcgcatggacggaggtgtgtgggcgtggctcggctcggaggcggctgaggcttctgtgcgcatagaggctaaaggctagggttttggggtttgaggcatattttggtctaggcttaggc

SEQ ID NO: 8391 - DNA, 608 bp, Gossypium hirsutum
  unsure (1)..(608): unsure at all n locations; Clone ID: LIB3828-009-Q1-K6-F9
gntaacccttgtgcagggtctagccttggtcatggtaactttgctatggactggaaccatggctcaatcagactgcaccagtgtgctaatcacgatggctccatgctttgattatgtgactggaacctcctcaaccccatctgttccatgctgctcacagcttgctaacgttgttcaattacagccacattgcctttgcatggccctcagtggtggtggttcatcactgggtgtggaagtaaaccagacacttgcccttgcactccctcaactttgccatgtcaaaaccccacctgagagcaactgcaaagctgctgatgggcctgctgtaatttcaatatctccatctggttcacctcaaggtttaccaccccattcaaatgataccccaggcagcaactcatcaacatcaggtggatctagaacaattgcagctactgccagtgatgttatcttcagcacatcccttcagttcatcctgttcttgctgcccattgctttgttttcttcaacttggaccaccatctcctaaggctcctatacatatgcttctgttactaatctcagatcctatctacttgtgttttatcctccacttttagtactta

SEQ ID NO: 8392 - DNA, 581 bp, Gossypium hirsutum
  unsure (1)..(581): unsure at all n locations; Clone ID: LIB3828-009-Q1-K6-G1
caaaatcgaaaaggggcagatcatactccganaaatactttgatgatacttatgagtacaggcatgttgttctcccccctgaagtggccaaacttctccccaagaatcgcctactctctgaaaatgaatggcgtgcaattggagtacagcagagtcgtggttgggtccattatgcaatccatcgccccgaaccacacatcatgctcttcaggaggcctctcaactatcagcagcagcaggagaatcaggcccaacaaagtatgcttgctaagtaattacattagtattcagcatccaaaacaagaagggtgaaaccaaagctactttgttagtgtttatcctcttcctaaacagtttgggtgttgtggattcctggattgttttgtattttagttctccactttggagaattccatgtcaggattgctttcttactttctttatctgactacctagtcattggtactccgcatcttaaattgtttaaatagcatggatgaataattttttcttaaaccttaattagatcatcttaatttactggtgtttcttgccaattttgattatcttttgtgcaaaaa

SEQ ID NO: 8393 - DNA, 408 bp, Gossypium hirsutum
  Clone ID: LIB3828-009-Q1-K6-G10
gggacttgcaattacatttgtctcatcaacatcagactctgatgtccttaatcaggttcaggaaaggtttgaggtggatataaaggagcttcctgagcaaattgatacttcgacatacatgccatcatgatagaagttgttgctgctagacatccaagcacctttttggctggctgatttcgattcggagatgaaagggctttgccagaactgagaattgttgtatactatagggtgtttttataaagtcttgatgttaataggtgagaaacatctgctcaaattatcatttttgttctacgtactactgattattttaattgttgcaattaagactgaatctgtagtgtacttggtggattgaaattggattggggttactctcctaattttgggaattttcttatc

SEQ ID NO: 8394 - DNA, 568 bp, Gossypium hirsutum
  Clone ID: LIB3828-009-Q1-K6-G11
aaatagtctcttctattttgccaggaccgaatccgaacaaacaaaagtgctaaacatggatgctgctggcaatcgaagttttaagttactattatttttatttgctgccataatcccagccctgcaaggtcacatcggagaatatgatgaatattgcgaaacaacgtgaattggaagctaaagaaaacaccgagcaggcatataaccccaatcctgaggaagttacccagcatgtcaaccaccttgtttccaggtcgctgatggggctaaatagtacaagacgacatttgagagcaagaaaaaaagcggtccctgcgatccaaccaaccccattgaccagtgctggcgctgtgatcgtaactgggagaaaaacaggcagagactggctgattgcgccattggattcgcacgtggtactattggtggaaagtacggaagaatttacgtagtgaccgatccttcagatgatgattttttaaatcctaaacctggaaccctacgtcatgctgtgatccagaaggaacctctttggatcatctttgcacgagctatgatcatcaggctaaaa

SEQ ID NO: 8395 - DNA, 590 bp, Gossypium hirsutum
  unsure (1)..(590): unsure at all n locations; Clone ID: LIB3828-009-Q1-K6-G12
ggggtgtcttccagttgtggttcatggtgttgatactaaactcgtgtccgaatgacccgtcttgcgagagagttttttgctttgcctgctgaagagaagcttcggttcgatatgtctggtggcaangaaggtggtttcatcgtctccagccaccttcagggagaagcagtgcaagattggcgagagattgtgacatacttttcatacccattgaggagcagggactattcaaggtggcctgataagccagagggttgggttgaagttacaaaggagtacagcgagaagttgatgggcctagcttgcaagcttcttgaggtgttgtcagaggccatgggtttagagaaggaggccttgactaaggcatgtgtggacatggatcagaaagtggtggttaacttctatcctaaatgccctcaacctgacctcactttaggactcaagcgccacactgacccaggcaccatcacactcttgcttcaagaccaagttggtgggcttcaggccacccgggacaatggcaagacttggatcactgtccaacctgtggaaggagcctttgtggtcaaccttggagaccatggccatta

SEQ ID NO: 8396 - DNA, 587 bp, Gossypium hirsutum
  unsure (1)..(587): unsure at all n locations; Clone ID: LIB3828-009-Q1-K6-G2
caattattaacttcaaggtgctggnaaagnaccaacagcgtccactctgtcgtggtttatatacatgctttgcaaacatcctgatgttcaagaaaggttgccgtggaagtgaaggaagcaacaaaatcaatggaggttaaagatgttgatgaattcgctgctagcctgagagaagaggctttagaaaaaagcactatcttcatgcagctataactgaaactataaggctctacccggcagttcctatggatggaaagatatgtttctctgatgatactctgccagatggttttagtgtgaggaaagatgatttgattgtttatcaaccttatgcaatgggtagaatgaagttcatttggggtgatgatgcagaggagttcagacccgagagatggctcgacaagaacggcatgttccgatcagaaagccctttcaagtttacagctttccaggcagggcctcgagtgtgtctgggtaaggactttgcctatagacagatgaagattttctcagctgttcttctccgttgcttcgtattcaaattgagtgatgagaatagagcagtgacatacaggacgatgatcaat

SEQ ID NO: 8397 - DNA, 583 bp, Gossypium hirsutum
  Clone ID: LIB3828-009-Q1-K6-G3
ttcttcactgagtaaaatgaagatctgaaagaattgctgaagagcatgagttggaatgggatccagctgctactgagtctgagtttttcaaaccacatgaagatttattgaatggcccaacaaatcttgagactgggtctaagttaccccctcctgtggagaaacatgatgaagcattcacttctgccgctaatcgtgcccaaaccgagcagcctgattctgattcggactttgacccattagattttcctcaagttcctaatgtgtcattgaagccaagcactaatgctgcatcagcaccggtaactaacccactgtcatcagctgctccagaacctgaaattgatcattcatctagacattctggagcttcaagacatgtgttacaaatgtcccctttggagcctgatatgacgcaagaacattcattaaccaaagaaagtacaatgcccaacgatccagctggagccaaagaaaataaacaatttctgccattcatttcttctccacccgtatctgcttcaccaatttctgaaagaccaagtgatccaacacctgcgattttgaaaacaaatagcgaggc

SEQ ID NO: 8398 - DNA, 581 bp, Gossypium hirsutum
  unsure (1)..(581): unsure at all n locations; Clone ID: LIB3828-009-Q1-K6-G4
atccagcttaacccttccacaacctaanatgtcgccaggtcccgtggttgaagcagccctccctgacactgaactccttcctaatccttccgctgaggaaccccagaagaagcctttgagcgaggaggaggaggctgtggttgaggacgtcaaggaaattgagatagaagatgacgaggaggaggaggaggaggaggaggatgacgatgataaggaagatagtgctcagggtgctaatgccagttcaaagcaaagcagaagcgagaagaagagccggaaggcaatgttaaagctggggatgaagcctgttactgatgtaagcagggtcaccatcaaaagaaccaagaatatattgtttttcatctccaaacctgatgtcttcaagagcccgaattctgagacgtatgtcatcttcggcgaggctaagatagaggatttgagttctcagctacagacccaagctgctcagcagttcaggatgccgggcttggcctctgtgatggcaaaatcagacacctctgcagcagcagctggaacagcagcggatgaggaagaggaagaaatcgacgagactggagtag

SEQ ID NO: 8399 - DNA, 601 bp, Gossypium hirsutum
  Clone ID: LIB3828-009-Q1-K6-G5
gtttccataattagaaagcttgaattttatgttatagtaatatttatcactttcatcagatcagctttatatttatttgtggtaattaataaattattatatccctattagaacaattttcttataaaaacctacgttttgatcatcgaatttaaaatataaaatttgttgaaaaaaaaaaaaaaaaaaaaaaaaaaaaaaaaattaaaaaaaaaaaaaaaaaaaaaaaaaaaaaaaaaaaacccaaaaaaaaaaaaaaaaaaaaaaaaaaaaaaaaaaaaaaaaaaaaaaaaaaaaaaaaaaaaaaaaaaaaggggggggcccttttaaaggaaccaaattttcttcccggggcatggaaagtaaaaactttttttttggggccccaaaattaaattccggggcccggttttaaaaaccgggggaggggaaaaacccgggggttccccaaataaaagggcttggaaaaaaacccctttttcccagggggggttaaaaaaaaaaggccccccccaaaggcctttcccaaaattgggccccccttaatgggaaaggggccccccccttgaagggccctttaaggggggggggggggggggtt

SEQ ID NO: 8400 - DNA, 593 bp, Gossypium hirsutum
  unsure (1)..(593): unsure at all n locations; Clone ID: LIB3828-009-Q1-K6-G6
gttttgaagtggtcctngaaaaagttgttcttctggatgttccggtaattgtaatcctggtggtttcgttctaccatttcctcaaattccagaaatcccaagaattccacagatcccacagatcccacaaatcccacaaattccactaatcccacagatcccacaagtcccacaaatcccactaatgccaggacagtcgggatgtgagagtggggagtgttgccgtcagggttgcggtgggacttgtgctgagtgtggtcagcccaggtgcgcatcaggatgttgccaggctgaaactgtaaagagcaaagggatagaagaggttatggacagtgaacccagtccaccaaagtagggagatgataccatattaagatgaaataatgaggaagagttggttgtcgtcgtattaattatacaaaataagaagtaatgatgttgcagaagggcttgctataaaatcctgttggataaaaagagtaattatgaagaataaatagctcaaaacaatatttgatttacaatatcctaaagttccttgaatcttgttttgtagccatatgtaattaatgcatgtacatgctaatatatat

SEQ ID NO: 8401 - DNA, 585 bp, Gossypium hirsutum
  Clone ID: LIB3828-009-Q1-K6-G7
tttctttctctctcctctacttactattcatttttctctcttgaattttctcgaaaattttggcaaaagccttgtgagatgtgaaaggaaagggaagtctgggtgttgttttgtctgacttcaaaatggcttctttgtactgcaataatcaggtaagagattcttgttttaccaacgcacgccatggaagatcatgttccaaagctcaagcttgtctcgaaaagattcttcatttaatttcaagcatcccaccaccatgtgaaattaacccaaaccctttcaagaagagagggttcgatattgatttaaacttgagattaggctcttttgtcgacgatgatgacgagagcgaagaaaaatccgattgttttgctgagaatagtttcaatgaagagaaaacaggtaccggtgaagctacagcgacggatgtttcttccgatgttacagatattcaaaaaagcgaagagtttaagagcggcactgagggtgaagttaaagcttcggcggcggcgtttcatgattcattggatttgctaatagaagcggcagagatgatttcagccagggatatttacctgaatgaaa

SEQ ID NO: 8402 - DNA, 486 bp, Gossypium hirsutum
  Clone ID: LIB3828-009-Q1-K6-G8
gcaaaccctaaatcccctccttcaaacaccgatttacctccataaatggcaaccagtgcgttcaagctttgagggatggtttttcagccttgaaaccccttttcggctttgattgcaacgaagcaaaaaggaaacccatggcatatttgcaagtctattgtaggtacagctggagggtggcgagtgtggagaaaccgttcgtgggcgtagagcatgaaagaacggaggcgcacgtgtggcgctgggctatgctggaggccagtacgaaactgttggctgcggcgcaagggaaagaaatcctagggtttctgttcaaaagtgtcctgggccgtttgggcattgggccattgtaactaggtcgggttttaattgagttgtctgggttttagcctggttgggttaggcttgatctgttattgggacatttgtttgggcctattatttgtaaatggacttaggacaattttaatttgtttattttttttt

SEQ ID NO: 8403 - DNA, 553 bp, Gossypium hirsutum
  Clone ID: LIB3828-009-Q1-K6-G9
gtttgaggaagcaaattaagtaaaatggtaggttagtgcaacacacgcaatgtactgtcttgtgagtctctgcggcaaagtatgcggctgaagaagaaaagccgtcggtatctggggctgcaaggattgctggaaaagtcaaagcaggcggtgcttatactttgaacactgctagcgctgtgactgtgaggagtaccatcatgaggctgagggagcaaactgagagctgagcaaccactggtgattgatttgtattctactttcataggatgttgttttgcatgttttagctatgagacttaattgaaacttttttttgacaatgatgttcgtactatgtgttctcatttttatatctgagtctggttttagaactttatttaagttcaataataatgctccattcgacattatcttgttaactacacatcaaattattgcatccttgatactccatcttgctcaactaaataaatctactcgtgaaagtagatctaatttctcaaatggttaagccccaagtgctgatgaggaataacaagattggggtgcc

SEQ ID NO: 8404 - DNA, 597 bp, Gossypium hirsutum
  Clone ID: LIB3828-009-Q1-K6-H1
tccgactgataagcctttttggagcttggaaagagcatgtgcctctgtaaccccatcaacagttgtgattcctaaagggacatatttattatcaaaagtaaacttagaaggtccatgcaaggctcctattgagattaatgttcagggcactataaaggctccggctgatcctggtgctttcaaggaccctaattgggttagattctatagtattgaaaatttcaaaatgtccggcggaggaattttcgatggtcagggaagcattgcttatgagaagaataaagatccccacaatcgtgcatttcgtgtcaaactccccgttaatataaggtttgactttgtgaccaacgcattgatacaagatataactagcaaagacagtaaactattccacgttaatgtttttgcatgcaaaaacattaccctcgaacgtttcacggtagaggcaccggcagatagcccaaacacagatgggattcacatgggcaaatcagacggcgtaaatattattggatgtgagattaaaactggtgatgattgtatttctatcggagatggcactaaaaatttggacataaaagatataacttgtggacc

SEQ ID NO: 8405 - DNA, 608 bp, Gossypium hirsutum
  Clone ID: LIB3828-009-Q1-K6-H10
tccggtctttggatgagaacttcagtgactttgagcgagctgtggtgctgtttactttggaccctgcagagcgtgatgcatttctggctcatgaagctacaaagaggttcacatcaagccattgggttctcatggaaattgcttgcactaggtcttcacatgaactgttcaatgtgaggaaggcgtatcacgatctttacaagaaatcccttgaagaagatgttgcgcaccataccaagggagactaccgcaagcttttggtcccacttgttagtgcattccgataccagggagaggaggtgaacatgacactggcaaggtcggaggcaaagatacttcgtgagaagatatcagacaagcagtacagtgatgaggaggtcatcaggattgtaacaacacggagtaaggcacagttaaatgctactctgaatcattacaatactgcatttgggaatgctatcaacaaggatttgaaggccgaccctgaagacgaattcctcaaattgctgagagctgcaatcaagtgcttgactgtccctgagaaatattttgagaaggtgctacgtcaagcaatcaataagctgggaacagatgaatgggctcttact

SEQ ID NO: 8406 - DNA, 596 bp, Gossypium hirsutum
  unsure (1)..(596): unsure at all n locations; Clone ID: LIB3828-009-Q1-K6-H11
ggagattacaganaaaaaaanatgatttgcaaatacacaatacgaataatcgcgatgggtttcaagatatttgtggtggcgatgatggtgggttccatcgcagcggctcagatttcattagcatccaccgtgcctgcttttctatgggctcctggtttctctagcgttgaatcgaaggaatctgtaaattatcagatcaagtctccaaaggatctagctaactctgttctctctcaagggggatggtctgacttactgtgctccgagaggaaaaatgagcgccctgttgatctcgccgttgtttttgttggtagagagttgcactcttcagatgttgcagggaacaaacatgcagatccggctcttttgaacttgcttaaggactcttttaccaagtccaacttctcaatggcatttccatatgtagctacttctgaggaggaaacaatggagaatttgttggtttcaagttttaaggaagcctgtgcccacggtttgggagttgctaatgttgcaattttggaatcgtgctctatagagggtggagatttccagaaacttgcaaacttgcattcagtccatgatcatctagttaa

SEQ ID NO: 8407 - DNA, 593 bp, Gossypium hirsutum
  unsure (1)..(593): unsure at all n locations; Clone ID: LIB3828-009-Q1-K6-H12
aacaaatactctttttattaaaaggaaanaaggaggaggagtaaaatggatggaaaaagaatcgagggcaatgaagtttatgctctagcaatgtgtgtaagtattctcctctttgctccgattgttgtgtcacaaccaataccggcagataaatcccaagtggaagcttggtttaatggcattatcaagccggtgaaggaaaggggtacaaccttagaccctgaattggttcaagccgagacagaacctagaatcataaaggtgatgcaaggtgggggtggagaattcgataccataaccaaagccatcgagagcgttccatcagggaacgccaaacgcgtgattatatccatcggacctggatcttacaaagagaaaattagaattgaaagaaataagcctttcattacattgttaggagatcctaaaaacatgccaaatttgacatttgacggcaccgccaagcaatatggaaccgtagatagtgccactcttattactgagagtaattactttgtgggtgctaatctcaatatagtgaactctgctccaaggccagacgggaaaatggtaggagcacaggcggttgctct

SEQ ID NO: 8408 - DNA, 426 bp, Gossypium hirsutum
  Clone ID: LIB3828-009-Q1-K6-H2
gtgccgtagcttgtctctcatgtcctattatggtactgtttgcatccaaccagatctttccaagtagctacgcttttatacttaaaatagacaccactctgggtttcactattaatagttgatttctgtgtttatataaaagagtaatcccaatcctacaatctcatatggattactatgaccagcactggactgcacgagaattggtatccattgacaacctgcacacggcctatcactacaacccggatgatgtggatcgtccttacaatgacctcttctttaggaccatgctacgagttttatatcaccaaaagggtgttggcataatcaaaactgggaacttgggacgttaccaaccacttttacagtagctgccgatagtgatcttgactcaggaacgaataacaagaagtaggccaactg

SEQ ID NO: 8409 - DNA, 590 bp, Gossypium hirsutum
  unsure (1)..(590): unsure at all n locations; Clone ID: LIB3828-009-Q1-K6-H3
cccggngtcgacccacgcccgtccgtttttcagggnctaagaaagnanaaaaaatggctttgcaaaaggctaaggacatcatatctaccaataccgtcgtcgttttcagcaagtcctactgtccgttctgtgtggatgtaaagcaattgcttcaaaaacttggagcttctttcaaggccattgagctcgacaaagaaagtgatggagctgatattcaagcagctctggctgagtggaccggtcagcgaactgtgccaaacgttttcattggtgggaatcacattggtggctgtgattctacaacaggcttgcataaccaaggtaagctggttcctctgctgactgaagctggagcttttacaaaatcatctgtttagaatagagttaagctgcttgtctcccctaaaattaataaacgaataccaagtttgatttcatgttgattctgtcctttaagttgaatccatagtatagcatatagatatcgaactgaattgctgttgaacttcctagtaatattttcatgttcaagtttctttttacagaaatgttttagctggatctaattagagatttgtcatgtttgtcct

SEQ ID NO: 8410 - DNA, 599 bp, Gossypium hirsutum
  Clone ID: LIB3828-009-Q1-K6-H4
aattcaggaagcttgagcatatattaagcgagttgaaaagcatatccttacttcagttgatgatccatctcctatgaagactatggctgggggaagtgttgcaaatgctattcgtggacttagctctggctttggtgttaacagtggaatgatcggggcccatggggatgatgagcaaggccaattgtttgtaagtaacatgaactttactggagttaatatttcgagactgcgaaagaagaggggaccaacagctcagtgtgtttgcctagttgatgcatacggcaatagaacaatgcgcccttgcctgtcgaccgctgtaaaagttcagggggatgaattgaccaaggatgactttagtggttctaagtggttagtaatgagatatggaatattcaatttggaagttactcaagcagctataagatttgccaaacaagagggtctgtctgtctccatcgatttggccagttttgagatggttcggaattttagagaacctcttctaaagttactggagtcgggagatatcgacctctgctttgccaacgaggatgaagcaacagaactactaaggggtgaagcaaatgctagtcctg

SEQ ID NO: 8411 - DNA, 589 bp, Gossypium hirsutum
  Clone ID: LIB3828-009-Q1-K6-H5
attactctttttattaaaaggaaagaaggaggaggaggaaatggatggaaaaagaatcgagggcaatgaagtttatgctctagcaatgtgtgtaagtattctcctctttgctccgattgttgtgtcacaaccaataccggcagataaatcccaagtggaagcttggtttaatggcattatcaagccggtgaaggaaaggggtacaaccttagaccctgaattggttcaagccgagacagaacctagaatcataaaggtgatgcaaggtgggggtggagaattcgataccataaccaaagccatcgagagcgttccatcagggaacgccaaacgcgtgattatatccatcggacctggatcttacaaagagaaaattagaattgaaagaaataagcctttcattacattgttaggagatcctaaaaacatgccaaatttgacatttgacggcaccgccaagcaatatggaaccgtagatagtgccactcttattactgagagtaattactttgtgggtgctaatctcaatatagtgaactctgctccaaggccagacgggaaaatggtaggagcacaggcggttgctctg

SEQ ID NO: 8412 - DNA, 592 bp, Gossypium hirsutum
  Clone ID: LIB3828-009-Q1-K6-H6
tgttacacaatcaattcaatgatcaaatttgagattaaaaaatatttcttttgcataccttaaccttctcaaagttgagacagttttaatagcccataaaataagatgactgacaaaggagcagatgaaaaccaagtaggtagattgtttttgtcacctatacttaccatacaaagccgtagaatagaagaggtttgaagagagtcacaagagaaacatgaagttatatatagtaggcaatccccccaagaagggagttcatgattttagttaatgttttggtagcttttgtccattatctttttagttttcgtgatggagactttgctttctcctttcccactacgtttgaatttagataacaaacaaaattacgattcaactcttaaatgctaatcgaacaactacttcaccaactttaagattactgcttcatcttatctcttgggggttagtttacaaatttttccattaatagctgaaattcaatgatatccgaggtgccatttcaatcctaaatcaatatcagataattttgggtttgatccaagtttaaatggatttcagtcattatggtgttttttcaatctgt

SEQ ID NO: 8413 - DNA, 594 bp, Gossypium hirsutum
  Clone ID: LIB3828-009-Q1-K6-H7
cggccgcgtgggttttgaagcagcaagttttgggggttctaacattgatccaactgcttgggaagacaaaaagtgtaaaggcgagtcgaggtttcctgctcaggtgagaatccgtataaggaaggtatgcaaggcattggaagaggatgcttttaggccagtcttgcaccactatgacggtcccaagttccgtctcgagctctcagttcctgagactttggatctaatggacctttgtgaacaagcaggctccccataaacaaaatgctagccgagtgcaaatgtagtagcagtagggtttgtgatgcacgtttccggagatttttccatagagcgcaagctgtggtgggtgttaaatccagttggggaaaaagtaggaaatggcattagccacatatgaataaatgcgttcatgtcatgtgaaagatgcattgtaaaacttttgcattaatatgctatgaattaaaatcctatcaaagatatatttgcaagatgtcaaaagaaaatggcaactacgtgtaatgttcaagtcctcaacaactgaaggctttgatgtctatttttgtgcttataatatgaactttctcctgtctt

SEQ ID NO: 8414 - DNA, 601 bp, Gossypium hirsutum
  Clone ID: LIB3828-009-Q1-K6-H8
aaaaagaggcgtctgtaataaaatctgcaatcttaattctgtcggtgtttttatctgtaagcttcagttcgggtgttaggttgctccaggaacagcccaatgatgacctcaaaaactggacgctattcctcccattgatgcactcaaccctaccgagttcaatggacccggtgttggcattcacgaagatcatgttgtcccaaaaggttccgaaattggtactcttggttttggttttgaaggtggtcctgaaaaatgttgttcttctggatgttccggtaattgtaatcctggtggtttcgttctaccatttcctcaaattccagaaatcccaagaattccacagatcccacagatcccacaaatcccacaaattccactaatcccacagatcccacaagtcccacaaatcccactaatgccaggacagtcgggatgtgagagtggggagtgttgccgtcagggttgcggtgggacttgtgctgagtgtggtcagcccaggtgcgcatcaggatgttgccaggctgaaactgtaaagagcaaagggatagaagaggttatggacagtgaacccagtccaccaaagtagggagatgatacc

SEQ ID NO: 8415 - DNA, 371 bp, Gossypium hirsutum
  unsure (1)..(371): unsure at all n locations; Clone ID: LIB3828-009-Q1-K6-H9
cggncgcgtgggttccactgggagcactgtaacaataaagatgaaatattcatggattccgagacaaatattcgactacttgctgcaagaagatacatttcatatgaagcacttaagagaaacaatgtcccgtgctcccaccaaggacgatcttactacgaatgttccactgggaaaccggtcaacccttacactcgtggttgcacttacgcaacacgttgcagaaggtacactgcttaattaaaaatatttccaggggtgatgtaaactaagggagcaagttggcttcatgaactcagctagcaatctatgagcaaaagcaacagtgcaataagcataaagcttagtaataaaatcaagtgttcacttaa

SEQ ID NO: 8416 - DNA, 601 bp, Gossypium hirsutum
  unsure (1)..(601): unsure at all n locations; Clone ID: LIB3828-010-Q1-K6-A1
gatggggagaggtagggttgagttgaaaagaattgagaacaanattaacaggcaagtaacttttgctaagagaaggaatgggcttttgaagaaagcctatgagctttccgttctttgtgatgcagaggttgctctcatcatcttctccaataggggaaactgtacgagttttgcagtagttcaagcatgatgaaaacattggagaggtaccagaagtgcagccatggagcaccagagacaaatgtttcaactagggaggctctggagctaagcagccagcaggaatatctgaagcttaaagcacgttatgaagccttacaaaggtcccaaaggaatttacttggagaagatctggggcctttgagcagcaaagagcttgagtcacttgagaggcagcttgattcttcattaaagctgataagatcaacgcggacccaatacatgcttgatcagctcactgatctgcaacgaaaggaacatctacttaatgaagctaataagagtctaaaacaaaggttgatggaaggctaccaagtacattcactccagctgaatccaaatgccgatgacgtcggctacggccgacaaccaacccatcagc

SEQ ID NO: 8417 - DNA, 608 bp, Gossypium hirsutum
  Clone ID: LIB3828-010-Q1-K6-A10
cggccgcgtgggctcggttgtccgagtcaaaaccaggcctctttcaagtgttcagaagcatgtccagcgacccgagctcgaaactttttgtaggaggtatctcgttccaaatggatgaccaaagtctaaacgaagcatttagcaaatatggtgaagttgttgaagcaagagttattgtggatcgagaaacagggaggtcgagaggatttggatttatcacttacactagcaccgaggatgcttccagtgcactacaggctttggatggacagattctccatggccgtcaagtaagagtagactatgcaaatgacagacctcgtcgtaactttggaggtgctggcggctatggtggtggtggtggctatgggggtggtaactatggaggtggcggctatggcagaaatgatggaagtaacattggatacggtaacagtggtaactatggaggccaaggaagctatggtggggataactatggcactggtggtggtgttggctatggaagtaacttcggtcaatccaccaattacgacaatgggagtttcgaagttgctggtggtggcagtggcagtgatggttttgcggctggtggtgaaaatgtggga

SEQ ID NO: 8418 - DNA, 592 bp, Gossypium hirsutum
  Clone ID: LIB3828-010-Q1-K6-A11
gccgaccttaattagtatggtaaaaagaagattgtttgttttgcgatggcggacaaggcggtgacgatcaggacaaggaagttcatgaccaacaggctcctttccaggaaacaatttgtcattgatgttttgcatccagggaggcccaatgttgccaaggcggagctgaaggagaagctttctaggatgtatgaggtgaaggacccaaattcgatctttgtgttcaagttcaggactcattttggcggtggcaaatctactggatttggtttgatttatgattctgtcgagagtgcaaagaagtacgagcccaaatacaggctgatcaggaacggactcgataagaaggtggagaaatcaaggaagcaaatgaaggaacggaagaacagggctaagaagatccggggagtaaagaagaccaaggccagtgaatcagcgaagaagaagtgaggtaagatgcccggaacggaaaaagcgaggatcgcgcttatcttaaagccgatgtttctcgagagcgatgcataagtagtctgaagtttttaggtgttcttgaacctatatttttggaaactgagtttggtgttatttgatt

SEQ ID NO: 8419 - DNA, 596 bp, Gossypium hirsutum
  unsure (1)..(596): unsure at all n locations; Clone ID: LIB3828-010-Q1-K6-A12
gaatcgcttggcaagnagtttgatctggatggtaaccgggtaaatcaaggaatttctgtttatggaaataaaggaagcacagatcagcacgcctatatccaacaactgagggagggtgtgcataatttctttgtgacctttatcgaagttctacgtgatagaccccctggtcatgattgggagcttgaaccgggtgttacatgtggtgactacctgtttggaatgctacagggcacaagatcagctctgtatgcaaatgaccgtgaatccatcactgtcactgtccaagaggtgacacctagatctgttggggcactcatagcactttatgagcgagcagttggaatttacgcctcgcttgtcaacatcaatgcttatcatcaacccggtgtggaagctgggaaaaaagctgctggtgaagtattagctctacaaaagcgggttttagcggtgctcaacgaggccagctgtgaagaccctgccgaatcattgacgcttcaagaaatcgctgaccgttgccatgccccggacgatattgaaatgatatacaaaatcatcgaacacatggccgccaatgaccgagcactaatcgccga

SEQ ID NO: 8420 - DNA, 586 bp, Gossypium hirsutum
  Clone ID: LIB3828-010-Q1-K6-A2
gctccgtattatatagtcaaccactatggcaaccagaatgtctgttagatacgtttctcgtaggttctcgagtgggagtgggaagatactcagtgaggaagaaaagctgctgaaaatatttacatccagaaactgagcgagagaaattggagaaacttgcacgcaagggacccaagccagaggagaaaccggatgctggttcagggggtgctgcgaccgatggtagcactacctctacatcgggaacatctgctgagaaaagtatcaaccgataagtaccgaaactacggggttcttgctggtgttgcaacccttggtgctgctgtgggatggtatctcaactctaaagacaagaagcaagaggcctgaaatgggggttaatgcgattggattctctaggtggaacatggcatgaatggtttaccccaatgccctgttcgtgtgcaaagtaactgaaaaataaaacaaactttgtaaagcagcttatcatgttttctgataacgtctgtgtttgaatcagtagtgttcttgtgtacctcaatgccaatcatggttttctgcattgtcttttaaagaatctttgatg

SEQ ID NO: 8421 - DNA, 590 bp, Gossypium hirsutum
  unsure (1)..(590): unsure at all n locations; Clone ID: LIB3828-010-Q1-K6-A3
gatcttagnagatatgttgttacagtgccaacgcaaaggtggaattagaaggaaacatcatcgagcttggactctctctgaggttatgaagctagttgagggtgtgtccaagtatggagctggccgatggtctaagattaaaaggcttgcctttgcatcctattcgtatagaacttctgttgatctcaaggacaaatggcggaatctgctgaaagctagctttgcccagacacctacggacaaaggggcaaattcacggaagcatccttcgatgccgattcccgcaccaattttgttacgcgtgagagagcttgccgagatgcaggcacaggcttcattgccaaatctgagcacggggaagctgtcggcatgtggtggccgaagtgtaaatgaaacaagacccggatacttgtaacattgtaaataatataataatagatattagttgtgtctaaactagaaataatagtctaattgactgtactgtctagaagggagagggaaaaaaaggttgaatggtttggaccggatgggcagatgagagaagtttgtttaacataagctgcgctaactaggatatttcttccttg

SEQ ID NO: 8422 - DNA, 601 bp, Gossypium hirsutum
  unsure (1)..(601): unsure at all n locations; Clone ID: LIB3828-010-Q1-K6-A4
caggnatgacatgaactgtgccgaggcttatgtgaagtatatgtgcaattggttgcttgataaatgccttgacgatatgctattcatggctaaaagttatgataaaggttgcattgatcggttgagaatggttgcttcagttccctttgtacggatatcatacacagaagcagtggagcttttagaggaagctgtgagaggtggtaagaaatttgagaatgaagtgaagtgggggattgatttggcttctgagcatgaaaggtatgcaagtcttttttattatttttgacctgctttaaatgttgagcatgaaaggtatgcaagtctttcttattgtttcttctacctgctttatgtggatgcttaaatcctatgctttatgtggatgcttaaatcctattttgcgttggccttgcagatacttgactgaagttaaatttcagaagccccttattgtttataactacccaaagggaataaaagcattctacatgaggctcaatgatgacttgaagactgttgctgctatggatgtccttgtgcccaaggttggagaactaatcgggggaagccaaagggaagaacgttatgaggtcattcg

SEQ ID NO: 8423 - DNA, 588 bp, Gossypium hirsutum
  Clone ID: LIB3828-010-Q1-K6-A5
gtttttccaacatgtagtttagcagtctttgatttttgggtgtgatgagaaattggagatcggttaacatttatctgttgattccgcagaactcctcacatgtccgcaatgcatcaggacacatctccggatctcaaaattgtggcgacaaaactaaaggatatcttagagatatcgaatacctccctgaaaatgagaaaagttattgttgagctatgtgacattgttgcaactcgtggtgcccgactatcggctgcgggaattgccggcatcctcaagaaaatcggaagagacacattgaaagatggtgaaaagcaaaagtcggttgtgtctctagacggtggattgtacgaacactacaccaaattccgtacctgcatggagagcaccctcaccgagttgctaggagaagaagtctccgaaaacatcattatcgaacattccaacgatggttccggcatcggggcagccctcctggcggcttctcactcacaatacatcggaattgatgaatcctgaagatcgttgaacttaaaaagtaagacatcgtagatcgaagaatcgaactattgtgatttttgtatattt

SEQ ID NO: 8424 - DNA, 450 bp, Gossypium hirsutum
  Clone ID: LIB3828-010-Q1-K6-A6
ggtgcttctctattgtttaatacaacagccttagcgatcaactgcatttctccgtcccccaatcttttcctttctaataaactcaatggcccgccaaattgttgttcttgctttggtcaccatggccctctttgccttggtttccaccgctgctgcggccaccgcccccgcacccggtggcagcccctcaggttcacctggagatgctagctcccctccttctcaggccagtgctcctagtcccagcagcggtgctgctcttgagctctcggctattgttggagttggagcagccgccgttgctggctactttatgttctaaatacgatatgtaagggccgctttcctagttttgatatcatcacaaatgctgtcttattaattatgttgagatttgcataatttctttacgaataaagaaaaggaatggattggtgcatagattggtgc

SEQ ID NO: 8425 - DNA, 595 bp, Gossypium hirsutum
  unsure (1)..(595): unsure at all n locations; Clone ID: LIB3828-010-Q1-K6-A7
gttcaggtaagcaggtccctttgttaaacctagatgagtataccaaagataccgatgaggctgaaaccgaccttccagttgatggcaatactgacatggatttgctaatcgatgaggatagtgattctcttacgtcaaaactgccttctgcnacaagaaaatattggaatcatgngaagaaaagcagggaaagtgatgggatatacttccctttccatcttgggcagaagtgagtggaaccatttccatagcattatcagaactgaagttttgggattaaagaacaggtcggcacccagaggcagaggtgaggatcttcgaggggaagagaatgaagcagaaacagaagtatttccccggaagtgggtcctatagagtaatcctattatcaacacttcaacttcttaggagatattggcaacagatctaacattctaggcaagcagtgttaaacttgattgatgtaaaggtcgaggcttaggcaatgggagaggaagtattgcaggagcagattagaaagcaaaatggtaacagttgatgtgtgtgtatatatatatataatgtggataagaacttggctaatggctgagctctt

SEQ ID NO: 8426 - DNA, 590 bp, Gossypium hirsutum
  unsure (1)..(590): unsure at all n locations; Clone ID: LIB3828-010-Q1-K6-A8
ccccgcgtccggtngaaaaggggngaagcagtagtggcagcgcacaacgtattcgtatatggaagcctattagcagatgatgtggtccgtgtcctgttgaatcgagtccccacttcctccgctgctcttctcaacggcttccatagatttagcattaaaggacgggtttatccggcaattctcccagtccgaaaccgtcatgttagtggcagggtgttaatgggaataacggatcctgaattgcatattttggatgaatttgaggacgttgagtaccaaaggactcgcgttgaggtctctttgctggaaagttctgacaaattacaagcccacgcttatgtgtggagcaacgctagtgatcccaacttgtacggcgattgggattttgaggaatggaaacaagtgcacaaggaaagtttcataaagatgacgatgggatttatggaagaacaagagctgcctggatcaaagccaagagtcgccacttacgaatccttctatcagcaagatgttgctgaaaagtgaggaatcaatcatgcttccttctgttcttttcattttattatcaaaatctatgtaaataattagaa

SEQ ID NO: 8427 - DNA, 592 bp, Gossypium hirsutum
  Clone ID: LIB3828-010-Q1-K6-A9
ctcatttcatttctccatatggctagagggttgaagaacatttgaagaggctcaatgcccccaggcattggatgcttgacaagcttggtggtgcttttgcacccaagccatcgtctggtccccacaagtccagggaatgcttgccattgatccttattttgcgaaaccgattgaagtatgctctcacctatagagaagtcattgctattcttatgcagaggcatgttatggttgatgggaaggttaggacggataagacctatccagctggtttcatggatgttgtgtccattcctaaaacaaatgaggacttccgtctactttacgacaccaaagggcgatttcgtctccatgccatcactggcgatgaaaccaagttcaagctctgcaaggttcgatctgtccagtttggccagaacggtattccatacttgaatacatatgatggtcgtactatccgttaccctgatcctttgatcaaggctaatgacaccatcaagctagaccttgaaagcaacaaaattgttgatttcatcaagtttgatgttgggaatgttgtcatggtcactggagggaggaacagaggcgagtt

SEQ ID NO: 8428 - DNA, 471 bp, Gossypium hirsutum
  Clone ID: LIB3828-010-Q1-K6-B1
ctatgttctttgctaatttgcttctacttccttcttcttctctttctcgtgaaccaaacagaaatttcctaaaggaaaaaaaaaattcaaaagctgatgttaatttatgaataaatgttgaggatctgaattttaaaccaagcgagggagtgaaagagagacgagagaaggatttgaggaattgttagatacacttgaagagattggagggaagttttttgctggttctgataactaatcgtgaagatttctttttattttgttgaagtttttgagaatctatacatttggaagatagaagagctacttcggggagaaatttcaactgaattcatctgcaaataagcagatcaattgctgacatattcaaacattagaaccttcatcacaatcacaagagagtttcggaggaataggctgcaaatgtcattattttgttgaaaatttgaagtagatttgtgtttatagact

SEQ ID NO: 8429 - DNA, 598 bp, Gossypium hirsutum
  unsure (1)..(598): unsure at all n locations; Clone ID: LIB3828-010-Q1-K6-B10
ctctaatcaaanaacttattgagcagtatggtttgggaaactgttcaggcttatatgacttatgtgcagcttaatgcagaagaagcagtaagagagatgctcaaggcagttgctgcaagaatttcctcggaatcaactaggcttggcgagagaaactctataacgatagaagaagaggattgcatggatgacgggtctgtcattcatttaaaactctctattgattctaacaaaggggaagcaagttttgattttagtggaactagccccgaagtctacggtaactggaatgctccagaagctgtcactgctgctgcagtcatatactgccttcgttgtttggtcgatgttgatattcctcttaatcaaggttgtttggctccagttataatccatgtaccggcaggctcatttctttctccaagtgataaagctgctgtagtaggaggcaatgttctcacatctcagagaataactgatgtagtattgactgcatttcaggcctgtgcttgttctcagggatgtatgaataatcttacctttggggacaatactttcggttattatgaaacaatcggaggtgggagtggggctggtc

SEQ ID NO: 8430 - DNA, 598 bp, Gossypium hirsutum
  Clone ID: LIB3828-010-Q1-K6-B11
cttgactttattggagtcgaatctgatcccctctgctactgctagtgagtccaaggttttctatttgaagatgaaaggagattatcatcgctatttagcggagtttaaggttggtgatgagaggaaagccgctgccgaagatactatgttgtcttacaaggctgctcaggatattgcactggcggatctagcaccgacgcacccgatcagattggggctagcactgaatttctcggtgttctactatgagattctcaatcagtcagacaaggcatgtagcatggctaaacaggcatttgaggaagccattgctgagcttgacacactgggagaagagtcatacaaggatagcactctcattatgcaactactaagggataatcttactctctggacttcggatgtgcaggaccagttagatgagccgtagaaggtgtgttatagcggtgttggtcctattcttcatctgaaggaggtgggctttgaatgtcatttgattctctgattacagtgtgtaatttaaaaaaagggaagcaacccatggcaatgatgttatattctgtactgaacttgtttttggaatatggaagtgatttta

SEQ ID NO: 8431 - DNA, 603 bp, Gossypium hirsutum
  unsure (1)..(603): unsure at all n locations; Clone ID: LIB3828-010-Q1-K6-B12
tccggccgatttcagaccanatcccgatttccttagaaaagtatcccgtttttggaccataaccccgacattgctctagttcaagctcgttggagattcgtgaatgccgacgaatgcttgctaacaagaatgcaagagatgtcattggattaccatttcacagtagaacaagaagttggatcagcaactcatgctttcttcggttttaatggaactgctggtatatggagaatagcagccattaatgaggcaggtggatggaaagatagaaccaccgtggaggacatggaccttgccgtccgagctagtcttaggggatggaaatttctttaccttggtgaccttcaggtaaaaagtgaacttccaagtactttcaaggcctttcgtttccagcaacatagatggtcatgtggccctgcaaatttgttcagaaaaatggtgtgggagatcatcacaaacaagaaagtgagattctggaagaaagtatacgtaatttacagcttcttcttcgtcagaaaaatcattgctcacatggtcactttctttttttactgtgtggtcctccctttaaccattctagtccctgaggttaaagttcctata

SEQ ID NO: 8432 - DNA, 594 bp, Gossypium hirsutum
  Clone ID: LIB3828-010-Q1-K6-B2
cttttccagaaacgaaagcagctgttccccccaccattttcttcatttttagatctgctagggtttcaaaaggaacccatttcaccgccgtcgtcagaccgccaccgtatacggtggccgacgttcccaagtcacccttttttcggccgatttggctctccctacctcgttttaaaacccaaaactcttaaaaaataaaacaacagacaataaaccctcggtttcctcctccaatcttaagaaaggtaatgttttttttcttctcttttctttttattttcttttttcctaacaaaaacaagcatgaaagcaaaataatcaagaaaaaggaacaacctttttactattttttgtattttgatttctatgggaccttttttgtattgattttttgaatattcaagaatcccctcattcacaatcggttcccccctttttgaattcgaaaaaaccgcttttttaaattcggaaaaaaaacccccttaatacattcgtttcttctcggctttatagccggttacaatattacgaaaatcttatttatttttgtcattttcgtttgtctgcttctgtcttggtgtctgcttcattttt

SEQ ID NO: 8433 - DNA, 587 bp, Gossypium hirsutum
  unsure (1)..(587): unsure at all n locations; Clone ID: LIB3828-010-Q1-K6-B3
cgcagnattttccatcatttctcccgcaaaaaagcaaaagcgagtcccatggccactaggctcgccgctctccgtctcagatcccatctcctccgcaactgctcaactctctccaccctcagatctccaacgtcgatctctcaccccgcgccccttcccatctctactactcaccattacttcatgtctccaaccctccgtttcctctccacttccacccggcggatcccgacccgacccaaaaaagtcgacatcggggcccgagctcgccagctccagacccgccgcctctggacttacgcattaaccttcagttgcgtcgcgggttttgtagttttagtcctcaacaattttcaagaccaattagtcttttacgttaccccaaccgacgccctcgagaaatacacgaaaaacccatcgaaaacaaagttcaggctcggtggtctggttctcgaaggaagcgtggttcaacccagttcttctaaagaaatggagttcgtcattaccgatttgataactgatattctggttaggtacgaaggttcgctacctgatttgtttagagaaggacattccgttgtggttga

SEQ ID NO: 8434 - DNA, 586 bp, Gossypium hirsutum
  unsure (1)..(586): unsure at all n locations; Clone ID: LIB3828-010-Q1-K6-B4
cgatacgagnagccatagccaagcccaagtttcaaatggaggctcggagattggccattctctattctcatctttgccccttccgttcggcttccgttccatccctctcctccatcgtttctccttcctcttgcgctcctcagagcaaggaaacctttccacacgactgcgttttctgtcaaattattcgcggtgattccccggctttcaagctgtatgaagatgatatgtgcttgtgtatattggataccagacctttgagtcctgggcactctcttattatcccaaagtctcattttccttccctggacacaactccgccatctgagcgttcaggtggtagctgcgatgtgttcaaaagtgccttttattagcaatgcaatcatcaaagttactggtgctgattcattcaacttgttggttaacaatggtgtagctgctggtcaagttatatttcatacacatattcacataatcccccgtaaagcaggtgattgcttgtggacttctgagagtttgcatcggcggaccctaaaggtagaccaggaaacgtcgggtcttgcgaatcgagttcgagaattgctgc

SEQ ID NO: 8435 - DNA, 592 bp, Gossypium hirsutum
  Clone ID: LIB3828-010-Q1-K6-B5
ggaaaccattggaaaaaaggcaatacaattgcgaatcggcggcggcgtcttcctctcacggtggtctccgcagctagtgttggatagtaacaataggaatgggcggcggttggtaattgggggcgagagctgggagagatcgcgattcatcggccttgtccattgcaacagcagaagcagcaataatggtagcagcgatgctaaaaagggtgtccctaattcaaactacgttgtgccactcaacaagtcgttttcggcatcaaactcttcgtacatcactcgtcctctagttgaaatccttcgcgatctcaacaagcgaatccctgataacatcgtcaagcctccttctgattcttcttccacttttctcccttggtaccatgccaatcgcatgttgagcttctacgcccctggatggtgtggagaagtacgtgatgttatattctctgagaatggaactatcactgttgtatatcgactcactattcgaggatctgatggagaagcacatagggagtcaacagggacagtatcacttagcgacattgacatagaagatccagttggcgcagcagaggaaatagcattctgc

SEQ ID NO: 8436 - DNA, 593 bp, Gossypium hirsutum
  Clone ID: LIB3828-010-Q1-K6-B6
atctgagtaagccatttttggatgcttggaaagaagctgtgcctctgtaaccccatcaacagttgtgattcctaaagggacatatttattatcaaaagtaaacttagaaggtccatgcaaggctcctattgagattaatgttcagggcactataaaggctccggctgatcctggtgctttcaaggaccctaattgggttagattctatagtattgaaaatttcaaaatgtccggcggaggaattttcgatggtcagggaagcattgcttatgagaagaataaagatccccacaatcgtgcatttcgtgtcaaactccccgttaatataaggtttgactttgtgaccaacgcattgatacaagatataactagcaaagacagtaaactattccacgttaatgtttttgcatgcaaaaacattaccctcgaacgtttcacggtagaggcaccggcagatagcccaaacacagatgggattcacatgggcaaatcagacggcgtatattattggatgtgagattaaaactggtgatgattgtatttctatcggagatggcactaaaaatttggacataaaagatataacttgtgga

SEQ ID NO: 8437 - DNA, 593 bp, Gossypium hirsutum
  unsure (1)..(593): unsure at all n locations; Clone ID: LIB3828-010-Q1-K6-B7
atggctaaaaggtgatcgagcgatattcaagagacccanatttcaggttcctttatgaacgtgtctctgatctttttgctgcttgtcttaaatcagattggagtttttgaaatctaatgaaactagaaagatggtcttgctgcaaaatggtgtccttcaattgattcttcatttgataaatcaacattgttatgtgaaagcatttccaagaaaatattttctcgagaaaattatcctgaatatgaaggaatcgatgaagaacattatgcttaccgtgttcgtgatcggcttagaaaagatgtgttagtgccactgcgtaaaattttagaattaccagaagtatacattggtgcaaataaatgggattcaatcccttacaacagagtagcttctatagcaatgaagttttacaaggagaagtttttaaaacacgataaagatcggttttcgaagtatttagaagacgtaaaagccggtaagtcgactatcgcatccggtgcattactcccacacgaaataatcgctgaattaaacaaagccgacgacgaacaagttgagcaagtagcagagcttcaatggcagaggatggtgaa

SEQ ID NO: 8438 - DNA, 323 bp, Gossypium hirsutum
  Clone ID: LIB3828-010-Q1-K6-B8
ttgacctagcatcaaaaatgttggtagtccgccgctatttcataatttgtcgttattcctatgtatataacaacacatttattcacaagtcttaaatcaataaagttggagtcgatcttggttatgaattttaaataattttagccttgaaaacatttgatggactgttgttgacggggcatatcctccaatcgaactaagcacatctgcctttggtttcctatcgtatccttgtttgtaccttggttgaaagttaaagctctttcatcgtttgaaagtctttaccaagaaaaagcaaagctataataaagtattattcaact

SEQ ID NO: 8439 - DNA, 493 bp, Gossypium hirsutum
  Clone ID: LIB3828-010-Q1-K6-B9
gtattgatgacataagtagcaggcatggttattgttcctttacactggtttggctatgtgagagaacgtattgcgagcaaatgggagtgatattcgtccgtgaaccaacttatggttgaatcaatttctgagcttcagaaaagggcaatgagattgaatgagagtgatcttttaagagagtacactggacaacgatatgaaattgagatgcccatgacgtcttgggtgggaaaaataccagagtatcctcatccagtggcatcttccatatccagcagagtgatggtagagcttggaatggtaactgctgtaattactgccgcagcagttcttgttgtagggtttctagcagctgctgtatttgctgtcaccagttttaaatttaaatgtattacattacatattgaatcaatgtttatgtattaaacttaaattcattaatttttatatttagttttaaagttaaaattttaatagaaaatttaatttaatt

SEQ ID NO: 8440 - DNA, 611 bp, Gossypium hirsutum
  Clone ID: LIB3828-010-Q1-K6-C1
gtcctcccgcagaaaatattgcttagaaacacttgaattgattggtagtgtttcaagagagcagctctcatttctgcaagttggttaaaaaaaatcctgtatgcaatgatatatatatatacacacaccacataattaattctgtaatgttaatatcttaatggataacttttttttttcttttctgggtcagagagttgtgatggtgttattataaatacatatatcaagcttttgcaattagggaaaaaatgtcttcttgatcatctctgaatcgctctatgctcagattcgtttgaaataatatctggcgtcattcatttttataatttgataccgtatgaaaatagagtatctcactaatacaggcctttacatattataacaaattatatatgggtcttgatgaagatacataacacgttttggtttatagaaaatatttttgactgtttcctttaagattcccttttttccaggtgttcagcagtgggagctaagattttggccgagtttggtatggcttgactttgcaccaattcagcgataaaaagaaaatatgaaatatcaatcttttatgagaaactgcacagaaacatagatggaactgc

SEQ ID NO: 8441 - DNA, 604 bp, Gossypium hirsutum
  Clone ID: LIB3828-010-Q1-K6-C10
gtctaacgcattggttttcgaaatcgtgatgaccttcggattggtgtacacagtgtacgccacagccgttgatcccaaaaaggaagcttgggaacaatcgcaccattggcaattggtttcatcgtgggggccaacattttggcaggaggtgccttcgatggagcctcaatgaacccagctgtttcatttggaccagccttggttagctggacatgggataaccactggatctactgggtcggaccccttatcggtggtgggctcgctggtctcatctacgagttcatcttcatcagcaacacccacgagcagctcccaaccaccgattattaagcctaatcagggtttaattgatttgtctgtcactttgaaaccggattttctccgatctcatttgagtttcctatctctttccttgttttttgtgtttaatttgtggcccgtcgatcttgtttacttttttttcattccccatcctctatcatgatcatcatgcatggcagatgttgtttacaattgcatgccctgaaaaaatagtatatgagtgactcactggaagtcttttttcttatattattcaaaaccagcatcagggctgtaaatg

SEQ ID NO: 8442 - DNA, 602 bp, Gossypium hirsutum
  Clone ID: LIB3828-010-Q1-K6-C11
ctcctttgcaatggcgaaattgcttcttcttcccgaggcttcttcaaagcttaatttttacgattctatggacggtaagggctcagctcccgggcacatgggaacttctagtcccaaatgccggcgtagcctccatgcatacggcggttacccggtttaacacggttgttcttctggaccggaccaacatcggaccttcccgtaaaatgcttccgaaaggccactgccgtatcgactcgaacgacgtcgtacttaaaaaggattgcttcgctcattccgtcgttttggatctgcaaaccaaccaaatccggccgttgatgatactcaccgacacttggtgttcatcgggacagttcctccccgacggaacacttgtacaaactggaggagacttggacgggtttaaaaagatccggaaattcgaaccgtgtgaacctggagagttttgcgattgggtggagctgaaagacgtggagttagctaatggccgatggtatgcaacgaaccaaatattaccggacggaacggtaattatcgtcggagggagaggaacgaacaccgtcgagtactatccgccgaggaaaaacaagaacggcgcaatt

SEQ ID NO: 8443 - DNA, 607 bp, Gossypium hirsutum
  unsure (1)..(607): unsure at all n locations; Clone ID: LIB3828-010-Q1-K6-C12
acaatggccgcatcttcacttttcgaaatgcaacaccggttctctgaaccagtaaagaattggntctaactccaccggaaaactctctcattggcctttaaaagattcttttgaatactacgccgttttagctcaccgggatcgtctcctacgtggccgtaaactctccggtgctaatacaaccctttctttcgctgatggcaacttcactttccaaatcaactctttgggatttttacattatacaacagttcaattaggcaccccaggggtgaaattcatggtggcacttgacactggaagtgatcttttctgggttccttgtgattgtaccaaatgtgctccaactgaaggcactgtctatgcttctgatttcgagcttagtatatatgacccgaaaggatcatcgaccagcaagaaggtcacctgcagcagcagcttgtgcgcacaacgtaaccaatgtctcggaacattcagtaattgtccttacatggtatcttacatgtcagctcagacttctacttccgggattctagtggaggatgttcttcacttaacaaccgaagacggtcacccagattctgttgaggcatatgtcacatttggg

SEQ ID NO: 8444 - DNA, 602 bp, Gossypium hirsutum
  Clone ID: LIB3828-010-Q1-K6-C2
ctttatttgtttgtttgttctatttcttgggtttgtgtgtaaattttgttactctcccttttcgttcaattcgaagtttttctcagataccatttgttgaagaaatcaacagcttataggtccctagaaaagacaagtttacacttgacaaaagtttgggtttatgaaaccaaagcagaaaggggactcaccagctgactctgacacaatgacacctgctcgaaggactacttctgagccggcaatgttggtcccagagtcaatcgaagatgacaatgtgggaagaaaaaacaaagctcagcatccactagggcatcaccagcaagaaacaatagagacaaatacaaggacgatttccgtgactccggcggactagaaaaccagaccatggaagaccttgaggggtatgctgtctacaaggccgaggagacaacaagtactgtcaacaactgcttgaagattgctgagaacatcagatcggatgctacaaagactcttgatactttgcatgcacaaggagagcaaattgaaaggacccaccaaatggctgttaatattgacaaggatttgaataagggtgagaagcttttaaataatctagg

SEQ ID NO: 8445 - DNA, 600 bp, Gossypium hirsutum
  Clone ID: LIB3828-010-Q1-K6-C3
tccgaagggagtggcagtggaagtggccgctagcagcgatcctaacccggagggttccgatgagcagcagaaacgatccgagatatacacttacgaggccccttggcatatctacgccatgaactggagtgtccgccgcgacaagaaataccgtctcgccatcgccagcttgctcgagcattacaacaaccgccttgagattgtccagctcgatgactccaatggcgagatccgatcggacccaaatctctccttcgatcatccttatcccccgaccaagaccatcttcatccccgacaaggagtgccagaaacccgaccttctcgccacgtcctccgacttcctccgcatttggcgcatctccgatgaccactcccgcgtcgacctcaagtctctccttaatggcaataagaacagtgaattctgcggtcctcttacctccttcgactggaatgaggcggagcccaagcgaatcggcacctcctccattgatacgacttgtactatatgggatatcgagagggagacggtggatacccagcttatcgcccacgataaggaggtttatgatattgcctggggcggcgtcggtgtttttgc

SEQ ID NO: 8446 - DNA, 584 bp, Gossypium hirsutum
  Clone ID: LIB3828-010-Q1-K6-C4
attggttaaacatatagttgattcattttggaatcagttggtaaggtttgagcacttgccttctcttcagtcgttcaaagtcaaatacaagcagttcttggaaaattgtggacccgaaatgaatgttaatgcaccggacccaagaaaacggattgatgagcgtgctttggagaaagaagaggaagactattttaatgaggagagtgatgaagaggatacaacatctggatctcatcctgagaaagtgcaatctcagcctgttttatccaatggagttgctgtcagctgcccatcgtcatgccctagatctggtgggcttgttgactatgatgatgacgatgaagactacagaccacctccaaggaaacagactgaaaactcggaggatgatgaaggaagcatggagtcccttggcttgaagcgtaagttgactcctaaggaaaaggaacctgggctagctaagaagcagcgtttgggtaaaagctctaaaccaagagatagtgtatttgcggctttgtgttcaaccctaagccaggcagtgctgcctagtaagaaaaccgcaaatgccatgcatttatctactc

SEQ ID NO: 8447 - DNA, 604 bp, Gossypium hirsutum
  unsure (1)..(604): unsure at all n locations; Clone ID: LIB3828-010-Q1-K6-C5
ccagttcacctaanaagtgaccaaanatgaattggggaatgtagctgggatggctgctacatctacagccagtggtgggaaattcgataggaaattgccaggagaaaagcctgctaaaaagcaaggaaagcatcgcaagttcttaccagttgttgaagggtcagggataggctcaagggagaaggagcaaactgagaatgttctaaacaagctaatctctaagcattcacatgagatactcaacgttgacaaggctgttacgatgtataatgtgaaaaaagagaagaaagctagaaatagaaagaatcaagaagggaggtcatcatcaacctcaaacgagttgaaacccaaaaagcaacttcataagaagggtgcaaagagaggaccaggatcttcaaggaaaggcaaggcctaataaaattattaggttcaaaaattctggtaagcttgtagagatttgggatatcaattttgttaacaagagagttatttgtaccaaaggttctatttgttgagacaggtttaagttattacattatttgatctgcttatatttgttcaaggaggtttagatagaaaacgaaagggtctgtttgaaaaatgg

SEQ ID NO: 8448 - DNA, 602 bp, Gossypium hirsutum
  Clone ID: LIB3828-010-Q1-K6-C6
ataagtttggcccctccacctatttccaattggttttagttcagacgtttaaccattccttttgcacaggaccacaaccatcagtacattttatttcaatctatgttctatgagcattgcaacagtaaaaaccataaatcgaggaggcagcgtgcctttagtaagaaagtgcaaaatataaaactataaaggttaattttataaaaagttatctagaaatcaccctgagcaaagtcagtataagcccctaaagttgaaggaacaagaattttagatttagcattgtgtacatcattttgccagcatttgccttttgtgagatgtagatgatagataatccaaaattccaaatgctaggaataaaaattatgtagtacaaaccgatataaggataataaatgaagctccagctgcctaattagccaattaacattgatagttgacttattggagagagtggtaatttttgtagtctagagctaaacaaattattagcccttatctggctatgctaatgagattttgctaatacattcagaagattatgtagtatttgattctgataaatccatgtttgaaatggtattagattctagatttgc

SEQ ID NO: 8449 - DNA, 577 bp, Gossypium hirsutum
  unsure (1)..(577): unsure at all n locations; Clone ID: LIB3828-010-Q1-K6-C7
gttttcaagtatgataccattcccgatgagcctccaagtgacaacactaaggtaactttggcacctattgtcctcaacatgacacacagaaactttgtggaaatcatcttcgagaatcacgagaccgccattcaatcctaccacttgtctggctactcattctttgctgtgggcatggacgttgggaaatggagccccgagaagaggatgaactacaatcttcttgacgccgtgagcagacagaccatacaggtattccccaactcctggtcagcaatcctattgacattcgacaactgcgggatgtggaacctgaggtcggagatatgggacaggcattaccttgggcaacagctttatgctagtgttatttcccctaaccgatccctcaaggatgagtacaacttaccggaaggtgtattgacttgcggcatcgtgcaaggcatgccaaggcctccacctttcagcagttaatttaaataagcttataaatctgtatccaattctggtataaatacataatatgggngagagagagagggtgagaaaagcttgagttcccaatggatttaatgaa

SEQ ID NO: 8450 - DNA, 601 bp, Gossypium hirsutum
  Clone ID: LIB3828-010-Q1-K6-C8
tgtagcatcaaattcatgggcgagaaaggcatcgtttcacgctccgctgcctcctctctccgtctccgttccggcatgggtctccctgttggcaaacatattgtgcccgacaagcctcttcctgtaaatgacgagctaatgtgggacaatggaactgcctttccagaaccttgcatcgatcgaatcgctgatactgtcggaaagtatgaggcattggcttggatgtgtggtggtttgagcttctttgcatcgttgggattcttagcttggtggaatgataaagcctctaagattccatttgcacctaaagtatatccatatgacaacctgcgagtggagcttggtggagaatcataggtagatctgtatgagcaattgtacggttcttgttgtcacttgtctccccatgtgtttcattttacttctggaactctgaacagttgaataatggattgtgggtttgttgctgaagcaaacattttgaacaaatatgcatttcctccttgtcattttaggattggtgctaaatcatgagagaatcagaatatggtgtgtgtgtgattattggtgctaagccatttttatgttcatcaatgaatgg

SEQ ID NO: 8451 - DNA, 417 bp, Gossypium hirsutum
  Clone ID: LIB3828-010-Q1-K6-C9
cgattctctcgttcaatttcaatcgtggttcttcttatgttagttcttctaacaacagagatgggacctgtggtagcggatggtgataagatatgcgagtccccaagcaatgcattcaaggggttgtgcttacgtgatgacaattgtgatattgtttgcaagacagagggttttcctaatggagattgcaaaggtttccttcgcaaatgcgtctgcactaagccttgttaaatgagcaatctattaatatttcattatacttaaaagattacccttgttcctcttgttatgtgtgtgggtgagagttgagagaatagaatatcaacaacatatttcctacgaggaaatttattattattgaatatatctataattttcttttgttgcatatgaatgaacttctaaattaattctctt

SEQ ID NO: 8452 - DNA, 612 bp, Gossypium hirsutum
  Clone ID: LIB3828-010-Q1-K6-D1
gttctgagaactcatttacacccatgagacacattgaagatgttgagaagtatgccaattcaaacattcaaattcatacttttaatcagagccaatatcctcgtctggtggctgaagattttactccatttccttgcaaaggccagcctggcaaggatggatggtatcctcctggtcatggtgatgtgttcccagctctaatgaacagtggcaagcttgctactttcttatcacaggacaaggagtatgcatttgttgccaactcagacaacttgggtgctattgttgacttgaaaatcttgaaccatttggtcaaaaacaagaatgaatactgtatggaggttacacccaaaaccttagctgatgtgaagggtggtactcttatttcttatgaaggaaaagttcagctccttgaaattgcacaagtccctgatgcacatgtcaatgaattcaagtctatagagaaatttaaaattttcaatacaaacaatttgtggctgaacctaaatgcagtaaagaggcttgtggaagctgatgcactcaagatggagataattccaaacccaaaggaggtcgagggaaccaaagttcttcaactggaaactgcagctg

SEQ ID NO: 8453 - DNA, 623 bp, Gossypium hirsutum
  unsure (1)..(623): unsure at all n locations; Clone ID: LIB3828-010-Q1-K6-D10
ctggagatcgttcgaagaaatcctggnacccaagtggagacggggtctgctattacnttggaaatacccaagtgttgttttggaaggtgataatacggtgggcgagttttactctgtagcactcacaaataactatcagcaggcagacacgggtacaaaaatgatacacaaagggaagaatacaagaagtaggattatctcaaagggtatttctgttggacattcaagaaactgttatagggggcttgttcaggttcaatcaaaggcagagaatgctagaaattcatcacaatgtgattcaatgcttatcggcgataatgctgctgcaaacacctacccttacatccaggtcaagaatccatcagctcgtgttgaacacgaagccagcacctccaaaattggtgaagatcagttattttactttcagcagaggggaattgattatgagaaggccatggctgccatgatttctggattttgccgtgaagttttcaatgagcttcctgatgaattcggtgctgaggtgaaccaactcatgagtctgaagctcgagggatccgtgggttaagtatgatgaaggttttattcaatcgaggccatgttggacaatgaaaaattttgtc

SEQ ID NO: 8454 - DNA, 602 bp, Gossypium hirsutum
  Clone ID: LIB3828-010-Q1-K6-D11
atccccaaacagcccttcacccaccaaaaaaaaaaaaactctctagtttattacctctctctctgcgaggctcttttgagccattgcatgagattgattatctttaaacacaaaaaaaaactctaaagcttttcttcacaccggcagagagagagagaaagagagatcaagcattttatatacaaatagtttttaaaagcaaaaggaagaataatggcagtagttcccatgggttgtttagtcgttatattcgttgctattgtttgctgtgctattatcaccttgcctgcttccattcaagcccagtcctcttccccaacaagcgacggagggaattcgatagaccaagggattgcatgcatgttgatggtggtggcattgttgctcacttacctcattcatgctattggaaaaatagggttttgtgctggcttctattttttaatttaattattttattttagttaaagctaagggtatttttttttgagggttgatgtgtttctttcttcaatctgatttgaggactaaatgatttgtaaataagagcattatgtgattttagtcgaaaattattttgttcgagcttgataatctcaaaa

SEQ ID NO: 8455 - DNA, 609 bp, Gossypium hirsutum
  unsure (1)..(609): unsure at all n locations; Clone ID: LIB3828-010-Q1-K6-D12
cttgtgggtgggaagaattcctggtgcacttggnaaatggaagatggtacgcaacccaagtaaccttaggcgatggtagattcatggtgttcggcggtcgagatttcccaacatatgaatttgttcctccacaaggccagaaaaacacccttaaagagtagtcgattttaatttattggtggaaacacacgatccggtggagaacaatttgtaccctttcgtttacctttcgactgatggaaatgtcttcatcttcgctaacaatcgttcggttcttttgaaccctaacacccaaacgatcatccacgagttcccagtgctccccaatggtgctcgtaattatcctgcgtcaggaagtgcttgcctccttccgatcatgctcaagcctaatgaagatcgtagagtgatccccgccgaggttttgatatgcggtggcgcatcacatgatgcgtacgccaaggccgatttgcaacgtcctaaagtgtttttgccagggaacaccgactgtgctcgccttgatatcaccaaaaggaacggcaaatggaagatcataaacatgccatcagctcgtctgttgggagacatggccgttttaccaacaggagatgt

SEQ ID NO: 8456 - DNA, 597 bp, Gossypium hirsutum
  Clone ID: LIB3828-010-Q1-K6-D2
tggcatcatccgttacaagaatggtaaggggagctgcctcatccgagttgccaccaccacctgtaggttgggccttggtcactcaatcaattccgtaccttccgttggaacttgacttctaacgctgctaggcctaaccctcagggctcctacaaatatggttccattaacattacccgcaccatcaagcttgccaacactgcacaaaaagtagatggcaagctccgatatgctcttaatggagtctcctatgtcgaaccaaccactccactaaaacttgcagaatactacggcgtagccgacaaggttttcaagtatgataccattcccgatgagccacaaagtgacaacactaaggtaactttggcacctattgtgctgaacatgacacacagaaactttgtggaaataatcttcgagaatcacgagagcgccattcagacttaccacttgtctggctactcattctttgctgtgggcatggacgttgggaaatggagccccaagaagaggatgaactacaatcttcttgacgccgtgagcagacacaccatacaggtattccccaactcctggtcagcaatcctattgacattc

SEQ ID NO: 8457 - DNA, 314 bp, Gossypium hirsutum
  Clone ID: LIB3828-010-Q1-K6-D3
actctctctccctctcatcttcttctgatgatcgggttctctcgctgcccgccgcaccaccactgcattcggtggccggctacgcgcaaaatgggcattccaaccccatttcaaagcccctttgaaggccaaaccttcagcgtcctataagaaacaaaagaagagaaccctcacccccctttcgaacccgattgcaacgacggagaaagctttccgacgacacgtccgtggagattcaggtgtcagaggcgtgggtgaacagtggttggcgcgtgaggtggctgagcatgcgtggggaggccaatggtgggagc

SEQ ID NO: 8458 - DNA, 617 bp, Gossypium hirsutum
  unsure (1)..(617): unsure at all n locations; Clone ID: LIB3828-010-Q1-K6-D4
gttctttgggcctgatgacttctgtgtntgctgtcatnnctgatgggaaaacactagaagctgaggcagctcatgggactgtaacacgacatttcaggctacatcaaaagggacaagaaaccagtacaaacagcattgcttccatatttgcatggacaagagggctggagcacagagctaaactagataaaaatgaaatgttgctggactttgttcagaagttagaggctgcttgcatcgagacagttgaggcaggaaaaatgacgaaggatcttgccattttaacccatggacccaaggtaactagagagttttacttgaacacggaagaattcattgatgctgttgccgtaaatcttgacttgaagcttcaggaaccagctctgtgcaagtagacacttacattaagttgttcaggtaatttccaacatttgaagacattttttatggcgcatgacaaggcataaaccacaaactgaatgttgaacctattcttgaaatgccaagagcactttggaatcaattggatgtacatttttatgaaactggtacattttgtagtctccagctatatgttagctagagtcgggggtggctgtaggatataaacatgcatc

SEQ ID NO: 8459 - DNA, 597 bp, Gossypium hirsutum
  unsure (1)..(597): unsure at all n locations; Clone ID: LIB3828-010-Q1-K6-D5
gtggtcgtcctttaggaagaccgnaggtatacttcttaatggtaaagctggtaaagttggggttaaacaagaaccacttttcaccatggaaccaggcaagacatataagtatagagtctgtaatgttgggcttaaagcttcacttaattttagaatccaaggtcataagttgaagcttgttgaaatggaaggttcacatactgttcaaaacttgtatgagtccttggatgtacatatagggcaatgcttttcgatccttgttgcagctgatcaagacccaaaagattattacatggtagcatccactcggttccttaaagaagtacaaacgaccacagctatcattaggtacaaaaatggcaaaggtgaagcttcaacggagcttccacctgcacctattggttgggcttggtcattgaaccagtttcgtactttccgatggaatcttaccgctagtgctgctaggccaaacccacaaggatcttaccgttatggtgctattaacatcacgcgtacaatcaggctagtaaacagtgttagcagagctaatggtaagcttcgttatggctttaatggtgtctcacataccgacccaaa

SEQ ID NO: 8460 - DNA, 518 bp, Gossypium hirsutum
  unsure (1)..(518): unsure at all n locations; Clone ID: LIB3828-010-Q1-K6-D6
cggncgcgtgggcggacgcgtggngaaaaattacgcaaggctaaacgtgaggctccacctggtgagaaacccgagccagttaggacacacctccgcaacatgattatagttcctgaaatgattggtagtattatcggtgtttacaatggaaagaccttcaatcaagtggaaatcaagccagaaatgattagccactatttggctgaattctcaatctcctacaagccggtaaagcatggaagaccgggtattggtgccacccattcatccaggtttattccactcaaatgaaaaagattatgcatgtgtctttattcttggtcttgttggaatgttttgttattgaattttgatcaatgtgtctagtgttgatgcttctcttttgagtattcaatttagaaaaggactctgtcaagctttgcatttctttcctatttccccctattctgaactattactaaaaaaattaaggtttttgttattgaattttgatcaatgggtctggcctggctttgatg

SEQ ID NO: 8461 - DNA, 385 bp, Gossypium hirsutum
  Clone ID: LIB3828-010-Q1-K6-D7
accaaatcggcttacgagaagctggacacaatttacgggtcatttgataagccttctgagaagaagaagggtacgtactgcctcgatctaagatggtgaacgctgatctgggtaggattatcaactctgatgaggtgcagtcggttgtgaagcccattaagaaggagatcaagagggcacctttgaagaagaacccactcaagaacttgaatgctatgctgaagttgaacccatatgcgaagactgctaggaggatgtctcttttagccgaggcacaacgtgttaaagctaagaaagagaagcttgacaagaagagaagcccatttctaaggaggaggcaacagcaatcaagtcagcaggcaaagcatggtatcagactatgatc

SEQ ID NO: 8462 - DNA, 371 bp, Gossypium hirsutum
  Clone ID: LIB3828-010-Q1-K6-D8
agcctgacctttgatcctatcgctgccattggaattgaaatgtggacatacgcaagacggcatatgaatagacaatagttggatagccaaaaacgacaaggccgctgagatcatatcgaaagcaccacatggaagaccaaagtgtgaggctgagaatgaaaaacagaaggctgacgatgaagctgccgattctgacaggctcgcatactttcagaggaaggtttttgatgccttatacaaggttgctgacattcctttcttaagcaaatacaagcatcaaattctcgatcttattgaacatgctgagacacagccgaacctcaccattggtgtcttggtctctattgtggtgattattctcacgattttct

SEQ ID NO: 8463 - DNA, 608 bp, Gossypium hirsutum
  unsure (1)..(608): unsure at all n locations; Clone ID: LIB3828-010-Q1-K6-D9
cattcttccaatgcgaagaacctgacttttctctcatggnaaatctattgcggccttgcaaaggaatattactttttggtcctcctggaaccgggaaaacccttcttgctaaggcactggcaacagaagcgggagccaactttatcagcataactggttctgctcttacatcgaagtggtttggagacgctgaaaagctcaccaaggcccttttctcttttgctagcaagctggcaccagtcattatttttgttgacgaggttgatagtttgctgggtgctcgtggtggtggttttgagcatgaggcaactaggagaatgagaaacgagttcatggcagcttgggatggattaaggtcaaaagatagccaaagaatcctcatccttggtgccacaaataggccctttgatcttgatgatgctgttattcgtcgcttaccaagaaggatatatgttgacttaccagatgctggaaaccgcatgaagatactgaaaatatttcttgcacaagagaatataggatgtaatttttcatttgaagaacttgcaaatgcaactgaggggtattctggcagtgatttgaagaacctctgtatagctgcagcgtac

SEQ ID NO: 8464 - DNA, 194 bp, Gossypium hirsutum
  Clone ID: LIB3828-010-Q1-K6-E1
cttagatgttttggatgattttagtattacatatcgtatggtcttgataggttacatacaacatgtatctaggtcattaagaagtattgtggagtcttaatgacgttttgaacatgtcttggatgttttggatgattttagtagtacatatcgtatggttaatgactaattttgcacaagttgatagttgattc

SEQ ID NO: 8465 - DNA, 157 bp, Gossypium hirsutum
  unsure (1)..(157): unsure at all n locations; Clone ID: LIB3828-010-Q1-K6-E10
gcggnacggcgccctttttttttttttttattattcttaataaagttattcttaatcctcataaaggtatatggtatttctacggtcctcatttgggctcttcctgcgtatgtaattatatctatcggagaaatccatatacctggatgaggatcaa

SEQ ID NO: 8466 - DNA, 583 bp, Gossypium hirsutum
  Clone ID: LIB3828-010-Q1-K6-E11
cccagcgtccggaaagaagcggcggagagaaaagaagtggggagaagaaagaagcggtggtgaagccaagatggaggtgagcaagatggagtatcatggatatgcgtatccaccgcagccaatgtactggtcgggtggacaggagtacggtggtccgagttatgcgattgagggatataggaatcagcagcagtacggatacgtggatcgagggtatatgcatccgcatcctgtatatgtgaatcaagggtacatgattgatccacgtcatccacttcacgcacctcagatgttcagtgacgaaaatccgaacgcctgttctgtcatgtgagggaaaaattaactgtgcaggatgaaagatgagatcccaaaaaataaaaatgacaaatgtaaataacagaactttctagggagataaagtaaatagagagccaaaaaatgaaccatataaacggcacgtaataggctagaggttttaaggatgaaccggctagagccggcttggctaggagctggggtggtgttgttggttgcttcttttgtctaaattttattaattggggtaatggaaataactttttct

SEQ ID NO: 8467 - DNA, 401 bp, Gossypium hirsutum
  unsure (1)..(401): unsure at all n locations; Clone ID: LIB3828-010-Q1-K6-E12
gtaattatgggtgatactggntcatcggccctcggtggcgcattagctgcaatggccgcttgtactggaatgttctttcccttattcattgcatctggtttgtttgttttggaagcatcatcagttgttatgcaggtggtatactttaaagcaactaaacagtatcatggaagcgggagtcggttgtttaagggcacctttgcatcatcatctagaactatgtggactccaagagccaatgattgttgctggtgcatatgctgtttcctctgtgttggctttatgtgctgcttacataggccttaaatctgcataatatctttacatcattttcaccccatcttcaaattttgttccccttagttatattagtcataaaaaggtgttcttttcttcctctc

SEQ ID NO: 8468 - DNA, 606 bp, Gossypium hirsutum
  Clone ID: LIB3828-010-Q1-K6-E2
cgccgtccgcaagaccctcggctttccaaatttcttctgcgattcgtgtcatccctgacttcccaaacctgggataatctttcagacacaacactttgcttcttgataccaaagcatttcgtgatactattgatctgtttgttgagaagtaccagaggaaaagatatatctgtcgttgcaggtatagaagcaaggggattcatttttggcccacctatagcattggctattggggcaaagtttgttcctatgaggaaaacccaataaattgccgggggaggttttatcggaggagtattctttggagtatggaaaggacacaatggagatgcatgttgatgctgtcaaagcaggagaacgtgctttgataatagatgatcttgttgccactggtggaaccttgtctgctgcaatcaggctactcgaatgcgtaggggtgcacgttgtggagtgtgcttgtgttattgaattacccgagctaaagggacgggaacggttaggagggaaaccactgtttgttcttctaagctccacttgatcatcttacatattttattgtgcaagagcttgtttattggccttcattgagtgttgcaacatggctag

SEQ ID NO: 8469 - DNA, 421 bp, Gossypium hirsutum
  unsure (1)..(421): unsure at all n locations; Clone ID: LIB3828-010-Q1-K6-E3
ttttctcccactcagtctttggaacttggtagtctttcaaggctctgctcagagaatatacctcagcattctccactttgacatcggaagccgcatgttaacagttttgagatgagattccaaaagtcttttgagtaaaaaaaagcttaattgcttttattgatgttgtgaatataattagatatatagtgttagagtttacttctttccctagttaaacacttgtaactagtaaatatgtatgatattcttacgtgtaaactgataagtttttccctcaaaaaaaaaaaaaaaaaaaaaaaaaaaaaaaaaaaaaaaaaaaaaaaaaaaaaaaaaaaaaaaaaaaaaaaaaaaaaaaaaaaaaaaaaaaaaaaaaaaaaaaaaaaaaaaaannnnnggggggnaaaaaaaaaaaaaacca

SEQ ID NO: 8470 - DNA, 600 bp, Gossypium hirsutum
  unsure (1)..(600): unsure at all n locations; Clone ID: LIB3828-010-Q1-K6-E4
tttttcaagtaagggtaaaaatgatgggatggtagtggtggtaaaaagaaggttcccacaatggaaatggaggcaatggtggtggtgngaaacaataatggcaatggagctaaaaaggtggaggcaaaatggtggtggtgggggccatgagatgatgaacaaaattaaaagtggtgggtttcaagacattgatgttattaatcatggcaaaggaggtgggggtgggggtggtgccggcggcggcggtaagaatatggggcagatgggccaaatgggtggtcagatgggtcacatgggtccaatgggtggtcagatgggttataacatgggccaaatgggaaaccatccgatgaaccagatgagtaattttgctgcagtgcaaggactaccagcagcaatgaataatggtggtgggtattatcaagggatgggaccaggaaatccttataatcagcctcaatatatggcagccatgatgatgaaccaacaacgtgcaaatggagggatgtatccacccatgatgtatgctcatcaaccatatccccaaccaaattatggacctccacccatgcatccacccccatctgaatcttatgctcc

SEQ ID NO: 8471 - DNA, 612 bp, Gossypium hirsutum
  unsure (1)..(612): unsure at all n locations; Clone ID: LIB3828-010-Q1-K6-E5
gtccgcaggnatgnaaagtggnaaacatcaaatgcacacccatatactcgagaatagtctcattgtatgctgaacaaaatgagctacaatatgccgttccaggaggtctaattggtgttggaacaactatggacccgactttaactcgtgcagataggttggtgggtcaagttcttggagaggttgggtcactcccagaagtgtatgtcgagctcgaggtaaatttcttccttctccgaaggcttcttggtgttaggacaaagggttcggagaggcaaggaaaagtgtcaaagttggccaagggagagatcctaatgttgaatattgggtctatgtcgaccggtgctcgagtcatagctgtaaagaatgatttggcaaagctgcaactcacgtcccctgtatgcaccagcaagggagagaaaattgcacttagtcggcgtgttgagaagcattggcgtctaatcggatggggccaaatccaagctggaacaaccattgaagtcccaccctgccctgtttaagaactgataaacaggtaaacagaaagcaaaaacatctataagaaaaaaaagagggcagaagaatcaaattttttgttgttgaaaatgtggg

SEQ ID NO: 8472 - DNA, 603 bp, Gossypium hirsutum
  unsure (1)..(603): unsure at all n locations; Clone ID: LIB3828-010-Q1-K6-E6
ctttttcccatttcgtcaatcgcggcattcaatcaaaanaaacctttgtttagttacatggaaatcgggcctttcacatttctttctcctgaagatttttcttttaacaacaactacaacagcgatttctcttggtttttggatatggaaactgggttcaacggaaacaccaagaagaggggtagaaaagactttgaggaatctcttgtcagcgaaaagagtgggtttggtgatatactttcctcgattttgatgttggatgaggaagcaaagcaagagcagtatcaatgggtgactaaccctgatcaagatagagctttcttccaagccaattacaagggaaatgttcaggaaatgaatgggtattttgaaaaccagttttctgaaatgaaccagttggataattccagtaacaaacgcgcccgcaaatctggttcacccgctgcggctgcgacggtttcagccgggtccgataatgtgggtccatcgcaatcgggcagcggatccggacagcaaaggcggttatgggtcaaagaccgatccaaggactggtggactaagtgtaaccacccagatttccccgatgaggagtttaaacgcgct

SEQ ID NO: 8473 - DNA, 596 bp, Gossypium hirsutum
  unsure (1)..(596): unsure at all n locations; Clone ID: LIB3828-010-Q1-K6-E7
ggnagctatttatgcttctggccattggctaaatcggaactcagtcgtggcgtgttggcaaacaacaaaatgttgcggataatggcaatgatatcttcaaagttattgactgggagtcgttggtgattctgcctcggtacgttgctttcaaaggaaacaatgatatgttccttcgtcttacccaggtcgatggtcacccatatttagaattctcgagtgcggatgttggtgctggatctgtgccaatggaggttttttatatgaagaatggagacatccggttcaagccagtttcttccgataagttctggaggcgtagcccgaattggatttgggtggattctaatgacactaaaggcaccgataaggacactcggtttcgtgccttcaaagtcgacaacaagacaatagctctgctcaacttgggcaataataagttctgcaagcgcctcacgatcgagggaaagacaaattgccttaatgcagcagtcccttctattaccagagaggccttcttaatggttcaagagcctgtgttgtcaagccagatttataatctccgatacgatattgaatatgctcgagtctataacaag

SEQ ID NO: 8474 - DNA, 605 bp, Gossypium hirsutum
  Clone ID: LIB3828-010-Q1-K6-E8
cgaatatgtcgagctcggctgactctgagaggaagaagcggatcgctataatcgtggtctcctctttcctcttggtggccgtagtggtggcggtgacagtcggggttaccatccaagaagaggacagcgactacgacgacggaaccacagatgggaataaacacgctcaggttacttcctccaagaaggctatcaaaatgatttgtcaaccaaccactttcaagaaaacatgtgaagagcagctccaacatgaagctgggaacaagaccgatgttaaagacctgattcaagcggcgtttaaggcggccatgaagtacgtggagcaagctcaggcgaattccacccttttgagggatctggagaaagatgaagggactagaagtgctttagatgcctgcaagattttgttgaattctaccatgagcgaatttaacaagtcacttgaacttgttgacaagatagaagttaatacggtgaataaattgttgggtgatatgaagatttggttgagtgctaccattagtaaccaacaagcttgtatagatgggttcgaaaaaaccaaatcaaaaacggaagctggggagaaaatgaagaagttcttgaac

SEQ ID NO: 8475 - DNA, 604 bp, Gossypium hirsutum
  unsure (1)..(604): unsure at all n locations; Clone ID: LIB3828-010-Q1-K6-E9
cttggctgctgatgttacagattacatgcttcaanagaccttcagggcacactttccttcggtgaagggtgcaaaggttgtgattgataggatcactgggcgcacaaaagttatgggtttgtcaggtttggcgatgaaactgaatataatcgtgccatgactgagatgaatggtgctttttgttcaactaggcctatgcgcatagggccggctactaacaagaagactggtgctgcacagcaatatccagcagcttcatctcaagggactcagaacgagaatgatccaaataatacaactatatttgttggtaatttggattctaacgtgactgaagaccatttgagagaggtcttcagcccatatggtcagttggtgcatgtgaagattccacaaaacaagcgttgtggatttgttcaatttgctgataggagttgtgccgaagaatctctccgaatattgaacgggactcagttgggtggacaaagtattcggctttcatggggtcgtagcacatcaaacaagcaggcccaagcagatccaaaccagtggaacgctggatattatggatacagccaaggatatggttacggctatggcgctg

SEQ ID NO: 8476 - DNA, 191 bp, Gossypium hirsutum
  unsure (1)..(191): unsure at all n locations; Clone ID: LIB3828-010-Q1-K6-F10
attctttgctttcggncgtgtattttctgaccttcataccagttgcaactttgccagaaaatacacgtccgaaagcaaagaatctgccgcgttgagaagcacgagtcatcttggactggcgcacgcgggtcgtaccagctaagcctctcgtgggtcgtatgacatgaactacgcgtccgaatggctggaat

SEQ ID NO: 8477 - DNA, 596 bp, Gossypium hirsutum
  unsure (1)..(596): unsure at all n locations; Clone ID: LIB3828-010-Q1-K6-F11
gtcttcccataaaacagacanagaagtaaacccaagtttgaaaaccatcaaaatggttcaaaggctcacttaccgtactcgccatagctacgctaccaaatccaaccaacaccgtgtcgttaagacccctggtgggaaattggtctatcagacaactaagaaaagagcaagtgggcctaagtgtcctgtcactggcaagagaattcagggtattcctcacttgagacctgctgaatacaaaaggtctagattgccaaggaaccgccggactgtgaatcgtgcttatggtggtgttttgtcctgcagtgctgttagagagaggataattcgagccttcttggtggaagagcagaaaattgtgaagaaggttctgaagatccagaagtccaaggaaaagcaagcttcaaagagctaagaaattagatgtcgaatcatcatttcaattctgatatgtgatcagcaaggctttggaaagtgccaccaatgacttcagaagattagaggttctctttttctattggcaaatggacttcaatgtttacaatgttttgataattttggattacgttttgatcatcgaatttaaaaaaaaatat

SEQ ID NO: 8478 - DNA, 609 bp, Gossypium hirsutum
  unsure (1)..(609): unsure at all n locations; Clone ID: LIB3828-010-Q1-K6-F12
cccattcctctctaacacatacaanaatcttcacatggcaaatgcatctttgtaaatggagcaaatatcatttgctcaccacaccacgctgtagccagctcaaatatacacctagataaaccacgtttctgcttgttgatttgcagtgggaaaaagggagattaattcacgctgaatgtaacttattacaagtcatttgtggcataaacagattcatgtgaggatgtagtgatagaggattgctacatatgtgttggcgatgatgcaattgcaataaagagcggttgggatcaatatggcatcgtttatggacgaccttcgagaaacattctcatccgaaacctcattgtccgttctatggtcagtgctggcgtatcaataggcagcgagatgtctggcggggtatctaatgtcaccgtggagaatgtcactgtctggagttctaggcgtgcagttcgaatcaagactgctgttggaagaggtggatatgtcaggcatataacgtaccgaaatctgacatttgatgatgcccaagttggaattgttatcaagacagactacaatgagcaccccgacatggattttgacaaaaatgctttcccaatactc

SEQ ID NO: 8479 - DNA, 595 bp, Gossypium hirsutum
  Clone ID: LIB3828-010-Q1-K6-F2
gttcggtgtgtgatgtttcagatcaaacctcaaagggagaatctgttaaacactgtttcctcagaattcaacgggaagcttaacatcctgataaataatggtcggaacgaatacaacgaaattggtgacggattacacggcggaagatgtttcgtttttgacgagcaccaacttcgaatcggcttttaaccacttagtgtgttggcatatccccttttaaaagcttcaagtgctggaagcgttgtgtttgtgtcttcaattgctagtctattacccgcatactttggggctatatatgcttccaacaaagctgccatgaaccagcttgcgaaatacttgtcatgtgattgggcaagagataatattagggttaatgctattttaccttcggtcgtcaaaacagccctctttgacgagtgtttcgaagctaataaagaaggattagaggcaaccctaaaccgaacaccattaggacgggttggacagccaaaggaagtgtcacctatggtggcgttcctgtgcctaccagcggcttcatatgtaacggggcaggttattagtgttgatggtgggatgagcgtgaatggcctcttct

SEQ ID NO: 8480 - DNA, 600 bp, Gossypium hirsutum
  Clone ID: LIB3828-010-Q1-K6-F3
ggactattaagatttagattttttgtttacttatttgggctttaatgtagacccggacaaattggcccgtttacaaaaaaaaaaaaaaaaaaaaaaaaaaaaaaaaaaaaaaaaaaaaaaaaaaaagggaaggaagatataaaaagaacaaaaaataaaaaaacgcaagcaatgaaaaaaaataaggggggggtcgggtcaagaaaatccaatttactggccgcgggtttacaacgtaatgactgtttaaaaccgtgacgtaacccaaattaatgggctggcattaaatacccctttggcgggaaaacccctgggctaacaggccttaaccgattggccttccaaccatttttgcaccctggatggaaaatggaaggggccctgtaggggcgctttaaccaaagtgggtgcggtgtttacgcgcagtgggacccctccttttgcgagctatttagcgcggggggggtggggtttccccccttggttactggtcaatttggcaggcttttaccgccaagttttaaatcttgggctccttttttggcccccatttagggctttttcccccctaaggccctaaagaggggggctccgttgagg

SEQ ID NO: 8481 - DNA, 573 bp, Gossypium hirsutum
  unsure (1)..(573): unsure at all n locations; Clone ID: LIB3828-010-Q1-K6-F4
gnactctgttgctgcagccccacaagcagtccatcttttccggcagccatttccacctaattactttccatatcctcactatctttcacccttttatatgcatccaatgcatcaatttttaaaccccactgggctgcctcagcaaccttcaactggcaatgtatacatgccacccggagtaactccacctggggtcaaattccctctcccacagttcaagcctggaactaatgcaggaaaccctgctcaccttgcaattccatctggttatggtccattgacttctccgcctattggtttcaatttacctcttccatcggtgacttctgggagctctagcagcaaggaggatattgcagcattgcagttgaaggaaaatcaaatatacacaactggaccactgaatgaaagttcagctctctggatgcctgcaccagggcaagatttatccaacttgcaggttaattctttatacaacctttcccttcatggtccacagcttcctttctctcctgcacaggctggtcatggtgcctttgccggactttatcagtcaccgccacaaacaatggc

SEQ ID NO: 8482 - DNA, 482 bp, Gossypium hirsutum
  Clone ID: LIB3828-010-Q1-K6-F5
ctcagaatgcagcgacaacaattgagcaaattacacaacttaaagcggaggcaacatcgagagaagttgaggttcaaaaaagaatgaagaactccagctacaactaaaagcagatgcagcagcgagagaagctgaggttcaacgaaagtatgaagaactccagcagcagcttaaagtagatgcggcagtaagagaagcagaggcggcagctagagaagtacaggctgtagtgagggaagcagaggctaaagcgagggaagcagaggctgcagcgagggaagtagagcagcgtcaaaagttcgatgaactccaacaacagcttcagagcatgatgaagatgtttcagcagtcgcaacagccgccgtcttagactatcgtgtaaatatacttcgattttaacttttaattatcattttaacttttaacatttttgtaagaataatacgaaatttattttatttattgatatttattatttgttt

SEQ ID NO: 8483 - DNA, 544 bp, Gossypium hirsutum
  unsure (1)..(544): unsure at all n locations; Clone ID: LIB3828-010-Q1-K6-F6
gcccgaaagcatgctgctattttttgtatcttctatttgcgtaacaataaagcatgccattattctgaattattgacagcatgatatgacttacttttgtactgcactgtatttgattatgctattttgataaaaatgacattatgcattgcatcgagattgagttgatcgaagatagaggagatctgtagagttatggcggtaaatctgcaattttggtgttttcacgatttgctcgcatattgttctggtggtttgtccacaacactattctggtggtttatccacacaatctgattagcagtataacttcaattattttcttttatcgatggtttaaccacaatgagctacgactccttctgatatggtgtgtatggttggatatggtgtgtagtggatggatgggtaagaaaactacattaaaattcatgtacatgtgcattaattctaggatatgatatattctgataatacgatgattggtgatattgttgtatatgacatttatttgtttataaatgattttatggtgtttagcnna

SEQ ID NO: 8484 - DNA, 511 bp, Gossypium hirsutum
  Clone ID: LIB3828-010-Q1-K6-F7
ctctcgaaaaccgctcctcatttccgaacagacaggcgcagatcctctcagcccagcgaccatgacaaagagaacgaagaagccggaattgttggcaaatatggtacccgttatggtgccagtttgaggaagcaaattaagaagatggaggtgagtcaacacagcaagtacttctgcgagttttgtggaaagtatgcagtgaagagaaaggctgtaggaatctggggctgcaaggattgcgggaaagttaaagctggtggtgcttatactttgaacactgccagcgctgtgacggtgaggagtactattagaaggttgagggagcaaactgagagttgagctgctgctgactacgttatgttcacaactttggtatgatgttcgtgtatgtgttggctacaaaccagttgagtcattttgttgacaattatggcgcttagttcttaattttatatcttaactctggtgttggagctttatttaagttcaaatatttgagtattcttgtttc

SEQ ID NO: 8485 - DNA, 600 bp, Gossypium hirsutum
  unsure (1)..(600): unsure at all n locations; Clone ID: LIB3828-010-Q1-K6-F8
gacaaatcaaccatgttgttggtatcgtccacacaaattacttgngatatattaagagggagaagaatggtgctctacaagcttttcttgtgaaacacatcaacaattgggtcaccagagcgtattgccacaaggttcttcgtctttctgctgcaactcaggatctaccaaaatccgtgatttgcaatgttcatggagtaaatccaaagtttttgaaaattggggagaaagttgctgaagaaagggagcttgggcagcaagccttttctaaagaagcatacttcttaggcaagatggtctgggcaaaaggatacaaagagttgatagatttgttggcaaagcacaagaatgatcttgatggtttcaagttggatgtgtatggaaatggtgaggacgcacatgaagttcagagtactgctaagaggttgaatctgaaccttaattttctgaaaggaagggaccacgcggatgattctcttcatgggtacaaaatcttcatcaaccccagtgtcagcgacgtgctttgcacagctactgcggaggcacttgctatggggaaattcgtagtatgtgcagaccatccttcgaatgagttcttta

SEQ ID NO: 8486 - DNA, 607 bp, Gossypium hirsutum
  Clone ID: LIB3828-010-Q1-K6-F9
ggcgtctgtaataaaatctgcaatcttaattctgtcggtgtttttatctgtaagcttcagttcgggtgttaggttgctccaggaacagcccaatgatgacctcaaaacatggacgctattcctcccattgatgcactcaaccctaccgagttcaatggacccggtgttggcattcacgaagatcatgttgtcccaaaaggttccgaaattggtactcttggttttggttttgaaggtggtcctgaaaaatgttgttcttctggatgttccggtaattgtaatcctggtggtttcgttctaccatttcctcaaattccagaaatcccaagaattccacagatcccacagatcccacaaatcccacaaattccactaatcccacagatcccacaagtcccacaaatcccactaatgccaggacagtcgggatgtgagagtggggagtgttgccgtcagggttgcggtgggacttgtgctgagtgtggtcagcccaggtgcgcatcaggatgttgccaggctgaaactgtaaagagcaaagggatagaagaggttatggacagtgaacccagtccaccaaagtagggagatgataccatattaagatgaa

SEQ ID NO: 8487 - DNA, 329 bp, Gossypium hirsutum
  Clone ID: LIB3828-010-Q1-K6-G1
tgatgatcgaagtctaaacgttccactgccaccgtctccaatggtttacggagtccgatggcgaggaacaaggcttggagttcagcagcgataaaccgagtcaactcacccaggttcagtcaatcccaagaggacaccagcccaacggagtacgagttcgacaacgatgatgactcgattccctattccccaagtaactctaggctccaacaggctcgtctcaagctccgccgcaccaaaacacaaaattaatttaatttgtaataaaacaaaccaaatttgtacgaagatttttttgtttcttgaataccaagtccgtaatcccactc

SEQ ID NO: 8488 - DNA, 398 bp, Gossypium hirsutum
  Clone ID: LIB3828-010-Q1-K6-G10
ccatgattgctcgtctgtatcatgctgcaaataccactagagtttgccaagaggcgtaaaaggaaccggttttacagccttagctgctaagatcgaggatataattaagctctgtgaaatttgtgtcgtctccaccaacttctttgtgaacggtgctcattaaaagcttttacccatgaattatgtgtgcatgtaatagataaataaagggttcccttttgagtattgcacaagatatttctaatggaatcccccgtaatattttacatcttcaaataccaaaatcaactatcagtctgtcatctcaagtctgcttgaaggcttaaaaaatttgcgataaagaatattcacatatgacatacgttgcaacaaatatagaagatcattggatacccttc

SEQ ID NO: 8489 - DNA, 606 bp, Gossypium hirsutum
  unsure (1)..(606): unsure at all n locations; Clone ID: LIB3828-010-Q1-K6-G11
cggncgcgtgggtacggcaggtcaggagaagaatcgagccatcaccagtgcgtactacagaggggctgttggtgcacttatggtctatgacataacgaagaggcaaacctttgataatgttcaaaggtggcttcgtgaattgagggaccatgcagattctaacattgtcatcatgatggctggaaataaatccgacttgaatcatctcagagctgttaccgaggaggatggtcaagctctggctgagagggaaggtctttcatttcttgagacatcagcactggaagcaaccaacattgagaaggcattccgaactatattgactgagatctaccatatcataagcaaaaaggcattggcagcccaggaagcagctgctagtaccgcaattcctggccaaggaactaccattaatgtcactgatacatcaggaaacactaagagaggatgctgttctacttagaaaggtgataggttacatttgatgctgttctaccttaaaaggtcataggttacatttgagaaggtaaaaatatttgctaggaagtaggccctttttctgtttttgtcaatttttggctgagagggagacatgtaaaatacata

SEQ ID NO: 8490 - DNA, 603 bp, Gossypium hirsutum
  unsure (1)..(603): unsure at all n locations; Clone ID: LIB3828-010-Q1-K6-G12
ctcttctctggctattcctgcaggtattttggatatcttgtttctcggaaaaaaacattatctctgtagacgatgactgcctcccagctcgagaccctaagggctttttggtggatgctgttgcccagcatataagcaaccttaccaacccagccacaccattcttttttaatactttgtatgacccttatgctgaaggagctgattttgttcgtggctacccattcagtcttcggggtggggtgaaatgtgctttgtcatgtgggctatggcttaatctggctgatcatgatgcacctactcaagccctcaaggcaaggcaaaggaattcccgatatgttgatgcagttatgactgtcccagccaggtccctcatacccattagtggaatcaacatcgcttttgagcgggaggcagtaggacctgcattggttccagctctgaagttggctggggaaggtaagtgtaggtgggaaacaatggaagacatctggagtgggttgtgtgttaagatcgtatgcgatcatctggggcttggtgtgaaaactggactgccatacatatggnagaaccgatagaggtgaccctatagcaagcttgaaa

SEQ ID NO: 8491 - DNA, 600 bp, Gossypium hirsutum
  Clone ID: LIB3828-010-Q1-K6-G2
cccagcgtccgatttatttctcggaatcttcctcaaggaatgtctcgggcatttattggcaggatgcttgcagatcctgcctttctataccaggcttctttgggaggaggctgctactattggctcttctgtttggtgggaggtgaagaatcgaaagaataggattaaacaagaatgggatctggcacttatgaatgtgcttacagtagcagcatgcaatgctcttgtagtttggtctcttgctccttgtcgttcgtatggcaataccttccggtttgacttgcaaaacacgttgcagaagcttcccaacaatatatttgaacggagttacccacttagagaatttgacttgcaaaagagaatccattctcttttctacaaggctgcagagttgtgtattgttggattaactgctggagcagtacaaggttctttgtcaaattttttggccagtaaaaagaaggaaaagttgtctgtgacaattccgtccatgagtaccaatgcgctgggttatggtgctttccttggactctatgcaaaccttagatatcagcttttgtgtgggtttgatcaagcaatggtcaaccattttgatgtcat

SEQ ID NO: 8492 - DNA, 600 bp, Gossypium hirsutum
  unsure (1)..(600): unsure at all n locations; Clone ID: LIB3828-010-Q1-K6-G3
ggacaaataatatcaanaanaatccgccgagtatgttccaccctgatttcattagagattaacgtttccggaattgtgggaagctagcctttgctgctaagtccattgatagaaacaatatcggattctcttcacataccgagaaaaatctgtctatgctatgagcataagacgtttaaatcattgctcaatttaccaacttggctctaaatcatttaacatgtttcttcgatcatttgttcttgttcaagtattcatttttttcgcatttccataattgtttattcattaaagaaaaaaaatcctccaatttgacgttaccgccatcactggaaatgctgtagtcaccatcgatgaaggcggcctttttaaggtggatttgtttatttgttgaacatgagtatcgggatataagtacgtgtctgacacgaatttggtacacatgaatttcaagaaaatgaagagtcggaattgtattcaaacaaatgagggttgaatatagatccaagactgctggaagagcggaatgatgttttgatggttcacggatgaattttgctcgtatagaaattaaacgacggatatgtgaggcaataaaat

SEQ ID NO: 8493 - DNA, 609 bp, Gossypium hirsutum
  Clone ID: LIB3828-010-Q1-K6-G4
caacaacaataaattaatcaatcatgagggttttcccagcgctttttcttgcatctcttgctttagtgttgggcgcctctcgtgctgatcctgacttgcttcaggatgtatgtgttgccgatctttcttctggaataaaattgaatgggttcccctgcaagcacccttcaactataggagcaaatgacttcttctttgccggtctagccaatccaaacttccctaacaacactttgggatcgcttgttacggcagctaatgtggaaaaaatcccaggtttgaacacccttggagtctccatgtctcgtatcgactatgccgttggtggggtcaaccctccccacacccatccacgagcatcagagattgcattcgtgttggaaggagaattagaggttggcttcttcactacatccaatgtgttaatatcaaagcatatcaagaagggagaaatatttgtgttccctaaaggattgatgcatttccaaaagaacattgggaagacacgtgcatctgctattactgcgttcgatagccagttttcaggaacacagtccattgctactaccctatttgcagcctcaccaacaattccaaatgatgtattga

SEQ ID NO: 8494 - DNA, 546 bp, Gossypium hirsutum
  Clone ID: LIB3828-010-Q1-K6-G5
gttttaacctcttcttgatcataaagcctctgtacctgatattggaaggaatgggttcttttttgttgaggaggaggaatacttttttccatgttatagtttactccggctactttgctccttggtgcttacctgaactgttgaagcaatggcatagataataccaggaaccagtccttgaatcatttcagtcctaatctcttggaaaatttgatcccatgccctgaatcatcatcctgttcgaataattgatgccaatcatttcccaatagaaaatcctttttcaaatgattctgcagttatggtataagtgtttgaccttagttgcatatattcttggctatgtataaattagaactgcagtttctgggagtaactgcctgtagaagaggaccaaagagacagtaatatatgcatgcatgcatatatatatttgaggacaccctcttgaagtcttgaactccctttgaaattattgtttcaaaaattaattattcccttttgtgacaactgaatttacaccctttagatataagttaatgatcc

SEQ ID NO: 8495 - DNA, 598 bp, Gossypium hirsutum
  Clone ID: LIB3828-010-Q1-K6-G6
ctcgcttaatgtagcatctgcatcaacatctgctggcaccattgctgggcctctacaccagaattccatgaactccagacagcagaattctatgaataatgcaagcagttcctatggtggaaactctgtgcagatcccgtcccctggttcctctagcacaataccccaaacacaagcaaatccttctccatttcaatctccaacaccttcctcatctaataatcctcctcaagctccgcatggtgccttagcagcttcaagtcacatgagttctgcaaattctccagcaatgaacatgcctatgcagcagccagctctttccagtgaggcggatcccaatgaatcccaaagctctgttcagaaaatcattcatgaaataatgtctagccaacttaataacactggcggcatggttggtgctggcactctaggcaatgatgtgaagagcgtaaatggaatgctgccaccgagtaacaacatggttctcagcggtggcaacactttggtcgctaatggaaccatcagcaataattcagttattggtggtgtggggtttggttcaatgagtggtggactagggcagtctgctatggtgaat

SEQ ID NO: 8496 - DNA, 611 bp, Gossypium hirsutum
  Clone ID: LIB3828-010-Q1-K6-G7
gggggacttgattataacacaaatgcttctagttccagtctgtatgttggatctggaagtggtactattggaggaaatgcctttggaaacagtggaattaattggggttcttccgcaatttccagtcaaggtgaggggaataatgtttctagaaatagtgtggaatttggctatggaagcggcgataacagctttgggttggggacaacagggtatggaagaaacagtgggaccaatttgacaccaacatcagcatatgctgcatcaaatggtggttacgatggagcctttgcagatctttacagcggtgcttcggtttacggggatgccactaggggatcatcaatgtccgagcgagatggttctggttcctttgggtatggactcgatagtgccacttctggtgttctgcgtaaaagttctcctggttatattggtggttatagtgttaatagaagacaagcaaatagcggaattgctacctagaaaattatttcgggttatcacaatacggcaagtatagacaatcttgcgaagcaggtgatctactctgcatatctcccgtcttaatacgctttcatggaagttggttatctagagctaaccgcagt

SEQ ID NO: 8497 - DNA, 602 bp, Gossypium hirsutum
  Clone ID: LIB3828-010-Q1-K6-G8
aaaactgggtctcatttgttttgatctcaaaaggatgaaggtcactctagtttctcggagtgggagagagttcatcaaaggtggccttgagcttaatgactcggctactgtggctgatctgcaggaagcaattcacaagagaactaaaaagttctatccttcaagacaaagactaacacttcccgtgccatcgggatcaagggagaggcctgtcgtccttaactacaagaagagtctcaaagactactgcgatggaaatgagaacagcttaaccatagtgttcaaggacttgggtccacaagtgtcgtatcgaacacttttcttcttcgaatacttgggtcctttgatcctctaccctgtcttctactacttccctgtatacaagtactttggatacgaagaaaagcgtgtcatccaccctgttcaaacatatgctttatattactggtgtttccactacttcaaacgaatcatggaaacattcttcatccaccgtttcagccatgcaacgtccccactatcaaacgttttcagaaactgtgcttattactggaccttcggttcatacattgcttactacgtcaaccacccactttacacac

SEQ ID NO: 8498 - DNA, 602 bp, Gossypium hirsutum
  Clone ID: LIB3828-010-Q1-K6-G9
gttcctttgtgggagcttctttggttctcggttgttgccaatacttcaattaccgcgatgaacttgagcctcatgttgaattcagttggattttatcagatttcaaagctaagtatgattcctgttgtttgctttctggaatggctcctcaatggtaaacattactcgagtaaagtcaagatggcagtggtggtggtggtggtgattggtgtaggtgtttgtacagttactgatgtaaaaattaattcgcatggatttctttgtgcctgtgtagctgtcctatctacctccttacaacaaatttcaattgggtccttacagaagaagtactcaataggatcttttgaactgcttagccaaacagctccaatccaagctttatctcttttgttgcttggtccattcgttgattacttcctcactggcaagttactagcaagttataagatctccacagctgcattttttttcatagtactgtcatgttccttagctgttttctgcaacataagccagtacctgtgcattggacgattctcggcggtgtctttccaagtgctaggacacatgaaaacagtatgcgtgttgatattaggatggat

SEQ ID NO: 8499 - DNA, 604 bp, Gossypium hirsutum
  unsure (1)..(604): unsure at all n locations; Clone ID: LIB3828-010-Q1-K6-H1
gnaattctctcaaagttcttaaacattgtctttttttgtctgaagttcaatttttatctcttttcttttttcattaagatatacggtaaaatggcttcccacattgttggatatccccgtatggggcccaagagagagcttaaatttactttggaatctttctgggataagaagagcagtgctgaggatttgaaaaaagttgcagctgatctcaggtcatccatctggaaacagatgtctggtgctgggatcaagtacatccccagcaacactttctcttactacgaccaggttcttgatactacatccatgctcggagctgttccacctagatataactggactggtggtgagatcggatatgacacttacttctccatggctagaggaaatgcctctgtgcctgccatggaaatgaccaagtggttcgacaccaactatcacttcattgttcctgaactcggacctgatgttaaattctcttatgcttctcacaaggcagtggatgagttcaaggaagctaaggcgctcggagttgacaccgtcccagtccttattggccctgtctcatatttgttgctgtcaaaacccgcaaagggtgtcg

SEQ ID NO: 8500 - DNA, 613 bp, Gossypium hirsutum
  Clone ID: LIB3828-010-Q1-K6-H10
cttagttgcaactgcgaggcgagtgaaaacatactctgtatttggaataacacccaattattgttttatgtcctaagaatcaagagcagagcagagcagaacggagaagaagaagatggagaggattctgtcggcggtaggtggaggaggagagtctttgttaggtagcatgaagattgcagtcctgccgatagccaaagtgttcaccatgtgttttctgggctttttaatggcttccaagtatgttaatatcttgcctgctaacggccgaaagcctttaaacgggttggtgttttctcttttgcttccgtgtttgatcttctctcaactgggacaagctattactctgcagaaaatgctcgagtggtggttcatacctgtgaatgttgttctcggctctttggttggctcactcataggtttcattgttgtaaccttagtcaagcctccctacccatacttcaagttctcaatcgtacaaatcgggattggaaacattgggaatgtaccacttgttctgatcgcagctttatgtagagatacatcaaatccttttggggacacagacacttgtaccactcagggaactgcatatatttcatttggacagtgg

SEQ ID NO: 8501 - DNA, 593 bp, Gossypium hirsutum
  Clone ID: LIB3828-010-Q1-K6-H11
gaaaggaagaaaggcaaagcttctgtgatctcccttctttccttatttatttgcattttctcctcactcagctttgcctatgcttcagctccagctccagctccatcgtccaatcaacaaatgagattcgaggtcttaggtcatgtttattgcgacacttgtcgtgttgaatttgagacatctatcagcgaacctattcccggtgcaacggtgaggttagaatgtaggaatcgtaccgacgaaaagatcacctatcaaagtccagaaataacggctggtgataaaggaaactataaaatccaagtgacgggcgattatgaagaatcagattgtgatgtaatgctagtgaagagccccagagcagattgcaatgatcccaccgaagagtggaggaaagcaagggtggttctcaccacattggatggggtttcgggtgaaattcgctttgccaacaaccttgggtttaaaaaaaaggaagctcttcccgaatgtaccaaagttttaacagaaatgggttactttgaacttcaaaaagaacttggaagcgaagctgtttgaggaaatatgttgggtaagttggactttttccatga

SEQ ID NO: 8502 - DNA, 524 bp, Gossypium hirsutum
  unsure (1)..(524): unsure at all n locations; Clone ID: LIB3828-010-Q1-K6-H12
ngagaggtgcacgcaacgtaacgaaccaaggcccatccaaccccgatgctatcccttgcctttcttctagcttcaattcgcaccttgctctgcgatttctcaatcgttcaccatctctagagttccaaagccaaacaaagctttaaatcgaaaggcagggataggaaaagggaagccatgataacgcgatccaatttagcagatcaattaagagagtatcagcttcgatctaagcacgattgggcctctgtttcgtttttcgcatcaacctctaatctcacaacttctagagtggatgttgtggcctttgttatatgggaactcgttatattagcttttctggttttttcagccgtttctttatattttaggcatatgcaacttgcttttattctagtatgcatcacattgttattgcttctgtgcatgaaaatcacaaagcaagtgagcgtggctgggaaaaagaaaagaaggatgctacttccattatctatgtaaaacacaaaatgataatgaatttgttt

SEQ ID NO: 8503 - DNA, 597 bp, Gossypium hirsutum
  Clone ID: LIB3828-010-Q1-K6-H2
catgaagcttagtactggatactcattgaaccttcaagggaaatctttaaaacgcaggcaaattttaagtctaatgagacgtagggagggtcttgtgtacggcgtaattttttttcagggttcaaattttcaccattgcatagcaatcgaaatcaattggattcattctttcaaaaaaaaaataaaaaaaaaaaaaaaaaaaaaaaaaaaaaaaaaaaaaaaaaaaaaaaaaaaaaaaaaaaaaaaaaaaaaaaaaaaaaaaaaaaaaaaaaaaaaaaaaaaaaaaaaaaaaaaaaaaaggggcggccggttttaaaaggacccaagtttacttcccgggtgcttgcaaacgtattagctttttttttagggcccccaaaattaaattcacgggccggggtttaacaacgtcggaactggaaaaaccctgggtttcccaaatttaatccctttgcaaaaaatccccttttccccagttgggttaataccaaaaaggccccccccgatcccctttccaaaaatttgcccaccctaaatggcaaatggaaccccccttttaccggccctttaaccccggggggtgggggggttcccccc

SEQ ID NO: 8504 - DNA, 601 bp, Gossypium hirsutum
  unsure (1)..(601): unsure at all n locations; Clone ID: LIB3828-010-Q1-K6-H3
caattatttaacttcacaggtgctggnaaaaaacacaacagcgtccactctgtcgtggtttatatacatgctttgcaaacatcctgatgttcaagaaaggttgccgtggaagtgaaggaagcaacaaaatcaatggaggttaaagatgttgatgaattcgctgctagcctgagagaagaggctttagaaaaaatgcactatcttcatgcagctataactgaaactataaggctctacccggcagttcctatggatggaaagatatgtttctctgatgatactctgccagatggttttagtgtgaggaaagatgatttgattgtttatcaaccttatgcaatgggtagaatgaagttcatttggggtgatgatgcagaggagttcagacccgagagatggctcgacaagaacggcatgttccgatcagaaagccctttcaagtttacagctttccaggcagggcctcgagtgtgtctgggtaaggactttgcctatagacagatgaagattttctcagctgttcttctccgttgcttcgtattcaaattgagtgatgagaatagagcagtgacatacaggacgatgatcaatcttcatatag

SEQ ID NO: 8505 - DNA, 571 bp, Gossypium hirsutum
  unsure (1)..(571): unsure at all n locations; Clone ID: LIB3828-010-Q1-K6-H4
cttttctgtctttggtttgatttttgaatttttgttgttttattgacatatacagattggtagattataatttagttttctagatttgcaacctttagtgtaatgaactctnactgaaaattttctttttcagtcttgttcctgtttcaatttctgtgctttgatttaaaaaaaaaaaaaaaaaaaaaaaaaaaaaaaaaaaaaaaaaaaaaaaaaaaaaaaaaaaaaaaaaaaaaaaaaaaaaaaaaaaaaaaaaaacaacaagcaaaaaaaaaaaaaaacataatatataaagtaaccaaaaatccaaataacttgaccgctgggtaacaacgtaaaagactgggaaaaaccctagaatacccccaactttacccactttgccgcctatccccccttttccaaaactcggaaaaataccctaacatgcccacaaacgaccccccttacaaaaattagaagcaacctgcaacagcaacatgggactcagccctataacggcgcaattaaggcgcgctcctccgtggctggttacaacgcaacatcgaccctatacactctgccacccccc

SEQ ID NO: 8506 - DNA, 588 bp, Gossypium hirsutum
  unsure (1)..(588): unsure at all n locations; Clone ID: LIB3828-010-Q1-K6-H5
cccagcgtccgcatggntgctgatgaagaaaagcacatactttatgaaaaaactgaggtcactgattatgagctcaaacctggaggaagaaacaccagagttactgaagaaacaaaacatgaatatgtagaccttgttgctgatcatatcttgacaaatgctatccgtcctcaaatcaattccttccttgagggatttaatgaattggtgccacgtgaacttatttcaatttttaatgataaagagctcgagttactaatcagtggacttcctgaaattgatttggatgatctaaaggccaacactgagtataccggctatacggctgcatctcctgttattcaatggttttgggaagttgttaaagcttttagtaaagaggacatggcaagattgcttcagtttgtaactggaacatcaaaggtgccattggagggttttaaggcactgcagggtatctctggtccacaaaaatttcagattcacaaggcttttggagctcctgagcggctgccttctgcccatacatgctttaatcagttagatcttcctgagtattcatcaaaggaacagcttcaggaacgtctg

SEQ ID NO: 8507 - DNA, 600 bp, Gossypium hirsutum
  unsure (1)..(600): unsure at all n locations; Clone ID: LIB3828-010-Q1-K6-H6
gcgtgagccacaaagtgttctgttctttgccggnttacacttgatgccaagactgcaaagcagtttaaggagaagattgatgatgaatatcgagtcaatatgatcctggataacctgccccttgttgttcccattagaagattagatcagggttctcctactgtttatcagcttggttaccatgttgggctcaaaggccaatacactgggagcaaggaagagaaaattttcattcacaaccatttggcatttactgtcaagtaccatagggatccacaaactgactcggctaggattgtgggatttgaagttaaaccgtacagcattaaacatgaatatgaggggaaatggagtgagaacactcgattaacaacatgcaacccccacagtaaacgcacagttgttaattctaacactccgcaagaagttgaagcaaacaaggagattatattcacctatgatgttgaataccaggagagtgatgtgaagtgggcatcgagatgggatgcatatcttttaatgagtgacgaccaaatacactggttttcaattgtcaattctctgatgattgttctcttcctttccggcatggtagcaatg

SEQ ID NO: 8508 - DNA, 491 bp, Gossypium hirsutum
  Clone ID: LIB3828-010-Q1-K6-H7
cggccgcgtgggttccaacaaaacctgtgctgtccttacagttttctctcttcttcttttcaacttatcattcaccaatgcttgccattcatgcaagccaccaaagcccattccaccacctgctgcatgccctccaccaccagcaaagcctgcttcttgccctaaggacacattgaagctaggtgtttgtgctgacctgcttggactggtaaacatagtggtgggagcacctccttcgagcaaatgctgtgctttgctccaaggcttggctgatttagaggctgccctttgcctttgcaccgccattaaagccaatgtgcttggggccaacctcaacatccctattacccttagcttactccttagtgcatgtcagaaggaaatccctccaggcttcaaatgttgatatttttttttaagaagcacaatcagttgttgatgttggctaatggctaagtttgctctactttaaatttatattatggtgctgc

SEQ ID NO: 8509 - DNA, 465 bp, Gossypium hirsutum
  Clone ID: LIB3828-010-Q1-K6-H8
gagaaaccgtgttcaaactcaaaggatgtaattttgtgtacaactgcatgcctcctttactggtgtatctaccagatttgcaagtatcacaaggaaattcagagtttggaggaagtagagaagagatacaagaatgagtagttttctatacaaaagctcatctagttgtagagactacgttatgttctaaagcctacacatgatgcccccatggcatgttttcattacagctaaagctcctgcacgtctctctctcagcggaaactataattctttccttgaaccatgtatgttcttttgttagcaattgcattttagctggtttacttgagcggttatggttgtcttgttagtggcaagtgccaaggccatacgcacacattggttaggaaaattcaacacacaactggcttttcgacaactctaaataattataataaaaaagcttcatgacaattttaattt

SEQ ID NO: 8510 - DNA, 606 bp, Gossypium hirsutum
  unsure (1)..(606): unsure at all n locations; Clone ID: LIB3828-010-Q1-K6-H9
cggccgcgtgggttcagatctgaggtctctcagttctaagccatggccgagaaggtgactataatggtgctgaaggtggaccttcagtgctggcgatgctacaagaaagtgaagaaagtgctgtgtaaattccctcaaatacgagaccagatatacgatngagaaagccaacaccgtgaccattactgtggtatgctgcaatcctgagaagctgagggacaagatatgttgcaagggtgctggatcaatcaagagcattgagatcaaacctccacctcctcctcccaaacccaaggagcctgggaagcctaaagaacccgaaaagcccaaagaaccagagaagcctaaagtaccagaaaaaccaaaagaacccgaaaagcctaaagcacccgaaaaaccaaaagaacccgaaaaacccaaagaacccgagaaacctaaacaacccgaaaagccgaaagaacccgaaaagcctaaggaacctgagaaaccaaaagaaccaccaccgaaaccaccagcaccagcaccaaaggttccagaaccttgtcctccaccaccaatggctcatccccccatcggatgctgttgcacggaatgctatcatggcgt

SEQ ID NO: 8511 - DNA, 277 bp, Gossypium hirsutum
  unsure (1)..(277): unsure at all n locations; Clone ID: LIB3828-011-Q1-K6-A10
cgtattacctccatgctaaacatatgtacaacttgngataggatgaaaaatcagaagctgacaatgtctcttggagttttgacagccttcagcattggtgtgtttgttcctatctatgctgtcattttccagcagaaaagnctgcatctggttgatttttattttttatgcttgccttcatggcatggtttggctgcctgcaataatggaagcaactgcctttgtgaattgttatcttcggctttttgaactgatgcagtttgatgattatgatgat

SEQ ID NO: 8512 - DNA, 622 bp, Gossypium hirsutum
  Clone ID: LIB3828-011-Q1-K6-A11
ggagttttgtataataataatgggggattcaactgggcataaacaaaacacttggagttcacattggcggctgtttctgaactgtcttcctcttcatcggtttcttcttcttcaacaccggtgattgctcgattcagtgctgatgatggagttgccgcgcttcggtttcatcaaggttcggaatttattgacgggttcaatgtcgatcttggaacctctcagctcttcaagttgggacctcttcaatcactttgtgtctcagagagtgctgataccaataaagagaaatcatattctcggggagtctccatccggtttagaaatgaggaggagagcagggacttccattctgcattcgaacaatggcagatggaaagcaaaggaacacatttgcctaatggagacatttctgtttctaagagcaagttcgataataaaattgagccatcttctgctaaaatgtacttccattattatggacaattgctacatcaacagaatatgttacaagattatgtgagaacaggaacctattatgctgctgtaattgagaaccgagtggattttacaggttgtgtggtggttgatgttggtgcaggcagtggtattttgtcattatttg

SEQ ID NO: 8513 - DNA, 618 bp, Gossypium hirsutum
  Clone ID: LIB3828-011-Q1-K6-A12
cttttactggggacagcgataataagggtgcacaattgcaatttagaggccaacgtatatggttagctggaatggaagatttaatgtcaaaaggaatgcgctacgcaaatcaggctcttctttcggggtgttctgctgggggtctggcagcaattttacactgtgacgagtttagagacttgtttccaagaaccacaagagttaaatgccttagtgatgctggtctattccttgatgcggttgatgtctctggtggtcacacaattaggagtttatacagcggcgtggttggcttgcagggcgtgcaacataacctgccacgtatatgcaccaaccacctcgatccaacttcgtgtttctttcctcaaaatgtaatcaaccacatccggactccactgtttattcttaacgcagcatatgattcatggcagattcaatccagtattgctccaccatcggcggatccacatggttattggcatgattgcagattgaaccatgcaaaatgctctgcttctcagctccggtatttacaaggcttccggacacagatgcttaatgctataaaagggttctcaatgtcgagacagaatggattatttataaattcatgttttg

SEQ ID NO: 8514 - DNA, 641 bp, Gossypium hirsutum
  unsure (1)..(641): unsure at all n locations; Clone ID: LIB3828-011-Q1-K6-A7
cngaacaactgggtttgaacgtaagctcctgtctaacgatggacctgagtggatgggccacgctgagaggagactacttcaagcaaaaccaacagatttgaagcctaacgttgtggttgctaaggatggtagtgggaaatatgataccatcaccaaggccttggctgaagtccctcaaaaaaagccccaatcgatttattattcacattaaggctggtacttacaaggaacaagtccttttacctaaggagatgactaatgttatgttcatcggtgatggtccaactaagaccatcatcaccaatgaccttaactgcattagggatcatccgcttaaaacattcggcactgcaacggttggtgtggatggggctggtttcatggccagggacattggattcgagaacacagcaggacctcctggtcatcaagcagtagcttttagggcaacatgtgatatggtcatcatgttcaattgtcatttcaatggataccaagacaccctttatgctcacaaacagaaacaattttatagggattgtctcatcagcgggacagtggatttcattttcggggatgcggcgagtgtgttccaaaattgtctgatcattgcgaggaagccaggtgaaaaccagaacaac

SEQ ID NO: 8515 - DNA, 620 bp, Gossypium hirsutum
  Clone ID: LIB3828-011-Q1-K6-A8
aaaaagagagaggcgtctgtaataaaatctgcaatcttaattctgtcggtgtttttatctgtacgcttcagttcgggtgttaggttgctccaggaacagcccaatgatgaccccaaaaacatggacgctattcctcccattgatgcactcaaccctaccgagttgaatggacccggtgttggcattcacgaagatcatgttgtcccaaaagtgctgaaattggtactcttggttttggttttgaaggtggtcctgataaatgttgttcttctggatgttccggtaattgtaatcctggtggtttcgttctaccatttcctcaaattccagaaatcccaagaattccagaaatcccacaaatcccacagatcccacaaatcccacaaattccactaatcccacagatcccacaagtcccacagatcccacaagtcccaaaaatcccactaatgccaggacagtcgggatgtgagagtggagagtgttgccgtcagggttgtggtgggacttgtgctgagtgtggtcagcccaggtgcgcatcaggatgttgccaggctgaaactgtaaagagcaaagggatagaagaggttatggacagtgaacccagtccaccaaagtag

SEQ ID NO: 8516 - DNA, 618 bp, Gossypium hirsutum
  unsure (1)..(618): unsure at all n locations; Clone ID: LIB3828-011-Q1-K6-A9
ngtggcgtcaaggtttcaacagtttcaaacaaagactttcaagtgtcacggttggtgaccaagaatggaggtccttattacaaggagatgaaggaacgggctattcaagtttcacagttggtgaccaagaatggaggtccttattgcagggagatgatggaacgggctattcaagtttcacagttggtgaccaagaatggaggttcttattacagggagctgatgaaacggaacaaaacatacatcaaggaaccatccagcgtagaaacatgccaattgttggcaaaacaattattttatactcgacttgccagtattccaagaagatacgaggcgttctggaaagagcttgattcccttaaagagcttctgaaaacaaaggaagcttggaacattgaaaatgcaagcatggctgctctgattggagttgagtgctatgcctggttctttggtggagagatcattggaagaggcttcacaattacaggttaccatgtttaatattcaactttatttttctgagaatttgaatcaagctgatgatcttttttgtcagctggacattattatttattagcacaataagactctntaaactagttttaactttgttaaata

SEQ ID NO: 8517 - DNA, 635 bp, Gossypium hirsutum
  unsure (1)..(635): unsure at all n locations; Clone ID: LIB3828-011-Q1-K6-B10
gggtagtcctatgtggcactatattccgggttctcattactctgtacctcccgctcaacaaatacctgtatattatgtttcgggtccagttcanaccgggaaatccgcaggttcaacctgttcaaatccggccacagtatgtccagcagtatccaatgtcaacgggtcaaataccggttgggtatcatcggccggttgctggtgtgggtcaaggatacaggccagtaacgcacgtggacccttatgatcccgcattaagagtggctcctgatggtgtgaaacaacctatatattatggagttagaaatgcgggtgcagtgccagtttactcaggaattgtggtaccgggtggggaggaattgggtagaagcgggtcggattcaacacggggtcgggtctcgcaataaggccggaagtgagcgtgtgttaaataatggcaaggtaatttcgttttagtatggttggtttgatgattatcgtgaactgggttttaataaatgctagtttgtataggctggttttggaagttttttgtgattaaaactgtgaatggcttctgattttgaaacaaaatgtatagaaagtcagaaggttttctctaaatatgtagatataatagtgttntctttgcaact

SEQ ID NO: 8518 - DNA, 539 bp, Gossypium hirsutum
  unsure (1)..(539): unsure at all n locations; Clone ID: LIB3828-011-Q1-K6-B11
atttcaggcaatgaattcctcataaatgctttngaaaggaatgcagatgctgtcaggttcgatctctatcacacatgtnggaagacgaatgccgagcccatgtttttctggctgaaaaagaatctgcatcgggtcgatatatatgcagtgctgtcaataccagtgtgccagaactagcaaagttcctcaacaaaagataccctgacttcaaagtccctaccgattttggagatttcccctccaaacccaagttgatcatttcctcagagaagcttattagcgaaggattcagctttaagtatgggatcgaggaaatctacgaccaaaccgtggaatatttgaagtctaaggggctgctcaagtgaagcgctttgacgcttccccaatgattatggtgtttgactgttgtgctattgtgataatattcgaataacttcatgctctacaaatgaaggcaaaaccgtgtggcgtttgtcatctattttgattatgaatttctatcacctcatgtcctacaaatgaagcatgcattttgatct

SEQ ID NO: 8519 - DNA, 646 bp, Gossypium hirsutum
  unsure (1)..(646): unsure at all n locations; Clone ID: LIB3828-011-Q1-K6-B12
gnaaaaaaatggggaagaaatcaaaaacctcaataagggtaaaaaagctggagagctaacataagcacagaagacatccatgatttcttcgagaaatccactaaagatgctctctctggtggttctcttacttcagctcctactgaatctctcttcttcatcgacaaatctcaagatctttctgtgaaaaaaaaagattgagaagaaaagagaaaaggtattgcgtgtggatagtatgttgaagaagaacccttttgttgaagctgtaccatcttcgaagcaaaagagttctaagaagaaaaagaaggaagctttgaatgctaaagatgtagttcaagatgttcccaaggatgaaaccgtccctgactctggtatggttcctatatggggagatgaaggtcaacatagttgcaaagctagacaggtatctaaacaatcgattattccagcagttgaagttgagcctccgggatgttcatacaatcccacatttgatagtcatcaggattcgttggctcaagcggttgctgaagaaatgcaaaaggcctacaagatcgagttgggacctcagccggttccattaactgttatgggagaagtggttgatgaagatgatgtgagtgtctatttgttacattcatgtact

SEQ ID NO: 8520 - DNA, 190 bp, Gossypium hirsutum
  Clone ID: LIB3828-011-Q1-K6-B7
cggccgcgtggggttctgcactttttcatttatagactggaaatttgtatctttgtgtttaggactaggaaacagaaaggtgttcaaaagttccatttggccttggttgaggacttatttttagcacagtgaatcaagatctgaaataatttgagattaaattttattttataatgaagcttgtgatttc

SEQ ID NO: 8521 - DNA, 493 bp, Gossypium hirsutum
  unsure (1)..(493): unsure at all n locations; Clone ID: LIB3828-011-Q1-K6-B8
cttttaaaaaaattcttgcttataaaccanttccacattttgaacaaaatggcacgacaacttgttgttcttgctttggttttgattgtcctcgccggcgtggtttttgccgacacctcatccgtcggtggtagccctgcaagtgcaccagctggagcttctacaggtggcagtgctgctagttcctcccctacttctcagcctaccactccaactcttagcggtgatatccctattgatgatccatagaatgattgtcaaggaaatgctgacaaatcattaaacaaattgccatttaaaaacttggtggggttttggaaaataaataattagttttataaatagaatgttatgtttttcattaagtttatgaaatgtttttcatatatatgatttcacttacaacattatactcttaacaaatctactaaaacgagtagattggtgaactgtgtttttttttgtgaattatgaaaggatggtaaagccctaa

SEQ ID NO: 8522 - DNA, 642 bp, Gossypium hirsutum
  Clone ID: LIB3828-011-Q1-K6-B9
tggctattcaatagactttcgagtttttcacttgaagcataaacatctgtgaaacctagtgccaaaacttttgaaaactgatacttgtttgataaacagtgttgccttgaaattagggcgtggtatcataaatcattagtagacagatgggagaagtgggattaaccgtgtttagaactaaattgactgattcccttctaaaaaatataattaagcttgtgaatttgtggtgttcattctgtctgatcctctcttgatgtatctttttatttagaaaatctccatatatagaaagcgatggttcaatcataatgtccgttttggaaaggtacagagatgaagatgcaaaaacttgaccagtgctgcttaatctccatttaatatcagatttaatatcatttataatgtttgaatgggtgaaccattactgaacctagtgtcttaccttttcaggcatttgctgtagcaggatatggtgggtggaagcttcaaggcatagtgacacccagtagtaacctgtagagcatagacattccaaaatttttgaacaaatctaatccccctcccttctcagttctctctgcaaggaaaatagaaattgttcaaagaggcaatagctagagaaagagttgctatatatgg

SEQ ID NO: 8523 - DNA, 641 bp, Gossypium hirsutum
  Clone ID: LIB3828-011-Q1-K6-C10
ggcgtctgtaataaaatctgcaatcttaattctgtcggtgtttttatctgtacgcttcagttcgggtgttaggttgctccaggaacagcccaatgatgaccccaaaaacatggacgctattcctcccattgatgcactcaaccctaccgagttgaatggacccggtgttggcattcacgaagatcatgttgtcccaaaagtgctgaaattggtactcttggttttggttttgaaggtggtcctgataaatgttgttcttctggatgttccggtaattgtaatcctggtggtttcgttctaccatttcctcaaattccagaaatcccaagaattccagaaatcccacaaatcccacagatcccacaaatcccacaaattccactaatcccacagatcccacaagtcccacagatcccacaagtcccaaaaatcccactaatgccaggacagtcgggatgtgagagtggagagtgttgccgtcagggttgtggtgggacttgtgctgagtgtggtcagcccaggtgcgcatcaggatgttgccaggctgaaactgtaaagagcaaagggatagaagaggttatggacagtgaacccagtccaccaaagtagagagatgataccatattaagatgaaataacga

SEQ ID NO: 8524 - DNA, 631 bp, Gossypium hirsutum
  unsure (1)..(631): unsure at all n locations; Clone ID: LIB3828-011-Q1-K6-C11
caagttttgattttacaaccagnaatataaattctctccacaccatcatctccttccttcaggaactggtctatattgcctaacttgtcaggtgtcagataatgatagtgaagagaagctgctcttggctgcacagagagttttctttaactcaccacatccacttgagatcttaagcgaccgttctgcatatggttctgaaggaacaatccaaagagaccatgacatgaattcttacttaaaatgtgttaaaggcgtgatacgacaggagctaaaacgcatcaggaagaccaagagagagcagcgacgcaagatctggtggcccctggtattacctcacgacataaatgcgggtggtatcattcttcggaggtcagtagcaacaatgaatgcggggcaagaccaattcaactttgctggcgttttacaaacagggagagaatccttgaaaagattcagtaggctggttgcatcacagcacatgcatttgtttgtggttcttttgttgcctgccaagctgttactcgtaggtgcatttagcttgatcagtctccgctgatcatcttatttggtaggccatttaatgtttgttcctagaggtggcgagccgattctttattcattgagttag

SEQ ID NO: 8525 - DNA, 627 bp, Gossypium hirsutum
  Clone ID: LIB3828-011-Q1-K6-C12
gcaatccaaacaaacaaaaactctctctttatctgtgacaccaaccaagcagcaaaccccccctgcataaatgatcagattttaataaatcggagaagggatattaatggaggctaacatttgtgacatcaatcacttggatgcggatgtcctcctgcctccccggaagcgcctgcttgcaggatttaagaaacaggcatccaatgccaatggtgcttcagatcagcctgcagtggcttcttcctcttcatctcctccttcaccttcaccttcaccttcaccttcaccctcaccctcacactcgccttctacttcttcaagtgatgttaatgaccatcttaaaaatttattgatgagttcccatttatataacccaaatctttctcctgaggagattttggaggcctcaagagcagcagctacctctgctgctaaagctgctgaggctgccagagctgctgcagaggagaaggctgcaattgcagctaaagctgttgctgcagctaagaatgcattggacatggtagcaaaattttctgaagacacgattaataaggaaagacacctaaaaaataataagctcaagaaacatgtccctgttcaactcttgtacaagaaacacgaacc

SEQ ID NO: 8526 - DNA, 251 bp, Gossypium hirsutum
  Clone ID: LIB3828-011-Q1-K6-C7
ggcagggacagcattatataacaccagctggtgggtgactatactgcttgtgcatggcatccaagcgcggttcacgtatcaacctgctctagttagagcatcagggatgattgctggaggctctggccttactacaatgtgtcaagctgtcagagccatgtcggggaacccaaaacaatgccaaactgacaccttattgatgccaatgtcacatatgaggacattctaaaaaaggacagactcgatagcct

SEQ ID NO: 8527 - DNA, 515 bp, Gossypium hirsutum
  Clone ID: LIB3828-011-Q1-K6-C8
cccagtttaatgccagagtacttgatgaatgtctcgaatggcggtggtcgaagaagtttcgtcctcaataatgttaaaatcattagcccgaatatatgtactatcggatcgtccatccggtgccatggtatcgatggggtgttaaaccctgaaagtaatatatctctacatacttgctctaacaccatggttcttgtaccaccaccaccttcttcagtggccccaccacctctattgccaccaccacctccatcaccagtcccatttttttcttcccctgaagatgattttccggtgcctgccccattacctgctgatagtagccaacatatttctgggtcttcaaagttatcattaggtagaaaagtgttgaaatcaatggctaccattttggtacctctaatgattggtgtttccatttgaaaagttgataagtatttggtgaaattgttggcaatagttttaagattaaatgtttgaaaattaatgcatatgtatgtgagcaatattctagt

SEQ ID NO: 8528 - DNA, 317 bp, Gossypium hirsutum
  Clone ID: LIB3828-011-Q1-K6-C9
tccgcaaattctcgggggggattgagttctgctcaagcatgggcaatgctactgattattgtaaagccaagtgttcaaagggtcacactcaattgactcctgtatgatgggaatcattaagctggaaagctctaatgacagacacatgatatattcttaagcactcttaggtctcgcttgacaaaattacaggtggtgcgacatttttgggaaaagataacattaaaggtgcaatcagtgccctacataagctgccggatcattatgtgcaaattagtaaaatcattggaatgctcgaaaaaaatggacatacttac

SEQ ID NO: 8529 - DNA, 545 bp, Gossypium hirsutum
  unsure (1)..(545): unsure at all n locations; Clone ID: LIB3828-011-Q1-K6-D10
tgctggggttggcattgttgggggtaattcctgaggattccgaggttatcagaagcaccaacagagggtacccacttgttctgaataagcctcccacgcttgctgggttggccttcgagcaagccgcttggaggcttgttgagcaggatagcatgaaggctgttatggttgaggaggagcccaaaagcgtgggtttttctcattttttggaggctaataactggagtgagcttgttggagccggtctttgtacagagtaaaggttggttgcctttgaattctagctatatcagttttaagtttcttatggtagataaagggtttggtttttagggaatgtgtttgcttgctttgagatgaggttttactcaaaattgtattctaggggcttgtttgaaattctttgttggtgtgtgtggattgagttgaaacatttcagtgctcaatcaatctattagaatctggtcaatgaatatcatttcatttgattgactgtcacatatcggtcattcagtaccataaaaaaaaaaaaaaaanaannnnnn

SEQ ID NO: 8530 - DNA, 658 bp, Gossypium hirsutum
  Clone ID: LIB3828-011-Q1-K6-D11
gtccctgtgaacaaatcttgttgttcatttctgggtttaatttctcaagaaaaagaagatgacaaaagataggcaaatcggtgtagcaatggatttctccaagggaagcaaagcagctcttaaatggacaatcgacaatctggtagacaaaggggataccctttacctcatccacgtcaaacccaatcagagcgacgagtctcgtaaccttctttggtccaccagtggctcacctttgattccattatcggagttcagagagaaggaagtgatgaaacattatgaggtggaacctgatcctgaggttttagacttggttgatacggcttcaaggcagaaagaggtgaatattgtcacaaagatttactggggtgatgccagggataaaatatgtgaatctgttgcagatttgaagcttgattgtttggtaatgggcagcagaggccttggcaccattcaaagggtactgattggaagtgtgagcaaccatgtgatggtaaatgcaacttgtccagtaacaattgttaaaggatcctagtgctcatggattttgatctcagtattctgcaaaagtaatgttctttgaaaataatcgatgttccttgtttctatttctatgtgggtgatttatgtatgtatgtatggacatcttggttct

SEQ ID NO: 8531 - DNA, 310 bp, Gossypium hirsutum
  Clone ID: LIB3828-011-Q1-K6-D12
gaaaaaagagttgctagtctgaggttccttcgatgccattccgagtcctagttttctatattacttgagagttaaaaaagggggagtgagcatatgacaactcagtgtgaatttaatttttaaaacattatatatataattgttcaaatagtaaaacattcaatttatagcatcatagcaaaatttaagcataatgtaaagaacattcagtaaatcaatgcatgtacaaattatgttcatgatgcagtgcaattttaattttgtttccacccattcatcctattcgcccttgagtatcgctcgacacacc

SEQ ID NO: 8532 - DNA, 229 bp, Gossypium hirsutum
  Clone ID: LIB3828-011-Q1-K6-D7
ggcaggcgcaccagattgggttgccataaccttactgtcttcagtatggttatcggggtcctatggtaagaggaccggtgtctccaccatggatgacggagctcttgggggtcatccaagcaacggtgttactcatgaagctgctcctgattcttgaacctatattgcacctgatgctaccgggtctcctgctaacgataggaatatgttatgaactgaataccttact

SEQ ID NO: 8533 - DNA, 635 bp, Gossypium hirsutum
  Clone ID: LIB3828-011-Q1-K6-D8
aaaaatgtctttttggtgctttgaagttgcaaagtagaaaaagggaattccatcagaaataagggatgtttggatacagagaaaaagaaattccttcataattccttcccctgctgaagacgagaagaatttgagagccaagcaattctctcaagaaggaattcgtgccggtgtcaaggcggctgcggtcgccgccgttgtcagcgccgtacctaccttgattgcagtacgtaagattccttgggcaaaggcaaacctcaaccatactgctcaagctcttatcatcagtggagcatcaattgcggcctacttcattaccgtagataaaactgttttggaaagtgctaggagaaattctcgagcacagttcgacaaaactgtttgaatgctagaattgaaggtattcagtggcgaaggttctcaggacaagtatgatacatgtcaataagtttaaagctgttgtatgccatgcatccactttttttttcttttttttttctgtggaattttatcatcaattaagcagtttaaatgtatttaggtgatgttttatgtttcagtttataggcatgagattatataatccttttatgacctttaacatggaactcagttgagttctttcatgggagttt

SEQ ID NO: 8534 - DNA, 636 bp, Gossypium hirsutum
  Clone ID: LIB3828-011-Q1-K6-D9
ggcgtgacacccatagaccctaatctgcttccttgccttaaaaaaacgagtttttaataaaaaaggagaaaagtttgtggatttcgaggtgttgtgcagataaaggatgagtacactggatgcaactagagcagaacttgctcttgtagttttgtatttgaataaggctgaagcaagggataagatatgcagggctatacaatatggctcgaaattcttaagtgatgggcagcctggcacagcacaaaatgttgacaaatcaaccagcttggcacggaaagttttccgcctttttaagtttgtgaacgatttgcatggtcttattagcccagttcctcaaggaactcccgttccacttgttctgctaggaaagtcaaagaatgcactgttgtcaactttcttatttctcgatcaaattgtgtggcttggcagaacaggcatctataagaacaaagaacgtgctgagttgattggacgaatatcccttttctgttggatgggatcatcaatatgtaccacattggttgagcttggggagcttggaaggctatctgcatcaatgaaaaagttggaaaagagacttaaggatagtgacaagtacaagaatgaggagtatcgtgcgaagctccaaaattc

SEQ ID NO: 8535 - DNA, 565 bp, Gossypium hirsutum
  unsure (1)..(565): unsure at all n locations; Clone ID: LIB3828-011-Q1-K6-E11
ctttttctcataatccaaataaacagtaaattaatagtgctcgaaaggcagatgaatggtaaaggccagctacctaatttgaggtttccatgttcgtatattaatgttgattcatagaaaagctcaaagaacatgctggatccatgttgcggaagaaaatcgatggccggtgttttgaagagaggtttcttggagacaaaagtgatgatattggggtataaagcagtaaacatagtttgtaataagcttttgcttcaatcacttgtcatcctctgggtaatgttacataaatcgtataccatatggcttcagagcataggctgaaaatctttctttattcatatagttcgtaacatatttgaggaaacaacccanaaaaaaaaaaaaaaaaaaaaaaaaaaaaaaaaaaaaaaaaaaaaaaaaaaaaaaaaaaaaaaaaaaaaaaaaaaaaaaaaaaaaaaaaaaaaaaaaaaaaaaaaaaaaaaaaaagggggggcccttttaaaaagatccaattttacttacccgtgcttgcaaagtaatagtttttttttggggcacccaa

SEQ ID NO: 8536 - DNA, 618 bp, Gossypium hirsutum
  Clone ID: LIB3828-011-Q1-K6-E12
aaatattagccaaactttcttccatcttgcgaaactcaaatctgagaggagtaaaggaagaaacttgaaagctctaaacataatcatggagattcgcaagaaccttctccaaaatcagagcataccccaaaaactcacttattctggaaccaaatcgttcgatccataatagccatcttcttcatcaattcgagaacgccatcaatccggatgcacgagacttgccgtcttttttcttccaaaacaagagtaggaaccgccctgttaatctcccgagggaaaaaagataagaaacactttcaaaactcttctcagtagaacgaatattatgaaaaatcgagctgagaatggatttatctttcgcagatgtcttaagcttttttattacaatcagagagtccccctccaagataattcgacgaaaacccatgtcgactgcaaaaaagataagccttccacaagctcgtgcttcagccacaaaagacgacattttcaacaacgtaagtacttgcccctacaacttcacacttgtagtctctagccaaaactgcagcaatagaagttctagagtccctttgaaaagcgcatcaaagtttattttgataaacccattattag

SEQ ID NO: 8537 - DNA, 650 bp, Gossypium hirsutum
  Clone ID: LIB3828-011-Q1-K6-E7
gtcaacctcattcctttccctcggctccacttttttatggttggatttgctcctctcacctcacggggatcacagcagtatcgttctttaaccgtcccagaactcactcagcagatgtgggatgctaagaacatgatgtgtgctgcagaccctcgacatggttgttacctcacagcctcagccatgttcaggggtaagatgagcaccaaagaggttgatgagcaaatgattaacgttcaaaacaagaactcatcctacttcgttgagtggattccaaacaatgtcaagtccagtgtttgtgatattcctcctcggggcctgtctatggcatctacctttgtcggcaactcaacctccattcaggagatgttcaggcgagtgagtgagcaattcactgctatgttcaggaggaaggctttcttgcactggtacactggtgaagggatggatgaaatggaattcactgaggctgagagcaacatgaatgaccttgtttctgaatatcaacaataccaggatgcaacagctgaggatgaacttgaatacgaggatgaagacgaggaagctgttcatgagatgtaaaggtggtatgctacttgatactatgtcatgtggtaatgcctcgttatactagagagcgaagtttggcg

SEQ ID NO: 8538 - DNA, 423 bp, Gossypium hirsutum
  unsure (1)..(423): unsure at all n locations; Clone ID: LIB3828-011-Q1-K6-F10
ggnaatgtggccaggaatcctntgaggagaattcagaaaattagactcaataatcaaactttccaggatagagttggatctgtaaaaggaggagtggagttcttggagctgtgtgggtttgagaaagttgaaggagaggagttcttgtttctctcaagaaacaaggtcgacatgcaagttctcaactcagctggatctgagctcaactctgctatcaataatcctttttttggggtcctttaactctgaaaatttactttcataaaactatataattaaggcatatgcattcatatatctattttggcttgttcctctttggtttttctttggagaatgtggaattttatctgtgaatttaattatgtaccaactgagtattttccgctcataactttcacatagtttggtttatttttactg

SEQ ID NO: 8539 - DNA, 619 bp, Gossypium hirsutum
  unsure (1)..(619): unsure at all n locations; Clone ID: LIB3828-011-Q1-K6-F11
attctgtcaaccccttcaatgtgttgccgctgaatggctcatagattttccacctacgaaaacactttcaccattggaagttctcatgctgtggatccttttaccgtggtaaaaacacggttctctgacaatggaaaggttggaatgctgtgccaacgtgaatggaggcccaagtcacttgtaacattttcggcagagtatgattcaaaggccataaatgcatcccctaagatggggcttgcccttgctctcaagccttgacgggaaggtctcattttggattccatatttttaaattttgatttgaccttttccccgaacccttgggagagttgttattcacccagattattttgtatcgaaacattataaaagaaaattgttcagatactgagttgatgaatgttttcaccagaacaatggtgggagaattgaacccaaatttgccaaaattttatgaggataattgcacagcagtttttgttgctgaatgcttctaatgttcatgtcgtatgatagtagggggtgtttcccctaatgttgtattgaacttcccagatttgtggtcaacaatgccttattgaagtaaanaaaaaaaaanaaaaaaaaataaaaaggg

SEQ ID NO: 8540 - DNA, 451 bp, Gossypium hirsutum
  Clone ID: LIB3828-011-Q1-K6-F12
aggccgtcttgacaatgcggttaatgctatcagtggtgctgcaactggtctgccgcctagcagtagcagtgcaaccataattgggttatccgctatcgccaaagctgttgccattgccggttatttcctcttctaagtttgagatttgcgggtagaatgctagttgaatttgtttatgaataaattaaatgtcacatatttctaatttgcttttaatttgatcatgtcatatgtaataaccattttagtttttttattttcccaaagctaaaataggaaaatcatagtgtgtcacttaataataatcataatacaatatggtttcaactacatttcgtgttgggttaattaattttttgggttaaattatacaatgaaaatttgaaagttgaaatatgatgcaagtccacatgttttttgtatatttgaaattcagtgcacatttattttt

SEQ ID NO: 8541 - DNA, 658 bp, Gossypium hirsutum
  Clone ID: LIB3828-011-Q1-K6-F7
gtggcctctacccgttttaccagacgtgaggttacagcaactggcatcatccgttacaagaatggtaagggagctgcctcatccgagttgccaccaccacctgttggttgggcttggtcactcaatcaattccgtaccttccgttggaacttgacttctaacgctgctaggcctaaccctcagggctcctacaaatatggttccattaacattacccgcaccatcaagcttgccaacactgcacaaaaagtagatggcaagctccgatatgctcttaatggagtctcctatgtcgaaccaaccactccactaaaacttgcagaatactacggcgtagccgacaaggttttcaagtatgataccattcccgatgagccacaaagtgacaacactaaggtaactttggcacctattgtgctgaacatgacacacagaaactttgtggaaataatcttcgagaatcacgagagcgccattcagtcttaccacttgtctggctactcattctttgctgtgggcatggacgttgggaaatggagccccgagaagaggatgaactacaatcttcttgacgccgtgagcagacacaccatacaggtattccccaactcctggtcagcaatcctattgacattcgacaactgcgggatgtggaacc

SEQ ID NO: 8542 - DNA, 562 bp, Gossypium hirsutum
  Clone ID: LIB3828-011-Q1-K6-F8
ctcgacatctccgtcaaaattgtgattcctataaggatatattttttaagtacagctaccttagatggtccttgcaagtctcctattgagcttcaagttcaaggcactgtgaaggctccggcagaccctggtgctttcaaggagcctaaatggattgctttcaatagaattgaaaatttcaaattgtctggcggaggagttttcgacggccagggaaccactgcttataaaagggaaggttgcaaaggtcatgattattgtggttcacttcctattaacctaagatttgattttttaaccaacgcaatgattcaagatataactaccaaagacagcaagcagttccaggctaatgttctaggatgcaaaaacattactttcgaacatttcaccgtatctgcacctgacgaaagcccaaacacagatgggattcacattgggagatcggatggggtcaatgttcttaactcggagataaaaactggtgatgattgtgtttcaattggggacggttccaaaaatttggttatcaatggagtaacttgtggaccaggacatggtt

SEQ ID NO: 8543 - DNA, 628 bp, Gossypium hirsutum
  Clone ID: LIB3828-011-Q1-K6-F9
attcaaactgtgaatattaagagtgtagggacaaatattgaggttactgatggagaaggttgcccttgactgttaaggaattggggacttgtgatctataccctcaaagcttaaagcataacccaaatgggaggtttgttgttgtctgtggagatggtgagtatatcatatatacagctttggcttggagaaataggtcatttggttcagcattggaattcatttggtcacctgatggagagtatgctgttagagagagcacatctaagattaagattttcagcaaaaatttccaggaaaagaggattgtccagccaaccttctctgcagagcatatttttggaggcactttactagcaatgtgctccagtgattttatttgtttttacgattgggctgaatgcaggatgattcgtcgaattgatgttactgtgaaaaatctatactgggctgatagtggtgatttggtggcaattgccggcgatacatctttctatatccttaaatacaatcgggatgtggttcaatcttacttagatagtggaagacaagttgatgaacaaggggttgaggatgcatttgaacttcttcatgaaaccaatgaacgggtcatgactggcatatgggt

SEQ ID NO: 8544 - DNA, 577 bp, Gossypium hirsutum
  Clone ID: LIB3828-011-Q1-K6-G10
gccagacggcctgctgcaccaacttcttcgaacagagcatcgtctcaagttgaagaagctcctgctgaggctgaaccaaagtttagcgcctttactggtacgggaagacgcttggatgggaagcctctgaagcagcagtctccaccagcttcttcatccgggtcaaaagacaaaggacctgctatttctaatgggaataatacccgaccttattcgggatcaagttcacaagctaccgcaggccaggctcaagggaaactcatattcggatcacatgtcaaccgttctaaggatacaaaacaggaatccggaaaagagactagatcggagcagcctgaaaagaaggaagagccaaagttccagccatttacagggaagaaatactctttaaagggttgattatattcatccacaattcatttaccttgggttgtttcgatacaggaaaacaccgtaaccatactttctggacattgtattatcgaaaaactgtaggttctcgtgtcaaaacgaagtgattccgttgtgaattttaaaatatttcaaagaacagaaagagaggattctacatgctggt

SEQ ID NO: 8545 - DNA, 608 bp, Gossypium hirsutum
  Clone ID: LIB3828-011-Q1-K6-G11
cccaccgtcgccggctctacatacctgactcaccacaaatgtgggacgcaaagaacatgatgtgtgctgctgatcctcgtcacggtcgatacttgactgcatctgctatgttccgtggtaaaatgagcaccaaggaagtggatgagcagatgttgaatgtccagaacaagaactcctcatactttgttgagtggatcccgaacaatgtgaaatcgactgtttgtgacatcccacccactgggctgaagatggcatcaacatttattggcaattcaacatccatacaggagatgttcaggcgtgtgagtgagcagttcacagctatgtttaagaggaaggccttcttgcattggtacacaggggaaggcatggatgagatggagttcactgaagctgagagcaacatgaatgatctggtctcagagtatcagcagtaccaagatgcaacagctgatgatgaagagtacgaagaagaagaagaggaacccgaatatgaggactaaggagaaggaaagttattgccattttggcaattcaaaatctcaactcccagttgctggtgcttttttttcctgttttggatgtgaaagaattagtcatttactttt

SEQ ID NO: 8546 - DNA, 225 bp, Gossypium hirsutum
  Clone ID: LIB3828-011-Q1-K6-G12
cctttttcactcttcggcctctccttaaattgcagcaacatcagctggctataagtagttagtaccccccacccccatttctataaaagtcaatgcctcattcttgtgttgctatttttagagtgtgaaatccatcaatcaatcatggaacctacatttcctcataaataatgatttcatgattttcctttgaatttatgaaattcaacttattattttgcttgt

SEQ ID NO: 8547 - DNA, 563 bp, Gossypium hirsutum
  Clone ID: LIB3828-011-Q1-K6-G7
ttcagcttcatgggacaagactgttaaagtttggaacctgaccaactgtaagattcgtaacaccttggccggacactccggttatgtgaatacggtggcggtttcacctgatgggtctttgtgtgccagtggaggaaaagaggagtgattctgttgtgggatttggctgaaggaaagaagctttatagtcttgatgcaggttccgtcattcactcgctttgctttagtcctaataggtactggctttgcgcagccaccgagcagggtatcaagatctgggatctggagagtaagagcatagtggaggacttgaaggttgatcttaaggctgaggctgagaagtctgacgtcactgacatcggaaataagaagaaggtcatatactgcactagcttgaactggagtgccgatggaagcaccttgtttagtgggtacactgatggtgtaatcagagtttgggggattggtcgttactagatatgcttgtcttgagttaagattttgtttcaaatgtcggaaggttttttggtttattttcttaatatggttggatattgaggcct

SEQ ID NO: 8548 - DNA, 614 bp, Gossypium hirsutum
  unsure (1)..(614): unsure at all n locations; Clone ID: LIB3828-011-Q1-K6-G8
ctcaagcggtctacttcttttccagccatgcagtggnaaggggctaacnntatcatgatacatgaaagaagccatgttttacttgcttaacgattactacatcacctgtgggcggatcaagcggtcggagtcttcgggtcgaccgtacataaagtgtaatgactgcggcataaggttcgtggaaggtgtttgcgatgaaactgtggatgaatggcttgaaactgacgacgattctaagaggaatttgcttgtttatcatcgagccatcggccctgagttgtccttttctcctttagtttacttgcaggttactcagttcaaatgtggtggaatttcactagggctgagttgggctcatatccttggagatgcattttcagtctctaatttcatcaacaattggggccaacacatggctatggtcaatgtcaatagttccccagccctcgcaccaagatccctaaccaatactgcaaaacctgaggcacccagtgaaccactttctgcaaagcaagtgaaccatgtgggagacctttgggtgcttgccaataactgcaaaatggaaactttttctttcaacttgaccacacaacatttatcaaacttacaagcca

SEQ ID NO: 8549 - DNA, 631 bp, Gossypium hirsutum
  Clone ID: LIB3828-011-Q1-K6-G9
gttcattgcttccatatgttaatgctgagggtttggacaatggttttcatgacatctacaatgaaactgcatctcttgggtttcatggttttgggcatagtccacaaatgcaacaaagagcttatgctccggtttcatcttatctgcctcctgttggggatcctatcgggctgtccaatgcaaggcatttcatcaccatagattcatcttatcaccatccatcagttccccgaaatattccacatgttacttcaaaggcccagttttctcatttagagtgtcctgtaaatattgagcaacaagtggttggaaaaagatttgggctgagaaccaattaccttcctcagttaggatcatttgatggaggaagaaacttctttggaagctccagcagtctttgctcttcataccaagggtctgatggttttgcggttggtggattctgctcagactggtcaaagccttttagtgggaagagttctctgtttcatctctcatatgcaccagcttctccaaaacgggttggttcactagagttttcttcaaacggtcctgcaatggtttcttttcaaaaaggaccatttaatgggtttggttgtactagctccagctctagaggctacagtggtag

SEQ ID NO: 8550 - DNA, 267 bp, Gossypium hirsutum
  Clone ID: LIB3828-011-Q1-K6-H10
cccatccccaaagtagggagagataccatattaagatgaaatatgaggaagagttggttgtcgtcgtattaattatacaaaataagaagtaatgatgttgcagaagggcttgctataaaatcctgttggataaaaagagtaattatgaagaataaatagctcaaaacaatatttgatttacaatatcctaaagttccttgaatcttgttttgtagccatatgtaattaatgcatgtacatgctaatatatatgattttctttgctat

SEQ ID NO: 8551 - DNA, 480 bp, Gossypium hirsutum
  Clone ID: LIB3828-011-Q1-K6-H11
atagatgagggttaaggggccagtgagtatgcccaccaaggttcttcacatcacaacaaggaagtctccctgtggtgaaggaacaaacacatgggatagatttgagctccgtgttcacaagcgagttattgatcttttcagctcccctgatgtggtcaagcagatcacatctatcaccattgaacctggtgttgaggtggaggttactattgcagattcttaaatatgcctcacttatatgctttttggcaacctctagttttagtcaattagaagacttccatctgatatagccctcgatgtcctaaacaatcttttaagcttgagtggttggttacagggcttttgtagtttttgattttcccatgctagtattaaagttaaggttctattttgccctgtggctctggattctctttcctttttgttacctaaaaagatcatgtctggatgattttgtttattgcattatttgacatt

SEQ ID NO: 8552 - DNA, 621 bp, Gossypium hirsutum
  unsure (1)..(621): unsure at all n locations; Clone ID: LIB3828-011-Q1-K6-H12
ggnaatcagttcaccattaatggccactcctacttcaacctagtccttatcaccaacgttggcggtgctggtgatgtacatgcggtggccatcaagggctccaggactggttggcagcccatgtctagaaactggggccagaactggcagagcaacacctacctcaacggacaaagcctctcatttaaggtcacaacaagcgacggccgtactgtggtttccaacaatgttgccccagctgggtggtcctttgggcagaccttcactggccgccaattccgctagaggaacacattatcatcttaggcttttgaagttttaattaataattactatataaatataccaagcatccgaagtagtatttaactagcttgacttttagtatagctagcatattatactctatctatagggccctatagtgggactttcgggtcactcaaaaatgtgaagggcttattttaaagtagcccttttatcattttgggtttttagttttattatggggtaggtgtcctaattaaggtacctttttaaaaaaaaaatattaagggtcacgtttccttctgttgtttgttaaaacaggaggagatggcagaggtgggacttttaccaccc

SEQ ID NO: 8553 - DNA, 657 bp, Gossypium hirsutum
  unsure (1)..(657): unsure at all n locations; Clone ID: LIB3828-011-Q1-K6-H7
cggccgcgtgggcggacgcgtgggcggacgcgtggggnngaaagtggcagaaaattgacatgtcaagtggtccgcagatttattacctatccagcataaatcctgatggaagagatgattactgtgaacaacttggatggaaaaggctgcaagaatataatcctgctcaaagatgttggaagtatcttagcaccttagctgaaggaaatactatgctggaaagcaatttaccttttgaagatgagctggaagatgaagattattaccctagtttgccatttgcagcacttttttcttgtttgaaggccaaaggcttgaaggttacgtgtttactatgctactgttcggaaggggataatatacaggatgcttttcatttggctgaggcagcatgcagacttttaggcctaaatcctaatgcttttcctggtaatggaagtggtggttgggtcattcctttctcatggcacactgtttatggaccgccaccggatatgtctatcttttaggcttagatctgaccatgcttagtgaagttgacaaagctaaatctgtaatctattgtttgaaacttgagattttatgtttttattacaagaaaagtagcatgtattggccctgatggaagcaggcaacaaaaaaatgctcaactaaata

SEQ ID NO: 8554 - DNA, 607 bp, Gossypium hirsutum
  unsure (1)..(607): unsure at all n locations; Clone ID: LIB3828-011-Q1-K6-H8
gccaggaccttgntggggtttcgcaccaattccacgaggaggatgttgaagaagcagaagggaggtccttgtggagcaaccaaccctatcgatcaatgctggcgatgtgaccgcactgggaaagaacaggaaaagttggctgattgcgcacttggatttggccgtggtactaccggtggaaaggatggacccatttacgttgtcactgatcctaccgatgatgttcttaacccaagttccggaactttgcgtcatgctgtgatccagaaccgcccactttggatcactttcgctagggggatgattattaggttgaaagaggagctccttatgaccagcaacaaaaccatcgatggtaggggagccaatgtgcatattgcttatggggctggtattaccatccagtttgccaagaacgtcatcattcataacatccatatccataacatcttccctagcaaaggtggcaagatcaaggatggcgagaaccaccttgggttgaggacaaggagcgatggtgatggcatctcccttttcggagcaaccaacgtttggcttgaccatctttccgtttacaagtgctccgatggtatcatcgatgctattc

SEQ ID NO: 8555 - DNA, 624 bp, Gossypium hirsutum
  Clone ID: LIB3828-011-Q1-K6-H9
attgcccttaacctcaatccctcaccttgatacattgaagagaattatgggaaggcaaaagcgagcttcttctccaatcaaaccctgtttacaatgaaaatcccagtcctcattcacggcgataacaagccaatctgcgaatctctcatcatcgtacaatacatcgacgaggcttggtcttccggtccttctattcttccttctgacccctgtgaacgtgctgtcgctcggttttgggctgcatatcttgacgacaagtggttcccagcggtgaaaagtataggagtcgctaaaggagaggaagcaaagaaagcagcaatagcgcaagtggaagaagggttggctttgatggaagaagcatacgacaagtgcagcaaagggaagggttactttggtggggatgaagttgggtaccttgatatagcttttgggagcttcttgggatggcttagagtgacggagaagttcaatgcgatgaagctgctggacgaggggaagacgcctggtctggtaaaatgggcggacaggttctgttcccatgccgctgtgaaggacgttatgcctgataccgacaagcttgcggagtttggtaagtttgttattgccaaaataagagccgctggt

SEQ ID NO: 8556 - DNA, 649 bp, Gossypium hirsutum
  Clone ID: LIB3828-012-Q1-K6-A10
gaaacagaatggtgtctttgaagctgcagaagcggctagccgctagcgtcctgaagtgcggtcgcggcaaggtctggctcgatcctaatgaaatcaacgaaatctccatggccaactccaggcagaacgttaggaaacttgtgaaggatgggttcatcatcaggaagcctactaagattcactcccgctctcgcgcacgtaggatgaaggaggccaagagaaagggaagacactctggatatggtaagaggaagggtaccagggaggcaaggttgccaacaaagattctttggatgaggagaatgcgggtactgaggcgattgcttcgtaagtacagggaatccaagaagattgacaagcacatttaccatgacatgtatatgaaggtcaagggtaatgtgtttaagaacaagcgtgtcttgatggagagtatccacaagtctaaggctgagaaggcgagagagaagaccattgctgatcagtttgaggccaagcgtgctaagaacaaggccagcagggagagaaagttggccagaagagaggaacgccttgcacagggaccctggtgtgaaggcaacacccacagcggcaccccaacaagccgagggagttaagaagacgaagaagtgaataaataaggaagatggct

SEQ ID NO: 8557 - DNA, 262 bp, Gossypium hirsutum
  Clone ID: LIB3828-012-Q1-K6-A11
caacactccacctatgcatggtgtctgtgaattcacaaatctccaatagttgggtatcaatggctgtaatctaaagggtagcttacccatgtgtttctccaacctcacttcccttaaaatgttatctctctcttccaatcagttttccggaaatatatctatccttaagagcctaaaattgcttaaaaaaaaaaaaaaaaaaaaaaaaaaaaaaaaaaaaaaaagaaaaaacaaaaaaaaaaaaaacaaaaaaaacatacac

SEQ ID NO: 8558 - DNA, 632 bp, Gossypium hirsutum
  Clone ID: LIB3828-012-Q1-K6-A12
ccccgcgtccggctcaattgaatttcaaagtttttagatcaatgatttccttgggctgcttttcacttttcctttttcttacgttagattttggaattcgatttacatttagagtgtgtttgtttggtggaaaatattttctagaaaacattttcattcatttccagtgtttgttttgaggaaaatgatttccataggaaaaaattttacaaacacgggtaaaatccaaagaaaaattttggaaattgtcttaccgatttctaatccgtaagacattttccctttctcctttctcttctaagcaatctcctctctcttctaagcaaattttcttccacatcctctgcgtcctcatctccattcgtcacctcacctcaccatcttcgtccgtcatttccgtcgatcgtcggccttacttgtattttgaagaaaccctaaaaaattagcagccacagtcaagaaaagaagacccagaagtaatggttctctttctgtcatcaataggatgggaatgaagttttctttaggattaaaagaagcactcaactaaagaagctcatgaatgcatattgtgatcaacaatctgtggatttcaactcgattgtcttcttgttcgatggtcaccgccagcg

SEQ ID NO: 8559 - DNA, 506 bp, Gossypium hirsutum
  unsure (1)..(506): unsure at all n locations; Clone ID: LIB3828-012-Q1-K6-A7
accagcgtacgaaaggttaagtcgaacagggcagtcaaaacaagacactgcacnataattccacgcattaagctctcctcaaagacacccaaaaccctcaccttcaggttcaatctctgaaatacaagcaacacgcaaagatggaggcgtcattggtaacttcattgcaaggtcaaaggtgagctcagatgttactgctcctgccagcaacactgctgcatgaggaaaagcatatctttcgccaaaacgtactactgactctgagagggaaatcgaggctattctgttaggcgcctgcttctgaattttcagctgtcaaagctagctttaccgaagctcgaaataaaatttctgatctgatatatatctccaatcttagttctctgatatgtaaagaactgtttactgaactttaaaaagcacataagaatcaaaattgctcttaaaaaaccatcgtgggatgagacttcattctcagtgaaataatatgttgtaactctttttct

SEQ ID NO: 8560 - DNA, 642 bp, Gossypium hirsutum
  Clone ID: LIB3828-012-Q1-K6-A8
tattgccctcacttcagtgggcttcgccgatcatctcccaacttacacaatgcaccatgtcaatctttccttcaacacttcagctctcaagcccgtctcccttcttctcccaaaccttgcagagctgttattgccatgtccggctctgggaagttctttgttgggggtaactggaaatgtaatggaacaaaagactccaccacgaagcttgtttctgacctgaacagcgcaaagttggagagtgatgttgatgttgttgtggcacctccctttgtctatcttgatcaggtgacttcttcattaactgatcggattgaggtatctgctcagaactcttggattggaaaaggtggggctttcacgggagaaatcaggttagctaaccttggctttgtgcacaaaacatgttaattcttcataattttggagcctttaacatagtaatattggctttttacccttcttgggaatataaaactgcatcattttttcatttagcctaccattagaaacatgtttaaaaatattcaggacttcaattacttcctatgatgtcccaatgagtttaatttgttgccttgatactagtggaatatttgtttttgctggtggataaatttcaaattatttagttcagacttc

SEQ ID NO: 8561 - DNA, 630 bp, Gossypium hirsutum
  unsure (1)..(630): unsure at all n locations; Clone ID: LIB3828-012-Q1-K6-A9
aaaaccctaatcaaaaaaggggatattgtggctaatttgcattgcttcgatctcaatccttctcccatttctctgcaatgctttctctcccgaatcgccaacggatcgccgagtccttgttctcctcgacgacttcgccatcaagtcgtcacactccctctacttcaatgccctcaaatcacgtggcttcgacctggaattcaaactcgccgatgatccaaagatcgccttgcaacgctacggccagtatctttacgatgccttgatcctcttctgcccctccgtcgaacgatttggaggatctattgatgttgccgccattgtcaattttgttgattccggtcatgatttaattgttgcggcggatgttaatgcttcggatttgattcgggaagttggtactgaatgtggagttgattttgatgaggatccttcggctatggttattgatcacattggctatgctgtttcgggaactgagggagatcatacattgattgctagtgatgattttattaagtctgatgtgatcttaggaggcaaaagaattgaagctcctatacttttccgaggcatcggccattcagtgagtcctgccaatagctnggggctgaaagttctctcagcttc

SEQ ID NO: 8562 - DNA, 508 bp, Gossypium hirsutum
  unsure (1)..(508): unsure at all n locations; Clone ID: LIB3828-012-Q1-K6-B10
ccgtccganaaaaccaaattaataaattttgttttccgtctcgcagcaggtctctcgactctcactaagcctattcttcaataccatggacatgaagaagatctcctgcgccgtcattgtcgccgccgcctctatgagcgcggtcctggctgctgactccgctccagctccagctccagcttcagctccaggtgcagcttcagcttcagcttcagcagctgccccaggcccagactccaacgtcgcaacctcaacaatgcctgttcttgtgtccttggttggagccacccttgtttctttcttttcctactatttgcagtaagccagcaaaaatctacgaaaccatgaagtattgaagaatcaaaaatggtgaatgaataaatgtaaaatattactcggggttcaatccattttacttgctttcttcttccccttttttttggttcatcacttcatttgtacgtttattaaaaaaaataatttgaattccatgtgatactttgcaccc

SEQ ID NO: 8563 - DNA, 636 bp, Gossypium hirsutum
  Clone ID: LIB3828-012-Q1-K6-B11
ccccgcgtccgcgctctctgaaatcttagttacatccatggcagcaacatctctaaatgcccctaacgctcctctccttcaaaagacccatcaaactcatgtctttctcaaacccatctccaccattccttgtcaaacctctgccaagcgcttctgcatctcttgttccgcaactacccaagatcgcctctccgtccaatcccaatctcaagatcgggtctttaacttcgccgccggtcctgccaccttacccgagaacgttctcctcaaagcccaatccgagctttacaactggcacggatctggcatgagcgttatggaaatgagtcaccgtggtaaggatttccgttctattatcgaaaaagccgaggccgatctccgttcccttctcaacatccctgaaaactacgccgttttattcctccaaggtggagccaccacccagttcgctgctgtccctttgaatctctgtgccccaggtgactccgttgattatcttgttactggatcttggggagacaaggctttcatagaagctaagaaatactgcaaccccaaagtcatttggagtgggaaatcggagaattacgtcagggttccctcgttcgatggtttagaactgaaccccgatgccaa

SEQ ID NO: 8564 - DNA, 347 bp, Gossypium hirsutum
  unsure (1)..(347): unsure at all n locations; Clone ID: LIB3828-012-Q1-K6-B12
cggacgcgtggggtccaatagcgggtgttaaagcagttttggttggggagtcgatagtgaagcaaagcgaccctgngaaaaggaataagtggactttttggtaaagacatttcgttatgagttcacacagggnaaaagtggactctggatgtgtgcttccgagacttcatttacaattactaagtgcagttaatcgatcagaatctttcagcatgttgaatccatatttccaagtggagcatctttacataatctttgtaccttgattgtataaattataatactaatagaataaattgcggatgtgcatttctgttctcgtgttttttaatcatttacttttccgt

SEQ ID NO: 8565 - DNA, 634 bp, Gossypium hirsutum
  unsure (1)..(634): unsure at all n locations; Clone ID: LIB3828-012-Q1-K6-B7
gttttgaactgaaaatattgtgattattgagattttatggtcttaagtttacattgactatatgaattccttcctttctgatttgaggtattaatgttcagatgatttagatttcattgccacaaggtatactctttctttgtattcaatcgtcttccttgtttagcaaaatgattttgtttttcaatcctctttctcctttttgtaatggttttggtttacatttcaatcctctttctccttacgagcagttatttgaatgacattcctgctattttgatgctccctcctagatgaagggttttagttttaccctttccttctctgtcagtaggattagattgataatgaagcttctttgtatatgattgtgatcaactttgaagatttcttgatgtttactgaagattctattttttaagttatattgtttgtgttcattttttttgtttatgcaaaaaaaaaattgagcttaaccgttcactttttaaagtggcactgtttatattaagtagtcaaattatggtctatgatcaatcatattgtgcancagtgttgtcaagggcggaaggtgccttccaggcactagcacccttatattgcctcaagcggaaaaaagatagccaagttaagt

SEQ ID NO: 8566 - DNA, 644 bp, Gossypium hirsutum
  Clone ID: LIB3828-012-Q1-K6-B8
tacagtttctgggtttagttctgctctgtggttttttgacatctaaagctttaaaaattaacactaactgggcttttaacatggtaggggtgctgttcgattctatccgaaaggtccctcatcctgtttagtagatgtgaggcagctctacactatattttcatcacactatgagcatatataacctgttagattgatgttgctgttgtaagaccaatatgataaaaccatagacgagagctaatgagtgtttttattcgaactgtactcacttgctgcaatccttcttttcttttcagctaagaatttcatatgaagttcctcaacttttgattccggtggcttccgtaagtaatctttttcatcattttgaggttaacatgaagtaatccgttatttttctgatatattcaggtacttcaacctttcatggaaaatttactggaacgaggtatggaccgatttgcaaaatttgctaaaagttcaagctcaacaagataatcatttcataatcgctgatccattgatgtgacagttcacctatattcaaaccccaataccccaccgtgtgggtatagttcttcattcatctcttaaaaatctaccctgattttaagattttatcacattattattattatttt

SEQ ID NO: 8567 - DNA, 638 bp, Gossypium hirsutum
  Clone ID: LIB3828-012-Q1-K6-B9
tttcactctcttcgcctttcttttcttccctatttcagcgacgacgataacactctacaacaaatgctcacatccagtttggccagggattcaacccagcgccggcaagccaattttagcccgcggtggattcaaactcccaccaaacaaagcctactccatgaatctacctccgttatggtccggtcggttctggggtcgacacggttgttcctttgacgcctcgggtcacggccgttgcgcgacaggtgactgcggcggttccttattctgcaacgggctcggcggaaccccacccgctacgttagcggaaatcaccctcggccaacaacaagatttctacgacgtcagtttggtggatggctataacatcgctatgtccattacacctttcaaaggcgccggtaaatgtagctacgccgggtgtgttagtgacttgaatttaatgtgccccgtcgcgttacaagtgaggaataataaacaagtggtggcttgtaaaagcgcttgtttcgcttttaattcaccgagatattgttgtaccggcagcttcggcagtcctcagtcgtgtaaaccgacggcgtattcgaagattttcaagactgcttgtcctaaagcttattcttatgcttacgatgatc

SEQ ID NO: 8568 - DNA, 652 bp, Gossypium hirsutum
  Clone ID: LIB3828-012-Q1-K6-C10
cccagcgtccgatccaatcaatcgcttcaactatctcaccaaacacatatccaatggctccgatcgctgtcggcgacgtgttaccggacggtactctctcctacttcgacgccgatgataagctccagcaggtgtccgtacattccctggctgccggtaaaaaggttatcatctttggcgttcccggtgcctttacccctacttgcagcttgaagcatgttcctggattcatcgagaaagcaggggagctgaaatccaagggcgttgatgaaattatttgcattagcgtgaatgatccctttgtgatgaaggcatggaccaaaacttaccctgagaacaaagatgtcaagtttctagctgatggttcagcaacatacacccatgcccttggtcttgagctcaaccttggcgataaaggtctcggcactcgttctaggaggttcgcactcttggtcgatgacctcaaggtgaaggcagcaaatgtcgaatctggaggggagtttaccgtgtcaagtgctgatgatatccttaaagctctttagatttgctttgtgcctaataaggtctatgttttcttggcctcggctattaatatagattgctttatttagcacaccttttatggtattgttaataataaaatacgtctctt

SEQ ID NO: 8569 - DNA, 623 bp, Gossypium hirsutum
  Clone ID: LIB3828-012-Q1-K6-C11
aaaaatctcgcccagtttttttgtttctcctcatgcattttcattttccgttcattttagcttcttaacacgatagattttcaatatctgatatcccatttggttttttttttaattttcatttcttttggatgaaccttatttgtgttttagaaattttcttttgttttcaaccgattttaagctgaattgaggattttatttttgatatatttcataatgagcggagacaattttacggacgggatacccaaagtccgtccggttttgggtgacatttcaaatcgatcagttaaaagagggttttcgtcgatttcggaaaagttagggtttgattctcaagaagaagcagattcgcaatttgcaaagcaagttcgtataggtgtagaaacatttatcaaagagaaatctcaaaaacccgaatttgaaccaaaccctaattttttgcctacttgttgtggtgacattgacatattaaaagaggatttagtgtcggtcaatgacaaatttggtgaggctaaagaagggtttgaattgtctgatagtgatgatacgttggaagaagtcaaggtgttgcggaagtagggtgtacattgaatgagaattgtaggaatgagggtgag

SEQ ID NO: 8570 - DNA, 632 bp, Gossypium hirsutum
  Clone ID: LIB3828-012-Q1-K6-C12
cggtcgcgtgggccgggccaaaacgaggaataggcggccacggggtaccggaaggaagcaacagttagcttcccttggtgactggctgtccggttcagctgggatgggttttactccacatgtcatcaccgttgcagtaggagaagacattgcaacaaagataatgtcattttcacagcaagggcctagagcagtatgcattttgtcagccaacggggctgtctctactgtaactcttcttcagccatcatcttcaggtggcactgttacatatgaggggcgattcgagatattatgtctatcaggctcttacctgctgatcagcaacaatggctcttgcagccgaagtggtgctcttagtgtttcccttgccactcctgatggccgcgtcattggtggaggtgtcggagggatgcttattgcagcaagcccagttcaggtgattgtcggaagttttcaatggggtggtccaaaggcaaagaacaagaaaccggaaggtcaagaatgtctaaatgactcggataatcagagtgtcgacaatctagtatctccgtctggcatttcaccgagtcaaaatctgattccaccttcaccagcaggtgtatggcctggttcacgaacaatggatatgc

SEQ ID NO: 8571 - DNA, 665 bp, Gossypium hirsutum
  Clone ID: LIB3828-012-Q1-K6-C7
cggagttcccaggcagcgatcgtaggagttaggaagtgttggcgaatccaacgacgattcaagacttaattaaagatgactacaacggagaggcgcttaaggttagtcaagaagtgtaggatttatcgattgatgacttgcaattgtcgtttgataagatgggggaatacgatgtgagtaagatcgatgattacttactgaacctgacagtgtggttaacctgtgccttaactacccaacaaacatgtgtagacacattcacggaggtaagtaatgaacaagcgagaaaagatgcaatattagtgctagagagactttgcatggcatgcttacacgctctatagctttataccatgagtcactgaagttatccaccgtgctgaaagaccttaacattccatgcctcgcaggcatcaacacgactgggtttgaacgtaagctcttgtctaatgatggacctgagtggatgggccatgctgagaggaaactacttcaggcaccaattattaagcctgatgttgtggttgctaaggatggtagtgggaaatatgacaccatcaccaaggccttggaagaagtccctaagataagtcccaatcgatttgttattcacattaatgctggtatttacaaggaatatatcaatgtgaccaagcaaatgacta

SEQ ID NO: 8572 - DNA, 635 bp, Gossypium hirsutum
  Clone ID: LIB3828-012-Q1-K6-C8
ggggacttgaatggccctgtaggccctgcaggctattcttgcaataagacagtcaccgtaaatgacttcgtttactccggcctcgctgccacaggcaacacttcgaacctcataaaagctgcagtaacaccagccttttcggctcaattcccgggtgttaacggactcggcatttcaatagctcgtttggatttatctgttggtggagtgatacctatgcatacacaccctggggcttctgaagtccttgttgttattcaaggcacaatttgtgctggtttcatatcctcagctaacaaagtttacttcaaatctctgaataaaggagacattatggtattcccacaaggtttattacatttccaaatcaatgcaggcaaaactcaatccttggcatttgtatccttcagcagtccagaccctggtctccaaatcctcgactttgccttgtttgcaaatgacttgccgactgacattattgaagaaaccacttttctggatgctgctcagattaagaagctgaagggtgttcttggaggaactggttaatattatctgaacttgttgagagtcccttttttttttttttgtatgcttccacgtttgcttgtgtcttcttgtcagtggtagtttgt

SEQ ID NO: 8573 - DNA, 613 bp, Gossypium hirsutum
  Clone ID: LIB3828-012-Q1-K6-C9
agggcaaaaatctaacatgtattaaaagcttactaaatattacaatttcattattgcaatatttcctctattcatcctctctaacaatgaaataattcctaattagattgttgataacacatgaggacacaaggcagcttacttcttttcaggattatgaaccatctccaataggaaaagattacttactagttatgaaaacaagataggagtacatgaaaaagatgggcttccaaatttcgaggaaaccgacaagtttccaactcactaggttactgagtctagactattgggtactcgaagagggttggaacaccgacggtgctgcagagccatagtcatatgctacataactagtttgacccccataagcaccactggttggaaaactggaaacccccaaattttccaccgggtgtacgtagtgctgttgagtaactgcagcaggactttgtgagtgagtcacaccatatgctgatgcataaggagcagtaggagcctcgaaaacattctggccaacatagttatactgtgcggaaaatcgtgcagccgggctttgctgcgctgagggagctgggtttcggcgattgaaaggggataaacatttgaaaac

SEQ ID NO: 8574 - DNA, 493 bp, Gossypium hirsutum
  Clone ID: LIB3828-012-Q1-K6-D10
caatcaccaccggatccccattctccagcaattaaacgcaggtctcgttcatttctggtgcgtttaataatccctttatacgccatggacatgaagaaggtctccaccgccatcattgttgctgccgcctcaattagcgtcgtcatggctgccgatgcacctgctccctccccttccgccggtggttctattcctagctcctctcccggttccgccccagcatcaggaccagattccagcgtggctgccgcagccttgccggtccttggatcattggttggggcttccattgtttctttgttttcttacatgctacatgtatgaaaaatcaacatgtgaacgaatattatattttatattatattttttattttttgaaagaaacatgtgatgaataatgaaaaaattgaaatggagctttggaaagtatgttgtgtttatgcttttacttttccatttattcaaaacaatgaataacatgaaaataacaatg

SEQ ID NO: 8575 - DNA, 636 bp, Gossypium hirsutum
  Clone ID: LIB3828-012-Q1-K6-D11
catcttcctctttctttaaaacctcttcctatttaatttccgactaaacttgcgctgaattccatggctactgcagaggttgtatcagctcagactgcaatccatgaggagaaacctgaagaagtggtcaaggttggagaaattgcaacagaagaggtaccggctgttgctcctgcagcagaacctgttgctgaagaaccaaaggaagcagtgcctgaagcagcatccggagaaccccaggctccagaaactgaagccacagttgaaactgaatcaaaggaggtggttaaagagcccaaggctgtgactgaggagccagaagttgagaaaaaagaagaagagactcctaaggaaacggtagcagagccagttgccgaggagtccaaggagtccaaggagacttctgagccaacagttgaagaaaccaaagaaagcacagagtctacagaagcagcagcagcagcagcagcagcagcagcagaagtaaaagcagaagccgaaggcgccccagtggaagcacccaaagaggaagctgcaaaggaagaagagaaaccagctgaagctcaagctgagaatactactaccgagtaaataagcttgtaagatggggaatcaatggaagcttgtgtagtgggc

SEQ ID NO: 8576 - DNA, 637 bp, Gossypium hirsutum
  Clone ID: LIB3828-012-Q1-K6-D12
atctggtggtgtggcagtgatacaggttggagctcaaactgaaacagagcttaaagaaaagaaattgagagtagaagatgctcttaatgcaactaaggcagcagttgaggaaggtattgttgtcggtggtggatgtactttgctaagacttgcttctaaggtggatgctatcaaggattcactcgataatgatgaagaaaaggttggagcagatattgttaaacgagctttgagttaccctctaaaattgatagctaaaaatgctggtgtaaatggaagtgtggtgctctccaacgataaccctaggtatggattcaatgctgccactggaaattatgaggatcttatgtctgcaggaattatagatccaaccaaggtggtcagatgttgcttggagcatgctgcatcagtggccaagacattcttgatgtccgattgtgtggttgtggaaataaaggaacccgagaccgtgcctgctgggaaccccatggataattcatgatacggctactaaagcagatgttgaagggaaaccgaataaggtatcaaatctctatcgtagcaacgatgagcctgtttagagtagaatgcttaattattgaaaaatccttgagatcccggtgatatatatgatttg

SEQ ID NO: 8577 - DNA, 581 bp, Gossypium hirsutum
  Clone ID: LIB3828-012-Q1-K6-D7
gcggaccgcatgagcaaggagatcactgctcttgctccaagcagcatgaagattaaggtcgttgcgccaccagagagaaagtacagtgtctggattggaggatctatcttggcatcactcagcaccttccaacagatgtggatttccaagggtgagtatgatgaatccggtccatccattgtccacaggaagtgcttctaagttttgtaattgcttttgatggtggtctacattttgcatttagttggctttttttggtgtgccgtgttaagtgaactcaaaagtctggtttatgtcggggaagttagggatcattgtacgatggtctacttgatattaatgtactattattttagcctttcaccgtatcgccaccattaagatgacgggccctatggggctggcggtgggcggacaattggtgcttaattccctacttgcttaccttccatcttttaagcattttgcttaagaggatgtttggagctggagactgtattgtggtgcttattattatttaatattcaagggttttgagaacattaatgttaatagctattattgtacgagatttttttttg

SEQ ID NO: 8578 - DNA, 623 bp, Gossypium hirsutum
  Clone ID: LIB3828-012-Q1-K6-D8
tgattgtctccaaggttttcaagtttgccactctcttggagggggaactggttcgggtatgggtactctgttgatttctaagatcagagaagaataccctgatagaatgatgctcacgttctcagtcttcccatcaccaaaggtttcagacactgtggttgagccgtataatgccaccctttctgttcatcagcttgtcgaaaatgcggatgagtgtatggtgttggacaatgaagctttgtacgatatctgtttcaggactctcaagttaactactcctagctttggtgatttgaaccatctaatctctgcaaccatgagcggtgtgacatgctgccttaggttccctggccagctcaactctgacctccggaaacttgctgtcaacctcattcctttccctcggctccacttttttatggttggatttgctcctctcacctcacggggatcacagcagtatcgttctttaaccgtcccagaactcactcagcagatgtgggatgctaagaacatgatgtgtgctgcagaccctcgacatggttgttacctcacagcctcagccatgttcaggggtaagatgagcaccaaagaggttgatgagcaaatgattaacgttcaaa

SEQ ID NO: 8579 - DNA, 295 bp, Gossypium hirsutum
  Clone ID: LIB3828-012-Q1-K6-D9
ggagtatgagagggcaatcaggagattaatggtggaacctgagggacaggaaatgagagagaggatcaagttaatcaaagacaagatcaatctttgtctaaaacctggaggttcatcttacaaatctttggacaatttggttagttacatactttctatgtagtccattaagtctcttatgtaatattttaataaaacatttaaacccttatattttttagagttaaaaaaaaaaaaaaaaaaaaaaaaaaaaaaaaaaaaaaaaaaaagcgatctaaaaaaaaaaaactaaagt

SEQ ID NO: 8580 - DNA, 630 bp, Gossypium hirsutum
  Clone ID: LIB3828-012-Q1-K6-E12
atagatgatccagtacgtcttcctcctcctatccctctcagtctcttctccttctccgtttcagctgccctcgggcctgaaccctctttcatcaccttggatacccatgtggcaaaaccggtttccataatgccaggcaactttcactccggccttcagaaagtctgctccgccaccgatgaacccgtcgattgtatccagctgctttctcccttgatgaccgacaggaccgccgtcgatcccatttccatcctcagggtgggtatcgaggcgaccaaccagaaggtgagagaagccttggacaaagctaatattatcatgaaagatccatccaccacccccgaatgcggcgagatcctctggacttgcgtcaagaacttcgaggacatcatctactcggatcagaaagccatggaagccatcaccgagcacaacgccaaccacatcatcgaagaactctccgccgattccgcgtctgtgtctccctgcgaggacgagttggaagcggctaacatccagtcgccggtgagggatatcgttaagtcgattcacaagacgattcgcatcaatttggccatcgctgctgtacaggtccatttttgaaggcctgggaaattatcatgtgaaagc

SEQ ID NO: 8581 - DNA, 579 bp, Gossypium hirsutum
  Clone ID: LIB3828-012-Q1-K6-E7
gtcagatgattaccattggtgccgaacgttttagatgccctgaagtgcttttccaaccatctttgatcggtatggaagctgcaggcattcacgagacaacatacaactccataatgaagtgcgacgtggatattaggaaagacttgtacggtaacatcgtcctcagtggtggtacaaccatgtttcccggtatctccgataggatgaccaaggagatctcctcattagcacccagcagcatgaagatcaaggttgttgcaccacctgagaggaagtacagtgtctggatcggtggctcgatcttggcttccctaagcaccttccaacaaatgtggattgccaaggcggagtacgacgaatccggtccgtcaatcgttcaccgcaaatgtttctaaacagttcaatgggagaaaatgatcaaaaagagaaagcaatgactgctattagtgcagctctgctttgttctacggttctttttcgtctatttgtttttatcttcatgaacattgagagaaagcgaggggtttcattgtcttctaattcttttatttgttataaatgaatttgatgttcacaagc

SEQ ID NO: 8582 - DNA, 588 bp, Gossypium hirsutum
  Clone ID: LIB3828-012-Q1-K6-E8
caggctcaaagcaactattaattacttaataccaaaaaagaaaaggaaaatgagggcgttgttatctcagttttggtggtggtagccatggttcagttgatggttaggccaggagaggcgaccataagttgtgaagaagttattaatcttgtgagaccctgcgcttcttacattatgactgggatagggagtcccaccgttgcgtgctgtaatggtttggaccaactccggaaaagtgccacaaccaccgctgacaagcagcaagcatgtcaatgtgctaaggacgctgctgctggttttcccatgataaatgaacaagctgccgcatcgcttcctactatctgcaaaattcatattgatttcccaatctccaagaacatcaattgccaggaaatccactaagatggaagccatcaagaaattaaagaaataagggcgccgataagggagccattaattaggtgttgcaatcctaatatatttatgttccaacctcaaaagtttatttaatatgcaccttgtaagagatcatgcactgtgtatctgatcgattgaacctaataataattataattaattataataatg

SEQ ID NO: 8583 - DNA, 631 bp, Gossypium hirsutum
  Clone ID: LIB3828-012-Q1-K6-E9
ctcaaccctaccgagttcaatggacccggtgttggcattcacgaagacatgttgtcccaaaggttccgaaattggtactcttggttttggttttgaaggtggtcctgaaaaatgttgttcttctggatgttccggtaattgtaatcctggtggtttcgttctaccatttcctcaaattccagaaatcccaagaattccacagatcccacagatcccacaaatcccacaaattccactaatcccacagatcccacaagtcccacaaatcccactaatgccaggacagtcgggatgtgagagtggggagtgttgccgtcagggttgcggtgggacttgtgctgagtgtggtcagcccaggtgcgcatcaggatgttgccaggctgaaactgtaaagagcaaagggatagaagaggttatggacagtgaacccagtccaccaaagtagggagatgataccatattaagatgaaataatgaggaagagttggttgtcgtcgtattaattatacaaaataagaagtaatgatgttgcagaagggcttgctataaaatcctgttggataaaaagagtaattatgaagaataaatagctcaaaacaatatttgatttacaatatcctaaagttccttg

SEQ ID NO: 8584 - DNA, 382 bp, Gossypium hirsutum
  unsure (1)..(382): unsure at all n locations; Clone ID: LIB3828-012-Q1-K6-F10
tttttctctgttttctcttaaaaaatatttcttgcttataaacacagaganacattttgaaacaaaaatggcacgccaacttgttgttcttgctttggttttgattgtcctcgccggcgtggttttcgccgacgcctcatccgccggtggtagccctgcaagtgcaccagttggagcttctacaggtggcagtgctgctagttcctcccctacttctcagcctaccactccaagtcttagcggcgatatccctattgatgatccataaaatgattgtcaagaaaatgccgacaaaacattaaacaaattgccatctaaaaacatggtgggatttttgaaaataaataattagttctataaatagaatgttatgattttcatt

SEQ ID NO: 8585 - DNA, 641 bp, Gossypium hirsutum
  unsure (1)..(641): unsure at all n locations; Clone ID: LIB3828-012-Q1-K6-F11
gtacatgaaaaaaaccaaaatctttccttccattttcctttcagtccttttattttttctctcaatatgcttgccatggagaatattgagaatattggtgatngtatacataaaattatgtgggtagacagaaatattgtccttgtaaaatgaagaatatagttggccaattgatgagttctccggttactatgattcgagttctcctgacggagcagcttcttccgttgctgctaagaacatcgtctctgagagaaaccgacggaaaaagcttaatgaacgcctctttgctcttagagctgttgttccaaacatcagcaaaatggacaaggcttcgataattaaggacgccattgattacatccaagaattgcacaatcaagagggtagaatccatgccgagatcagcgagttagaatcgggaaaactgaagaaaaatccaggtttcgaatatgatcaagagttaccagggctgagatctaagaagactaaactcgataacatttttgattatggtggatcaagagcttgccctattgaatgcttgaactgaaagtgacgcacatgggagaaagacatggtggtgagtataacctgcagcaaaaagacggacacgatggttagactatgcgaggtatttg

SEQ ID NO: 8586 - DNA, 547 bp, Gossypium hirsutum
  Clone ID: LIB3828-012-Q1-K6-F12
ggtgccaagcaactgcaacctcatgaatataatacaggtactttcaccctgtctaaccttgggatgtttggtgtggaccggtttgatgccattctgccacctggaactggagcaattatggcggttggagcttctcagcccaccgtggtggctagcaaggatggccgcattggcatgaagaaccaaatgcaggtaaatgtgacggccgatcaccgagtgatctatggtgctgatctagctgcattcttgcaaacactggctaagattgtggaggatcctaaagatcttaccttctagtgtgggacaatttgtgtttgtagcatgctccctgtttttgaaatcactagagatgaaaatttttaggcgttatccagttgagaacaagacacatttctatacttactcgactttatccactcctttttttttctttacttcaccctttctattattaattataaagtttccgtttgttttctgatcgtatttggatcattattcggttcaatggatgattacttacgcaagcaatcaaattcaattattt

SEQ ID NO: 8587 - DNA, 567 bp, Gossypium hirsutum
  unsure (1)..(567): unsure at all n locations; Clone ID: LIB3828-012-Q1-K6-F7
gggnaaatccgcattgtgtgacttttggcaacagacaaagccagaatttgaccgttgatgaactaaatttagctgcaattggtcctaaatttgagcatcatgaaatgttcccagctaggaccaacacagaatttgtggaagtttttttctcatgaacacttgaaaatgcgtgtttgggagcgtggagcaggagcaacactggcttgtggaaccggagcttgtgctgtggtggttgcagctgttctcgaaggacgtgctgggaggagttgcacggtggatttggccggaggtccgttagatattgaatggaaggaggaagacaatcatgtgtacatgactggcccagccgaagtagtgttttacggatcggttgcagtgtgatgattctaatattgctaagccaattttcatgtagctaaaacattgtctatttgcttggattctgtataagacaatttggtagtcttatgaattccacattctttttggttgtcttaaatgttggcttttgtttcaaaaaaaaaaaaanaaaaaaaaaaaaaaaaaaaaaaaaaaaaannanaaaaa

SEQ ID NO: 8588 - DNA, 636 bp, Gossypium hirsutum
  unsure (1)..(636): unsure at all n locations; Clone ID: LIB3828-012-Q1-K6-F8
gctgctaaaacccctctcggtatcaaggccaagnaggctatggataagggtgaacttgtttccgatgacttagttgttggcattattgatgaagccatgaagaaccttcatgtaaaaaagtttcattctcgatggatttccgaggactgtaggccaagcacagaagcttgatgacatgcttgaaaagcaaggagtcaaaatcgataaggtgcttgattttgcgattgatgatgcagtcttggaggagcggattactggtcgttggatccaccctgctagcggtaggacctatcatacgaaatttgcacctcctaaagttcccggccttgatgatgtgaccggggaacctttggtgcagcgaaaagatgatactgcagcagttctcaagtcaaggcttgatgcatttcacaagcaaacccaaccggtgattgattattattccgagaagggaatagtcgcaaagcttcatgcggaaaagcctcagaaagaggttacggacgaagttaagaaagtactttcatgacgaaaccctcattacggacgagattcgtataaggtgatttacacatgaacattggttcttttgcaaacagggaccccccaaaaaattgagaaatttcatggatttttactcgt

SEQ ID NO: 8589 - DNA, 628 bp, Gossypium hirsutum
  Clone ID: LIB3828-012-Q1-K6-F9
ctttactatctttcctcctcaataaactctctactacccagtataagccatgagtcgtcatcctgaggtgaaatgggcacaaagaaccgataaggttttcattacggttctattacctgattcaaagaatgcaaaagttaaccttgagccggaaggagtgtttaatttctctgctactgctggaactgacaataacacatatgagttgaagttggatctttttgataaggtcaacgtggaggaaagcaaaattaatattggagttaggagtatattctgcatcttggagaaggctgaaaaagtgtggtggaaaaaattattgcgcggggatggcaaagccccccattacgtcaaagtggactgggacaaatgggtggatgaagatgaagacaagggtcttggtgatcttgacttatgaggaatggacttctcgaacttcgggggaatgggcggcatgggcgacatgatgggcggcatgggcggcatgggcggcatgggtgacatgatgggtggcatgggcggcatgggtggcatggatgaatttgaggacagtgatgatgaagggcaagaagtgacaaagccagatgacaaggccgaaggagatgcaaagcctgaggagcatggcatc

SEQ ID NO: 8590 - DNA, 484 bp, Gossypium hirsutum
  Clone ID: LIB3828-012-Q1-K6-G10
catttcccttgaatacattaaaaacatttacttatatttcttttatttttaaaatttaacccagcaaataaagatggctcgccaagttatgctcgtcgtcgcccttgttctcattgccgttgttggggcttatgcggcggatgtgcccaagacctcttcttcttcatcgccttcaacatctcccgcctcatctccctcctcctccattggcactagcagttcccctcctacaccaaacggcggtgctctcgctccatcaccatctagtgccgtttctctcaaagcctccagtttcgttggtgctgttaccgttgttgccggactcggactcttttacttctaaggtttaacacgctacatgcatggccggtggatctacgctttatatatatatatatgattaaaatgtattttgcttgcgaatagccgcggcatagaatgtgtgaacagtcttgaataataataataagaagactttggcgaa

SEQ ID NO: 8591 - DNA, 597 bp, Gossypium hirsutum
  unsure (1)..(597): unsure at all n locations; Clone ID: LIB3828-012-Q1-K6-G11
cgatatgggngaagatcaagatcggaatcaacggatttggaaggatcgggcgtttggttgccagagttgctctccaaagtgaagatgttgagctcgttgctgttaacgatcctttcatcaccaccgattacatgacctacatgtttaagtatgacagtgttcacggtcaatggaagcaccatgagcttaaggtgaaggactcaaaaacccttctctttggtgaaaagcctgtcactgttttcggcatcagaaaccctgaagaaatcccttggggtgagactggagctgattatgtcgttgagtctactggtgttttcactgacaaggacaaagctgctgcccatttgaagggtggtgcaaagaaggtaatcatctctgctcccagtaaggatgctcccatgtttgttgtgggtgtcaatgagaaggaatacaagcctgaccttcacattgtatccaatgctagctgcactaccaactgccttgctccattggctaaggtcatccatgacaaatttggcattgttgagggtcttatgaccactgtccattcgattactgctactcaaaagaccgttgatggtccatcaatgaaggact

SEQ ID NO: 8592 - DNA, 644 bp, Gossypium hirsutum
  unsure (1)..(644): unsure at all n locations; Clone ID: LIB3828-012-Q1-K6-G12
cttcaacctaggcagtgtttggnttctaaaccatggnaaattccggttatcaacaggataagcgatttcgaagctagcataagcactctaaacaacccatcttttctttcccaagtttatgccctttctgggattgataaaatctaccaagcttatcatttttggaaatggggggctttgattcttgccctactggcctccttatctaccataatcaatagactcaagattctggttatcagattccgacgaaaccattctctaccatctcgacctcttctttatgacacagattttgatactgactcggagacttcatcatgttcatcatcggacaacgaagtagaatatgaggagccctcggcttctcaaaactggcgacaagttgatgaggattttcgagtgagaggatcgggtcattttattgacgatcaatggcggaacagtggctccaccctgcgaaagaggagaagcagcatcggcgatctattttcgtgggctgaagagctaaccaacggaaaaagcgtggtgaagctgtgggacaacttatgattagggttccgtttggacctcgatgaaagcagcaactttttaaatgtttacgatatcaacaaagaaacaaaaatcaggtcaatttttgggga

SEQ ID NO: 8593 - DNA, 363 bp, Gossypium hirsutum
  Clone ID: LIB3828-012-Q1-K6-G7
aaaaaaaaaaaaaaaaaaaaaaaaaaaaaaaaaaaaaaaaaaaaaaaaaaaaaaaaaaaaaggaaggaaagaaaaaaaaaataaaaaaataaaaaacaaaaaaaataaggggcgggcggtttttaaggtacccaagcttactttcccttgcatggcgacgtcttatttctttttttggggccgcctaaaatccattcctttgccccgtttttttacatcgcgggaattgggaaaaaccctggggttccccaatttaatcgcgttccggaccatccccctttcccaacttggggtaataccgaatgggccctggcagttcccctttcccaacatttgaacaccctgattggcgattggaacccc

SEQ ID NO: 8594 - DNA, 482 bp, Gossypium hirsutum
  unsure (1)..(482): unsure at all n locations; Clone ID: LIB3828-012-Q1-K6-G8
cggccacgctccgatcattgggcgcccacgcgccatcatcaacgccaccacgtacggcggttagagttcgaaacgtctcaaaaccctngaagaaatttaatgatgtctcgcacggaaatcagcgaatccagatgatcaggccctgatggtgacgctgctggccctgatctgctttccttcggcttcaactacggccagattcgaagccgggaatcatggcgtcgattggggcagatggaacgacagaagttgaaggggcgtgactgctggggtgattacggcgcgaagcatctggaaacctagggtttccaaattctgtttaggcattgggcctcatttaggttgggtaaattttgggccaaaggtttaggctaattgggttgtaaccgggtgttgggttttggtatttgggcctttgtaaactggactgtaatggactatttatttatccaattttagcccgatcaaatttgggctgctac

SEQ ID NO: 8595 - DNA, 322 bp, Gossypium hirsutum
  unsure (1)..(322): unsure at all n locations; Clone ID: LIB3828-012-Q1-K6-G9
gggnaattgtcagactgttctttgtcaaccaacaggaggaagagctagactcactgaaggatgctctttcaggaagaagggtgattgatctcatattttgctattttatgattcacaaaaacaaaagaaagtaatctttggatcaaatatgggaatcatatgagtaatctttttcatgtgtttcagttatgacatatgtttgaagtttatttttgtagtaagtttgttcctaagctttgatacttgatgatggtattaatcaattatggattgtctttgtagtggatgaagtttatttttttatgatatgagtatttggagt

SEQ ID NO: 8596 - DNA, 633 bp, Gossypium hirsutum
  Clone ID: LIB3828-012-Q1-K6-H10
gttttctttcttattatcatcatcatcctgcaatgcattagacttttgtgttgcagacctaaagactcctcaagggcttgcaggttactcttgcaagaagcttgaactagtcactgtagacgatttcgttttctccggactacacgcgggcaacacttcaaacctcataaaagctgctgtaacaccagcattcactgctcagtttcctggtgttaacggactcggcatttccatagctcgtctggatttggctgttggcggagtagtgcctatgcatacacaccccgacagttcggaaatcattgttgttattcaaggcataattgatgccggattcgtatcatctgccaacaaagtttacttcaaaactcttaaaactggggatatcatggttttcccccaaggtttattgcactttcaaatcaatgcaggtacaacaccagcattggcatatgtatctttcagtagtccaagccctggtgttcaaatcctagacttcgccttgtttggaaatgatttgccctccaacattatagaggagactaccttcctagatgatgctcaggttaagaaactgaagggtgttcttggtggaactggttaagttccatgtccttctttgtattccttctt

SEQ ID NO: 8597 - DNA, 631 bp, Gossypium hirsutum
  unsure (1)..(631): unsure at all n locations; Clone ID: LIB3828-012-Q1-K6-H11
gcgttcggcaaaacatagtggtttgaaggctttcctatcatggnaaaatcaacaactccacctgcatcatcatcaccttgagtaccagcaacaacaacgtcaacccaattccataaagtcaagattcagacgtgtctgtgtcttttgtggtagcagtccaggcaagaatcctagctaccagcatgctgctgttcagcttggccaacaactggttgaaaggaacattgacttggtttatggaggaggaagcattggcttgatggggttggtctctcaagctgtctttgatggtggtcgccacgtgttgggggtaattcccaagactctcatgccaagagagatcacaggcgagacagtaggagaagtaagagctgtgtcaggaatgcaccaacgtaaagctgaaatggctcgccaagctgacgcctttattgccttgccaggtggttatggaaccttggaagaactcctggaagtgatcacttgggctcagctaggaatccatgacaaacctgtgggactgttgaatgttgatgggtattacaactcgcttttatcattcatagacaatgcggtggatgaaggtttcatagccccagctgcccgtgacataattgtctctgcccaaactgcc

SEQ ID NO: 8598 - DNA, 598 bp, Gossypium hirsutum
  Clone ID: LIB3828-012-Q1-K6-H12
gaacgagggagcttctgtcttcagtggaatcactttgacaaatctagtaggggtgctggtactctgcttctcaaagacggaagtttttgtggtctattacttccagatgtacctagctttagtccttctaggtttcttacacgggcttgtatttttgccggtggtgttgagcatggtcggtccactgtcgagatgtatacaagttgagaagcaagatgagcgaccctcggtttcatctcagccataattgatgatctttcacacagttcataactccttttgtagagagttttaccatgtctgatatagaaactgcatgtacaaccagagcaaaggcttaaaaagggggggaaaagagaatagttgtccccatcccatcccaacatgtaaaggtttgtttagagaaggaaaagaagaagaaagtaatagaaaaatgatattgggtgctgtcgttgttgttgtcaatattataaggtagctgattcatctaatttaaaagttaatacttgggatagagttgttgtgagatttatatctctgttatttttcggacatgttcaccgtattcgtcctacgtaatctttatttgttttttttc

SEQ ID NO: 8599 - DNA, 507 bp, Gossypium hirsutum
  Clone ID: LIB3828-012-Q1-K6-H7
gggagtttaagctcagatgagtttgtgaaagtagtacagagacgtgaacgggacgactctcagcctaaagcagagtcgaagggattgatatcttgcctgctaagttgtgcagcaaaatgatccaattcaaagctgtttcctttgatttgtgagatgatcatcatcttacaatgtattggaagatatatatactttactgagtcaaacaaggcagatcagttgcttcttgaaaatcaaaacctattgttgttatggataccagccaaggtgaatgaatggtcatccgtagcctctcatatatatatatatatattatggataataataaaaaatctcatttcatcgtatgctttccttgaagtaaatgaatctcctctatatataatacatggataacaataggtgtatatattatatttttctacgagtttttatatatgtaaaaatcatggattgtcttgtaaactagttccttcgatgaataaatagaactttgcccattttgat

SEQ ID NO: 8600 - DNA, 592 bp, Gossypium hirsutum
  Clone ID: LIB3828-012-Q1-K6-H9
aaacagcaatctatcacatgtgctccaacaatggcggcaccagaagaagagttgaggaagaggaaccaggagttagagaaggaattgaaggagagtagggaaagagaggagcagatgagaaaggaattacgaaagatgtgggaaaggctgagggtggcggaagaggcggaggaaaggctctgttctcagctgggcgagctggaagcagagtccgttaatcaggcccgtgcttacaactcccacatacttaccctcatggaccagctctccaagggtaacaaccttctcatcaacaaccacccatcccctgcacccatctccatcctctgattctgcttttggctgatgttctttttatctatctaaccaaaggcatggggattctaaattcgttaattttgggtatggtatggatctatatatgtaatagttgttaacacttggtggtgtttgttgatgttaattggtaaaggtagtgctgatatgtttcactggctgtttcatattgtgaaactcaattaagttgatttaattctgatatataaaaaaatttgtgcttttttcttcttcaaatatattaaaaatagtttgg

SEQ ID NO: 8601 - DNA, 604 bp, Gossypium hirsutum
  unsure (1)..(604): unsure at all n locations; Clone ID: LIB3828-013-Q1-K6-A10
gcggcgctgcacagcttccccaanaacccatcattctcagattttctctcagtgtttaatagtgaaacgatgtccactgtcggagaagctgcttgctcttacgctgctcttattctttatgatgatggcatccccatcaccgctgagaagatttctacactagttaaagctgcaaatgtctctgttgaatcctactggccaagcttgttcgctaagctttttgagaagtgcaacattgaggatctcataaccaatgttggagctggtggtggtggtgccccagtagctgcagctgcacctgttgctgctggcggaggagccggtgctgctgctccacctcctgctgaggaaaagaaggaagaaccggaggaagagagtgatgacgatatgggattcagtttgtttgattaggtgtgttttggtcaattactagttatatcacatgaaggtagtaacgcttttagagttgtattgctattggtatttgcatgttgattagaaatattacgtttttgttgaatgaaagttgacactaagtagctctttctttgtgatctgtttttttgaatcttcctatatatagaagtattatagattctagacc

SEQ ID NO: 8602 - DNA, 632 bp, Gossypium hirsutum
  unsure (1)..(632): unsure at all n locations; Clone ID: LIB3828-013-Q1-K6-A11
gccagccaccctgnntctgcgaagccaagtttcagagagtacattggttttcatgccaagccaggaaaaagtagtactacatagttgttgagttaagtcttgaatcttgagtccgatcatgagttgcaacggctgccgagtcttacggaaaggatgcagtgagtcttgtatattacgtccttgtttgcaatggattgagagccctgaagctcaaggccacgccactgttttcgttgccaagtttttcggccgtgctggtctcatgtcttttatttcagccgttcctgaatctcaacgccctgctttattccagtcgctgttgttcgaagcttgtgggagaacagtgaaccctgtgaacggagccgtggggcttttgtggaacggaaactggcacgtttgccaagcggcggtggaaaccgtcctgcgaggaggatctctacgttccatgcctgaattcatggctccgacgccagcatccgacgaagcgtccgaagccacgtgcacggacatgtggaaattgcgggagacatccacgaatctcaactccaactgtcgattctcaaattcgagatccagggtttcacccaagcgtaaaagagtcgaagaagaattcaagatactacagccctctg

SEQ ID NO: 8603 - DNA, 416 bp, Gossypium hirsutum
  Clone ID: LIB3828-013-Q1-K6-A12
gacagtcgggaagtccagagtggagagtgttgccgtcagggttgtggtgggacttgtgctgagtgtggtcagcccaggtgcgcatcaggatgttgccaggctgaaactgtaaagagcaaagggatagaagaggttatggacagtgaacccagtccaccaaagtagagagatgataccatgttaagatgaaataacgaggaagagttggttgtcgtcttattaattatacaaaataagaagtaatgatgttgcagaagggtttgctataaaatcctcttggacaaaaagagtaattatgaagaataaatagctcaaaacaatattcgatttgcaatatcctaaagttccttgaatcttgttttgtagccatatgtaattaatgcatgtgcatgctaatatatatgattttctttgtt

SEQ ID NO: 8604 - DNA, 639 bp, Gossypium hirsutum
  Clone ID: LIB3828-013-Q1-K6-A7
cttaagccccaacagctgaacagctagcaaacacacttagagagcataaagagggccgcaaagcttgaagcagaatgccgaagactcaaagccataggctctaaatcgtccttcacaaatgactgtaaatccccagctgcctcctcgatttatgttgaatccttcatgggtagtcaatccgacagcggagaacggctgcatgtggtggacactgatacccaaaagatgagtggcttggaggcaaacaaaggagaacctagttgttccgactcatgggcgtcagccttaattgctgaacttgatcaattcaaaaacgaaaaggtcatcaacagaaatgtccctagttcttctattgagattgatctcatggatgattttcttgagatggagcaacttgctgcattacctgataccaagaatgaaaatcaatgtcttgaatcaaaagctactgtcaaacaatccaatgatggtgatagctctttgaaggctgagcttgaagccatgattcatcgaacaacagaacttgaagaaaagttggagaagatagaagccgagaaagctgaactagaaattgctcttgccaaaagtcaagaaagtctagaagcatcggaactagagttgagggacagtgaattaaaa

SEQ ID NO: 8605 - DNA, 644 bp, Gossypium hirsutum
  Clone ID: LIB3828-013-Q1-K6-A8
aaaaacttgatgtcttggatccaaacgcctgcctaagagatctgattatggactacctgaagacaaatttctctttgcatgtttcaatcagctgtacaagatggatcctgatattttcaccacgtggtgcaatattcttaagcgtgttccaaatagtgctctttggctgcttcgattcccagctgctggtgaaacgagacttcgtgcatatgcaactcaacagggcgtgcagccagatcagattatttttacagatgttgccatgaaaagtgaacatataagacgcagtgccttggcagatctcttccttgatacaccattatgcaatgcacacacaacaggcaccgatgttctatgggctggtcttccaatggtgacccttccacttgaaaagatggctactagagttgctggttctttgtgcctggctactggtgttggggaggagatgatcgtcagtagtttgaaagaatatgaagagaaagcagtgtcacttgctctaaatcgtccaaagcttcaagagctttccgataaattaaaagcagccagaatgacttgccctctttttgacacggcacgctgggttaggaaccttgaacgggcctactgtaagatgtggagtgtgtatcggtcaggtcagcaac

SEQ ID NO: 8606 - DNA, 469 bp, Gossypium hirsutum
  Clone ID: LIB3828-013-Q1-K6-A9
gagatgctggatgaaatgattaactatgtcgcagaacttcaccggcggtagcgtttctgtcaatgaagcttgcgacagtcaacccgaggctggattttagtatacaagcgcttgttgcaaaagatattatccaatcccacagctgccccttcttagactctgggatcttctacagctgtatctatgggttatcctacattgcgtccatattaacctggacttgtgtcaagctcctctcactggcatacaggaatagcacagacgttattcatacagctctcagctctcagatcacataatggaccgaatgcacgaaagaacccaaccaagtttcactccatttattcactcacacgcataggacgatgacctacccaacgtagataaaatgacctaatgaacccatgctacctctgacaacctagacgaaactgggccaatcacctccggggatacgaaactagaactt

SEQ ID NO: 8607 - DNA, 640 bp, Gossypium hirsutum
  Clone ID: LIB3828-013-Q1-K6-B10
cgaaattttcctcgctctctcttttatcctcactttctcagccatcaaagacacccttttcttctcttaaggttgtaaaagatggcagatggtgaggatattcagccacttgtttgcgacaatggaactggaatggtgaaggccggatttgccggtgacgatgctccgagagccgtgttccctagcattgttggccggcctcgtcacaccggtgtgatggttggtatgggccaaaaagatgcatatgttggtgatgaggctcaatctaaaagaggtattttgacattgaaatacccaattgagcacggtattgtgaacaattgggatgatatggaaaagatttggcatcatacattttacaacgagcttcgtgttgccccagaagagcacccggttttacttaccgaagctccccttaacccgaaagctaaccgtgagaagatgactcaaatcatgttcgagacctttaattcacctgctatgtatgttgccatccaggctgtgctctctctgtatgctagtggtcgtacaaccggtattgtgttggattcgggagatggtgttagccacacagtccctatttacgagggttatgccctcccgcatgctattcttcgtctcgatttggctggtcgtgatc

SEQ ID NO: 8608 - DNA, 642 bp, Gossypium hirsutum
  Clone ID: LIB3828-013-Q1-K6-B11
tttttgttttgtctctttaataaagattggcacgactcgccatttcgttcattgctattttcgtcttattcaccgtctctcacgctcgcttaattgtaccggaccaggccgtcacctctgaagaaatcgttgccgaattacccgaatccgactctacaacgacaaacgttatccttctccctaacgagaaacccaactctgaacccgccaaaacagttgattctaagcacgacgttgatgatgcctccgaagccgaccccgacttggtttccgttccgttgacgataatcagtttccgtcctgtaaaaggtcacttccccaggcatccgttggttccgttccgtaatggacatgactgccgttaccatagaaggttcaggcctttgaactcgcggttccagcgcaagcgctatgtttctcacggtaacggtatggcactgtcggacgagagatctcgttccgacccggagtcaatcagacttggtcaccagatccgggggagatggaccaggtttcccaataatggcgccgagtcgaaggagcacgtagactttaggaaggttcgtccttataaccacgagcatgaacaagatcatgacaacaacgatcaccactcgcaccaccgctaccaacatcaacgtc

SEQ ID NO: 8609 - DNA, 636 bp, Gossypium hirsutum
  unsure (1)..(636): unsure at all n locations; Clone ID: LIB3828-013-Q1-K6-B12
cggccgcgtggngaaaagttaagcaagtaaagaatggcaaaagttcaacagatcactcttgtttccttggcgatctgcctttcaaccctcctcggcttcgctgccgccgccaaccctgaagagaagttcatcgttgaaggccgagtttactgcgacacttgccgtgttgaatttgagaccaaaatcagcaaaccaattaagggcgcatcagtgaaattggaatgccggaacattaccaacgagaaaatcgtgtcgcacagccaagacgtagttaccgacgaagccggaggatacaagatcgaggtgaaaggtgatcacgaagatgagatctgtgaagtgagcctggtgaagagtccaagggctgattgcaatgaacctactgaagtatggaggaaagccagggtggtcttgacaaaggcagatggtgtcagtgggatttatcgattcgccaacaatcttgggtacatgaagaaggaagctcttcctgaatgcaagaaagttcttacagaaatgggatattttgaacttcaagatgaaattggggaaggaagttgaaggtcattctactgccccatgatctcacttctaaaaacctttgcccatgtaataaaaattaattgcatctatagtaatatt

SEQ ID NO: 8610 - DNA, 523 bp, Gossypium hirsutum
  unsure (1)..(523): unsure at all n locations; Clone ID: LIB3828-013-Q1-K6-B7
cggncgcgtgggctgcatttcccttgaatacttaaaaacatttacttatatttcttttatttttaaaatttaacccagcaaataaagatggctcgccaagttatgctcgtcgtcgcccttgttctcattgccgttgttggggcttatgcggcggatgtgcccaagacctcttcttcttcatcgccttcaacatctcccgcctcatctccctcctcctccattggcactagcagttcccctcctacaccaaacggcggtgctctcgctccatcaccatctagtgccgtttctctcaaagcctccagtttcgttggtgctgttaccgttgttgccggactcggactcttttacttctaaggtttaacacgctacatgcatggccggtggatctacgctttatatatatatatatgattaaaatgtattttgcttgcgaatagccgcggcatagaatgtgtgaacagtcttgaataataataataagaagactttggcgaanaaaaaaaaaaaaaaaaaannnagg

SEQ ID NO: 8611 - DNA, 635 bp, Gossypium hirsutum
  Clone ID: LIB3828-013-Q1-K6-B8
catttcctctataggtttttactttttaatcccttttcctcatttttgcaacaactttttttttccattgcacatataatttaagaggaaaatgactttcagtggaacaacagagaaatgcaaggcttgtgataagactgttcatgttattgatttattaacagctgatggcatttcttatcataagacttgcttcaaatgtagtcattgccatgatgggaaactattgctcaatggatagtgtcctgtattgcaagccacactttgagcaacttttcaaggaaactggcacttaccaaaataagaatgcaaaaccctcctctgaaaattcgaatggaacgggaaaggctcctagcaaatttgcatcattcttctctggtacacaagacaaatgtggtgcctgtaagaaaactgcataccccttagagaaggtgactattgaaggagaaaactaccataaatcatgctttaggtgttcacatggaggttgtgtgctcacaccatcaacatatgctgcattggaaggattcctttactgtaagcatcacttttcacaactcttcaaagagaaaggcacctatgctcatcttacagagacatctacttcaaagaaaattcagctgcaccttcacctg

SEQ ID NO: 8612 - DNA, 632 bp, Gossypium hirsutum
  Clone ID: LIB3828-013-Q1-K6-B9
gaaactctgggcattggacaagccaggaattattcctccctggagtcagagcaacttgctgttcattcatctagagtacctaaactgcatgctagtgatatcaatattccaaggaatgtatcttgccctgtttcacccataggaagccctcttctacattcaaggtcaccgcaacatctaaacggaagaatgtctccttctcccatatctagccctcggaccacttcaggctcgtctacacccttgacaggtggcagtggtgctataccttatggttatcttaaacaatcgccttactttcaggagggtcttggtagcatgccaaagccctcaaatggactttatgtcagtggctcttcctgtcatgataataatcctgacatttttcgaggcctgcaagcaggttctcacatcttttctgaactggtgccatcagaaaatgacattttaggagctggaagatcagtccatggggaatcttatgatggacagtctgtattagctgatcgtgtttctcgacagcttctgaaggatcacgcagcaatgagcccatccctggatctaagtcccagctctcctttaccttaccggagtgttattatctaaactcagctttgaagattcatcgatca

SEQ ID NO: 8613 - DNA, 604 bp, Gossypium hirsutum
  unsure (1)..(604): unsure at all n locations; Clone ID: LIB3828-013-Q1-K6-C10
gnaatagggtgtgtcgggaaagcaacgatgtgcggtcaccatatccaatagcaacttcgggcatgatccatgcccaaatgtattaaaacgtctatcggttgaagctgtttgtgctcccatgacttcaacaacagcacaaccgggtggtaattaaatcgaaagggtgcaaaatgattccgtaacttgtgcatcaagtaactataagcaagagaaagaaaagaaaataaagagagtgcaaagaataggcatttagttaggttaggttagtgccacagcttctcaaatggagggctttggctaaagctgttgtccattgttgtagttgtttaagtggggttattgacccctgtaaattagtgacactataagatggttaaaggtttcgaaattcttggggtcgggttcggatcggtagggtgaaatttctagcctgtgccgccgggcttttaaccggatatgggcaccgaagaaaatgatctttgttggtgtgattgattgattgatttctgtttgaatgagtgggggaaagttgaacttcctatacaaggttcaagtatggccattgttttatgtgtagttactaactaaaagtgccttgaggttc

SEQ ID NO: 8614 - DNA, 558 bp, Gossypium hirsutum
  Clone ID: LIB3828-013-Q1-K6-C11
gcttggccttctcgaccgtgggaatgagagaaaaaatgagaaatagacctctacctatccaactccggtgacggcgaagacaagttccgacaccgactcccgaagcaagcaggtgattgacatgcgccggtgatgggtcagtggcggtgatagacgcgcagcggcccggagaccaaggtctgaagcgagtggcggcagaagaccatcggtctggagctagtgcggcgcttagggtttcaaaaactgaaaccctaagttgactttggttttcgggtttgggtattgggcctctgtaattgggttttttgttttaattttgttttattatttgtgttttgtgtttaaggcccgggtaaaattgggcccgaacataaatgatttttatcttagatatgtatattttagtttaaatcatggagatgtacttagggtagagaagagggaaggatttgtttttctagcctttgctttttttttcgatttctcgaaatgtttcttggacatattataactgtttctatcctctttctttctcaataaaacctaccaatttgtatt

SEQ ID NO: 8615 - DNA, 619 bp, Gossypium hirsutum
  Clone ID: LIB3828-013-Q1-K6-C12
attaaatgagctaaacaggagggctttaaggctgattctgatctcgagataaagttgtcaaacattatcctccaacaacttgatgatgtagctggtgatgtttctggattggctgtcaaatgtcttgctccattggtgaagaaggttggtgaaccaagagttgtggaaatgaccaataaactctgtgagaaattgcttaatggcaaagatcagcatcgtgacattgcaagcatagctttgaagacgatcatttctgaaatctctactccatctcttgcacaatctgttttaatttctctgtctcctcaactaataagaggaataactggcggggcaagtttctgaacacagcttgtcaatgctttgtgatttatatcttcaattaatttcacaatgaaagtgtttcttttgaagtactgttttagtttcttatttcagttaagttccaatgtgaaagtttaattccacaaagatttatggacaataatatttgcttgttaaatttctcaaatatacttcttttacagtttcatcatgctaatcatatacagggccttgactatgggatgaactgtaaggctgatatcaattactttgtactgttgtccttgtgcaatga

SEQ ID NO: 8616 - DNA, 299 bp, Gossypium hirsutum
  Clone ID: LIB3828-013-Q1-K6-C7
cgaattcccagccaggcctcgtagaagctaggaaggcgttggcgaatccaaccacgatgcaagactaacataaagtatgactgcaacagagaggcgctctatgactgtcaagaggtgctggatgtctcatattgatgacgaggaatagccgtgagtacagatgggggaatacaatgtgagtgagatcgatccttactttctgcacctgatagtgtgggtatcttgagccataactacccagcatacattgcttgacacagtcaccgagctaaatcatgatctgtggtaaaagatgaatg

SEQ ID NO: 8617 - DNA, 331 bp, Gossypium hirsutum
  Clone ID: LIB3828-013-Q1-K6-C8
ttgaagtcttggatccaaacgcctgtcctaaaagatctgatgatggactacctagaaacaaattggtctctgcatgtttcaatcagctgtacaagtatggatcctgattttgccaccacgtggtgcaattttcttaatcgtgttccaaatagggctctttggctgcttcgattcccagctgctggtgaaacgagacttcgtgcatatgcaactcaacaggccgtgcaggcagatcaaattatttttacagatgttgccatgaaatgggaacatataaaactcagtgccttggcagatctcttccttgatacaccattgttcaatgcacaca

SEQ ID NO: 8618 - DNA, 628 bp, Gossypium hirsutum
  unsure (1)..(628): unsure at all n locations; Clone ID: LIB3828-013-Q1-K6-D10
gnataatctaggtttaaattatataaaaataaaaaggcgttgttttggagagggcttattatattacctctcctatttgtgtatgcaagcagccattttatatatactaaacgacatttcgataaacccgaggtagtcgggtttaaggaccttgattacctccacggcgatggcggtggtttccttagtggccccatagaagccgatgatggtgtcaaagcttcgaagaccgtcgttgaagctgagagtgacgatgatgacaatgacgatgacgacggtgataagaagagtaaaaagaagaatgaaaagaagaataagaagaataagaaggagaaaaagaatagcaagaaagacaaaaaatacgatgaaagtttccatacattgccggtcgaaagccttgtaaacgaaaagggtggtgacgggaataccgacgattcgtctcaactcgtcggctataatgtagtgacggctcaaactacgtttaaggggagttgggaattgttcgttgaaaactctggtgtttccgctatgcatgtggtgttgcttccgaatatcaatcaagctttgatttttgatgccacggtgtggaaggtgtcaaagctgaaattaccgggaccaccatgccgac

SEQ ID NO: 8619 - DNA, 635 bp, Gossypium hirsutum
  unsure (1)..(635): unsure at all n locations; Clone ID: LIB3828-013-Q1-K6-D11
gaatcctccaaatttaaaaaaatagaataaatttcgaaggctttngaaaaaaaaaaaaaatcgaacgaagaagaataatttgttaagcgatcgatctgtggattacaatggaagtgcctgtctcatgggatgctctacgcaaacaggcaaggaaacttgaagctcagttggatgagcaaatgaattcatatcgtaagttggtctccagtaaggcttcgaccaaaaatgactcggaagagaatgatattgaatctggtatcgaccgactactaaaacagctacaacaagtaaatatgaaaatgcaagactgggtctcatctggtggatctgaaatggtttctcataccttgactaggcatcaggaaattcttcaagatcttactcaggagttctatcgtcttcactctagccttagagctaaacaagaacacgcttctctactggaggattttagggaatttgatcggactagattagacttggaagaaggtgttggttccacagaacaggctctacttaaggagcatgcggccatcagtcgaaatcaggacatatggataatgttatttcacaagctcaagcaactcttggtgcacttgtccttcaacgttctacttttggggggattaattcaa

SEQ ID NO: 8620 - DNA, 640 bp, Gossypium hirsutum
  unsure (1)..(640): unsure at all n locations; Clone ID: LIB3828-013-Q1-K6-D12
ggnacatattgctaagtgccagcactcatctgttagcaaacttaacaataatagtcaaattgctagctgggatacaaaattcgagacaggtacaagaactgccttgctgcaacctttctctcctattgtgattgcggcagatgagaatgaacggatcagggtatggaattatgaggaagccaccctcctcaatggttttgataatcatgattttccggaaaagggaatatctaaactttgtcttttgaatgagcttgatgacagcttgttgcttgttgcttcaagtgatggaaatatacggatttggaaagattatacactgagggggaaacaaaaacacgttaccgcattttcttctatccaaggtcacaaacctggtgtgcggagtttgaatgctgttgtggactggcaacagcagtctggatatctctatgcatctggagagatatcatccatcatgctttgggacttggataaggagcaacttgttaattcaataccatcatcctcagattgtagtgtctcggcattggcttcttctcaagtccatgctggtcaatttgcagctggttttgtggatggttctgttagactatatgacatccggacacccgacatgctggttcgcacaaccaggccg

SEQ ID NO: 8621 - DNA, 624 bp, Gossypium hirsutum
  Clone ID: LIB3828-013-Q1-K6-D7
ggctgtcacaccatttcagagagttgcgtgttggtgattatcttgctgtgaaggtcccaagggcggttcaggtatcaacctggtcaagttagagcatttgggatgattgctggaggctctggcattactccaatgttccaagtagccagagccatattggagaacccaaaagacatgacaaacgtacaccttatttatgccaatgttacatatgaggacattcttttgaaggaagagttggatagccttgttgccaagtaccctggtcgcttcaaagtctactatgttttgaaccagcctcctgaagtctggaatggaggtgccggctttgtgtcaaaggaaatgattcagacccactgcccagcaccagctcctgatatcaagattctaaggtgtggccctccaccgatgaacaaagccatggctggccatcttgatgctctcggctattcacctgagattcagttccagttctaatcccgctagatgaggtcaagctttactcagaccaattttaatcttcttcattggtgagaacaaaaccatttgctatcaactcttgttgtaattggaactttttaagcattggaaccaagattcagatgtttttaactgttattacaa

SEQ ID NO: 8622 - DNA, 637 bp, Gossypium hirsutum
  Clone ID: LIB3828-013-Q1-K6-D8
cttggaagctgaagagaagaaaaaagccctgggcatgcagtttttgctctctattggtgccgcacatgcatgctcacaaattcatcctgcagtcaaggtgtaaatatctacaagccttgtttctatcaggaatgcaggaaagccattcgcaaagcatcaaggttcctgtgagttgggaagcattaatcaagttagttcgattgatttatagtcgcaagctgccagatcctccctttggatgtttgtgggacaacatggacaccaaggaaaggctatacgagttgaaaccttatgtagaagtgtactggctggctgagttttggattttggaagatgttcaagaagcttgcttcacaaccattatatcttgcttggattctgatagacaattagctcttgaagttatgaaacttgcagctggtttctctctgtggaagttagcggaggtagcggcagattatatggcccctatttatcataaactgcgagactccggtgttcttgaacaacttgatgaactgttaattgaactggttcgtgatgcttctgtcaggctttctcaggggagtggtggtttttccggatgataccacctcatctataatagatgaaggcgattactgaatccgttgttatt

SEQ ID NO: 8623 - DNA, 643 bp, Gossypium hirsutum
  Clone ID: LIB3828-013-Q1-K6-D9
cggacgcgtggggatcaatcaggagcgtgaaggacaacagattgactgcgtcctgctgaagaatgtcttggatatctttgtggaaattagtgactacaaaggggctaactattatgaagattttgagcggatcatgcttacagaaatctctggttactattctcgattagcttcagagtggcttctgtatgactcatcagctgaatatgttcaaaaggttttctggtgcttgaatcgggagaagcaaagagctcgacagtacctacatcctgacactgaagttaagatagtgcaggttgtcagatatcatttgctagatcaaattgcgaataaactgatggaaaaaaggcaagctgagaattctggcatggtgacagattatcaggaaatattgttgaaatgtgctggcatatcccttcaagatggaagttcttcaacatcacccgaagaatggctctcgacgctaatggcaaattcagcacatatatgctaaacttgttttgagagcattatcagcagatgtttgtacaaattactttgataaaaatatagttaccaatagtcgacctagtgctgcaacctctgtccttttctgttttcccgaatgcaaaattaaagttcagctgttcattagttgaatgaa

SEQ ID NO: 8624 - DNA, 477 bp, Gossypium hirsutum
  Clone ID: LIB3828-013-Q1-K6-E10
aatactagacagggagagtgatcgacttcgttcagagatttcactattggagtcaaagctgggtcatggtgattattcagcttcaaatacaaaagttctgcgaatggtaaatactcttgctgttgataatgaggcaaaacaaactattgaggcattaaaaactgagttacaaaagacaaatgagaaggtacaagctcttgaagaattgaaaagtcaatcaggtgacactgggaagctggttgactcgtatatatctgagaagataacgaaattaaaagaacaaattgcgacacttgaaaaacgtgaagagagatacaagactgtttttgcggatagaatttcagtttttagaagagcatgttgcgagctttttggttacaagatagtaatggatgagcaccagcgtcctaatggaatccctgtgacccattttaccctccaatcaatttatgcacaaaatgatgatgatgttgactg

SEQ ID NO: 8625 - DNA, 573 bp, Gossypium hirsutum
  Clone ID: LIB3828-013-Q1-K6-E11
cacagctgtaattgtacgtactcgtaatgaactcaagacgcgaaacgggatgataatacgatatgatgacaatgctgccgttgtcattgatcaagaaggaaatccaaaaggacactcgaatttttggtgcgatcgcccgggaatcgagacagttaaatttcactaaaaagtttcattagctcccgaagtattatatagacgagtacccaagtatagttagagtatttagagtatttaaatggcataaattaattagtagattgagtctcacgtatatacctttactaagtaaaaaaaaaaaaccacgtcggttatatcaaaatacgggagcaacaaatattctagtttaccatgggtaaggacactattgctgacataataacctctatacgaaatgctgatatgaatacaaaatgaacgatgcaaatatgatctactaacatcactgaaaacatctgttaataatactctcacgataatgtttcatcaataacatagggatacatcgggaacacaacaaatattttatggctgtaaccctactacatactacggattagataggaccacata

SEQ ID NO: 8626 - DNA, 640 bp, Gossypium hirsutum
  Clone ID: LIB3828-013-Q1-K6-E12
gccactgccatggcgtctctttcaatccgcttcctggctctttccctttccgtcactgctttattcacttgctcctccggccatggtcacacttacgatccttataacgacaaggcacggatgatccaccacggtggtcctatgctcaacgggaccgttaaattagccatcatgtggtacggaaattgtggcaaggaaataaagaacaccatgagaaacttcattaaatcattgaccgtcccagccaaagccaaacttcaacctcaagttacctgttggtggaaagtagtggaaagttaccaatcaatgataccagacgcaaagcctgggaaaagccccaaaatcaaggtcaaagtggtgaaacaatcaggagagaaaacatataaatatgggaaagttttgactttgcaagggcatatcccggagcttatcgagcatgtcactaagggcgatactgaactcttaccggtcatcgttgctgcaagggatgtctctattcaaggaatttgcaacgggcaatgtgcagatcatttacttactgaggatccccatccgcgaccatacatcatagtcggtaacccagaaacggagtgccctggagaatgcggatggcctttcttcccggctgacatgggtccaa

SEQ ID NO: 8627 - DNA, 626 bp, Gossypium hirsutum
  unsure (1)..(626): unsure at all n locations; Clone ID: LIB3828-013-Q1-K6-E7
gtcagctccccctgactgccttatgtgaaatggcaggaactgcgaggcacttctggtgggaaagcagcagaagatgtctgctgtaatgagtgctcaacagaatcgagaaggtttagtgagcatttccacaaaggaggggcaacctcgttcacatgctggttctggttttttgaaggctgaaaatccatttcttgacgataacattggtgctgtctctttaaatcaacctgctggcgctaatctgatgctttgtgcaaacgagcaccaacatcagccctgctttcagcttcctgcctcaatcccatatgacaatttcctgaaggctgctggttgctgataacctagagaaagaagtgaaacttaggctcaagatatggatgcacctctgtttggccagggaccaactaattttgtgattttgatgccacaccaggttgatagttgatggcttcattatcttcttgtctattcatagagtgttttcaatctcatttttccctttgtatccataaattgatgagaccagttgggatggcattgcagggttgactttaactgccccttcatgagaatngtacttttacttgtgtttcatttgaaaccaaagaaaggtcgttcttgcttgc

SEQ ID NO: 8628 - DNA, 632 bp, Gossypium hirsutum
  Clone ID: LIB3828-013-Q1-K6-E8
ctttcctctccattttctcggcaaaatcaagcatggggaaaggacctggtctctactccgatatcggcaaaaggccagagatcttctttacaaggattaccaggccgaccacaagttcactgtcactacttatacctccaatggagtcgcaatcacatcaactgggattaagaaaggtgaattgcttttggctgatgtaagcactgagctgaagaacaataacatcacaaccaatgtcaaagttgacactaagtctactctttttgccactgttaccgttgatgaacctgcacctggattgaagacaatctttagttttattgtccctgatcaaaggtctggcaaggtggaactgcaataccagcatgaatatgctggcataagcactagcattggtttcaatgctaatccccttgttaacttctctggggtggttggaaacaattgtgtctcagtggggactgatctctcatttgacaccgccagtggaaactttaccaaattgaatgctgggctgaatttcacccattctgacctcattgcttccctaacattaaatgataaaggtgacactcttaatgcttcctactaccacattgttagcccattgacgaacacagcggttggtgcgg

SEQ ID NO: 8629 - DNA, 636 bp, Gossypium hirsutum
  unsure (1)..(636): unsure at all n locations; Clone ID: LIB3828-013-Q1-K6-E9
tgattaacattaaaanatgggtgttttcagttatgaccatgaaactacctccccagtcgccccagctaggcttttcaaggcttttactgttgaagccccaaagtttggcccgcggctgctcctaatgcagtcaagagtattgaggttgaagctaatcctagttccggaagtatcgtaaaaatcaactttgttgaaggctttccattccaatatatgaagcaccagattggaagacatgatgaaaataatttttcatacagttacagtttaattgaaggtgggcctttgggggataagcttgaaaagattagctatgagaacaagtttgaggcagctgcaggtggaggaagtatttgcaagagctcaatgaaattctacactgttggagataatgttataacggaagatgaaatcaaggctcgaattaaagggagtgagacagtttacaagccccttgaagcttacctcttggctaatcccgaagcctgcaactaggatctaggttgctttgaattcttatgcttgcttttaaagaagagtttgattttaatgttgtgcttttgatattttccttttcatcttaaaacataaattgtcttgttgtttcagtaagagtgatggtggtagtgatcgaac

SEQ ID NO: 8630 - DNA, 639 bp, Gossypium hirsutum
  Clone ID: LIB3828-013-Q1-K6-F11
gtttttactttcctaaagaagaggggatcaaacgttccctcctcctcatctccatcttctccctcgtggctatctcagcttgtgctagacctccttcagacattactgatacgcccgagtcacccgattccacacccgaatcacctgattccacacccgaggcacctgatgatgactattcacctaatgcaccagatgaagcagcagacggttatgcacctccacctgaagcaccaaccccatctgcaacctttacaatattgcccggcggtagttaccctgagctcgatcaaatttgtggagcaaccgactaccccatcgaatgcgtaagattcatttctccgtacttgaacgacagtatcaaaatcgacccactcaacgtccttaaagtcgggattcacgtagcgactaacatgaccatagaagccctcaatctcgctataaagattagggacgaccccaaaacctcaccaaatgctcaatcatgccttcgcgtatgcaccgaaaactacgacttaatccccgacggcaacgaactcgcgctacgtgccatcggggaacgcaactggagcgatttgagaaaccagctgagcggcgatctgaccagcgtaaacacctgcatcgacgtgtaccatgaag

SEQ ID NO: 8631 - DNA, 644 bp, Gossypium hirsutum
  unsure (1)..(644): unsure at all n locations; Clone ID: LIB3828-013-Q1-K6-F12
caactttccctgaaaactagattaaaataanatggctcgagggaagatccagatcaagctgatagagaactcgaccaacaggcaagtcacgtattcgaagagaagaaacggtcttttcaagaaagctaatgaacttacagttctttgcgatgctagagtttcgatcatcatgttttccactactggtaaactccatgagtttatcagcccttccaccacaacgaagcaagtaattgatcagtaccagaaaaccttggggatcgatatctggaacacccactatgagaaaatgcaagagcagttgaagcagctgaaagaggttaacaggaacctgcgcaaagagattaggagaaggatgggcgactgtttgaatgatttgagcatcgaagatcttggtgctttggaacaagaaatggagagctctgtcactcttattcgtgatagaaagtatcgtgttctctccaaccagatcgatacttccaggaaaaaggtgaggaatgtggaagagatacacaaaaatctcttacatgaactggaatccctgaaagaagatccatatggnattagttgataatggaggggattatgataccctgatcgggtatcaaaatggaggtcctcgtatatttgctttacgcctgcag

SEQ ID NO: 8632 - DNA, 635 bp, Gossypium hirsutum
  Clone ID: LIB3828-013-Q1-K6-F7
gaaaaaataatctgttaacgacagtgtatgcacttttcgatccttgaccttactaaaatcatcaattattttatttatatcaattttttttgcaatttatttatcaatttttctatttttctatgaagtcgagtattcaaaatcttcatagcagaaaaagccattttgagtatactattgaaactagaagagtcaatataagatgaatcaatctgtcaacgagtgggtacatgactgactttccactctcaactaagcttctgcaaagttcaaaaagtgttgatatttttctcaaattaggatggttacatacatcaagttcataatgcttcaactcatatgggagacgttctttctcttgttgagaaaaatcttctagatagaacttgtttacaagaatgaaaattttatcaatatcaactagcatgaaaaaatccttgagatctaaagctttagtaagagtgagaagctcgacaacattatcgttaaacctgctcttcaattcttgtaattgagtatatattgtagaaaaaatatatccactcgataataatgctccactgcaaaatcttccttcttgttgcggctatgacctgtaatctattgagcattcatatctggaaaatccaactccc

SEQ ID NO: 8633 - DNA, 634 bp, Gossypium hirsutum
  Clone ID: LIB3828-013-Q1-K6-F8
tcttgatattcttttcgggaacaaacgatccgtacaagaaagttcgggaagccccattgtacatatttgccaagttgtttctgctgcatctgggaaaaaccggctaaactcccttctgatatttccttgttgtatgaagatctccctgaggcatcacgaatccatcacacggatcagtttcgcttcctggacaaggcatctgttgtgacagaagatgattacagacaaggttccttcatgatgaacccttggaagctttgtccagttacaagggtagaggaggtaaagaagatgatcaggctactcccgatttgggcaacaacgattatattttggacgacatatgcacagatgatcactttctcggtggaacaagcaaccaccatggacagaaccataggacatttccaaattccagctggttcacttactgtcttttttgtgggagccatattgatcagtttagctgtttatgatcgttttattattccactttgtaaaaaatggagaggtgaaccagggtttacaaatctgcaactgataggcataggtctgttcctgtcagccatgggaatggcagctgcagcagtggtagaggtgaaacggctatcggtggcaaagaaatacaatgaaa

SEQ ID NO: 8634 - DNA, 630 bp, Gossypium hirsutum
  unsure (1)..(630): unsure at all n locations; Clone ID: LIB3828-013-Q1-K6-F9
gtctgtaataaaatctgcaatcttaattctgtcggtgtttttatctgtacgcttcagttcgggtgttaggttgctccaggaacagcccaatgatgaccccaaaaacatggacgctattcctcccattgatgcactcaaccctaccgagttgaatggacccggtgttggcattcacgaagatcatgttgtcccaaaagtgctgaaattggtactcttggttttggttttgaaggtggtcctgataaatgttgttcttctggatgttccggtaattgtaatcctggtggtttcgttctaccatttcctcaaattccagaaatcccaagaattccagaaatcccacaaatcccacagatcccacaaatcccacaaattccactaatcccacagatcccacaagtcccacagatcccacaagtcccaaaaatcccactaatgccaggacagtcgggatgtgagagtggagagtgttgccgtcagggttgtggtgggacttgtgctgagtgtggtcagcccaggtgcgcatcaggatgttgccaggctgaaactgtaaagagcaaagggatagaagaggttatggacagtgaacccagtccaccanagtagagagatgataccatattaagatga

SEQ ID NO: 8635 - DNA, 470 bp, Gossypium hirsutum
  unsure (1)..(470): unsure at all n locations; Clone ID: LIB3828-013-Q1-K6-G11
aacgcttgggtacgtgctttacttgttgctgctgttgatgtatttgatactggttttctcgacggagtcgggtctcggatccaagatgttgggtttgggtcagatattcgtggggtttgccgtcgggttgcattactacgntggcggtgtttcatagagtggttttgcatggaccttccaattagtcttaggcggttgntgcanaaccactctntgatacaccgcccaatactaaccgnaccacacgagtcagcctcccacgctggacgccgggcgcctcgatagcgcacaggtacactgcctcccgagactcgacaggctcctgatctgcacacaanatcnggcacggatgccatcagatgaccccgggccatcttcaagccattatgctctacccctgcatgnccaaacagacngaancgccctcggcctnggncgcaaataaggccttcatctccatggagcgccaa

SEQ ID NO: 8636 - DNA, 505 bp, Gossypium hirsutum
  Clone ID: LIB3828-013-Q1-K6-G12
cttttatgtaataggatagtgaaggaagttgtggaagggccatctcatgatcttttggaatcagtggctcaaatgattgcatcataaaaccttcacaaatcactctcaaatatctgcagttcgagtaaaggttgggaagcctcatgttgctgttcatggctgtctcgactaccttggagttgagattatcagatatagaaccatcgatgcgcctaactgacctgaatatatatcatcctttgagcagtccgtcacgtggatgtggtaacagatcatctttcatccatgcttggtacctcaggtttctcattcacttaaattaatgtatttgtgttttttcttcttcatgtttgtttatagtgtaatggaatgtgtccgagttgtgaccgtattgaagttcgatgcctatggtcgtatttaatatcgtattacttttttttttttaatttatgaaatactccttttacataaaagaaaagactgtatatgagttatttttttttag

SEQ ID NO: 8637 - DNA, 645 bp, Gossypium hirsutum
  Clone ID: LIB3828-013-Q1-K6-G8
ctcgacatctccgtcaaaattgtgattcctaaagggatatattttttaagtacagctaccttagatggtccttgcaagtctcctattgagcttcaagttcaaggcactgtgaaggctccggcagaccctggtgctttcaaggagcctaaatggattgctttcaatagaattgaaaatttcaaattgtctggcggaggagttttcgacggccagggaaccactgcttataaaagggaaggttgcaaaggtcatgattattgtggttcacttcctattaacctaagatttgattttttaaccaacgcaatgatacaagatataactaccaaagacagcaagcagttccaggctaatgttctaggatgcaaaaacattactttcgaacatttcaccgtatctgcacctgacgaaagcccaaacacagatgggattcacattgggagatcggatggggtcaatgttcttaactcggagataaaaactggtgatgattgtgtttcaattggggacggttccaaaaatttggttatcaatggagtaacttgtggaccaggacatggtatcagtattggtagtctcggattgtttaaaaatgaagaaccagttgatggagttacagtaaaaaattgcaccatgactaatact

SEQ ID NO: 8638 - DNA, 622 bp, Gossypium hirsutum
  Clone ID: LIB3828-013-Q1-K6-G9
gttcttaaatactctcacaaaccttcttcaaaaaatcaccccatcgcccaattgtttttttgtttgtttgtttgtttaagctctaaaacatcatttgtgaatggtggaaacgaatcaaagtgacagtaatttaatgctctcccttcgtaattcaagggcgagcattatctgttcttgtaaacaaggctggtattatcattgcatcggcctcgatccataaaccctgttttgttttgttttttttgaaaaaaataaaagaaacccattgtttttcgtcgcgatatttagtggattttgatttgattttttgaaaaaaaatggttcacaatgagcagaagaagaatcagggttgtaaaggcaataagttattgaatagcgtctctgttttgggaagttccggtccgatccggttcgttgttaatgaaggagaactggttggtactgttattgatattgctttgaaatcatatgctcgtgaaggccgttacctgttcttggatcggatcttaatgagtttcttctttattcccctagtgttggatcacatgcattgagtccctgggaggcaattggatcaatacgggctaggaatttcatgctatgcaagaagccaagcactgag

SEQ ID NO: 8639 - DNA, 608 bp, Gossypium hirsutum
  unsure (1)..(608): unsure at all n locations; Clone ID: LIB3828-013-Q1-K6-H10
aaggtaccatcaacttctccaaaacanactttttctccatgcggtttccatgtgggacgctgagttctatgtcaaggttgacgatgatgtccatctcaacttgggtatgctggcgacaacactagcacaataccgatccaagccaagagtgtacatagggtgcatgaaatctggaccagttctttctgagaaaggggtgaaatatcatgaaccagagtactggaaatttggagaagatggaaacaagtatttcaggcatgccactggtcaaatttatggcatttccaaggatcttgctgcctatatttccatcaactcgcccattttgcacagatacgccaatgaagacgtgtcgttaggatcatggttgatcgggttggaagttgaacacgtggacgatcgttccatgtgttgtgggacccctccagattgtgaatggaaggcacaagcggggaacatatgcgtggcatcatttgattggtcgtgcagtggagtgtgtaagtcggtggagaagatgaaatacgtgcacaactcttgtggagaaggcgattctggtatttggaaatctgatttttaagttgcctccctagtcctacctcctcatctgc

SEQ ID NO: 8640 - DNA, 631 bp, Gossypium hirsutum
  unsure (1)..(631): unsure at all n locations; Clone ID: LIB3828-013-Q1-K6-H11
ctgcatttgnatcctgaagccatttagtcgctgttacactcgtattatacgccaaaggaaaatataaagatgggaattttagtccaagtcaagcatatctatatcttactatcatctatacaatctcttacaccgtagctctgtatgctttggtgttgttttacatggcatgcagagatcttcttcagccattcaatccagttccaaagtttatcatcataaaatctgtggttttcttaacctattggcagggtgttatgttttttcttgctgcaaaatctggatttattaaggatgctgatgcagcagctcaatttcaaaacttcattatatgtgttgagatgcttctagctgctctaggtcatctttatgcatttccatataaggagtatgctggtgcaaatattggtatgtctcgtggttttacacgaagccttgcacatgccttgatgttgaatgacttctatcatgatactgttcaccagtttgcacctacatatcatgattatgtactgtacaaccataatgatggtgatgagggaacaaggaaataccggtcgaggacttttgtgccaactgggcccgagatggatgctgctagaagaaacaaacacatgattggaaacaagct

SEQ ID NO: 8641 - DNA, 628 bp, Gossypium hirsutum
  unsure (1)..(628): unsure at all n locations; Clone ID: LIB3828-013-Q1-K6-H12
ggnaaaggctaccattggctgttcttccacttttatcattgaaagaaaagtagacatgttttcacttcctcaactttgagtccaacaaagattgaaaatttggctgtttttagtggttcaacaagaggggtttctttgttttgtaatagagggcagctttggaggtttaagcctgtaagaattgctggtgatgacccagagggttcacttcagtttacaattaagaagagcaagaagattgcagaaacaaggaaactggtttcgtccttaaaaataatattactgacttagatgaaaatgaagcttttcatgagcagagggataagtctcttcctgatgtggatctcacttcaagcagctctattagtacagttgaaggcaaaaatgggagcattctttcaagcagtcatgttacttcaactgtgaaggacatatcggagatacgaccttcagatgaagctggtgatgaacctgaagtacatttgtcttcagaaaaggcctcctcagatttaggttctaccaaactgctgaaaaccactgattcgaaagcttttaagtctgacatgcttccttcttttccctcaagttcctctgatgctgtcctacttacatctgttgagaatgaaaa

SEQ ID NO: 8642 - DNA, 636 bp, Gossypium hirsutum
  Clone ID: LIB3828-013-Q1-K6-H8
ggcatttccgaagcgcatcatgttctttgagaaagtgaatggactgattttcccaaggatctcattgcttcaattaggaaagatctcatcacaaagaagccatttattgagctggagaaagatggtcaatcttttgtgcttgatttcttgcatatgtttcgactggatgggaaaactggcttgaaacaaccaattgcttggattgacgaagcagatggctgtttcttcccggagacttgctgtggaggatgaactatatcaggctcatgagtatgagagtgatcatgaatcatatgttccccctgagatcaagctacatcttgaaattgacattaatggtgatcaatctaggttgaaggaatgtagtggggagtcaagttcttttgttagaaattttcaaattgctcagaaacctgccaccagttgctgtgccatagaagctgaggataattgcaacagggatggtgatgcaaaacacagcaaaatcattgaggatattcaacaaacaaggttaaaattttcctgaaaaggagtttgtggatgtagaatttggagaacagttggattctcaaactgtggagacgatgttcctgttgggcatgagctcttcgggtggttcggatgttattaatataa

SEQ ID NO: 8643 - DNA, 625 bp, Gossypium hirsutum
  unsure (1)..(625): unsure at all n locations; Clone ID: LIB3828-013-Q1-K6-H9
cttgtcttctccctaacgttctttccccctcagctggttgtttggagctgtatacccaatttttttcacattttcggctttcaaaactctttcttgttctttgttcatcttccgcagagcaggccggtatgagattgatggatacgtgtataattccgctgaggagctaaagatattgatgactgggaaatggaatgagtcaatgtcaaccttgtgatagtgaaggggaaccacttccaagcactgaactaaatgaggcatggaaacttgctaatgctccaaaaaatgataaattccagtacacacattttgcgcataagattaacagctttgatactactccgaagaagctattggcatctgattctcgcctacgtcccgacaggcatgcactagagcagggtgacctctctaaggcaggctttgaaaagagcagtttaaagtgatgatgatgacgacgatgatggtgatgatgacagtgaatcaaacaattcaagtggttttgaaatggaattaacaagagatgttatagcttctagtttaatgaattcattttaaattgtaaatgctattgtaaaatntttagtatttatatttggtatataaatattatccctttttaaaa

SEQ ID NO: 8644 - DNA, 637 bp, Gossypium hirsutum
  Clone ID: LIB3828-014-Q1-K6-A10
ttgaagctagcagtgagaccagagctgagattgttgagcttataactcagctcgaggccaagaacccgactccagcaccaactgaggctttgcctcttctcaatggcaaatggattctcaagtacacatcattcccgggtctgtttccactgttgtcaaggggtcaatttccattagttaaggtggaggaaatatcacagaccattgatgccgaaagtctcactgtgcagaactctgttcagttcgctggaccattggcctcaagttctattagcaccagtgctaaattcgaggttcgaagccccaaacgtgtgcagatcaagtttcaagaaggcataattggaactccccagctgacagactccatagtgttaccagaaaatgtggaatttctaggacaaaaaattgatctcactcctattaagggcttgctgacctctgtgcaagacacagcttcatctgttgcaaagaccatttccagccaaccgccattgaagatcccattatcaaacagcaatgctgaatcatggttgcttacaacataccttgacgatgaactgcggatttcaaggggagatgctgggagtgtgtttgtgctcgtcaaggagggcagcgctctcttgaactaaactctggg

SEQ ID NO: 8645 - DNA, 627 bp, Gossypium hirsutum
  Clone ID: LIB3828-014-Q1-K6-A11
caacatcaaaatccttcacgcgccacttcacgcgcagctgttttttttttcctcggaacgttctaaaaaaatggaaaaatgaagaaggaaaccgagccaaagtccagctcaacgcaatctatggctcaagaaccaaatgccaaagtggacccgaaaaactcggatcccgaaatggacgcggagggctttgttattgtgccaacaacagagccagagaaagagaaagagggtcagattcaaaacgagcaatcaccgaaccaggcacaatcgggattgaggaactcggttcatccattggatagtggatcgcctgctgcggatcgcgacgctaacatgtccgctcctaacagatacaatcctaaccttgctcaggctcccgctatggattcttcttcggcttctttcaaagagaagatggatatagtgagggatgccttttggagatggaagaggatagtgggagaagcgacgaagaaagccgaggatcttgccggaaacacgtggcaacacttaaaaacagcccaagtcttgctgaggctgccatgggaagaattgctcagggaacaaaggttttggcagaaggtggctatgagaagatttttagacaaacttttgaaacagttcctg

SEQ ID NO: 8646 - DNA, 513 bp, Gossypium hirsutum
  Clone ID: LIB3828-014-Q1-K6-A12
ctcatatttgcctatttctcagatttttctctcagtttgaaacgatgtctacggctggcgaagctgcttgttcttacgctgctttaattctctatgatgatggcattcccatcaccgctgagaaaattgcaacaattgttaaagctgcaaatgtctcggttgaatcttattggccaagcttgtttgcaaagcttttcgaaaagtgcaacattgaggatcttataaccaatgttggtgctggtggtgctggtgctccagttgccgcagctgcacctgttgctgctggtggtggtggtggtgccgctgctccacctcctgctgaggaaaagaagaaggaagaaccagaggaagagagtgatgacgatatgggattcagtttgtttgattagaagttcctttcagtgcttgatttggttgattgctgttttaatgcattaaatctgtgacagtagttgttgaggtttcttggtattattagtatttgtctgcttttgagtaaaaactttctttttg

SEQ ID NO: 8647 - DNA, 515 bp, Gossypium hirsutum
  unsure (1)..(515): unsure at all n locations; Clone ID: LIB3828-014-Q1-K6-A7
agcacggaagagcaatggcgagnatcaaggtccatgagttgagacagaaatcaaaaactgagcttttggctcagttgaaagatctcaaagctgagctcgctcttcttcgtgttgccaaagttaccggtggtgcacctaacaagctttccaagataaaggtggtgaggttgtcaattgctcaggtgttgacagtgatctcacagaagcagaaggctgcactgagggaggcatataagaagaagaatttcttgccccttgatctccgtccaaagaagaccagagccatcaggagaaggcttaccaagcatcaggcatcgctgaagacagaacgtgaaaagaagaaggaaatgtacttccccatgaggaagtatgccattaaggtgtaggataagatatttaagattctattttgaaatccgtttgtgtttacttatttgtgaaaacccgagctgtgattttgtttggtttttatgtttttgaacattttcccatatgtcaaatctagattttaatct

SEQ ID NO: 8648 - DNA, 638 bp, Gossypium hirsutum
  unsure (1)..(638): unsure at all n locations; Clone ID: LIB3828-014-Q1-K6-A8
gttctttggagctgtataccatttttttcacattttcggctttcaaaactctttcctgttctttgttcctcttccgcagagctggtcggtatgagattgatggatacgtgtataattccgctgaggagccaaagatattgatgactgggaaatagaatgagtcaatgagttatcaaccttgtgatagtgaaagggaactacttccaagcactgaactaaaggaggaatggaaacttgctaatgctccaaaaaatgataaattccagtacacacattttgtgcataagattaacagctttgacactgctccgaataagctattggcatctgattctcacctacgccccgacagatatgcactagagcagggtgacctctctaaggcaggctttgaaaagagcagtgatggagaaacttttatatcagccgatgatctacgtataaatctttggaacttggaaattagcaatcaaactttcaatattgtcgatgtaaagcctgtaaacatggaggatctaactgatcaagaacagaagaaaacgaaattagatcgggggaagttgaaagtagtcgagtagtcgactgtgtccgtcgatatccgagattttggaattcgttatgagctcggngatcatcag

SEQ ID NO: 8649 - DNA, 93 bp, Gossypium hirsutum
  Clone ID: LIB3828-014-Q1-K6-A9
aaaaagtacatgctaaataaatgtttctatttcctttcctccgtttactgttattattattttatattaagtaataggacaattatttagtat

SEQ ID NO: 8650 - DNA, 355 bp, Gossypium hirsutum
  Clone ID: LIB3828-014-Q1-K6-B10
atttgatttggttcttgtttttgaaattaaaaatcaatcttgattggcatcgatattctttccaatacaagaggatgtgggttcaatttacgtgtcaattcaggaatgaatcatgtcaacttctaggcattgtataaaaaataataatcttttattttttcaaaaaaaaaaaaaaaaaaaaaaaaaaaaaaaaaaaaaaaaaaaaaaaaaaaaaaaaaaaaaaaaaaaaaaaaaaaaaaaaaaaaaaaaaaaaaaaaaaaaaaaaaaaaaaaaaaaaaaaaaaaaaaaaaaaaaaaaaaaaaaaaaaaaaaaaaaaaaaaaaaaaaaaaaaaaaaaaaaaaaaaaaaaaaaaaaa

SEQ ID NO: 8651 - DNA, 642 bp, Gossypium hirsutum
  unsure (1)..(642): unsure at all n locations; Clone ID: LIB3828-014-Q1-K6-B11
gcctctcccagtagcggtgcagagccaatactactcggagagcttaccatatgatcccaggccggttaaggtcactaatctttacttctttttgcatgaaactctccgcggtaagaacccaacagtagtcatggtagcccaagctaacaacacaagcaacgacaactactcatcagtgccatttggcaccctatatgccattgatgatcccctcaagataggtcctggggacaactcagaggtgattgggaatgctctgggacttgggatcttgtccggcaaaaattcaacgactgtggtgatgtacttagattttggatttactgccggaaagtttaagggcagctctattagcatattttcaaggaatccgttaataaagatggaacgtgagctttcggtggtgggaggaagaggagaattcaggatggcagaagggtatgcacgactcaagaattactttttcgatggcaccactgttattattgaatataacgtgaccgtaattcattactaagaggacattctcttggactgtgcaagattcacatggttttgcagcacttgattagaataaatgtatgagaaatttagtaaatntcatcatacttttaaatgaatcaacttaaaataatattccct

SEQ ID NO: 8652 - DNA, 632 bp, Gossypium hirsutum
  unsure (1)..(632): unsure at all n locations; Clone ID: LIB3828-014-Q1-K6-B12
cagtttgcgagtaggttgactgggattaaatagaatgcaaagttcaaaaagaatgaccaaaacaacgaacagatctctggcctaaaacatgttgtagacgaggccaagcagcatcataatgtgaagaatgtgtatgtgtggcatgctttggctggctattggggtggagtcaaacctgcagctgctggtatggaacattatgatacagcattggcatatcctgttcagtccccaggtgtgatgggcaaccagccggatatagttatggacagccttgctgttcatggccttggtttggtgcatccgaagaaggttttcaacttctacaatgagcttcatgcctacctggcttcatgtggagttgatggtgtgaaggtcgatgtgcaaaacatcatcgagacacttggtgctggacacggtggtagagtatctcttacccgcagttacgttcaggcccttgaagcgtcaatttcccgaaacttcccggacaatggatgcatagcatgcatgtgccataacactgatggaatctacagcaccaagcagaccgctgttgttagagcttctgatgactnttatcctcgtgaccctgcttcacatactatccacatttcctcagtggcttacaacac

SEQ ID NO: 8653 - DNA, 531 bp, Gossypium hirsutum
  Clone ID: LIB3828-014-Q1-K6-B7
gttttggattacaacctgatgaggaatctttgaaggatcatcataaaagtcttggcaaacagtatcgtgatatgaggattctcattgatcagagagtgttttcttgggacgaaacacggcagatgcttacagcccgtgatgatgtttgggaggcttataccaaggaatacccagacgttgtctcatacaggcacaaacgtaagccaaattataatgatttatgcttgatctatggaaattcaactgataggaaggacaggcgatcaggtcgaaatgctcactgcaatggatatggtcagattttctattgccaatattatttgcacttgcattagctctataactggaactatactgaaaaatggttattaagaaagcttcgacgatagcaattgtatatcagcttttcttagcatgtaaaaattgttcactttcacttccatttcaactgttaatgtccttgtgaattatccttccttctttgatcctccatgtatgaactattaatggagttccccaatttttgttctc

SEQ ID NO: 8654 - DNA, 635 bp, Gossypium hirsutum
  Clone ID: LIB3828-014-Q1-K6-B8
aagttgggaggtttttttccccttaattttctaggggaaacaaacaaaaccatggatgattacacgagagagatgatggatttgaaaaccctggttactcgaaccctagagaagaaggggttctagctaagatccgggctgaactaagggcaagtgtctttgaggcaatagaagaggaagatcgagtaattgaaaaagaggagagtttacctcctgcattattgggaagttgcaatgatcgcgctaaacgacttcatgcttctccttctggaagattgttaactgcactagtgtgtgagtacttagactgggcgcaactaaaccacactctaaaagtgtaccagccagaatgcaatttgcaaaaagactcctggaaagctgagttgaaagactttagcgtcaaaaatggttatgaccttaacagaaatggagataatcctgtccttatggatgttcttgattgcttcttgaagtttgagaacttaacccaagcaagaggaagtggaaggagatcacaagaaattgagtcctcgtctagttcagagtctcgtaacacaagaagaccctcatcatctactgttgctgggggcttgcctccattgggaaggccggtccctgcctcgcagtcgtctgat

SEQ ID NO: 8655 - DNA, 453 bp, Gossypium hirsutum
  Clone ID: LIB3828-014-Q1-K6-B9
gggaagttccttgcagttggaacagtcggaggagacctttttatcatagattctgccaatatgcgggttcagatgatggttaaaaaagctcaccttggtttggttacagcattgacgttctcccctgattcaagggctttggtttctgcatcactggactcaagtgctaggttgaccccaatcaaggacaagacgagtagtggtggaatgacatggatgatcatattaatggtgctacttgcaattgctgtgtactttatgaaggagaaaggaattataccctaatgcaggcctgctaaaattgcaatcgaagatttgaccattgtgttaaaacttttgaaattgcttgtggcaaactttacatagattcttatcactgttcagtcaacttaaaaatgtgatatggatttctgatttaaatagtctaatcagctgactgcttcattcccaaca

SEQ ID NO: 8656 - DNA, 632 bp, Gossypium hirsutum
  unsure (1)..(632): unsure at all n locations; Clone ID: LIB3828-014-Q1-K6-C11
cgaataccgtttagtaaatgtgnatggnnacatgaaagcaaacctgggttcatttgcagctgcgttgagtaacaaagaggtttgggttatgaatgtggtgcccgaagatggacccaacactctcaagatagtatatgacagaggactgttaggaagtgtgcataactggtgcgaaagctactcgacgtatccgagaacttacgatctgatccatgcttggaccgtgttctctgatatcgaaaggaggggatgtagcattgtggatttgttgttagaaatggaccgaatcttgaggcctaaaggttacatcatttataatgataagcgatcgatagcggaagtgataaagaaatatttaggagcattacactgggaatcagtggcaatatcagattctcagctggtggagcaagatgaggatgatgtagtgttcataattcagaagaaaatgtggcttacaagtgaaagccttaaggactccgaataaagactcactgcaattcaacttctctttcattttatattatatatactttcattattgcaggcttgtgtttatgccaatgctcgtctctacttttttttgcttttgttagctttgttttattcttcactaattttttatctttact

SEQ ID NO: 8657 - DNA, 618 bp, Gossypium hirsutum
  Clone ID: LIB3828-014-Q1-K6-C12
cccagcgtccgctctactcatcaagttcttcccttttggggtcctttctctgatatctccattctttagctttgcttttctttctcatggcgcaggttttagacgacgctgagttttgtcttccacctcagtttttaaccgacgacgacttggtcatggacaatagtaaggctaagagcaatcccaagtatgttgatggtggttttggattagagcttggcggttctaagtctttgtttccctacgagttcccttatgggtttggatctttgggtttctcttcggatccaagttctccggttgagtcagtggtgggttctactgagacagagagtgacgaagaagattatcttgctgggttaactcgtcaaatggctcactctaccctcgaagacggtattcgcagaaacggccgtgccttttcttctgaaaaccctaagggtcgggtcatgtccagttcgccgcaatcaaccttatgtgtgtcaaggagcgggtgcagttgcatgcaagggtgtagccgtggaagccctacttgccaatcccgagttccgccaccgccgggaacatgggatttgctgtatgcggcggcagaggaagttgcaaggatgcgaatgagtg

SEQ ID NO: 8658 - DNA, 325 bp, Gossypium hirsutum
  Clone ID: LIB3828-014-Q1-K6-C7
gtttgatctacgtgcctattcaaatttgatgttttatgtcatgacatattttggagtgaagaggtccaataattattcattttcttttaatcattatggctcttttcaatgtgagaagagagatggattaaaattgtgttaatagtcttggatttagtgttaaacgaagaaaaaaaaaaaaaaaaaaaaaaaaaaaaaaaaaaaaaaaaaaaaaaaaaaaaaaaaaaaaaaaaaaaaaaaaaaaaaaaaaaaaaaaaaaaaaaaaaaaaaaaaaaaaaaaaaaaaaaaaaaaaaaaaaaaaaaaaaaaaaacggtggacttccct

SEQ ID NO: 8659 - DNA, 426 bp, Gossypium hirsutum
  Clone ID: LIB3828-014-Q1-K6-C9
agggcaaaaattaacatgtattaaagcttactaaatttacaatttcattattgcaatatttcctctattcatcctctctaacaatgaaataattcctaattagattgttgataacacatgaggacacaaggcagcttacttcttttcaggattatgaaccatctccaataggaaaagattacttacttgttgtgaaaacaagataggagtacatgaaaaagatgggcttccaaatttcgaggaaaccgacaagtttccaactcactatggtactgagtctatactgttgtgtactcgaagagggttggaacaccgacggtgctgcagagccatattcatttgctgcataactagtttgacccccataagcaccactggttggaaaactggaaacccccaaattctccaccgggtgttcctactgct

SEQ ID NO: 8660 - DNA, 640 bp, Gossypium hirsutum
  unsure (1)..(640): unsure at all n locations; Clone ID: LIB3828-014-Q1-K6-D11
gcaacccttgttttactcaaaaagaccctctccaacatggcttctaatcccaagtcttcttcgacatgaccgtcggtggccaaccagctggtcggattgtgatggagctctttgccgattgcactccccggactgctgagaacttccgtgctctctgcaccggcgagaaaggggtaggccgtagcggcaaacctctccactacaaaggctcatccttccaccgggtgatccccaatttcatgtgtcaaggaggcgactttaccgccggaaacggtaccggaggtgaatccatctatggagccaagttcgcggacgagaacttcatcaagaagcacacgggacctggcatcctttccatggcgaacgctggacccggaacaaacggatctcaattcttcatctgcacgaccaagacggagtggctggacggaaagcacgtggtgttcggacaggtagttgaaggcatggatgtggttaaagcgattgagaaggtggggtctagcggtgggaggacttccaagcctgttgttattgctgactgtggacagctttgaaaaaggcttattgaattgtgtttccttcataatatctggtctttntaggctccttttttttatgctatgctgcttctatggctact

SEQ ID NO: 8661 - DNA, 628 bp, Gossypium hirsutum
  Clone ID: LIB3828-014-Q1-K6-D12
ctcagccctatcttcctttttgtttattaggaaaaaaagatagagtttgagtaactgaagaaggaaaaatgggtattgcaggtgcagtgtgcattattgtgggttttatctcatcaatgtggatggctgaggcaagaattccaggagtttactccggtggggcatggcaaaatgcacatgctaccttctacggcggctctgatgcctctggcaccatgggaggagcttgtggatatggaaacttgtacagccaaggttacggagttaacacggcagccttgagcacagcattgttcaacaatgggttaagctgcggtgcttgctttgagataaagtgcgcaagtgatccaaaatggtgccattccggaagcccttccatcttcatcacggcaaccaacttttgccccccaaactacgctctcccaaacgacaatggcggctggtgcaaccctcctcgctctcactttgacctcgccatgcccatgttccttaagattgctgagtaccgtgcaggaatcgttcctgtttcttaccgccgggtgccatgccggaagaggggagggatcaggttcactatcaacggtttccgttacttcaacttggttttgatctcgaacgtggcgggtgc

SEQ ID NO: 8662 - DNA, 641 bp, Gossypium hirsutum
  unsure (1)..(641): unsure at all n locations; Clone ID: LIB3828-014-Q1-K6-D7
ggcaaatcaagtgccaagaagcgcataanaatataacacccgccacatggccaatcttcgccgcctcatcattgcttgtaatgttgtatacgtcttggttaggatgctgatcttccattcctcattcacatggaaacattgggttggtctacttttgacctctgtggcttactttataccctatcaacaactttcacagatggcaaaacctgcttattctgatgatggagaacttcttgacggtggatttgatatgagtactggtggaatatgtggctatttacatgatgtcatctacattacaagttttgtgcaactgatgtccatcatctctgacaagttttggtatacatatcttgtgataccggcatttggagcatacaaatcttttgggttcattagaggttttctatcattaggctcagagggagaggtggaggatgaaaagactcgcaagaaaagagaaaagatggaaaagaaggcttcaaggccaaagttggtcaagacaaggaataggtgagtttaacagtgaaatgaagagagtaagcacttggctgaaagtagttcatttgataatttccgatatttctttgaaatttgaaaagttaagaccacagtttgaggaaagcatgttgtagtgg

SEQ ID NO: 8663 - DNA, 285 bp, Gossypium hirsutum
  Clone ID: LIB3828-014-Q1-K6-D8
caaaaaggcatacctcacaatcagggatgatggggttcatacaaaaagaatcccttcatactaccttcccctgctgaagacgactagaattcgtgagccaagtcagtactctcaagacagaatgcgtgccggtgtcaaggcggctgcggtcgccgacgttgtcagctccgtacctaccttgattgcagtacgtaagattccttgtgcaaaggcaaacctcaaccatactgctcaagctcttatcatcaatgaataatcaattgtggcctactaaattaccgaaag

SEQ ID NO: 8664 - DNA, 327 bp, Gossypium hirsutum
  Clone ID: LIB3828-014-Q1-K6-D9
tcgggcgtgtcacccatataccctaatctgcttccttgccttaaaaaaacgagtttttaataaaaaaggagaaagtttgtggatttcgaggtgttgtgcatataaaggatgagtacactggatgcaactagagcagaacttgctcttgtagttttgtatttgaataaggctgtaagcaagggaataatgatatgacaggcgctattacatatattggcttcagaaattactataatgtgatgaggcatgccttggcacaggcacaataatgtttgacataattcaactcatgcttggtcacggtaaagttttttcgctcttgtttaa

SEQ ID NO: 8665 - DNA, 616 bp, Gossypium hirsutum
  unsure (1)..(616): unsure at all n locations; Clone ID: LIB3828-014-Q1-K6-E10
tggtcaccttcgtgaagttggtcttacatttcaccttcttaaggatgttccggggcttatttcgaagaatatagaaaagagcctggtagaagcatttcaaccattgggcatatccgattggaactcccttttttggattgctcatcctggtggtccagcaatattagatcaagtagaagccaaattagcactgaagccagagaagctacgagccacaaggcacgttctttcagagtatggtaacatgtcaagtgcttgtgttctatttattttggatgagatgaggaagaaatcaagggaagatgggcttcagaccacaggagaaggattggagtggggagtgctctttgggtttggacctggcctcactgttgagactgttgtgctccatagtgttgctgcttaaagttaaacaaacatgccttttaagtaattggtcgtgctccacttggcttgcagttttatcttcttcttttttccttttttagaatcctatgaatttgtgtgtttattgttaaagactagaagcctttgatggtgtgggcgggaagcttaacgcctattcagttcatgtatcaacttatattaaatntatggcaataataagttactttgc

SEQ ID NO: 8666 - DNA, 653 bp, Gossypium hirsutum
  Clone ID: LIB3828-014-Q1-K6-E11
gattcttaggtttcgctctcttcctcttcctatctctcgatctcgatcaaggttccccttcctccgcatccgccgcctcctcctcctccacttcccaaaacgttgagattacttatgggacggttctaaagctaatgcacgagaaaacgaaatttaggctgcattcacacgatgtgccgtacggttctggaagtggacagcaatctgttaccggctttcctaatgttgatgattccaacagctactggattgttaggcctgaacctgatacatctgcaaaacaaggagacaccattcctagtggaacaattattaggttgcaacacatgagaactagaaaatggctgcatagccatttgcatgcatctccaatatcaggaaacctagaggttagctgctttggaggagaatcagaatcagataccggtgattactggaggctcattattgagggaagtgggaagacttggaagcaagatcaaaagatccggcttcaacatgtggacactggtggttacctccatagtcatgataagaaatatgccagaatagctggtggacaacaggaggtttgtggtgttcgagaaaaacgtgttgacaatgtatggttggctgcagaaggtgtgtatctccccgttaccaaaagtaagtag

SEQ ID NO: 8667 - DNA, 625 bp, Gossypium hirsutum
  unsure (1)..(625): unsure at all n locations; Clone ID: LIB3828-014-Q1-K6-E12
nataaaccaagnaatgaggaccatcttctccaaatctccatctcctcctacccatcaccatactttcaccgagtcattaattgaagaaaatattgaagctgctgaacttagcatcactaaatgggattccttacatggcgacgaccatgtctcctactgtaacattgcttctgttttctccgaaaacaatcgtgatgaagccaaacagtatctgagttccattaagggtttgcagaaagctatgcgatacttggcttcgcttgaatccacttccgataaacttgtgcgagcccaaacgctgatgcaaaccgccatgaaacgcctcgagagggagttttaccagattttgaagtccaaccggaattaccttgacccagagtctgtttccaatcactcatcttctagaccatcggtttccaggtcgagcttttcagattcagaagaagatgagtctgagaacgattccatcccggaagtggagagaggctcgtcggctgttattgcggatttaagagccattgcggaagccatgatatcagctgggtacgctaaggagtgtttcaaaatttacagaactattcggaaatcgatcgtcgatgaagctctatataatctcggagttgaa

SEQ ID NO: 8668 - DNA, 640 bp, Gossypium hirsutum
  unsure (1)..(640): unsure at all n locations; Clone ID: LIB3828-014-Q1-K6-E7
ggnaaagggaagctttatataacccatctgctgtctctctaaactctcttcctttccatctttcctttctttgctttgcttgtttctattgagagatttccactaacaaaagctctagactcttgtcttcccacattttctctcaccatgatttccttgcacagaagctgttttctgaacaacactggcatttctgggtcatcaagccctttctcatacaagctgaagaagctgccaccagcttctgtcaaagtcacagctttaggccccaacagggatcgaaacagcagcgttttgattgaaaacaacaacaacccattgaaagaaataaaagaagatgacacttcttctgttgctgatgtggaccccaatcctactgttaccggcgaagaccgcgacctctactatgacgccgccgccaccgacgatcaacttgtcaccccttggtctctctctgttgccagtgggtattcgttgttgcgagatcctcaccacaacaaaggactcgcctttaatgagaaagaaagagattcttattacttgcgtggtcttcttccccccacagttatttcccaagaacttcaggtgaagaaaaagatgtatagtatccgccagtatcaagttcctctgcagaagtaca

SEQ ID NO: 8669 - DNA, 384 bp, Gossypium hirsutum
  Clone ID: LIB3828-014-Q1-K6-E8
cagacgtataataactactcgaactacttactgccaacctacgaaaaatgcatatgaatggctgtgatcccttagcgagtttgtgtcggttgacagtcgttgattagatggatcggccgcgcaacgcccctcatactatgctaaaactttattatatgtaggacgaccctgctcgttttacataaccactccgcataagtagacacctcatagcgtgccattttggtttgcaccaactgcgaataatgccgcacccaccgccgacttacagcgcgcatgtgagtgctctcatgacgctgatgatggttgttccatgattaatacacaagcacgggcgtcgttgacttctatctgcaatattgattttgtttcacctaacctgac

SEQ ID NO: 8670 - DNA, 634 bp, Gossypium hirsutum
  unsure (1)..(634): unsure at all n locations; Clone ID: LIB3828-014-Q1-K6-E9
caaatttctcgggggggattgagttctgctaatgatgggaatgctnactattattgaaagccaagtttcaaagggcacatcaattgctcctgatgatggaatcataactgaaagtctaatgcaaacacatgatatattcttaagcactcttaggtctcgcttgacaaaattacaggtggtgcgacatttttgggaaaagaataacattaaaggtgcaatcggtgccctacagaagctgccggatcattctgtgcaagtcgatgtaatcagtgttatcatgngaaaaaatggagattcttaccttggatctgttttctggcctgcttcctgtgcttaagggcttattagatagtaaaacggaaaggcacgtaaatatctcgttggagatgcttttgaagcttgtagctgtatttggtccaatgatacgctcaactgtttcaaccccacgtggtattggtgtcgatttacatgctgagcaaaggcgagaatgctgcaatcagtgtttcacgcagctgcaaaagattctgaaacttcttccaccactcgaaaggagaggtggtgtgatagcaagatgtgcacaagaactgaatctagttcttcaagaatgatcgacgaatgccaccatggcgccatc

SEQ ID NO: 8671 - DNA, 547 bp, Gossypium hirsutum
  unsure (1)..(547): unsure at all n locations; Clone ID: LIB3828-014-Q1-K6-F10
cgccgtcatggccgccgatgcaccatctcctgccccttcagccggtggttctagtcctagctcctctcctggttccgctccagcatcaggaccggattccagcatggctgccgctaccttgcctgttcttggatcattggttggggcctccattgtttctttgttttcttacatgctacaataagctacatatatngaaaaatgaacatgtgaacgaatgttttattttattctttttgaaagaaacatgtgatgaatacntgaaaaaaaaattgaataaaatggagctttgaataaaaaaaaaaaaaaaaaaaaaaaaaaaaaaaaaaaaaaaaaaaaaaaaaaaaaaaaaaaaaaaaaaaaaaaaaaaaaaaaaaaaaaaaaaaaaaaaaaaaaaaaaaaaaaaaaaaaaaaaaaaaaaaaaaaaaaaaaaaaaaaaaaaaaggggggggggttntaaaggaaacaaagtttttgtaggggggttgggaaaattatattttttttttagggaaaaaaaaataaaattaaggggggggtttttaaa

SEQ ID NO: 8672 - DNA, 638 bp, Gossypium hirsutum
  unsure (1)..(638): unsure at all n locations; Clone ID: LIB3828-014-Q1-K6-F11
gttggcccggtttgcctagnagcccctacaacaccgattgtaaagagagttgttagacttgatgttcccgtggataaatatccaaattacaattttgttggccgaattttgggaccacggggaaactccctaaagagagttgaagccttgacagagtgtagggtgtacataagaggcaagggttcagtcaaggattctgtaaaggaagagaaactgaaagataaacctggatacgaacaccttaatgagccactgcatgtgttggtggaggctgaatttcccgaggatatggtaaattctcgtctggagtatgctgttgcgatactagaaaatcttctgaagccagtggatgaatccttggatagctataagaaacagcagcttagggagttagctttgctaaatggtaccttaagggaagagagcccaagcatgagcccaagcatgagcccaggtatgtcgcctttcaacagtacgggaatgaagcgggcgaagacgggaagatgaagaaatcccttgttttctgctggttctgatcatcaattgaaatcgagatggcttggcttggcttttgtgatggatgatgtatttcaaccttaacttaggaggctgagttaggaagatctaagtcaaaactc

SEQ ID NO: 8673 - DNA, 632 bp, Gossypium hirsutum
  Clone ID: LIB3828-014-Q1-K6-F12
cggccgcgtgggtttttttttcttttcatctgcaaatctggtcctttttttctgatgctggagagtttgggtattagatttaaattagtttgaagggctttcgagttctgggttttccattttggggtaacacccaggttagtcaaattgtggacatcacggctatacacagagtttaccggcctcttcttattcatgcccgatctgtacgacgtaagagttgtgtgatcgagaggaaccctgcgccgcacggcgggcgtggagctttgccttctgaaggcggtagtccttccgatctcctcttccttgctggcggcggtgttgtcttttagagtttcagtagttggtataggtagcttttagtataaaaaaaaagaaaaaaaaattactatcgaggaagcttatttagatcgctcgtaagaataatttggtggtggtggtggtgtttttcgtagtcgacgttgttgttctttgtgggttttcattttatttgaatttttattggacaaagaaagaagttgtagcaagatgatgctcaggattaagagggttccgactgttgtttcgaattaccagaaggatgagacggaagagactgctcgccgcagcagtgggtgtggaaagaattgcct

SEQ ID NO: 8674 - DNA, 625 bp, Gossypium hirsutum
  unsure (1)..(625): unsure at all n locations; Clone ID: LIB3828-014-Q1-K6-F7
ggcaggcgcagcaaattgggtttccataaccttactgttttcagtatgtttatcggcgtcctatggtaagaggaccggaatctccaccatggctgacggagccgatgggtttcaaccaagcaacggttttccgcatgaagctgatcctgattcttcaacctctatcgatcctgatcctaccggattcggtgctgggataggtataggttatgaaagaagcccttactgtatcgactgcgacgatgtggatatcatgggcggcagcttttgcggcgcctgcaattacggatgcccttaccgcaggttcaataatgggtgtggtggtggtattgcttatatggatgaactcaaacgaacgattaaggaccttaccatgaaacttgatgccaatggtcttttagggaaaaagaaggccatgaatatacaagctatggcgccagaatcttcatagaaatcttcatagatttatatatagattatagaaactacggattctatacaaagagaaagaaaataaagaataaccaagcagcttgatatatgattgaattacaatgtgctagctgnttttttatttatttattattattacatgaataaaagagatttaaagtaagcttgattg

SEQ ID NO: 8675 - DNA, 473 bp, Gossypium hirsutum
  unsure (1)..(473): unsure at all n locations; Clone ID: LIB3828-014-Q1-K6-F8
tcgnntccgcccacgcccgtccgnattggatcagnaaatacttgcccatggnaacaaatgcaaaataaatgaagaatcgaaagttaaactaagcaacattagtttcaaaaacattcacggcacttctgcgcgtccagaagctgtcaagattatttgtagtgctactttgccttgtgaaaatgtagaacttgcagacattgaaattacgcatagtggaccgactggacctgcagtatcacaatgttcgaatgtgaagcctaaagttagtggcaaacaaaatccagctgcatgttctgcccctatcccagcaaaacctaccccgaccgcttaatcaatagcagaggtataattttttttgatgacgttgtaactcttataattatatttatctcgcaaataaattttgttttttttatattctatgttataaagaatatttttcataaacttaattatttttaaaaatacacttc

SEQ ID NO: 8676 - DNA, 635 bp, Gossypium hirsutum
  unsure (1)..(635): unsure at all n locations; Clone ID: LIB3828-014-Q1-K6-F9
gngctatcgagcatgttcgagtcttagcacatgaaatcggtggtcgtcaagaaaggctactgaacaagatgctgttgaaatcttgatgtatgagagtttacgttttgcatacggcttgcttgaggtgttgatctttgtgacttctatcaccatatggaataaaggcatcattagccaaataattctttcattccctatatcagtttttactgggagaaatatgtttgctgaaaggagtaaacaaggcattagtgataataagatatatcattatcacttaaatcttggaggaagtgtttctaccagaaggctgactaggataccttcaattcctaagaatgatgcaaagttcagaacacacttatccaggatgggaaggagatggcatcagtgctttatacttatcgcagctgtgtcaaagcacttcctcaggggtatgttggaattcacagttcgggattcagaaactttctgctgaaaccggagctgcttcgatctattgtggattctggttttgaacatctttccgaaggcaaagttttaaactcatgtctgatgttaacattcgtgaattccatgaattaagtcattttgtttttcttgcttttagtgacttataatggtgggcagtatac

SEQ ID NO: 8677 - DNA, 623 bp, Gossypium hirsutum
  Clone ID: LIB3828-014-Q1-K6-G10
gggcaaaatctggtgctgatttatggtaaaattagggtttcgttttgagtttccctctctttaatatggttccgtggggcggcctcacttgctgcttgagtgcagccgctctttatcttcttggaatcagcagtggcagggatgcacagattctcaagacggtcactcgagtcaatcagcttaaggaattggctcaattgctagatattgaaagtaaagtgattcctttaatcgttacaatctccggaagagttggttctgagaccccaattaattgtgaacatagtggattaagaggtgttatagtagaggaaacggccgagcagcattttctaaagcacaatgatgctggttcttggatacaagattctgctttgatgctttctatgagtaaagaggttccgtggtacctggatgatgggacgggtcgtgcatatgtagttggtgctcgcagcgcagcaggttttgcactaactgttggaagtgaagtgtttgaagattcaggccgatcaattgtacgtggaacattagactatctccaaggtctcaagatgcttggagtgaagagaatagagcgtgtgcttcccattggttcttccttgactgttgttggtgaggctgtc

SEQ ID NO: 8678 - DNA, 651 bp, Gossypium hirsutum
  unsure (1)..(651): unsure at all n locations; Clone ID: LIB3828-014-Q1-K6-G11
cagtagtttacctagcagtagcaatgacggtagagatagactaaagggctttgacaaattccttcacgagacatctcaaagtcaaactgcaatatcagacttggaaaaattttagatgagcccgtctttcctcgtaactgcaatttcaatatattgaattggtggagagttcacactccaaggtatccaatcttgtcaatgatggcacgagatgttctcggaactcctatgtcaaccgtctcacaagagtcagcattccacgctggaggtagggtgctcgatagttgtagatgtccactgactcccgagactcgacaggctttgatatgcacacaagattggttacggatgcaatcagatgaccccggtccatcttcaagtcattatgctctacccctttatgtcgaaacaaattgatttgttctcggccttggtctcaaataaggtattcatctccatggagtgccaattgctttaaggtatttcgatgtggcattgcgattatagtccttcatcatgaagcttttgaatgaaaaatgtacattttagattaaaaacttaatgcttaaagcaatggctntaattcaaagcatttagctctttgattattgatagttatttgagtaaaaagtagagcttgtttaaagcgat

SEQ ID NO: 8679 - DNA, 623 bp, Gossypium hirsutum
  Clone ID: LIB3828-014-Q1-K6-G12
gcttctcttagctgcctttcgattcttggattgagttgttaaggcactagaaatatcgtttctgaatctaattcaaacccatatttgttgaggattcgatcgttctaagtttgggatttttcccaggtaaaggaaacaatttgtggttcgaaaagccagaatagaatatgagtacaagtacggccacgtccggtacatgtttgatcatatgctccaatggaaaatcatctctcgaaaccaaaacctccacgatgattacgttgaaatcgtcgtcgtttccttcccgtttaaccgccgtttctataaaggtgaggacgagagttgtttcctgccaagctgtctccaccgcttccgtcgacaaggacgagaaagacgcgtcgatttcgggatcggaggaagacccataggcggctaaagttggggcaaaggttagggtaaaagtgcctctcaaagtttaccacgtgcctcgcgtccctgaggtggatctgaacggcatggaaggagtgattaaacaattcgtgggggtgtggaaagggaaaaggatttcagctaatctacctttcaaggtggagttcgtcactgagattgaagagcgaggacctgtcaagttcttagcccatctt

SEQ ID NO: 8680 - DNA, 642 bp, Gossypium hirsutum
  unsure (1)..(642): unsure at all n locations; Clone ID: LIB3828-014-Q1-K6-G7
ttctcccctaaacgacgttgtttttactttcctaaaagaagaggggatcaaacgttctatcctcctcatctccatcttctccctcgcagctatctcagcttgtgctagacctccttcagacattactgatacgcccgagtcacccgattccacacccgaatcacctgattccacacccgaatcacctgattccacacccgaatcacctgatgatgactattcacctaatgcaccagatgaagcagcagacggttatgcacctccacctgaagcaccaaccccatctgcaacctttacaatattgccaggcggtagttaccctgagctcgatcaaatttgtggagcaaccgactaccccatcgaatgcgtaagattcatttctccgtacttgaacgacggtatcaaaatcgacccactcaacgtccttaaagtcgggattcacgtagcgactaacatgaccatagaagccctcaatctcgctaggaagattagggacggccccagaacctcaccaaatgctcaatcatgccttagcgtatgcgccgaaaactacgacttaatccccgacggcaacgaactcgcgctacgtgccatcgaggaacgcaactggagcgatntgagaaaccagctgagcggcgatct

SEQ ID NO: 8681 - DNA, 266 bp, Gossypium hirsutum
  Clone ID: LIB3828-014-Q1-K6-G8
ctcaagcggtctacttgttttccagccatgcagtggtagggctaactatgatgaacatgtaaagaagccatgttctactcgcttaacaatcactacatcacctgtgggcgggtcaagcggaccgtgtattgcggtcgaccgtacataaagagaaatgactgtggcgtaaggctagagtgaagagcttgcgatgaaactggggttgagatggcttgcaaactgactacgatggtaagaggaatcagcttgttaataatcttagccat

SEQ ID NO: 8682 - DNA, 639 bp, Gossypium hirsutum
  unsure (1)..(639): unsure at all n locations; Clone ID: LIB3828-014-Q1-K6-G9
ngatagtaaaagtaaaaagaagtaggggagggggaagattgagatcaagaggattgagaactcaagtaacaggcaggttacttattcaaagagaaggaatgggattatgaagaaagctaaagagattactatactgtgtgatgctaaagtttctcttattatctttggtagttctggcaagatgcacgagtattgcagcccttctactaatttggtcgatattttggaccaatatcagaagacttccgggaagaagttatgggatgctaaacatgagaatctcagcaatgaaattgatagaatcaagaaagagaacgataacatgcagattgaactgaggcatttgaaaggggaggatatcacctctttgccttacaaggagctgatggccatagaggatgcccttgaaaatgggcttacctatgttcgtggcaaacagatggatgtccttgataagacatggaaaaataccaaattcctggaggaggactacaagcagctcagtttcattctgaatcaacaacaagtcgcttatgaaagtgcaagagagcagatggatcatggataccagcgagcccgggactacaactcacagatgtcttccaccttccaagtgcagccaatgcagccaaacttaca

SEQ ID NO: 8683 - DNA, 545 bp, Gossypium hirsutum
  unsure (1)..(545): unsure at all n locations; Clone ID: LIB3828-014-Q1-K6-H10
ctaaggcaaaatcgtattaccttttcgatggttatgcccatctttcatctggtcttgcttgtggccttgccggtctttctgctggaatggctattggaattgttggtgatgccggtgtcagagctaatgcacaacaaccaaaactttttgttggaatgatccttatcctcatctttgccgaagctttggctctttacggccttattgtcggcatcatcttgtcttcccgagctggccaatctagagcagaataagatgctggtggaattggttagtattcttttatttgcttatattggtatattaccatatgaaaaaagagtattcgatcgttctcgggttagttccgatttaaacagcaaatccagggttggtattattagtatttaatgaaaagcaactacttttgagagttcaaaaaaaaaaaaaaaaaaaaaaaaaaaaaaaaaaaaaaaaaaaaaaaaaaaaaaaaaaaaaaaaaaaaaaaaaaaaaaaaaaaaaaaaaaaaaaaaaaaaaaaaaaaaaaaaaaaaaanggggggggcc

SEQ ID NO: 8684 - DNA, 640 bp, Gossypium hirsutum
  Clone ID: LIB3828-014-Q1-K6-H11
tccatttttggtttttcgtaagtgaaaggagttaggcattttcaagaaagattaatgaatcctccaaaggagctgcatagcccagcttcactcacttcatcaaacaagcccaagcttcccaatcaaatcatcaaccatttcctttcttcaaatcccaacaatgctttctcaatggggttcggatcctcagcttgctttgcttatgctcccacagagaatcgtttccccagtcatcaaaggttgttttgtggagtggatgaaatatactgcatattcttgggggatttgaataatttgagcagcctgctaaagcagtatgggctgtcaaagggcaccaatgaagccatgtttatcatcgaagcatatcggaccctccgagaccgtggtccgtacccggctgaccaggtccttaaggatcttgaaggcagctatggatttgtggtgtatgatagcaaagctggaagtgtatttgctgcattgggtgcagatgaaagggttaatctctattggggtgtagcagctgatggatcagtagttgtttcagataacttgaagcttataaaagaaagctgtgctaaatcatttgcaccatttccaccagggtgtatgttccacagtgagcaaggattgatgagttttg

SEQ ID NO: 8685 - DNA, 570 bp, Gossypium hirsutum
  Clone ID: LIB3828-014-Q1-K6-H12
ttttaaaaaacataaaacatggtaaggttcctttagttgtgttctcattggctttggtgctcacaatccaattcgtagtgggacacgacgagaacactttagatgaggcagcatccccggaagctgaaatgcagttttaagttcaggggcagctaaacttgttgaaaactttaaaagctctgttggagatgattcccagagtgtggatgggccaacttctgacttaactgatgagattgcagcttctccagaatcagaagtagaagctgctactgaatctatcgatgggccacattctggcttagctgatgagattgcagtttctccagaatcagaagcagaagttgctactgaatctgtcggcgggaggaagcgtaaaatggcatagtggaccccgatgatgtttagaaagcaacatagaaacaaattttctttaaagatgcagcaaaagctgctaaaaattataaaaacaatgaaaataataataaaagcaacatccatagtttttgtaaaatatggcttgcagtaatttacttttaaaaataataaaagttactttcacatttgctc

SEQ ID NO: 8686 - DNA, 641 bp, Gossypium hirsutum
  unsure (1)..(641): unsure at all n locations; Clone ID: LIB3828-014-Q1-K6-H7
cccacgcgtccgcggtcgcgtgggccagncacagtcctcttctcttcagctctatcgcgatattgagaggttactcacggacactgtaaggcaatctcaaggtgcttggggtagttcaagtgattggagccaagtcgagggagcatggattcttaaaccgaaaggctcaaaacctaagtcagtcgttcattttattggtggtatatttgttggagccgctcctcagcttacctatcgtttgtttctggagcgcctttctgaaaagggagttttggtgattgcaacaccgtatgctagcgggtttgattacttcttcattgctgatgaagtccagttcaaatttgatagatgtttacggtttctacaagaaacagtgcgtgatcttcctacatttggtatcggccattctttgggttctgtcattcaccttttgattggttcaaggtatggcttgcaaaggagcggcaatgtattaatggcattcaacaacaaggaagcaagtgtagctatcccattgttctcacctgttcttgtgccgatggcccaaagcgttggaccctttctatcacaaattgcatcaacacccacaatccgcatgggggtaaaaacaaaaactcttagctttttcctgctttacatgc

SEQ ID NO: 8687 - DNA, 635 bp, Gossypium hirsutum
  Clone ID: LIB3828-014-Q1-K6-H8
aaaataatgatgatctaacccctgagcatcatcagtttttcttataccagcttcttcggggtctgaaatacgttcacacagcacatgttttccatagagatttaaagccaaaaaattacttgctaatgcggattgcaaactgaaactttgtgattttggactcgctcgggtgtcatttacggacgttccttctgctattttttggactgattatgtggcaactcgatggtatcgtgctcctgaactgtgcggttcattttactccaactacacccctgcggtcgatatttggagtgtaggatgcatatttgctgagttgatcactggaaaaccattgtttccagggaagaatgtggtggaccaattggatcttgtgaccgatttgcttggcactccctctgctgaaacaatcgcaaggattaagaacgaaaaagctagaaattatttgaatagcttgagaaaaaagaaaccaattcctttctcaaaaaaattcccaaatacagatccattggccctcaaattgcttgagcgtctgatcgcattcgatcctaatgaccgtccatccgctgaagaggcattagctgatccatatttccatggattggcaaatgtggacaatgaaccatccatgcaac

SEQ ID NO: 8688 - DNA, 622 bp, Gossypium hirsutum
  Clone ID: LIB3828-014-Q1-K6-H9
cggccgcgtgggcggacgcgtgggtttggttcgagttaagatttccatctttgtgggttttaacctcagtgttgaggttttgcttcttctgaaacagccagtcatcatcactagaactggttaactcgctttgcagtgtaggcataacccaatcctccacaaggtttttgagttgtaaagctaatttcggagggcaagtggtacacaagtttgacgacgttggcgccttggcattatgagcaagagtttttgatgtgttagaagaggagcaagctttttctttgccgagcttgaaagttagctccgggcgtttaatatcggaagtcgaacaaggttgttcttccggttctttgcctggtctaggagcatgctcatgcacccgttgaacaaaggcctcatcagtgtttcctgaggtagagcaaggttgttccttgctgggtagttcttcaggatctttatgcctttgggaagacaatcgtttaaaataacaacattttaaaataataacatttttcttttttattttgtttttgtgtcacaactgtttctctgccattgtttctgtccttttctttgccttgtttgcaggtgctaggctcggtcaacagggttggaaagctat

SEQ ID NO: 8689 - DNA, 568 bp, Gossypium hirsutum
  Clone ID: LIB3828-019-Q1-K6-A1
tgaatttcacaaacccccaaatggctaacctcatgatcatggcggttctcctggttgcggtgtcgacggcggcaaccgttacggacgcgcaagcaacttgtgcggcaaagctagtgtcttgttctcgttacatcctaaacaccaccatcaaacctcaagatgactgttgtaacccgatcaaggaagaggtaaccaacgatctttcctgcctttgtaacctctacaaagaccctaaagtttttgcttctttgaacatctccaccgcgcaagctctcaatgtcactcgtgaatgcggcgtcactactgatctaaccgcttgcaacagcaacagcacttctacaagctctgctacatccccaccaggaggacgatctgcagatcaaaatggaggtgctgacaggatatcattgactggagttaccatcgtattctttttttccatctctatggcactgtgatgaagcgttatatatcaactagttttgtcattatatctttagagattacgaattcaaaattatatttttagagattaaaatttgaaataaatttaaatctgatttaagtc

SEQ ID NO: 8690 - DNA, 638 bp, Gossypium hirsutum
  Clone ID: LIB3828-019-Q1-K6-A10
ctcagcttccattgttttctttcctcttagttcagtggagacattgagcatctctcttgatcacaatgactatcctcattgatcaacccgagcttggtgttgaagcaggggttaacaagctcgataatgcagacaatgaactagtgttggatgggggatttgtggtgccacagacaaactcttttggccacacttttagagattatcatgttgaaagtgagaggcaacagggtgtggagaacttctaccggaccaatcatattaatcagacttatgactttgtcaagagaatgagaacagagtatggtaaactgaacaagatggagatgggcatatgggaatgctgtgaacttcttaacgacgtaatcgatgagagtgaccctgacttggatgaacctcagattgaacacttgctgcaaacagctgaggctatcagaaaagactatcctaatgaggactggatgcacctgactggccttatccatgaccttgggaaggtgcttcttcatcctggttttggggagcttccacagtgggctgttgtaggtgacacatttcctgttggttgtgcttttgacaaatcaattgttcaccacaagtatttcgaggaaaatcctgactatcataactccgattac

SEQ ID NO: 8691 - DNA, 606 bp, Gossypium hirsutum
  Clone ID: LIB3828-019-Q1-K6-A11
cccagcgtccgcttaacctggtgtctcgcggggttcaacccgtttcactcctaatccactcactgcagatggggcgcgtgattatcaattttctagaagtctcttatcaaataaataacaacccattgtaacacactagggttttatcttctttctaagacttctccagtctcaagcaaccaaaccaaacaaccccttatcctttaacatctctgtcaaagaaatggctacatctcagctaacagcgtcgtcagtgacagcctcagctaggaacttggctccattacaagggcttaggctgtccactgtcaaattctcttcctttggaacattaaagcctggggctttgaccagcaggtccttcaaacgttcggttgctaaagcggctaccgatgtcgcccctaagtacacttcagttaaccccttgggtgacagggtgttggtgaagattaaagaaacagaggagaagactgagggtggcatttcgcttccaacaactgctcaatcaaagcctcaaggaggtgaggtggatgctgttgctgaagggaatacaatagtgaataccaaattggaaagtgctgcgaagactggtgctcacgtcatata

SEQ ID NO: 8692 - DNA, 624 bp, Gossypium hirsutum
  Clone ID: LIB3828-019-Q1-K6-A12
tgccttggccggaaatctccagtgcttgatgaacacattctctcctctttatggcctccttcgtgataacatgggcgtatattctctattttggggacaaaatgaaactcaatctcctgaaatctatcttttttgctttgtatgtctctaataattgctccataaccgatttatctatatcagtactttggcatttctttataatagtttttgaatctccaactacttccattttgttaaaacccataaaaattcctaaaatcacttcctgtaaccctgcatgtgcctctaccgtgaatggagttactatctcggagtgaataaccgtctttaatgctaggatctcccccacctcatttcgtacaatcaggcccttagtcgatctagaagattgatggtcaaaggctgcgtcaaaatgaactgtgaccctttctctttgatcatcctgttgtatatttccatcagactgaaggattaaatgtaacgcccccacgcctgaaaccgtcgccggaggcgagcttgaggggttaccaaacataatttaccaaattaagaacttcaaatcatttgtttctacattcacagctttctagctacccgcatcacagttacaagaaaatcata

SEQ ID NO: 8693 - DNA, 560 bp, Gossypium hirsutum
  Clone ID: LIB3828-019-Q1-K6-A2
attcattcctatcccttttactcttttaacttttttttacataaaaacaaaatgacaaagattgctttggtcattgttttgatctcaatgatcgtgcttgtttcaatccattccgtcgttggtgacaccgccgcaacgtcacctacagcatcaacagaatcaaacgctgcaaaagctgaggcaccaggtcatgagggacacgataattccaatgaatcatggaccgattgggctaaggacaagatcagcggtattgggggcatgttcgcttcttcaccatcatcggaaccagcatcggaaccagcaccaacaccagcaagctcatcagcggaaacacccgaagtcaaggtttgagctgaacctgtagccacaagcttggtttaagatgggatatcaaagcatggttctcatcctataatatagagattgatgggaaaagcactatccctatcactatcagtactttttattttttatttttgcgatcaaaccttttatgtggtttgaacccattgttaataaaatgttataataataacaacaatgccaatatttttatc

SEQ ID NO: 8694 - DNA, 629 bp, Gossypium hirsutum
  Clone ID: LIB3828-019-Q1-K6-A3
agcctctacactattcatagtgtgaaccattaccattgtgcacccctaaatattgtctaacttaattattataacagttaacatcatctgagaaataagcaaaagttgtctctaccttcaaggagttatcatcattaggatgaaaaaaagaccaagattccatccattattaacactaaggtagatctagacaccaaataaaagtgatgctgtagaaacctataatccatcctttctataattccaatgatagagcaacaatcatacccttctattttcttccaccattttgataaatagtcaagatgaatggaaatgctaaaatacatgagcaagagaagatttgcaggctacaatccaacaatatagggagatgcaagcctagaatgaattactttgggctcaactccgggaatgcgcctgataaggttcttaagagagaaaatttaaccgacgatcagcggtatgatgctttgagtaaaattcccgatcatccaactcaaatgatcgttttcttcagtttaccttctgttgcccgattggaatgggtcagaagatttctttctcaccattaaatatcaatgttcaaactttttgatgttgtaaaacttttgaacatattgattatg

SEQ ID NO: 8695 - DNA, 602 bp, Gossypium hirsutum
  Clone ID: LIB3828-019-Q1-K6-A5
gcatattccagttgttgtgtgtgcgcacagtagaaccaaagccatggctgggattaccaccagcttccctttcaggaccatcccaactcgacccaccaagaccatacctttacttctctcttccctccaatccaagctctttggtatccatgtccgcaaccctaacagtttctcctctcctcttcactgctctgctactataaatgcccgttacggtgctgattctcggttctcgcctcccggtcgttctaagaagaatgatgaagaccaggcacttgatttatctgccatcaggtcggattctgtcagacttattgatgaggagcaaagtatgattgggatagtctctaaaagccaggctattcaaatggctgaagatgcagggctcgatttggtgatattatcccctgatgcagatcctcccgttgtcagaataatggattataataagtatagatatgaacagcaaaagaagaagaaagtacagcagaagaaaactaatcgcatggatttgaaggaactgaaaatgggttataacattgatcaacatgattattctgttcgtttgaaagctgcaaggaagtttctgaatgatggtgata

SEQ ID NO: 8696 - DNA, 625 bp, Gossypium hirsutum
  Clone ID: LIB3828-019-Q1-K6-A6
gttgtaaacagcacatattaggccacttaggttgaactatgacacttggtgttcatcgggtgctcttgatatcaatggtcgattggtaagtaccggtggttacaacaatggctctgacaccgtgagaatccttgacttatgtgatacttgtgagtggcaagaatttccaagtgcaccgggaaacggaagatggtatgccacacaagtaacattagctgatggtaaattcgtagtgttcggcggtcgggatttcccgacatacgaatttgttccgccagaaggacaaaaaaacaccatcaacgaagtgatcaatttcccattcttgaaggaaacacacgatcccgttgagaacaatttatacccttttgttttcctttcaactgacggcaacctcttcatttttgccaataatcgttcggttcttttgaacactcagacccacacgattatccacgagttcccaatgctacctggcggtgctcgtaattatccgtcatcgggatgcgcttctctccttccaatcatgcttaaacctaatgaagataggaaatcaatccccgccgaggttttggtgtgcggtggaacgccgcatgatgcatatacaaaggccgatttgcaacgccct

SEQ ID NO: 8697 - DNA, 639 bp, Gossypium hirsutum
  Clone ID: LIB3828-019-Q1-K6-A7
ataagatttgccaaactagagggtttgtctgtctccatcgatttggccagttttgagatggttcggaattttagagaacctcttctaaagttactgaagtcgggagatatcgacctctgctttgccaacgaggatgaagcaacagaactactaaggggtgaagcaaatgctagtcctgaagctgcactggaatacctgtccaaatattgccgatgggctgtggttacattaggggccaacggatgcatcgcaaaacacgcaccagaggttgtccgagttccggctataggggagacaaaagtggttgatgccacaggagctggggacctcttcgctggtggtttcttatatggattggtcaagggattatcacttgaggaatgttgcaaagtgggctcatgtagtggtggtgcagtgattcgttcacttgggggtgaggtaacacctgagaactggcaatggatgtataagcagatgcagataaagggcctaccacttcctgatattcggaattgatgtctccacgatcaaacaagcattgattttcacttctattgctgctatttaataattttttttcctgaagaaaaggcaaacctaatcagtgttgaatcatcactgaattattctgtagaaact

SEQ ID NO: 8698 - DNA, 628 bp, Gossypium hirsutum
  unsure (1)..(628): unsure at all n locations; Clone ID: LIB3828-019-Q1-K6-A8
cgcccacctcattctataaaccccaaccgataaatgatggtggaactccgtcccgtgngaaatagattaagccactcagtttcatcattgctggaaccaaagaaagacattggcggtgtaactcctgatacaaaggcatctatggcaaggattaggaggttatcagagccaaaaacaagtagcagtccacttgtttcttcagtgaagtcacggcactctgaaccaaatcgaaaacaaaagttctggagttcctgaaagcaaaaaaatatcagcaattatgaaccatgataaaagtaagattgcttctctgcccgagctcaaaattaaaacaactaaagatcccaatgttacggacaacaaatcgggaggaaatggaatgactcagaaggtcagtggaagtacttcttcgaccattgatgttgctgaaccaagtaggaacacggacaaaggttcacttaatattgatggggacgacggtacagtaattgagaaaaccgttgtgatgcttgaatccattcccacggtaaattcatcagaagcaacgacactagaacagaaggagaacaatggcatctttaaaatcgggagggaaactgagatggtgtcagattatgctgccattcgtgca

SEQ ID NO: 8699 - DNA, 624 bp, Gossypium hirsutum
  unsure (1)..(624): unsure at all n locations; Clone ID: LIB3828-019-Q1-K6-A9
ngagcagaatgctgtaagaacaataccttcttattttggggttggtgaagacgaagaagattacccgacatggctgattatgaagaagctgacaatcttgttgagactgatgcagctactttacaaccaacatatcttgttgctcaagagcctgatgatgacaatattttacggacccgaacctatgatgtcagcatcacgtatgataaatactatcagactcctcgtgtgtggcttactgggtatgatgagtcaaggatgctcttacaaccagagcttgttctggaggatgttagtcaggatcacgcacacaaaacggttactattgaggaccatcctcacttacctgggaagcatgcatccgtacatccatgcagacatggggctgtcatgaaaaagatcattgatgtgcttatgtcacgtggagtagaacctgaagttgataagtatcttttcttgttcttgaaatttgtagcctctgtaattccgacaattgagtatgactacaccatggactttgatcttggcagcaccagcacttaattagagctatggcttgacaatttattgatggatcatattgggtatacctgcaactgcttgtaaatgcatatcccgtgcatg

SEQ ID NO: 8700 - DNA, 647 bp, Gossypium hirsutum
  Clone ID: LIB3828-019-Q1-K6-B1
ttgatacacgccctcatttattttatttttcaaacaaattttcccttcagttttcgtataatttcctaggaaaagaaaaatgagagagtgcatttcagttcacattggtcaggccggtattcaggtcggaaatgcttgctgggaactttactgtctcgagcatggcattcagcctgatggccaaatgccaagtgataagactgttggtggaggagacgatgctttcaacacctttttcagcgaaactggtgccgggaagcacgtccctcgcgccatctttgttgatctggagcctactgttatcgatgaagtgaggactggtacgtaccgccagttgttccaccctgagcaactcatcagtggcaaagaagatgctgccaacaatttcgctcgtggccattatacaattggcaaagagattgttgatctctgcttggatcgtatccgaaaacttgctgataactgtactgggctccaaggcttcttggttttcaatgctgttggtggtggtactggttctggtcttggatctcttctcttggagcgtctctctgttgactatggaaagaagtcgaagcttggtttcacttgtctatccttcacctcagtttctacatcagttgtagagccttacaacagtgtgctgt

SEQ ID NO: 8701 - DNA, 622 bp, Gossypium hirsutum
  Clone ID: LIB3828-019-Q1-K6-B10
gttcgtgttcccatctggacaatatgggagaaaatctggtccgcaaccgaatggaatggttggaggagaagcgggtgagaacactggctaagaaccttagcctttggtagcgaatgatgaaccaaggttttcggttacgatagtgataggagaaatactatatcgtctgtagtgcgacattggagagagttcaaaaatgatggacgaggtagttgaggttgatggttgtagtgacgaatcgttagaggatgctagtacagcttgaaccagtggggccaatgttcacatggaatagagggtagttgtttcagagacttgatcgttcaatttgcaataaggaatggtagaattttgcgccaaacaccatcgtgcgacatccttttaaattgaaatctgatcaccgacccttattggtcttaactaattcgggaaggctagtggatggtaggtaccattttgtttgtagatgggcttacctattctagttattctttactcttatgccaccagtcgagctgaaagactagttcatcattttcttgttccagattatgacctcatgtatgctcgttgctacttaccttttctagcattataactatttcatggctcgtgtttgacc

SEQ ID NO: 8702 - DNA, 635 bp, Gossypium hirsutum
  unsure (1)..(635): unsure at all n locations; Clone ID: LIB3828-019-Q1-K6-B11
cggncgcgtgggttaagatcgagtttcatcaaccttcaaaccaaatcaaacacaagcaaaatcaacaaatttaagtaaaaacccaacatagaacatatattcgtaatatattatacgtcatatatagatttttctggggtttggttttggaaaaatggatcgttatgagatactgaaagatattgggtctgggaactttggtgttgcaaagctggttagggaaaaatggagtggtgacctttatgctgtcaagtatattgaaagaggacccaagatagatgaacatgtgcagagggagattatgaaccataggtctttgaagcatccaaatataattagattcaaagaggtgctgttaacaccaacccatcttgccatagtcatggaatacgcagctggaggagaactttttgaaaggatatgcaatgctggtagatttagtgaggatgaggcaaggtttttctttcagcaactgatatcaggagtgagctattgccatgcaatgcaaatttgtcatagagatcttaagctggaaaacacgctgttagatgggagcactgcgcctagactcaaaatatgcgactttggctactctaagtcaagtgtgtttcattcccaacccaanatctactgta

SEQ ID NO: 8703 - DNA, 640 bp, Gossypium hirsutum
  Clone ID: LIB3828-019-Q1-K6-B12
cggccgcgtgggcaaagaaattatatatgtgacattaacatcacaaaagattatttaaaatactaattaattctatgacaaaattatgttgataatatcaagccctttcaattctggttactcatgagcccatatcaacatgtgtaaggttcaatcttcagggatgatgaaatattaatagattgcttaaaaacaaggtttaatgcatatgcatcgacgacgaaagccttcgcatttgccatcctcataaccctctgtctggcaaacaatggcacagttatcacgattcatgcacatccctttgaatttatgacttggagactcgcattttctaccttccactgccgtaggtcccatctctgctttatttcatataattgcatcataaaaatatgtaaaaaatatatagaaaatgcaagtatatgtaaatccaaatatatatgggaaaaaaataaatagaaaactattaaaatataaataagacccagaccttcttgtttatataatagttaagcgagaagttattaaaaaacattatttcataaatgaatataaatttgagtctcatatctaaagtccatttgattgggttatatattaatattttatgaataacttaacttcttagttaatcaagtaa

SEQ ID NO: 8704 - DNA, 634 bp, Gossypium hirsutum
  Clone ID: LIB3828-019-Q1-K6-B2
gttttggttgaggaggaaggagaagaagaagaagaaaaatagcaacaagatgtgggattgaaagagtggattgagaagaacccaaagtgctgggtcataaggttttggaaaaatggggctctgatcttcctttcctgttcaaggtactgtcagtggggaaagcgctgtcaatacaggcgcatccggataaagaattggccaaagaattgcataagatgaagcccaatctgtacaaagatgctaatcacaaacctgagatggctttggctataactgagttcagggcactttgtggcttcattactctccaggagcttaaggaagtgcttgaagatgttccggagatagaagaattggtcggcactgcatccgcgaagcaagtcatggagattgacgagcgaggtggcgatactgccgacaaagctaaaactgctctgcggtcggtttttacgcaacttatgtctgcaagcaaggagatgaccacgaaagctatatccaaacttaaaagtcggctgctcctacaaagtcagttgaggagtctgacggagaaagaagagttggtgttgcagttggaaaagcaataccccggagacataggtgtgttatcggctttcttcttcaattacgtgaaact

SEQ ID NO: 8705 - DNA, 642 bp, Gossypium hirsutum
  unsure (1)..(642): unsure at all n locations; Clone ID: LIB3828-019-Q1-K6-B3
gngacacagagctcttgggaagcttaggagggaagctgagcgtgccaagagagctctcagcagccagcaccaggtccgtgtggagattgaatcactttttgacggtgttgatttctccgagccactgaccagagctcgctttgaggaattgaacaatgacctgttcagaaagacatgggacctgtgaagaaggcgatggaagatgctggtttgcagaagagccaaattgatgagatcgttcttgttggtggaagcactagaattccaaaataggacacatgcattctaccattggaaccgcaatgatgatgggaaaaaagtggcaactgactcgtttgtattacacaatcagtactggtcaagcaatctgagacgaagaaaactgaagaagcatcatttgagtagcgtgcttaagagtattgcttcttattgagaagatgaactttcgactagagtatttcatctctggtacagatttggttgattaaatttcagtaagaagatgaaaatgccaaaattaatcaaatcaagtaagcaaagatgctaaggagttttggcattttcttctttttcttcgaaatcatgcttcaaaatgaactctntaaatggctcataaattgtatgctgtagctagaattatca

SEQ ID NO: 8706 - DNA, 640 bp, Gossypium hirsutum
  Clone ID: LIB3828-019-Q1-K6-B5
tacaatggcatcttcaactcttacaggtaagcttgaggcagatgtagatattaaggcttctcccgagcagttccatgaaatgttcgcccacaaaccacatcacgtgcaccacaagattcaaggatgcgatctacatgaaggtgaatgagggaaagtcggtatcattgtccactggagttatgtgcatggtatgatataacataacaaacccaatttcttttaatgcttatcacctgatttgttgctctttttgttttgttaaagaaaaaagttatttgcttagatggaaaggctaaaaaggcaaaggaagtagtggaagcggtagaccctgataagaatttgatcactttcagagtgattgaaggagatctaatggaagagtacaagagctttgtagctatgattctagtttcgcccaagagcgaggatagtggcagcatagtgcactggactttggaatacgagaagctacacgatgggattgcgcaccccgagactctactgcaattggtttaagatatctccaaagacattgacgcccacctcatccaagcaaactaaacaatatcgcatgttgctattgttaccgctacttggagcatctatttaatgaatgaagtgacagcttcctttctcatgt

SEQ ID NO: 8707 - DNA, 618 bp, Gossypium hirsutum
  Clone ID: LIB3828-019-Q1-K6-B6
aaaaaatcccaaaaggaatcgaaaagaaaaaattgaaaaaatgggttcggttccatcagaactgagcttggattttagacccaaatttatacccaaaacgatcagtaattttctcgaggaaatttcattgatgggaagcgtttccgataaggtttcaaagcttgattcttttgttaaaagattagaagaagaaatgagaaagatcgatggttttaaacgtgaacttcctctttctatgcttcttttgaatgatgcgattttagctttgaaagaggaatcaacgcaatgtattagaagaagaaatgttgaacctgttttagaagaatttattccattgaagaacaatcgaaaggagaataataatcacagtgatgatgaagaagaagatgattctaagaaaaattggatgagttctgttcagctttggaacactgaagatgatgatcatagttccattgatgataaattagatactaagagaaaccatggggatccatttaaaaacaggggaaaagttagaggttttatgccattcaaggcaaatttgagttttgcagtgaagaaagaagagaaagggagataccaattcatggactaacgattctcactccgggaatc

SEQ ID NO: 8708 - DNA, 650 bp, Gossypium hirsutum
  Clone ID: LIB3828-019-Q1-K6-B7
cttaattagtgattatgattactgcatgagcttgtggttccagtaatgttggaactacaaccagaaagtagcattttatgtaaactattatgattaccaaatggatttataggttccggtgatattagaagtacaagcagaaaatagcaaattatgaaaacttcatccaagataggagaaaaggaaatggttcttaattccagttgacatggaaatcaaattaagcaattaaatacagaaattagattgcacctctgatagtttgggggttggggtgcttagagcgtgagattaaagtatctgcttaaagaaataatcgttggttgctggtgttgcatgtttctacccatttatcaatgctctaagccctagagcaaaagtccattttcaatttagatctggaataagtgaatcttactgatggtttcatctaatatagttcttgaaattcagttgtagaccctcaaaatttgctagaagagaaagaagcaatagaagaaaaattagcacttagtgactatgaattacggttagctcgagaagatgttatgaaactgaagactgagttacaaaggaaagtagatctccttcgggataaattgagtagtaaattttcttatttatttgatatttgaatggatgcacttgat

SEQ ID NO: 8709 - DNA, 637 bp, Gossypium hirsutum
  Clone ID: LIB3828-019-Q1-K6-B8
cgaaatcctcaaattcttgttcaaaagaaaccctaatcatgggtcagggaacaccgggtggtctgaaccgacaaggctttccaggggatcggaaacaggatggttccgataagaaggagaagaaatttgagccggcggcaccaccggccagggtgggccgtaagcaacgaaaacaaaaaggacccgaagcggcggcccggcttcctactgtgacgccgcatactaagtgtaagctccggctgttgaagctggagcgggtcaaggattatttactgatggaagaagaattcgttgctaatcaggaacggctcaaaccgcaggaagagaaagccgaggaagatcgatctaaagtcgatgatttgagagggtcgccaatgagtgtgggtaatttggaggagttgatcgatgagaatcatgcgattgtttcgtcgtcggttgggccggagtattatgttgggattttatcgtttgtggataaggatcagttggaacctggatgtgctattttgatgcacaacaaggttctttctgttgttggtcttctgcaagatgaagttgatcccatggtgtcagttatgaaggttgaaaaggctccattggaatcttatgccgatataggaaggtttggatgctcaaa

SEQ ID NO: 8710 - DNA, 636 bp, Gossypium hirsutum
  Clone ID: LIB3828-019-Q1-K6-B9
gccagatccaagaggggttttggtcttatgaccttctttacctttatcagcttctatctctccctgggtagttgtttaattgcagcttccttggaagactcaattgcccagcaaaaacttgataaagttcataaccttccggggcagagtttcactgtggactttgcacactatgctggttatgttactgtgaataaacactcagggagagctctcttttattggttcttcgaagctgctaaggatcctgattccaagccacttttactttggctcaatggaggacccggatgttcatcagttgcttatggtgaagcagaggaaataggtccatttcatattaggccagatggaaagaccgtttacttgaacccttactcttggaatcaagttgtcaacattttatttcttgagtctcctgttggagttggtttttcatattcaaatacttcctctgatttgcttaacaatggtgataaaagaactgccaaggattcactgacgtttttgctaaagtggcttgaacgctttcctcagtataaagaaagggatttctacattgccggagagagttatggagggcattatgttccacagctaagccaagccattgtaagatacaacaaggcaaccaat

SEQ ID NO: 8711 - DNA, 524 bp, Gossypium hirsutum
  Clone ID: LIB3828-019-Q1-K6-C1
cttgctattgtcccatatactatcctaattgatgggttgtgcaaagctcagcatattgaagctgcaaaggaattatttcatcaactctcagacagtggtttgaaaccaaatgtttacacatattgtgtaatgattaatggactgtgtaaagagggattgccaaatgaagcatacaggttgtttaggagcatgggagataatgactgtttgccaaatagcttttgttataatgtaatgattcgggggttccttcgcaatagttatacctcaaaagcaacgcaacttcttaccgaaatggttggtaagggcttttctgcagatatattcactgccaccttatttaggaatctaattgtacactctaataaatcaaacttgctctgaaatatttcataaattgtgtaaagatcatcacctgcaatgtgaaacagtttgtcacccttgtacagtgataaaagattctggaaacttgaatgaggtttagtgtctattttcaaaagaaataaaatccaatatcacaaatg

SEQ ID NO: 8712 - DNA, 648 bp, Gossypium hirsutum
  Clone ID: LIB3828-019-Q1-K6-C10
gtcgaacaacaggtattgtcttggactctggtgatggtgtgagccatactgtgccaatttatgaaggctatgccctcccccatgctattcttcgtttggaccttgctggacgtgatcttacagattccttgatgaagatcttgactgagagagggtactctttcacaacaactgcggagcgagaaattgttcgtgatatgaaagaaaaacttgcttacgttgctcttgattttgagcaagaattggagactgccaagagtagctctgccatcgaaaagagttatgaattgcctgatgggcaagtgatcacaataggggcggagaggttccgttgtccagaagtactcttccagccatctctgattggaatggaagctgctggaatccatgaaactacttacaactccatcatgaagtgtgatgttgatattaggaaggatctttacggaaacattgtgcttagtggtggatcgaccatgttccctggcattgctgataggatgagcaaggaaatcactgcacttgcccctagcagcatgaagatcaaggtggttgcacctcccgagagaaaatacagtgtctggattggaggatccattttagcatctcttagcaccttccagcagatgtggatttccaagggcgagt

SEQ ID NO: 8713 - DNA, 590 bp, Gossypium hirsutum
  unsure (1)..(590): unsure at all n locations; Clone ID: LIB3828-019-Q1-K6-C11
gtcgccgctctctgtgtcactccttttgctttcttactagnaagaagttcattcaaataagaggctgggtcgacatggttatggctcttcatcaatgcctcgacagggataacaatggcgatgggactgccttattatggacttagagacacatcaccaacatattccaccaacttactcaacataattcccatcgtcacctatgttttctacatctttttacgaatggaaaagctgggattaggcaacaaagcatgcaaaatcaatactgcaggtgcaattatatgtgttggaggagcgctgacaacgagtctttataaaggaaaagcgtcctatctcacgcatgatcatcatccccattaccactcacctgctgttgctgctaccatggcagtctcgagtcctcactggactcgtggtactttcatgctgagcggtagccgcttgcgctatgctactaggtacatattgcatgcgaagtagctggaagtatctccgtcgagatataagacaacgctgataacatgcatcatgggagtgcgtacaatcaacagacctaggcctgtgtataaacatgactaatgctgctt

SEQ ID NO: 8714 - DNA, 627 bp, Gossypium hirsutum
  unsure (1)..(627): unsure at all n locations; Clone ID: LIB3828-019-Q1-K6-C12
ctgtgattgattccttttcttatgatctccctccatttcccttttttctttttgcctctttctatctcagatcgccactctcaatcttcctttgtgttttttttttggctttcttaatttcagtgaatgattatttttgttgactttctcttttgaagaagatttggagaactcaatcatctcttgttagccaaaagaatatatcttgatataataacaagaagaaggggaggaagagattgtggagttgtcggctgattgtttgtgaactgggaagttaaagataaagagactgatagatatatcaacaaagagatgggatctttcaagggtcatgctttgccagggacactgtttctgatggtgggtgtatggcacatatggagttccgtggttcggtttgtgtcaaaccccaagtcttttgaggtcagagtatggagcccagttcctggttttaatgggaagttgaagcacttggagctatatgttgtagcctttggtgctttcattgatctgtgtattgagcttttgtattcaacccacctcaagttttttgtggatggagtcttgaatccatcacacttgaacgattntgagcattcagggatgcttctaatgtttttcctc

SEQ ID NO: 8715 - DNA, 638 bp, Gossypium hirsutum
  Clone ID: LIB3828-019-Q1-K6-C2
gcgaggttaggacttgcgctggctccttgtctttccatgtcgttaacattaggaccaacatcgacttcgtgttcttcgccggcgggttcagcacgccttgcattttgacaaaaaccgacgtgccgttgaaattttcaaatcccaattcacccctgcatggacatctctccagcatagattccactgccacatcgatgagattaacatgggttagtggagataaggaacctcaacaagtacaatacggagatggaaaatcacaaacatcagaagttacaacattttcagcagctgatatgtgcagtgagtttcggcttggttccgttgtggtaccaagtccagcaaaagattttggatggcatgatcctggttacattcacactgcagtgatgtcaggattgcaaccttcaagcaccttcaactacaaatatggaagtgatgcagttggatggagtgctgaaattcaatttcggacgccacctgctggaggatcggatgaactcaaatttcttgtttttggtgatatgggaaaggctcctcttgattcttctgctgagcattacatccagccaggatcaatttcagtgattaaaggaatgaccgaagaggttgagaatggcaatgtagactccattttt

SEQ ID NO: 8716 - DNA, 427 bp, Gossypium hirsutum
  Clone ID: LIB3828-019-Q1-K6-C4
taacaatcaccggcggatccccattcaccagttattaaacgcaggtctcattcatttccagtgcgtttaataacccctttatacgccatggacatgaagaaggtctccaccgccatcattgttgctgccgcctcaatgagcgtcgtcatggctgccggtgcaccatctcctgccccttcagccggtggttctagtcctagctcctctcctggttccgccccagcatcaggaccggattccagcgtggctgccgctaccttgcctgttcttggatcattggcctccattgtttctttgttttcttacatgctgcaataagttacatgtatgaaaaatgaacatgtcaacgaatgttttattttattcttttcgaaagaaacatgtgatgaattttgaaaaaattgaataaaatggagctttgaataat

SEQ ID NO: 8717 - DNA, 639 bp, Gossypium hirsutum
  Clone ID: LIB3828-019-Q1-K6-C5
gcatttataaaatcctttgaatcagacccatgataataaagctgtaacatgccaccctaaaaactgaggtttcttgctcttaaagcaatgtcaagtgagaagcaagcagaggaagccattgtttcaagcttaaatgaaactatggagcatgaagaagaagatcaaggagataattccatttttagtgttaagagtcttctttggcatggtggttcagtttatgatgcttggttcagttgtgcttcaaatcaggtggctcaagttctattaacactaccatactctttctctcaaatgggaatgctttcagggattatcttacaagttttttatggtgttcttggtagctggactgcttatctcataagtgttttatatattgagtatagaaccagaaaagaaaaagagaatgtcagcttcaagaaccatgtcatacagtggtttgaagtgttggatggtttattaggaccttattggaaagctattggattagcgtttaactgcacttttctcctctttggttctgtcattcagcttatagcttgtgcaagcaacatatattacataaatgacaagctagataagaggacatggacatatatctttggagcttgttgtgctacaacagtgttcatccct

SEQ ID NO: 8718 - DNA, 87 bp, Gossypium hirsutum
  Clone ID: LIB3828-019-Q1-K6-C6
ttggaagatatcctaggatttcaatacaagcagcatttgccaagtaccagtgataatggtaaaataaattttgccattcttattttc

SEQ ID NO: 8719 - DNA, 257 bp, Gossypium hirsutum
  unsure (1)..(257): unsure at all n locations; Clone ID: LIB3828-019-Q1-K6-C7
gnaaaattaaaacgattacaaatttcatttcatcaaatatggcaatggcatggagtagattaatcagtagttgaaatatcatatatatatatatattgttacttaataatcaagttacaagttttcggcaaccataaatatatatcatagacagagagagagagagacagtgcgatttgtaatcgtgtaaatacctcagtgtgcgtgtgtgtatatataaatatatatcaatcaattcaaagttaaaactccatatg

SEQ ID NO: 8720 - DNA, 630 bp, Gossypium hirsutum
  Clone ID: LIB3828-019-Q1-K6-C8
gcaatttagagaacggggtaagctcttcattttaaccttgaccggcgaagacgagcaccgcataaaccccgcccgaatcgacgcaatccggtctgcactaaaccaaatccgctccgactctacctctctctctggctccgttctcatcaccaccgctcacggtaagttcttctccaacggctatgatctctcctgggctggctcttcaccagacaagatacgtttaatgtcttccaagctccgggaacttgtcgccgaccttatctcctttccaatgcctaccgttgccgccatcaccggccacgcctgcgccgccgggttgatctttgctttttgtcatgattatattgttatgaggaaagatcgagggtttttgtacatgagtgaaacggatatcgggctgaaaattccggcttggttcattgccgttataagctgcaagattggagacgccaaggtacggcgagatgtggtgttgaaagcgaagaagttaacggctgagcaagcattggagagtggaattatcgacgcagcgtttgatacagcggcggagacggcagaaggggcgctggaattaggagaaaagttggttaaaaatgggtggaacggccaagtttactgtgaaaatag

SEQ ID NO: 8721 - DNA, 626 bp, Gossypium hirsutum
  Clone ID: LIB3828-019-Q1-K6-C9
ccccgcgtccgatcacatatcaaacacagttaataatatgggcccgtaccgcgcattaaggggtcgggtgaatggtataggatattctctggatgaatgactgatgccatacttggatttagctgggttcgggtcagcagtattgatccagacgtttgatttgcagtacgattcaatatctgcattggtcgagcgttggcacccaaagacctacacttttcatttaccgtgtgggaagtgcaatgtcactttggaggatgttgcattgcaacttgggctcccaatcgacgggagtgccgtaaagggcgtaagtacgatagctgagctgactaccctttgttatggcctactagaagtctcgcctaacaatgccgagtccaattttacgagtttgaaattttcatggctgaaaataaattttgaacatttatcaattaatgtcactgagcatgaggtgatgtgcacagctggagcgtacattatgcatattataaggggtgtactgatgccggatgggaacaataaggttcatttgatgtatttacccctattagctgatttgcagaatgttcgctcgtatagttagggttccgcagttctggctatattgtatcgtgagctttttc

SEQ ID NO: 8722 - DNA, 657 bp, Gossypium hirsutum
  Clone ID: LIB3828-019-Q1-K6-D1
aaatggtactcttggttttggttttgaggtggtcctgataaatgttgttcttctggatgttccggtaattgtaatcctggtggtttcgttctaccatttcctcaaattccagaaatcccaagaattccagaaatcccacaaatcccacagatcccacaaatcccacaaattccactaatcccacagatcccacaagtcccacagatcccacaagtcccaaaaatcccactaatgccaggacagtcgggatgtgagagtggagagtgttgccgtcagggttgtggtgggacttgtgctgagtgtggtcagcccaggtgcgcatcaggatgttgccaggctgaaactgtaaagagcaaagggatagaagaggttatggacagtgaacccagtccaccaaagtagagagatgataccatattaagatgaaataacgaggaagagttggttgtcgtcttattaattatacaaaataagaagtaatgatgttgcagaagggtttgctataaaatcctcttggacaaaaagagtaattatgaagaataaatagctcaaaacaatattcgatttgcaatatcctaaagttccttgaatcttgttttgtagccatatgtaattaatgcatgtgcatgctaataaaaaaaaaaaaaaaaaggcgga

SEQ ID NO: 8723 - DNA, 381 bp, Gossypium hirsutum
  Clone ID: LIB3828-019-Q1-K6-D10
gcgttccgaaaaacgcaaaagactttggcggtgcaaagtccttggcacaagctgtttgaaactacctgtccgagtaggtggagacaggttctagacaagctgaggattaccttatggactacggcccttttgctaatgttcctgcaactgatcctgccaagatcactgacccagtcttcagtgtcaacgatgaggaggatgcacctaaacgtctcaagaataatccgcttagcaagaggcgtcaagcgacactgtataccacatgacttttatactatccatcatgggacctcaagctggcccggttctgccagtgcactcaaattgggatacttgcgaatacataatattggacacacacatgcatccaatgaaaccttt

SEQ ID NO: 8724 - DNA, 438 bp, Gossypium hirsutum
  Clone ID: LIB3828-019-Q1-K6-D11
gtattatgttgcctttggatggagaataaaaaacctagcggcaggttccagctttcctcgtaagaatgttcccctagaagaaatgcagcctctcaaataatcatatttctcttttatatcatccctttcagaggtgtttgatatgctcggatgcttacggctgtggaaggttagagagaggcttttttctcgctagttaaattggttgcctgaaggaggagcatgttgagtgccgcaactgcttctctttatgcttgcttgcttttcatctccttttgtatgtagtttctgttattatttttttctttcctatttgttaaatgttacacttaacgcatttgggttgggcatgtaattgagtttccttgtctttgacagttgactcacgtgaactggatttatgcgcaatttatgcttgtcttggaactgagttgtact

SEQ ID NO: 8725 - DNA, 551 bp, Gossypium hirsutum
  Clone ID: LIB3828-019-Q1-K6-D12
cggtcgcgtgggcggacgcgtgggttcgaggtcggctttgtaacaggaatctgctgtacttgtttcttgataagatgcattgtgtccacactctcggccgacatgaatgctggtctttatgttctagatcatccaatcctaaatcttatctattacatgttcgtagaaattcttccatcagctttggtgctgttcattcttcgaaaattgcctccgaagcgggtctctgaacagtaccacccaataagatgaagagctgaaagcatttgtattatacctgaaactccaaagattatgttctccgggaaaatattagcatccggctcaaatcttactcatgatcatttatttagttcgatgaatgaacaataacaaacaaaaatcatttatttcgtccgatgaatgaacaaaaacaaaagtagaaccattcattagcactctgtatgcttaatccatagtctaaaatttcctgtcacagggacttgattcatatgaatattcattcactaatttgtttttacttccttttctcaatataaatccatttcatg

SEQ ID NO: 8726 - DNA, 660 bp, Gossypium hirsutum
  unsure (1)..(660): unsure at all n locations; Clone ID: LIB3828-019-Q1-K6-D2
gttgaatattgcttaatgttaggatcttgaactagattaaaagaagaaagagccattttgtagttaattttcttcaaaatttcattgcttttgctcccaacattaacattgttaactgtttgcaattaacaaagtagacgctttatagcatgagatgaagaaaggaggacaatccttttatcaaaaccacaacttctttccaacttgcagttttttttacatgaaattaacaaattagaagctttatagcttgaaacgaagaaacaaagacaatcctttcatcaaaaccacctatcaattaaaataggatttttttttagtgcgaaaaaagctttttcggggaaaatcaattagtggtttggatcaagtacacaagattggcttagaaagattttagggcctggaatgtctgagaaaatgtgggatgtcacaatcaagcatgccaaaacttgtgttatgggaaataaatactatgtttttcaaggcactaattacagagtcttcttaaaccccatttgtcaacttgtgaaagcagagattaatgggactacatatcctatacaaaccctaagtagtatcaacagaatttggtcagacaagcttatgtaaattggtcttncttggaagaaatagaangaatttctaatgagattggcttgc

SEQ ID NO: 8727 - DNA, 639 bp, Gossypium hirsutum
  unsure (1)..(639): unsure at all n locations; Clone ID: LIB3828-019-Q1-K6-D3
ctcttcccctccggtctcgccgatggctcagtcgctaagccgttctctgggttcggcttccattaacgagatggtggcctctttaaggaacttacagctagngaaaagtcaaatcctggaaaacccaagttggctgttgctccccttcgtcaccttccagtttcggatcccccagaacagcaatgatccgacccggtttctgcagcttacccagtactccaacccgaaacttaacccgtccaggtatcagctacccggattcatgggataaagtgtgtgaagaagaaccggtaatggaacgggtggaatccggacgtgatttacgtgcaaagatgttcgagaaactgagtaaagaaaattcattggagcgggttaacccggatcaatcttccggaggtccggatttgaattgggtttcggacttggtaaactaaaagtgaaactaaaatcttttttttttatttaattaacttttaatctattttgagatttcttcattgtgaatatagcctctaaaaaggttaaaaaggaagaagaagaaatctgaaaattctaaaaaaaaaaagaagcttaagctcttttttttttgtatagggtaagcaagcaagggggttattgtaatggttgatattgtgtttt

SEQ ID NO: 8728 - DNA, 647 bp, Gossypium hirsutum
  unsure (1)..(647): unsure at all n locations; Clone ID: LIB3828-019-Q1-K6-D4
caaaactganagatcatcccttcagttatgtctgcgcttcattttactgtaactttcctccttctgactctgttactggaagtaaataaagcaaaatcccaatcatttattggcgtaaattatggacaagtggccgacaatctaccatcaccggcagccacggcaaagcttctccaatccacttcaatccaaaaggtccgactatacggctccgacgccgcaatgatcaaagcgctagccaacaccggaattggcatcgtcatcggcacggccaacggtgacatccctgccttggcctccgacccgaattttgccaaaagctgggtggatacaaacgtagttgcttattatccagccagtaaaatcatcctgattaacgttggcaacgaggtcatcatgtcgggtgataacaatttgatatctcagttgttgcccgccatgcaaaatgtcaagaatgccctcgatgcggcttcgttgggggataaggtgaaggtctcgacggtgcattcaatgactctgttgaaacagtctgagccgccatcttctgggagcttcgacccggcttatggagacatgttgaagggagtcttagcatttaacaatgctaccggttcaccttttgccattaacccgtaccctttcttcgc

SEQ ID NO: 8729 - DNA, 655 bp, Gossypium hirsutum
  unsure (1)..(655): unsure at all n locations; Clone ID: LIB3828-019-Q1-K6-D5
cacattcactctttctctctgaactcctccctttatctctctataagtcgcattgccgccatgactgatggccatctcttcaacaacatctccctcggcggccgaggtggcacgaatcctggacagcttaaaatttcttcaggggggattttatgngaagaaacaaggaggtggaaaagctgtagaagttgataagtctgatatcttaggggttacatggatgaaggtccctaggacaaatcaacttggtgttagaatcaaagatgggttgtattacaaattcactggattccgtgaccaggatgttgccagtttgaccagtttttttcagaataattgtggaatagccccagaagaaaagcagctttctgtcagtggtcgtaattggggagaagttgatttaagtgggaatatgcttgcctttatgactggtacgaaacaagctttcgaagtgtctttagcagatgtgtcacaaacacagcttcaaggaaaaaatgatgtcatcttggagttccatgtggatgatacaactggagctaatgagaaagattcactgatggagataagtttccacatacctaattctaatacccaatttgttggtgatgaaaaccgcccacctgcntcagtttttcgtgaaaaaacatgtcagtgg

SEQ ID NO: 8730 - DNA, 636 bp, Gossypium hirsutum
  Clone ID: LIB3828-019-Q1-K6-D6
aaacccataaaaaggcaagttgcttcttttttcttgtccaatagttcctttgtttgttcaaaaacatattcttttttaaggttcaaacaagtttaagcttaagggaaaatggcattcacgggaactttggacaaatgcaaggcttgtgataagactgtccatgtggttgatatgatgactcttgaaggagttccttaccataaaacttgtttcaaatgcagccattgcaagggaaaccttgtgatgaacacctactcctccatggatggagtcctgtattgcaagcctcattttgagcaactatttaaggaatctggcaatttcagcaagaattttcaaacagcgaataccgagaagcaaaatgacacgtcgaggactcccaacaaactctcatccttattctctggaacccaagataaatgtgctgcttgcgagaaaacagtgtacccattagaaaagattacaatggaaggggaatgctttcataaaacatgctttagatgcgctcatggagggtgccctttgacacactcatcctatgcggctttgaatggtatcctctactgcaagcatcatttcgctcaacttttcatggtgaaagggaactacaaccatgtcctccaggctgctacacat

SEQ ID NO: 8731 - DNA, 342 bp, Gossypium hirsutum
  Clone ID: LIB3828-019-Q1-K6-D7
cttaatcacctaggcgtatttagtgtattgatgaagctgaaggccgccatattgattttgtttgtgtatgcgttgttgtaactctattacattagtcgcagaagatagagcaggataagcaagagctctcattttcaagtgccaagctgactgatataacgaccacacaaggagcttggcctggtgaagaaacctattttttgtgctgaattttactatgagcatatttgcctgcaatggtagggtcgtccccttggtatcctatacctagcaatattgcattgtatggagtcctatgctgtattagtttgtttttaatgaatatatagttttcccatttgc

SEQ ID NO: 8732 - DNA, 655 bp, Gossypium hirsutum
  Clone ID: LIB3828-019-Q1-K6-D8
tggtccaacagtgggagggctgttgaatgcaacatgcgggaatgcaaccgagctgatcatagcaattttcgcactaagccaacataaaatagatgtggtcaagtattcccttctgggttcagtcctatcgaacctgcttttggttcttgggacctctctcttctgtggcggtattgccaacatcgcaagggaacaaaaatatgataggagacaagcggatgtgaactctctccttcttttgcttggattattgtgccattcgctgccattgctgttccgtatgagtggagcatccgctgctctcacagccgacccaacgctgcagttgtcaagagcaagcagcattgtcatgttgattgcatacgtgtcatacatagtcttccaactattcactcacaggcagttgtttgaagctccagaggaagcagaaggcgacgacgatggaatatcagaagaagagccagtaattggattttggagtgggtttatatggctagttggaatgactgttgtcatttctctcctctctgaatatgttgtagaaactattgaggatgcctcagatacttggggaatttctgtaagtttcatcagcattattctgctacccattgttggaaatgcagcagaacatgcatgagcaatcatttttgct

SEQ ID NO: 8733 - DNA, 638 bp, Gossypium hirsutum
  unsure (1)..(638): unsure at all n locations; Clone ID: LIB3828-019-Q1-K6-D9
gcactggctgcttcactgctgggggtggagtctggacaagacgcagtgatacggacattactgtacctgagggctaatgaaacagtgaagccatatggagtaaccgtggcaggttttaccgatcgtatatcggaaataaggaacaggcttggcagatgtgggatgaaagatgaaggcttgatagtaccaatgcaacttggtgcagagaaccgaactaccagtaacattctatcggcggatgctgattccctttcgtattcacggacgcaggccgaaattttgaggataatatatggaactggcgacgagagtaggcctggtggatttctgcctgatggtggacgtgggagaatcgccatgggattcctcgctactcgaaactaagcgatcgcatatatataaaataagggtcatatataatctaagaaaagctttacatattggaaccactattagctgaaaataatatcagtaataaataaagacagagctgaccaaggaaattcccacttgttagtcacgggaaactcccatgaagaggtagatttaggttgttaatttatactgaagctttacaacagttaatgggctacaccttataattntatttttcacttacatttgtaacaatttactat

SEQ ID NO: 8734 - DNA, 635 bp, Gossypium hirsutum
  unsure (1)..(635): unsure at all n locations; Clone ID: LIB3828-019-Q1-K6-E1
tccagnaacagcccaatgatgaccccaaaaacatggacgctattcctcccattgatgcactcaaccctaccgagttgaatggacccggtgttggcattcacgaagatcatgttgtcccaaaggtgctgaaattggtactcttggttttggttttgaaggtggtcctgataaatgttgttcttctggatgttccggtaattgtaatcctggtggtttcgttctaccatttcctcaaattccagaaatcccaagaattccagaaatcccacaaatcccacagatcccacaaatcccacaaattccactaatcccacagatcccacaagtcccacagatcccacaagtcccaaaaatcccactaatgccaggacagtcgggatgtgagagtggagagtgttgccgtcagggttgtggtgggacttgtgctgagtgtggtcagcccaggtgcgcatcaggatgttgccaggctgaaactgtaaagagcaaagggatagaagaggttatggacagtgaacccagtccaccaaagtagagagatgataccatattaagatgaaataacgaggaagagttggttgtcgtcttattaattatacaaaataagaagtaatgatgttgcagaagggtttgctata

SEQ ID NO: 8735 - DNA, 479 bp, Gossypium hirsutum
  Clone ID: LIB3828-019-Q1-K6-E10
agaaagcaaagagagaaaggcgagcggaggaaagtgtcatttaaagtcactcttacctctgatcctaagctccctttcaaagtgtttagcgtgcctgaagcagccccttttacagccgtcttgaaattcgcagccgaggaattcaaagtccctcctcaaaccagtgctatcatcaccaatgatggtgtgggaatcaatcctcagcaaagtgcaggaaatgtgttcctcaaacatggatcggaacttcgcctgattccccgtgacagggtgggagccttttgaaataacaaaaacttcatttgttatctctgagtgagaagactggttatgactttgtttggttatggatcctttgttttggtatgtatgtttaaacttttacttgagtgtagaacatgacggatagcaaattcttttttccctaaagaaaatatataagagcaataataaaataaagaccctgaattttgtttgatgca

SEQ ID NO: 8736 - DNA, 593 bp, Gossypium hirsutum
  unsure (1)..(593): unsure at all n locations; Clone ID: LIB3828-019-Q1-K6-E11
tccttctaaacccncttatctcctcctggcaaaaccctagccccttccttttttctttcctagtagtcatccatggagttctgggggtatcgaagttaagcctgggcagcctattaaagcagatcctggtgctaactacgttatccatctttcccaggcttcacttggagagtccaagaacaaagcagaatccggtccactctatgtgaatgttgatggaaagaaacttattctgggaaccctttcccaccagatttgccctcaattatcttttgatttagtatttgacgaacagtttgagctctcccacaactggaaaaacgggagcgtatatttcctcggttataaaactttcataccataggaaggtgatgattctggtatgtctagtgaagaagaaagcgaggaggaggaagatgatgagcttcctgtcgctgctgctgctgctgctgctgcagtaaatggaaaagctaagccagatgcaaaaacagccaatgctaatgctgggaaacctgatgctgttaaacaatctggcaagatagcagaacctagcaataacaggaaatctgaggatgaagatgatgatgatgagt

SEQ ID NO: 8737 - DNA, 327 bp, Gossypium hirsutum
  Clone ID: LIB3828-019-Q1-K6-E12
cggtcgcgtgggcaaaaataagaaaagatggagatacatcggatcagataaagttttctcaagtggtaggggccgagaaacaaatagtttcagggatcaaatactttctaacagttgaagggattagaataatgggaaaagcaggatgtttgattcgatagttttgattaaaccttggtcaaaatctgaagacaaacagttgattagcttctctcctattcaataagattattcaaattttcttattgaatatatagaaaaatatataatgatctatgtaataaatgaagggataagaaattctaattaactatttgctttttgatt

SEQ ID NO: 8738 - DNA, 531 bp, Gossypium hirsutum
  unsure (1)..(531): unsure at all n locations; Clone ID: LIB3828-019-Q1-K6-E2
catgattctagtctgaacccgattgccgttccaagggaatggctatggcaacctgccaaggagaatggtctactttgggacatccataccttcaatatttaaaggcttaacaacagagggaattcaacactgcttctggagaggatatgtttgtgtgcggggatttgaccagaaatctcgagcaccccgtcctctaatggctagattacatttcccagccagcagattggccaaagcaaaaggcaagggtgctggagaagacgagtaaatgatagcagagtcataagatccaaacaagtcaacattgaccaaataaccatgtatgaagaaatggaattgcattttacaccactgacttggcttgtagggaaatgtgaattccttgtataacccataatgaaaaagcatgtagggctgtatactgtttaacaaggttgtaattatttagtttcgtgctcaaattttgggcaatttttcagaaaaaaaaaaaaaaaaaaaaaaagggattgacagngaacccannncaccaaa

SEQ ID NO: 8739 - DNA, 487 bp, Gossypium hirsutum
  unsure (1)..(487): unsure at all n locations; Clone ID: LIB3828-019-Q1-K6-E3
ctttgtaatagtttataggcactacgaaccgaaattcacccgaagttcaccgctccaagcctgaaagtcctcatgaggttctcttgccagtgggataccgaggatcttacctgctgcttcttctgggaaggtattgacaatcaactccctattccattctcttacgttattattgattaactcagcaaccttaaaaatcttgtgtattgacctcaccagaataaaaactagcatttctaaaaaaaaaaaaaaaaaaaaaaaaaaaaaaaaaaaaaaaaaaaaaaaaaaaagggcggacaaccaaaaaaaaaaaaaaaaaaaaaaaaaaaaaaaaaaaaaaaaaaaaaaaattntttttttttataatttattttatattaatatttaaaaatttaaaantttttatnntgaaggaggaaagcttaaannnattgtgggtgatgttttaagggattattaaattngtgggnttgnttagttaattttg

SEQ ID NO: 8740 - DNA, 638 bp, Gossypium hirsutum
  Clone ID: LIB3828-019-Q1-K6-E4
ctccttccaatcatgcttaaacctaatgaagataggaaatcaatccctgtcgaggttttggtgtgcggtggaacgccgcatgatgcatatacaaaggccgatttgcaacgccctaaggtgtttttgccaggaaacaccgattgtgctcgtattgacatcaccaaaaggaatggcaagtggaagatccaaaacatgccataagctcgactcttgggagacatggtggtgctttcgacgggagatgtgttacttgtcaacggtgccaagaccggttcagccggttgggatgacgctagggacccgaatttacacccagttttgtacaagttccaaaccgatggaactggttccaagttcaccgtgcttaacccatccaacatcccccgcatgtaccactcttcctttgctgtctttcccgatgcaaaaatcctcatcgctggaagcaacacaaacctaggttaccttgatgatgctttgttccccaccgaagttcgggttgagaagttctcaccacattacttggacccgaacttgggtatgttccaacaagagatcattgttgaaaagtccaataaccaggtgaaatacggtcagaaatttacaacgcagatccgtggaaacgtcgaaattgaccaaca

SEQ ID NO: 8741 - DNA, 625 bp, Gossypium hirsutum
  unsure (1)..(625): unsure at all n locations; Clone ID: LIB3828-019-Q1-K6-E5
agatctcctatgctgcggcagnagtacaacgaatggcctttcttccgggtaacgatcgatttggttgaaatggtcttcgcaaaaggagatcccgggatcgccgccttatatgataatctccttgtttctcaagaactatggtcatttggagagcggttgaggactaactatgaagaaactaaaagccttctcctacaaattgctgggcacaaggatcttctcgaaggtgatccgtacttgaagcaaagactacggctccgagattcatacataacaacactaaatgtctgccaagcctacacactcaaacgtatccgtgacccgagctacgatgtcaagttccgtccacatatctccaaagagatcatggaatcaaacaaatccgcggatgaactcgtgaaactaaacccaacaagtgaatacgcccccggtttagaagacaccctcatcttgaccatgaagggtattgctgccggcttgcaaaacacgggttaaaccccacttcggctaactcttaagtcgatttagtcccgagaataagaattacacacattgacgacgggttaaaaaagtggatgatgctatttaaattcctagttacagtgtttattgttgcaccaaaact

SEQ ID NO: 8742 - DNA, 605 bp, Gossypium hirsutum
  Clone ID: LIB3828-019-Q1-K6-E6
ggatcattctgagaaaatggcatataatgatactcggtctagtgacagaagatcgcgtggagatggccgacgttgatggttgtggcagcatactggctgcaagtacgaaatggaaccacttcaaattgtctccaggcttttcgaaggcgggtgtcctgttttctgaatgttgtggaaattgaatgttctttttgtgcgtgtgttttgtttccccatcttcctttcatttccgttggtacttggtaagggagtttttcatattctgactaatgaataagccatgtgtatgtttggaggaagtagtagtatttattatggctttttggttgcatgtccaaacttgttcttctttaatgtatatttggtatttgttagatgctatcccattaagcaagtagtgagacgtagtttcttcttcccctcagtatggtccaagaggattagcttgaagctttaaattggaaggttcttagagggtcattcttgtacccctctcgatatcgtgttcgggtatgtgttgaacatagttacctagaagatagggcggtgtttgaagtgcaaaataggcttgaagaaagaaaatttgtagctaacagttaatgata

SEQ ID NO: 8743 - DNA, 638 bp, Gossypium hirsutum
  Clone ID: LIB3828-019-Q1-K6-E7
ggtttcggtcgcttcgaagctttttggctgcaatcgtcattaatgtggcattgagttactggactctccctggatggttaccaaatctacattttcctatatacatagatagaatacataaatgcaagcatggaagtgattcttcaacatatgacactgaaggaaggtttatgccaatgaactttgagagtattttcagcaagtacgctcgaactgtgtccgataagttaacattcggagaactatggcacatgactgaggctaatcgaaactcatatgacttcattggctggataatatcgaagggagaatggatagttttgtatagactggcaaaagatgaaaatggttatctgtcaaaagaagccgtgaggggttgtttcgatgggagtttgtttgagtacgttgccaaaatgaataacagtggtagcaaaaagagctatagattgaaggaatgaaggttgctgcttttaacatacgtgtagtttgagtatgttgccaaaataaagaataagaatcagtgattcaagcaatgtagggtgctagctaggatttaaaatatacatgtgctctttctattgatcaagtaaacttcttccatctacttcaattaaaatcaagatttcatctgtttgtac

SEQ ID NO: 8744 - DNA, 400 bp, Gossypium hirsutum
  Clone ID: LIB3828-019-Q1-K6-E8
ctcataacgagtgtcgttacgctgtctttgatttcgacttcactaccgacgaaatgtccagaaaagcaaaatcttcttcattgcatggtctcctgatacatcaagggtgaggagcaaaatgttatatgcgagctctaaagatagattcagaagagagttggatggtgttcaagttgaattgcaagcaaccgatgcaagtgaaatgagtattgatattgtcaaagagcgagctttctaaactcttctttttttatcatcgttctaatctttctgcactttgctttggggagcctttttttttttcctcaattgccataaaatggtaaatttaattagtaaatttgggtgtcaaatgagggggatttgaaatatatattaaaatatataatttttgcttctt

SEQ ID NO: 8745 - DNA, 661 bp, Gossypium hirsutum
  Clone ID: LIB3828-019-Q1-K6-F1
ggcgtctgtaataaaatctgcaatcttaattctgtcggtgtttttatctgtaagcttcagttcgggtgttaggttgctccaggaacagcccaatgatgacctcaaaaacatggacgctattcctcccattgatgcactcaaccctaccgagttcaatggacccggtgttggcattcacgaagatcatgttgtcccaaaagttccgaaattggtactcttggttttggttttgaaggtggtcctgaaaaatgttgttcttctggatgttccggtaattgtaatcctggtggtttcgttctaccatttcctcaaattccagaaatcccaagaattccacagatcccacagatcccacaaatcccacaaattccactaatcccacagatcccacaagtcccacaaatcccactaatgccaggacagtcgggatgtgagagtggggagtgttgccgtcagggttgcggtgggacttgtgctgagtgtggtcagcccaggtgcgcatcaggatgttgccaggctgaaactgtaaagagcaaagggatagaagaggttatggacagtgaacccagtccaccaaagtagggagatgataccatattaagatgaaataatgaggaagagttggttgtcgtcgtattaattatacaaaataagaagtaat

SEQ ID NO: 8746 - DNA, 641 bp, Gossypium hirsutum
  unsure (1)..(641): unsure at all n locations; Clone ID: LIB3828-019-Q1-K6-F10
caccctttcattttccgatttccttcaagatctctaaaggccaagcctccaacagagagaaaatacaaatggagtcttcaggaccttcaaggaggacttgtttcatccaagaagatgatggattggcttccattgtagatatggaggctggatattcaggaagccattaccaaaaggttaaccaaaatgggtttctttcaagacctctttgttactctagaaggagtagtttgaggaatctatcttctttttcttcgtcatcttcttctggttcagtttcttctccgaggcctgctcgcttttatgatgccagatttgaagacgttcatcaaccctatttcttggatgtttgctttctttgcaagaagcctcttgggtgtaaccgtgacatcttcatgtacagaggggacacacctttctgcagtgaagactgcagacaagaacaaatcgagatagatgaagctaaagaaaaggacatgaacctttcttcctcagtgaaagctatgagaaagaagagccaaagggagtctacatctccgaatgaagctcaaggttactctattcgaactagcacagttgcagctgcttaaatcacaccacanaggaaataaacaaaaacatatctaccatatatatatatg

SEQ ID NO: 8747 - DNA, 462 bp, Gossypium hirsutum
  Clone ID: LIB3828-019-Q1-K6-F11
cggacgcgtgggcctccggacttcctttaagccacccaagttgcattcaggacaaaggtctttcaccctaatattaacagcaatggcagcatttgcctcgatattttgaaggagcagtggagccctgccctcaccatatccaaggtattgctctcaatctgctcacttttgacggacccaaatcccgatgatcccttggtgccagagattgcccacatgtacaagaccgacagggctaagtacgagacaactgctcggagctggacccagaagtatgctatgggttagtgtgctaatatgcatataataggagggctttattctatgtggctttgatcttcaatttaatatgtatgaatcaatgaaacagtatgtgtgatctgtctctccaactatgtactggaccaatccctccttaaaacacatttgttgccttaattgtttgtatggaaattatgtttc

SEQ ID NO: 8748 - DNA, 246 bp, Gossypium hirsutum
  Clone ID: LIB3828-019-Q1-K6-F12
aaacttgatgccaatggtcttttagggaaaaagaagccatgaatatacaagctatggcgccagaatcttcatagatttatatatagattatagaaactacggattctatacaaagagaaagaaaataaagaataaccaagcagcttgatatatgattgaattacaatgtgctagctgtttttttttatctttaattattatatgaataaaagagatttaaagtaagcttgattgaaaattatcatt

SEQ ID NO: 8749 - DNA, 541 bp, Gossypium hirsutum
  unsure (1)..(541): unsure at all n locations; Clone ID: LIB3828-019-Q1-K6-F2
gcatgnattggtttagaatcagaccaaatttaccatggttggtggatgcaggaggatgtgttctgcttgatactttcatagtaatacagttcatatacttctataagtgggcacctcaagattctgaggacaagcacggaacatcatgagaaatggcttttgttgaaggttttgaagatgctacggtggagtgccatattccttttggagatgttagcattgcattttttgaagatctcaaactttctaagtcactgaagagggatcatatgacatgatggtgcgcatgtatgtgtgcgcgcttttggcaaaaaaaaagaaaagaaaaaggcagtgtttcttattgaggtgttattattatgattggcggatgattaagactccgaacttctttcagttctctccaacttaaacttgatggatttctcaacttttatctttttctcatctgtagagcttcaaaatattgctactagaattatattatatttaataacttcaatttctaattgaacaaactgaaactgtaaagagcaaaggg

SEQ ID NO: 8750 - DNA, 628 bp, Gossypium hirsutum
  Clone ID: LIB3828-019-Q1-K6-F3
gggtgcatcctagacggctccgcgatgatccgatccaaagagtaagcggtgaccgtgaatgtaatcgcctgctggatgcttgttaaactacgcatggcggatattgaggcccttatgaacttggcgatgatggaggttcacagccccactaaaatagattcaaactccctacgattagactacgctaactataacgctgaggatggtagacactgctcacttccacaccacgagagagcactcaccgggaggtgcggccaatacaatgcaattgcggtagagaaaactgtgcttcgggggttctgcatggcgcaatagcggccaccccactaatcacgccccctctattgtccaggtccgagtctcactctacaagacctctacatccttgtgcaagctcactgataacacagaagaggacatggatggactgtagatataactataccatcgtggaccagtccaaaccttggtgatgataaaaccagatacagagggatcaaggcccatgatgaaggacacacatgaccagtgctcttgctttgcaggttcacggctggcatgttgaaaacccacataccaggcataggctatatcagacagtgctgcccatcctgccatggtctca

SEQ ID NO: 8751 - DNA, 648 bp, Gossypium hirsutum
  Clone ID: LIB3828-019-Q1-K6-F4
ggttgctctggcctgttacattgtggtccatggtgcttaccaggatttatcgtcgaactcttgttgttgaaaggaaccgcttccatcagcttagattacaaacatgggccatacccaagtacggaatacagtaccgcttgaaatggcaaaaggaatccgtcaataacatgattgaggaagctgtattagaggctgaggaaaaagtgctagtgtgttgagtctaggcctcatgaatcagggtgaagagctaaacaggtacggtgaggtctatgtgaagaagcatcctcagttgaaagtgaagttagtggatgggagtagcttggcagttgcagttcttctaaatagcataccaaagggaacaacccaagtactccttagaggccacttgactaaagttgcttttgcagttgcctttgccctatgccaaaagggcattcaggtcactatattgcgtgaggatgaatatgagaagcttgataagtcacttggaaccaaatctgagggtaaattggttacctctaagagttatagctcttgcaaggtatggtttgtgggagatgacttgaccgaagaaagcaaagaaggcaaataaggaacatatttattcccttctcgcaacttccaccaaaaaaatgcgcaaggactgct

SEQ ID NO: 8752 - DNA, 549 bp, Gossypium hirsutum
  Clone ID: LIB3828-019-Q1-K6-F5
agaatacaaccagtttccatggcacccaaagccgataagaagccagccgagaaaaagccgccgaggagaaaaaagccgagaaagtcccagctgagaaaaaccaagagccgagaagaagctccctaaagaagcgggggacaagaagaagaagcgaagcaagaagagcatcgaaacctacaagatctacatcttcaaggtgctgaagcaagtccatcctgatatcggcatttccagcaaagccatgggtattatgaacagcttcatcagcgacatcttcgagaagctggctcaagaatcttcgaggctcgcacgctataacaagaagcccaccatcacctcccgtgagattcagactgccgtaagattggtcctgcctggggagttggccaagcatgctgtttcagaagggaccaaggcggttacaaagttcaccagttcttagtttccaaaaatctgggaaatatggttttgttgtaaaaatcagtagctttttgtgggtcttcctgtaatttgcggagcttaaatggaaatttaaccatattttgaatt

SEQ ID NO: 8753 - DNA, 528 bp, Gossypium hirsutum
  unsure (1)..(528): unsure at all n locations; Clone ID: LIB3828-019-Q1-K6-F6
tataaatcccacaaatcccacatatcccacaaatcccacaaattccactaatcccacagatcccacaagtcccacagatcccacaagtcccaaaaatcccactaatgccaggacagtcgggatgtgagagtggagagtgttgccgtcagggttgtggtgggacttgtgctgagtgtggtcagcccaggtgcgcatcaggatgttgccaggctgaaactgtaaagagcaaagggatagaagaggttatggacagtgaacccagtccaccaaagtagagagatgataccatattaagatgaaataacgaggaagagttggttgtcgtcttattaattatacaaaataagaagtaatgatgttgcagaagggtttgctataaaatcctcttggacaaaaagagtaattatgaagaataaatagctcaaaacaatattcgatttgcaatatcctaaagttccttgaatcttgttttgtagccatatgtaattaatgcatgtgcatgctaatatatatgattntctttgttat

SEQ ID NO: 8754 - DNA, 656 bp, Gossypium hirsutum
  Clone ID: LIB3828-019-Q1-K6-F7
atcatccgccagagaaaccattggaagagttgcctctggagctattgctaagaaaattctcaagctattttcaggaactgaggttcttgcctatgtctctcaagttcaccaggttgttcttccagatggctcagttgaccatgacactgtaactcttgatcagatagagagcaatattgtgaggtgcccaaatcctgattacgctgagaaaatgattgctgctattgatgctgtgcggacaagaggaaattctattggcggagttgtcacatgcatagtgaggaatgctccacgtgggcttggttcaccagtttttggtaagcttgaagcagagcttgctaaggctgtaatgtcactacctgcaaccaaaggttttgaatttgggagtggatttgcaggtactttcttgaccggtagtgaacataatgatgagttctatactgatgaacatggaagaataaggacaagaacaaatcgctccggtgggatacagggtggaatatccaatggggaaattataaatatgagagtagctttcaagccaacagctacaattggtaagaaacagcacacagtgactcgagaaaaagagagatagaactactagcccgcggtcgtcatgatccttgtgttgtccctcgagccgtgccgatggt

SEQ ID NO: 8755 - DNA, 648 bp, Gossypium hirsutum
  Clone ID: LIB3828-019-Q1-K6-F8
cttttgtcgaatgctacgtcaaattggatcgctgcttttgacccaaatcgaccataaagcataacaaaaaagtcgacactgagcattatttcctttcttaaaaacccaggcactctcggaacacatggagactttcttcaggccaggatcggcatcgggtgcattcctcattagtaataactttcctacatctgagattaacaaaattgggaatataatcccaggagattcttcaaatagtcattgtaatttttgggggaatctgtaatccccataatttcctgtaaaattccttagtttcggtctataataaataatcagtaggattaagagtagcctcttgtaatagtttataggcgctacgtacagaaaattcgccggataattctcccttccatacttggatgtcttcgtgctctatctcagctaacggcatctataaaattttctgagctgtttcaccctgaaagatatattgtctcccctgcccactctccagcacaatcccttttggagtagaccttttgctgcccaaatgctccaccaggtgagtgaaggtttattgccagaataacacaaacacccctttttcagatttcaggaaaaaagatagaagtgaagaaggcaattagtaaaacataaaataaa

SEQ ID NO: 8756 - DNA, 609 bp, Gossypium hirsutum
  unsure (1)..(609): unsure at all n locations; Clone ID: LIB3828-019-Q1-K6-F9
gtcagttcaacccatcagcacattccatacagggnaaaataagaacctgactggaactgcaagatatgcaagcatgaatacacacttgggcattgagcaaagccgtagggatgatttagagtctcttggattgtgcttatgtacttcctaaggggaagtcttccttggcaaggcctgaaagctggcaccaaaaaacagaaatacgagaaaattagtgagaagaaagtttctacttcaattgaggccttatgtcgaggttatcctacagagtttgcctcatacttccattattgccgttcactaaggtttgatgataagccagactatgcttatctcaaaagaatctttcgtgacctctttattcgtgaaggcttccagttcgattatgtctttgattggaccattttgaagtatcagcaatcacagttgaccaatcctcccgctcgagcccttggcctcggtgctggaacaagttctcccctgccacctgccattgcgaatgctgacagacacacagctatggaggacacacgagcagctggtttgtcatccatggattcttctcggcggagagcatcaggacccttgatgagttctggaattatgcga

SEQ ID NO: 8757 - DNA, 648 bp, Gossypium hirsutum
  unsure (1)..(648): unsure at all n locations; Clone ID: LIB3828-019-Q1-K6-G1
ngattacaataccatctccaccggcaaacccaattatgcaatgtgcactgaaattcgcatgttcggccgcgccaccgtcgtccgcttcaattgcgtcactgctcttccccaatacccacaacaagaagaagaagcttagaaatggatgttcaatcagagctgaactcagcgatgacaatgacccattactccaagcagcaatcaattcagcttctcttcgttttcacgagacccatcgacaagaccctctttttattgatccttatgctgggtgcttcgtttcaacgcatactcaaatggatatggaaaccaaggcgaaacaatattgcattgcaaccaagttcattgatgataagctgcttagtactgtaaaccacatggatgggcttaaacaggttgtgcttttatcagatggaatggatactcggccatataggcttaattggccaagctctaccattatgtttgatatatcccctctaagggtattccagaaggcggctgagaagcttgatggtgtcggggctaagatccccagcgatgtttgtttcttcatgttccattggaaacccctaacattcaagaaacttcggttacaaaaggctctaattgtactcgtccgagtgtatgggctatacaggnactacc

SEQ ID NO: 8758 - DNA, 643 bp, Gossypium hirsutum
  Clone ID: LIB3828-019-Q1-K6-G10
gaaaagggggtctttatttatgatttgtgctttcctggaaatttgaggtttatgcagattagctttcaaaaaccaagtgaaagctggagtcctcaaaataaaatgaagtgaaatctaaatgctacaatattattttttttcctatctcagtatttatttgattcttatgaatgattaacagggatggacactttatgaggtactccaatatgttccagaacataattggattgcatacgaacaagctcttaaagccaaactagtgatagccaaaatggcaataagtgggatagtctattcaataggaaattagattgcacaagtagtttctctctcttctccaccctctctattaatcctttaaacgtaaacatatattgcattcagctcatattgtatagcctgtgtgtagtgttatgaaggaaagccttcagatcgggccttgttggatttactcttcatagatccctttctcattattattaccagttttgtgaggtaatacttgtggttcatagtttatatgttttgctgctttgagtcgttttttttttccatggagcaatgaaacactttgagttccaggctctgtttcctttcgatgactggtgggtggttccagcaaaattatctttgatcaaac

SEQ ID NO: 8759 - DNA, 615 bp, Gossypium hirsutum
  Clone ID: LIB3828-019-Q1-K6-G11
gttgatgcccctggtttacaccatttgtatgactgtctggtcttccctcaaaaggtgagagaccccatacgaatgaagcttctggaagtgatcttgatggggacctttattttgtcacatgggaagaggctcttatcccccctagcaagaagagctcacaacccatgcagtatgaccctgatgcgcctcgagagttgaatcgctcagtcactcataaggacataattgagtttttttcaaaaaacatggtgaatgagcacctgggaagtatctgcaatgcacatgtggttcattctgaccttagtgaacatggtgcttcagatgagaaatgtatacatctcgcagagttagcggctatagctgttgattttcctaaaaccgggaagattgtgtcgatgcctgctcaattaaaaccaaaactttacccagattttatgggtaaagaggagttccagtcatacaagtcaaacaaaattctgggaagactatatcgttatatcaaagatgcatatgacaaagatgtctctgaatcttctgagctcaattttggtgctagtgacatcaattatgatgcagatcttgaaattacaggatccgctgactacataactgatg

SEQ ID NO: 8760 - DNA, 628 bp, Gossypium hirsutum
  unsure (1)..(628): unsure at all n locations; Clone ID: LIB3828-019-Q1-K6-G12
gcctgaagcacatccggagaacccagctccagaaactgaacccagttgaaactgaatcaaaggaggtggttaaagagcccaaggctgtgactgaggagccagaagttgagaaaaaagaagaagagactcctaaggaaacggtagcagagccagttgccgaggagtccaaggagtccaaggagacttctgagccaacagttgaagaaaccaaagaaagcacagagtctacagaagcagcagcagcagcagcagcagcagcagcagaagtaaaagcagaagccgaagccgccccagtggaagcacccaaagaggaagctgcaaaggaagaagagaaaccagctgaagctcaagctgagaatactactaccgagtaaataagcttgtaagatggggaatcaatggaagcttgtgtagtgggcttactgttagctaagtttgcatgttgaaatcaattagtttcaattctagttgaataaggatgtgatagtattaaggtggatgaggcttgngactggggcatggaaatgacccaccaatgatagcttgcctattggctaaactaacatgcaattggcatatggcagggagagagagtttagagnaagttcaagcaggcattttggggggg

SEQ ID NO: 8761 - DNA, 600 bp, Gossypium hirsutum
  unsure (1)..(600): unsure at all n locations; Clone ID: LIB3828-019-Q1-K6-G2
caaacccaacagctgaaggttgaagtactcctcattctggcctgaccctgacaaccaggatcatcatgggtagaagcaaaattttaagacaaacaaaggaaattccttacggacatcattattagtacttgaagcctagctctggtcaagttcttttcaaggagagaggccaacaaaaccatctattactatggtttactcctttttttttttattctttctcttttttcttcttctaatgggggaggaccagagggacctggtttatgactttcaaaggctctcaagtctcaaatgaactaactgtaaaacagtccatgttggaaagagagaaagaacaaaagggaaaaaaaaagaagaagaagaagaagaaagtaaagtaaagaaaagaaaagaagaaaaaaaagcaagaaaaaaggctggtctctatactgacaaatagaaggatataaccaaagacccaaagcaaatatccttcctgcatgaaaatcaccaccattatgatgacaatatcatctttatctggctctatacttattattttattatttcaagactcttgnattatttctttcctatcttttttttatgtcaaacaaa

SEQ ID NO: 8762 - DNA, 624 bp, Gossypium hirsutum
  unsure (1)..(624): unsure at all n locations; Clone ID: LIB3828-019-Q1-K6-G3
gnaatattacacctataaattccaggtgaaggatcagattggcagctacatgtactatccggtgacggctatgcacaaggcggttggtggtttcggtggcctccgtgttaacagccgtctactcatccctgttccctacgctgatccggctgatgactatactctcttagtgggagactttttcaacaagggacacaccagcctcaagaagattcttgatagcggtcgcaaccttgggagatgtgacggtgtccaccttaatgggaaagttgcgaaaggtgatgggaaggatgaacctctgtttacgatggaggcaggcaaaacgtacaagtacaggatttgcaatacgggtatcaagacatctctgaacgtcaggttccagggccacaccatgaaattggttgagatggagggttcccacacaatgcagaatgactatgactcccttgatgtgcatgttggacagtgcttcagtgtgcttgttactgccaaccaggaaccaagggattactatgtggtggcctctacccgttttaccagacgtgaggttacagcaaccggcatcatccgttacaagaatggcaagggagctgcctcatccgagttgccaccaccacctgttgg

SEQ ID NO: 8763 - DNA, 509 bp, Gossypium hirsutum
  Clone ID: LIB3828-019-Q1-K6-G4
cgctgggcatctcggcaggcaaactactttttgagcctgttcaatcagagggattgacatgttcttgtgcctcgaggtctatatcatgctgctaaaggcatgtatgaacaaatgctgcctgatgtgcgtacccactcaaaatggcatgggacgcgtgcaactttgcgtttcactgtgacactctatcgggggcacactaggcactattaatacaatctcatgttgttgataagacgtgaagtgccaccttcattcttgcttactgtcgatacatttggttccccatactcatgtgtggtggcgacagtcttcttcacagacttggatcaccactaaatcatatccaagcaatcataatgcacagtgacattgctccccgcgccttctttagcaattatactgaccatgtaactgaactaataaaggctaataacacaaacttccgacacctttcttgtcttaaaaatcataaatactctgtgcaccaatgatgcaagtattgatattac

SEQ ID NO: 8764 - DNA, 594 bp, Gossypium hirsutum
  Clone ID: LIB3828-019-Q1-K6-G5
ggcaacctaacggagcatgaagatattgatcggaagaagaaatttttaagctttcacaaggtgaatatgttgctgttgagaacctggagaacatttacggtctcgtgtcagctattgattcgatatggatttacggaaacagctttgagtcgttccttgttgcggttgttaaccccaataaggaagcacttgaaagctgggctgctgacaataacgtaagtggtgacttcgagtccctctgtaaaaaccccaaggccaaagagttcatacttggggagctcgcaaagactggcaaagagaaaaagctgaaaggttttgaaatcataaaagctgtccatcttgacccaatgccgttcgacatggaacgagaccttctcactccaacatataagaagaagaggccccagttgcttaaatattatcagagtgtaatcgatgagatgtacaagagtgcaaacaaaccaaatgcttgataaaatgcttccaaaggcgtcggtgatatgttagatgatatggggttaaaacttgtgtattctttggtagtttggactgtacatgtagttccttcatcatcagaatttgtttaccaaaaac

SEQ ID NO: 8765 - DNA, 405 bp, Gossypium hirsutum
  Clone ID: LIB3828-019-Q1-K6-G6
cttctttctctctttttttaaaaaaaattgttgcttataaacacagagaccacattttgaaacaaaatggcacgccaacttgttcttcttgctttggttttgatttttctcgccggcgtcgtttctaccgacgcctcatccgccggtggcagccctgcaagtgcaccagttggagcttctacagttggcagtaccgctagttcctcccctacttctcaggctaccaatccaggtcttagcgatggtatccctattgatgacccataaaatgattgtctacgaaatttcgataaatcataaaataaattgtaatttaaaagaatggtgaggttttggaaaataaataattagttctataaatagaatgttatgtttttcattaagtttatgaactgattttcatat

SEQ ID NO: 8766 - DNA, 579 bp, Gossypium hirsutum
  Clone ID: LIB3828-019-Q1-K6-G7
ccccgcgtccgcaaaataacgaatctgtttagtcgttccttggctaaagacccaggtaagccattcccatatattctggtgattacgattaagtacctatgagagctttaaatgattccaaacctctcttgtcataggacactgctgaaaaatatgataactatcttcctcattttgtcggcattgagggcaaagggcgttagctactgctttcttctacttaaggttgactaatgaaggaatgaaatttcaagatattctccatactgttaatgtaacttttgaagggatgtgtagcttccacaattttctgtaaaagttattagtctcggtctgtaaattaatattactaggatctttgctagtctcttgtaatagtttataggcactccttaccgataattcccttgacatcccccctccaaacttggaagtcctcgtgtgctagctctgcgagtggaatttgcaaaattttcctcgcaatttctggttgaaaggtagcaattgcaacatctgtattccaacttctattgttagtttctactaaatttgatactaacttgatattttcttgatttc

SEQ ID NO: 8767 - DNA, 611 bp, Gossypium hirsutum
  unsure (1)..(611): unsure at all n locations; Clone ID: LIB3828-019-Q1-K6-G8
ganattccaggtatgatgtagcaggcgtggtggtgatagtggggagccaagttaagaaattcaaggaaggggatcaggtgtatggagatataaatgaaaggccatggatcacccaacacaatttggcactatagctcaatacactgttgttgcagagaagctgttggctttaaaacccaaaaatctcagctttgttgaagctgcaagcctgcctttagtcattgagactgcctatgaaggccttgaacgatgccatttttctgctggcaaatctatccttgtcttgggcggtgctggcggcgttggcaccatgattattcagctagctaagcaagtctatggagcatccaaaatagcagccacagcaagtaccgggaaactggatttgctgaagagcttgggggctgatttgcctattgattacactaatcaaaactttgaagatctgcctgagaaattcgatgtagtatacgatgcagtcggtaatattcgaatacacgatacgattacatgagcgtgttaaaatctgtacagtgacatggatttttggtttgattatgggatggtaaacagggcaatgtgagagggcagtgaaggcagtgagagaagtg

SEQ ID NO: 8768 - DNA, 620 bp, Gossypium hirsutum
  Clone ID: LIB3828-019-Q1-K6-G9
catcccaccacactgtttccaacgctcacttatccgttcattttcctatctcgtttacgacttcattttagtctctatcttttactacgtagccaccacttacttccacaacctccctcagccactatctttcgtcgcctggccaatttattggactcttcaaggttcagtcctcactggcgtttgggttatcgcccatgaatgcggtcaccatgcttttagcgattaccaatggattgatgacactgtcggtctcatcctccattcatcccttcttgtcccgtacttttcgtggaaatatagtcaccgacgtcaccattccaacactggttcccttgaacgcgacgaagtatttgttccgaagaaacggagcagcattagatggtgggctaaatacctcaacaatccaccaggtcgtttcgtcacagtcaccattcagctcactctcggatggcctctttacttagcattcaatgtagcaggtagaccttacgaaggactcgcttgtcactacaacccatacggtcctatctacaacgaccgtgaacgacttcaaatctacatatccgacgtcggtgtccttgctgtcacctatgggctgtaccgtctcgtgttagcca

SEQ ID NO: 8769 - DNA, 653 bp, Gossypium hirsutum
  Clone ID: LIB3828-019-Q1-K6-H1
ccccgcgtccggagaagagacattgagaagatgaaccagtacgtctttctcctcctgtccctctcatgtctcttctccttctccgtttcagctgcccccgggcctgaaccctctttcatcaccttggatacccatatggcaaaaccggtttccataatgccaggcaactttcattccggccttcagaaagtctgctccgccaccgatgaacccgtcgattgtatccagctgctttctcccttgatgaccgacaggaccgccgtggatcccatttccatcctcagggtgggtatcgaggcgaccaaccagaaggtgaaagaagccttggacaaagctaatattatcatgaaagatccatccaccacccccgaatacggcgagatcctctggacttgcgtcaagaacttcgaggacatcatcgactcggatcagaaagccatggaagccatcaccgagcacaacgccaaccacatcatcgaagaactctccgccgattccgcgtctgtgtctccctgcgaggacgagttggaagcggctaacatcgagtcgccggtgagggatatcgttaagtcgattcacaagacgattcgcatcaatttggccatcgctgctatagaggtccatttttgaaggcctgggaaattattattaat

SEQ ID NO: 8770 - DNA, 646 bp, Gossypium hirsutum
  unsure (1)..(646): unsure at all n locations; Clone ID: LIB3828-019-Q1-K6-H10
ngagatccctattcccgagaggaactttgtctcaccccctacatgattgtaatccgatcatttgatgtcaataagccagggtttgaggttgatgagattaaaggtggtgttgctggtggaagtatactcaggggtgttttgaaggtgaaccaatttattgaagttcgtcctgggattgttgtcaaggatgaaagcggaaacatcaaatgcacacccatatattcgagaatagtctcattgtatgccgaacaaaatgagctacaatatgccgttccgggaggtctaattggtgttggaacaactatggacccgactttaactcgtgcagataggttggtgggtcaagttcttggagaggttgggtcacttccagaagtttatgttgagctcgaggtaaatttcttccttctccgaaggcttcttggtgttaggacaaagggttcggagaggcaaggaaaagtgtcaaagttggccaagggagagatcctaatgttgaatattgggtctatgtcgaccggtgctcgagtcatagctgtaaagaatgatttggcaaagctgcaactcacgtcccctgtatgcaccagcaagggagagaaaattgcacttagtcggcgtgttgagaagcattggcgtctaatcgatgggg

SEQ ID NO: 8771 - DNA, 618 bp, Gossypium hirsutum
  unsure (1)..(618): unsure at all n locations; Clone ID: LIB3828-019-Q1-K6-H11
ncgatttaactagatacctccaagtgaaggacactgacccaaatacttgagagatacaattattaacttcacaggtgctgngaaaagacacaacagcgtccactctgtcgtggtttatatacatgctttgcaaacatcctgatgttcaagaaaggttgccgtggaagtgaaggaagcaacaaaatcaatggaggttaaagatgttgatgaattcgctgctagcctgagagaagaggctttagaaaaaatgcactatcttcatgcagctataactgaaactataaggctctacccggcagttcctatggatggaaagatatgtttctctgatgatactctgccagatggttttagtgtgaggaaagatgatttgattgtttatcaaccttatgcaatgggtagaatgaagttcatttggggtgatgatgcagaggagttcagacccgagagatggctcgacaagaacggcatgttccgatcagaaagccctttcaagtttacagctttccaggcagggcctcgagtgtgtctgggtaaggactttgcctatagacagatgaagattttctcagctgttcttctccgttgcttcgtattcaaattgagtgatgagaatag

SEQ ID NO: 8772 - DNA, 563 bp, Gossypium hirsutum
  Clone ID: LIB3828-019-Q1-K6-H12
gctttagccaagcaatgatttcgggagcgttgcctctgataacggtaggcttaagcgagataagatccaaacacgccttcaaccgaaacgggaggcaccggcagcgacagggtcgaggacccagggtttattcaacttggaagccaactgggcggcgagttccatagccggtaaccagttgtcggagagagttcctacgttgatgtagagagcgttgacttgaggggtgaaatctggggattcgttgggagaatggagcatggcaggagaggcacctgcggataagagagtgttggccgttagatccatggagacaaagttagtgatgcactggattaacggtgatagagagcggactgagctgaggtaggtccacgcctttgcaccccactctctctgttcgccgtcttccatttctgtcttctgtgatggagaaatttattgtttttctatctataaaagactcgcttgattctttagttcagccgatttctcacttatttccattttctaaattggatattataactctaactttaatcttaataacaaaacattcattc

SEQ ID NO: 8773 - DNA, 378 bp, Gossypium hirsutum
  Clone ID: LIB3828-019-Q1-K6-H2
atttccggtgcgtttaataatcactttatacgccatggacatgaagaaggtctccaccgccatcattgttgctgccgcctcaatgagcgtcgtcatggctgccggtgcaccatctcctgccccttcagccggtggttctagtcctagctcctctcctggttccgctccagcatcaggaccggattccagcgtggctgccgctaccttgcctgttcttggatcattggttggggcttccattgtttctttgttttcttacatgctgcagtaagctacatgtatgataaaatcaacatgtcaacgaatattttattattttattatttttgaaagaaacatgtgatgaatattgaaaaaaatgaataaaatggagctttg

SEQ ID NO: 8774 - DNA, 617 bp, Gossypium hirsutum
  unsure (1)..(617): unsure at all n locations; Clone ID: LIB3828-019-Q1-K6-H3
ctttcttgccgtttaaagagaatagaacgctttgngaactgtacacacatttagtggtgcatcaagatgattggattttatgctgccatcatcttgtacggtagataaatggctggttgcattagaatattctaaaaatattgtagcatattttagagaaagaatgaaagggtgggaaagtagtaaccgaaatgagagtgaatggttcaattatattagtgaggatttcggtaggatcttaagggatgtggctcatatatgggctaaaagtaacaagtgtatttacacgcaagatccgataaagtctatattcatcactaatttcggtgggagggtaaagtttttacccaatttaaatgcatctgaccaaccaatcgaaggtgatattgatcagttaaaatatttgatgaactacatcgtcaatatgccattcagatctattattcaaaattatcagaaattcaatatgccgaatgagctatcatgttttcttaccgagcttaattttcgacacttgaaatacatgagtcccgcatttctattggatgcgcctttattttggagacctgttgataagttccattttattataaatctagatcacatgctgaagtgca

SEQ ID NO: 8775 - DNA, 644 bp, Gossypium hirsutum
  Clone ID: LIB3828-019-Q1-K6-H4
aaactgggtctcatttgttttgatctaaaaaggatgaaggtcactctagtttctcggagtgggagagagttcatcaaaggtggccttgagcttaatgactcggctactgtggctgatctgcaggaagcaattcacaagagaactaaaaagttctatccttcaagacaaagactaacacttcccgtgccatcgggatcaagggagaggcctgtcatccttaactacaagaagagtctcaaagactactgcgatggaaatgagaacaccttaaccatagtgttcaaggacttgggtccacaagtgtcgtatcgaacacttttcttcttcgaatacttgggtcctttgatcctctaccccgtcttctactacttccctgtatacaagtactttggatacgaagaaaagcgtgtcatccaccccgttcaaacatatgctttatattactggtgtttccactacttcaaacgaatcatggaaacattcttcatccaccgtttcagccatgcaacgtccccactatcaaacgttttcagaaactgtgcttattactggaccttcggttcatacattgcttactacgtcaaccacccactttacacacctgttagtgatcttcagatgaagatcgggttcgggtttggtat

SEQ ID NO: 8776 - DNA, 613 bp, Gossypium hirsutum
  unsure (1)..(613): unsure at all n locations; Clone ID: LIB3828-019-Q1-K6-H5
tacctttccgtcactttcccgnataaaatganataaatcgttcacgttcaaggtggtcaatgcggcaaccaaattggagccaagttttgggaagttatctgcaccgaacatggaatcgactcaacgggtcgatacaacggcgactcggagcttcagctggagcgtatcaacgtttactataacgaaacaagttccggccgctttgttccacgcgccatcttaatggatctggaacccggtactatggacggcgtaagatccggtccgtttggacaaattttccgacccgataacttcgttttcgggcaatccggagctggaaataattgggctaagggtcattacaccgaaggagccgagcttattgattccgttctagacgtagtcagaaaagaagctgagaattgtgattgcttacaagggtttcaggtatgccattctttgggaggaggaactggatctggaatgggaacattgctgatatccaagatcagggaagaatacccggatcgaacgatgcttacgttntcggtattcccatctcctaaggtttctgatactgtggttgagccgtacaatgcaacactctcggttcatcagctggtggaaaatg

SEQ ID NO: 8777 - DNA, 627 bp, Gossypium hirsutum
  Clone ID: LIB3828-019-Q1-K6-H6
ccgtccgttgaattctcatggcttcaagtgctgcaacccttccatctaaaatgaaagcatggacttaccttgagtaccggaaaatcatctgatgttctgaaactacaatccgatgttgttgttccccaacccagggatgatcaagttcttctccaagttgtagctgctgggattaaccccattgatttcaaaagaatgcttggaatgttcaaaaacagtgattcccctttacccatcattccagggtatgatgtagcaggcgtggtggtgaaagtggggagccaagttaagaaattcaaggaaggggatcaggtgtatggagatataaatgaaaaggccatggatcacccaacacaatttggcactatagctcaatacactgttgttgcagagaagctgttggctttaaaacccaaaaatctcagctttgttgaagctgcaagcctgcctttagtcattgagactgcctatgaaggccttgaacgatgccatttttctgctggcaaatctatccttgtcttgggcggtgctggcggcgttggcaccatgattattcagctagctaagcaagtctatggagcatccaaaatagcagccacagcaagtaccgggaaactggatttgctg

SEQ ID NO: 8778 - DNA, 636 bp, Gossypium hirsutum
  unsure (1)..(636): unsure at all n locations; Clone ID: LIB3828-019-Q1-K6-H7
cattgttgcactttcaagtgagacaattggaaaccctttgggtactgaaacactgatgtcgatagagagttgacagaatctacttcacagcctcttgtttatgacgggtttggaccgttagattgtgacgggatttatctttcttcctgtgggcatgctgtacatcagagttgccttgatcgctatttatcatcactgaaggaaagatttgcccgaaggagtttctttgagggggcacatattgtggatcccaatcagggagagtttctgtgtcctgtgtgtcgcagactagcaaattctgtcttgcctgtagtgaatgggacttcccgaaaggctggaaggcagcctatgacttcaactgttgatcaagtgcctcctttaggttcttcatctgcagcgaacaaagaaacatgttctcttctgcttcagcaaggtttatgtcttctaaaaactgccgccaatgtggttgggagacctgatttctttgaaggtctttcttttcaaagaaaagaaagtttaagtcagaatctggagcctatatcctgtgttctgtccaaaatgtatttttcaaaaatgcaggatagattcttaggatctccaagttaagccacccataattntatgggatactcttaa

SEQ ID NO: 8779 - DNA, 611 bp, Gossypium hirsutum
  Clone ID: LIB3828-019-Q1-K6-H8
ggcactcaatagcggattctaggcaatgcatagtttgccgttctatagcctttctcctgacctaaacattgaattgtcttcttagccatgatttcatatttaaatgtttgacattcatttcctattaatatctggacgtggatacgaggagataatccttcaaggacctttcaaatacacttaaaaatagtcctttccttttgatcaccaattcatttttccttcaaataaattgatgtgtcctaccatcgaatgaatttggtattgttcaagtttctatatactcgggaaacctaaccgttccatctaaggaccgattatctcgtattttttagaaaagaaaacgtgaatgttaacaggactttatttcttttttgcttggggttaccgagaaaatatggcgtgtgttctttaatcttgtaacatcgtcttcttgcagcgctcaaggtacgatcttgaagaagagtcgagaaatgtgcaaaagaaacgtactggagccacatccagagccgctacaacagatgctcaaagttattcagtagatagaagtaggcaacattggagggaggtcagaagatcgtacggcttctcaacctccaaagcatccgaaa

SEQ ID NO: 8780 - DNA, 380 bp, Gossypium hirsutum
  Clone ID: LIB3828-019-Q1-K6-H9
tgcgtttaataatccctttatacgccatggacatgaagaaggtctccaccgccatcattgttgctgccgcctcaattagcgtcgtcatggctgccgatgcacctgctccctccccttccgccggtggttctattcctagctcctctcccggttccgccccagcatcaggaccagattccagcgtggctgccgcagccttgccggtccttggatcattggttggggcttccattgtttctttgttttcttacatgctacatgtatgaaaaatcaacatgtgaacgaatattatattttatattatattttttattttttgaaagaaacatgtgatgaataatgaaaaaattgaaatggagctttggaaagtatgttgtgtt

SEQ ID NO: 8781 - DNA, 646 bp, Gossypium hirsutum
  unsure (1)..(646): unsure at all n locations; Clone ID: LIB3828-020-Q1-K6-A1
acctgattgggaagccactgccatggcgtctctttcaatccgcttcctggctctttccctttccgtcactgctttattcacttgctcctccggccatggtcacacttacgatccttataacgacaaggcacggatgatccaccacggtggtcctatgctcaacgggaccgttaaattagccatcatgtggtacggaaattgtggcaaggaaataaagaacaccatgagaaacttcattaaatcattgaccgtcccagccaaagccaaacttcaacctcaagttacctgttggtggaaagtagtggaaagttaccaatcaatgataccagacgcaaagcctgggaaaagccccaaaatcaaggtcaaagtggtgaaacaatcaggagagaaaacatataaatatgggaaagttttgactttgcaagggcatatcccggagcttatcgagcatgtcactaagggcgatactgaactcttaccggtcatcgttgctgcaagggatgtctctattcaaggaatttgcaacgggcaatgtgcagatcatttacttactgaggatccccatccgcgaccatacatcatagtcggtaacccagaaacggagtgccctggagaatgcggatggcctntcttcccggctgacatg

SEQ ID NO: 8782 - DNA, 647 bp, Gossypium hirsutum
  unsure (1)..(647): unsure at all n locations; Clone ID: LIB3828-020-Q1-K6-A10
cggnagcgtggngaaaatctgcaatcttaattctgtcggtgtttttatctgtaagcttcagttcgggtgttaggttgctccaggaacagcccaatgatgacctcaaaaacatggacgctattcctcccattgatgcactcaaccctaccgagttcaatggacccggtgttggcattcacgaagatcatgttgtcccaaaggttccgaaattggtactcttggttttggttttgaaggtggtcctgaaaaatgttgttcttctggatgttccggtaattgtaatcctggtggtttcgttctaccatttcctcaaattccagaaatcccaagaattccacagatcccacagatcccacaaatcccacaaattccactaatcccacagatcccacaagtcccacaaatcccactaatgccaggacagtcgggatgtgagagtggggagtgttgccgtcagggttgcggtgggacttgtgctgagtgtggtcagcccaggtgcgcatcaggatgttgccaggctgaaactgtaaagagcaaagggatagaagaggttatggacagtgaacccagtccaccaaagtagggagatgataccatattaagatgaaataatgaggaagagttggttgtcgtcgtattaattatac

SEQ ID NO: 8783 - DNA, 648 bp, Gossypium hirsutum
  Clone ID: LIB3828-020-Q1-K6-A11
ttgattgtttacggaactgagggagctaagcttattaaagccttccgtaacattcctggagtggaggttgccaacgtggagaggcttaatctgttgaaactggcacctggtggtcaccttggaaggttcattatttggaccaaatcggcttacgagaagctggacacaatttacgggtcatttgataagccttctgagaagaagaaagggtacgtactgcctcgatctaagatggtgaacgctgatctgggtaggattatcaactctgatgaggtgcagtcggttgtgaagcccattaagaaggagatcaagagggcacctttgaagaagaacccactcaagaacttgaatgctatgctgaagttgaacccatatgcgaagactgctaggaggatgtctcttttagccgaggcacaacgtgttaaagctaagaaggagaagcttgacaagaagaggaagcccatttctaaggaggaggcaacagcaatcaagtcagcaggcaaagcatggtatcagactatgatctccgacagtgattacacagagtttgagaacttctctaagtggttgggtgtgtctcagtaattttagtttttgatttagatatttgttgcagtcaatgttgtcaactttgttatggtgttgtct

SEQ ID NO: 8784 - DNA, 602 bp, Gossypium hirsutum
  unsure (1)..(602): unsure at all n locations; Clone ID: LIB3828-020-Q1-K6-A12
cggncgcgtgggtttttgtgccgtagcttgtctctcatgtcctattagggtcctgtttgcatccaaccagttgtttccaagagctaggctttgatacttaaaataagaaccactatgggtatttctagttatagtttctttctgtttttatttgttgtcataatcccaaccctagaagctcatatcgctgagtatgacgagtactggacggcacgagaattggaagccattgagaacctggacaaggcctatcactccaacccggaggaggtggtccgccattacaatgaccacttctttaggaccatgctcgagttttatatcaccaaaagggtgttggcagaatcaaaaaaggtccctgtgaggttaccaaccacgttgacagttgctggcgatgtgatcctgactgggaaaagaataggaagaagttggccaactgtgcccctggatttgctcgaggtactaccggtggaaaggatggtgagttttacgtggtcactgaccctattgataatgctgctgaccccaagcctggaactctgcgtcatgctgtcacccaaactggaccactttggatcactttcaaagggtccatgaccatc

SEQ ID NO: 8785 - DNA, 542 bp, Gossypium hirsutum
  unsure (1)..(542): unsure at all n locations; Clone ID: LIB3828-020-Q1-K6-A2
gcgatttcaccgccggaaaggcaccggnagtgaatcgatatacggagccaagttcgaggacgagaacttcatcaagaaacacaccggaccggggatcctctcgatggcgaacgccggaccgggaaccaacgggtcgcagttcttcatttgcacgactaagactgagtggctcgatgggaagcacgtggtgtttggacaagttgttgaaggaatggatgtggttcgagacattgagaaagttgggtctagtggtggaagaacttctaagccagttgttattgccgattgcggacaactctaaaattaaaaagacagccacggtggttcatgtctgaagttttaagcttcattttatttttgttttaaatggttagtggttttggtggttctttaagaactaaccatggaataagataggctttttcattagtttccgtcattaatgaactgaaatttcagtttaaggcaatttatggatttggattattataattacatgattttggatatttattatatttgatgggaggtatgttgaggac

SEQ ID NO: 8786 - DNA, 625 bp, Gossypium hirsutum
  Clone ID: LIB3828-020-Q1-K6-A3
aaataataaaaggaaggattttttaaaaatttttaaattaagaaaatttctagaaaaaaaaaatccttccttttttcctttgatttccccttatgagatcgtaaaatattcgagaatcccttttttttttcctgtaaaatttatatatctaattatcgctttgtctttgattttatttggggttgttttgagttaattaatatggggagtgaagttttacgacctcaggattgtttgatcgaacggattcggttacctccgacggcgtgtcctcgccggagatacggaaacggtagctttaatcctagttattatcataactacaacaataacaatggaaatggtagatctaacaggaaacccgttcagaggaagcggatcggatcggagcaggggatttcgaagaaatacagctccgccgatgacttgaagacggtgaggaacaatgttatggtggagaaggttacgattatgagacgaggtgagtcgttggattcgaagatcaagatcgacaatggcggtggtggaagggaagggggtttgggttgttatgggtacggatcgtttgggtccggatccggaaatggtccctaaacagatcaaaatcgtggatgctaagtcttcg

SEQ ID NO: 8787 - DNA, 647 bp, Gossypium hirsutum
  unsure (1)..(647): unsure at all n locations; Clone ID: LIB3828-020-Q1-K6-A4
tttctctttcctcacananacananagagaatcagaggagcttaatcgagatttgatattcctcaccacagatggatcagatattgaacaaggtgggctcctattggctcggccagaaggccaacaaggagatcgattccgtcggcgacgacctcaactcattatccaccagtattgaagggggagccaaatggttggttaataaaatcaaaggaaaaatgcaaaagccgttgccagagctgttaagagagtataacctgccaataggaatcttccctcgtgatgccacaaattatgaattcaatgaagagactgggaagctcactgtttttattccagcaatatgtgaagtgggatacaaggactcatctgttctgcgcttcttcaccactgtgactgggtatctggagaaaggaaagctggctgatatagagggtatgaagacaaaggtgatgatatgggtaaaagtaaccagtatcacttgtgaaggatcgaagatctatgtcacagccggaatgaagaaaagcaggaatagagaggcgtacgaggtttccagggatggagtaagtgtagataagttttaaagtggttaggatgccttggagatcctatttcttttaacttttaactctgaaccttcatacttt

SEQ ID NO: 8788 - DNA, 611 bp, Gossypium hirsutum
  Clone ID: LIB3828-020-Q1-K6-A5
gttctggcaacaatacaaaggactggctgtttcccagtaagatggctcattattaaggatgtacctaataattccttgaagcacattaccctagagaacaatgagaataagcccgtcacaaatagcagggatacgcaagagatcaagcttgatcaagggcttaagttgctcaaaatcttcaaggagcattccagcaaaacttgcattttagacgatttcgaattttacgagattcgccagaaagcaattcaggagaaaaaggctaaacatcagttgcaaaagcaggtatgggaagaaaagcctggagatgaaaagaaagatataacaacaacaaatggtgatttgatcaaagaagccaatccaattcctcactcgaacggccttctttcagaagatggttcaggatacccaaaacagtgaagaactttttgtcaaacggttgctgacattttctatgaatccccttggggatgtgtttgtggtcttgtaaaatataatgaatgcttggtggttttttactggctttagaattttattatagattttacggtaccatgggaccatcttcaagggatataaagtgaataatccaaggcgggttgggggggggg

SEQ ID NO: 8789 - DNA, 642 bp, Gossypium hirsutum
  unsure (1)..(642): unsure at all n locations; Clone ID: LIB3828-020-Q1-K6-A6
cggccgcgtgggnaagagtactcctttccccctttttttttanaaaaaaaaactttnaaaatcctatactattctgtcaaaaatgaggcgaaatccgacgaagagcaagagaaaacaaccctagcccgaatcaccatattcctgagacatgagggctttcatcggtgttgtttcaagtatccttttcgttttctatgctaaaataatgcaagcaaatcgatggaaaagagggaaagatttgaaatcacatttagataacttttttgatttcttttctactgtttagaatatgtattgtagtgtgcgtatctcatccccaaaaaaaagagagactttacaatcgaaatacacagggctttatagccaaaatccgaaaagatcaaaacataaaaaataaaaaatacaacttttctttgtttttctatttgctactgctgtggtttgtctgttcttcgcaggtacggggtgcgttggcatcgtacggaggctgtgctggcacttgcgtagctgctggagggtacggaggcggtacggaggctggggctgctgcggcgcaaacagattgctagggttctgccttatttttgaatcttgggccacttgggctgatataatttggactagttttattagttttgggct

SEQ ID NO: 8790 - DNA, 640 bp, Gossypium hirsutum
  Clone ID: LIB3828-020-Q1-K6-A7
aggcgtctgtaataaaatctgcaatcttaattctgtcggtgtttttatctgtacgcttcagttcgggtgttaggttgctccaggaacagcccaatgatgaccccaaaaacatggacgctattcctcccattgatgcactcaaccctaccgagttgaatggacccggtgttggcattcacgaagatcatgttgtcccaaaagtgctgaaattggtactcttggttttggttttgaaggtggtcctgataaatgttgttcttctggatgttccggtaattgtaatcctggtggtttcgttctaccatttcctcaaattccagaaatcccaagaattccagaaatcccacaaatcccacagatcccacaaatcccacaaattccactaatcccacagatcccacaagtcccacagatcccacaagtcccaaaaatcccactaatgccaggacagtcgggatgtgagagtggagagtgttgccgtcagggttgtggtgggacttgtgctgagtgtggtcagcccaggtgcgcatcaggatgttgccaggctgaaactgtaaagagcaaagggatagaagaggttatggacagtgaacccagtccaccaaagtagagagatgataccatattaagatgaaataac

SEQ ID NO: 8791 - DNA, 641 bp, Gossypium hirsutum
  unsure (1)..(641): unsure at all n locations; Clone ID: LIB3828-020-Q1-K6-A8
cccagcgtccgcctgaggccgctgatcccattaatctggaatcactgctattgctgtacaattatttgaacaatgaaggtattctgaaaccgggaaacaaaggactattgttaagcgatgactatgatgatagaatccattcagggaaattccttcctaaccaagactgatatggaattcagttctacaaatgactttgatcgactaatgttaatccctgacgagtccttcgatttcatttcttcactgaaaacattcaatccaccctcgaattcatcgaccggagtctcaaagttggcggtattgttgctgttcagcagctggactcatcgcttccattcaacaagccgtctaattacaagattgtttacttcaggaaattcaattccaacctttttgtgatgaaaaaggttgagaatgctcgaccgatcccaagttcccaaaggcggcttttggggtataatacatcagaagcgaaacgggcagcattgaagaaattggaagacgttcttcttgaaccaccaagagcatcctcagggacgtccagaacttaccttaaacgaacgaaatatttgccagatctattgggggactcactcgaaagctacccccgtcgggttntcattgatgtaggcttgcct

SEQ ID NO: 8792 - DNA, 626 bp, Gossypium hirsutum
  Clone ID: LIB3828-020-Q1-K6-A9
gttgagcccagacctcgaagccttggcatcgattatgttgatgagagcgaagttcttaccctggccgacgaagaaaatcacattaacaaacataattttcggattccttttgtttgtgggtgtcggaatttgggggaagcgcttcggagaatccgagaaggagctgctatgattcgaaccaaaggtgaagctggaaccgggaacattatcgaagctgttaggcacgtcaggtccgtgatgggtgatatcaggatccttaggaatatggatgatgatgaggtttttagcttcgctaagaaaattcggtcaccttacgacttggttgtgcagacgaagcagctggggaggctgcctgtggtgcactttgccgctggaggagtggcgacgccggcggatgctgctctcatgatgcagttgggttgtgatggcgtgtttgtggggtctggcgtttttaagagtggtgacccggctagacgtgcccgggctattgttcatgctgtcacccattatagtgacccggccgtgcttgctgaagttagctgtgggcttggtgagactatggttggtcttaatttgaatgataagaaggttgagaggttcgctgctcgatctgagtagtgtctatc

SEQ ID NO: 8793 - DNA, 634 bp, Gossypium hirsutum
  unsure (1)..(634): unsure at all n locations; Clone ID: LIB3828-020-Q1-K6-B1
gnggtctgctctgctcaacatcctatctctttctctcgaccaaanactcagatccacgcgtgaatctttgttccagcttgttagaatggagacatttctattcacatctgagtctgtcaacgagggtcaccctgacaagctttgtgaccagatctctgatgctgtgctcgatgcctgccttgcccaggaccctgacagcaaggttgcctgtgaaacatgctccaagaccaacatggtcatggtctttggagaaattaccaccaaagctaatgtagactatgagaagattgtgcgtgacacgtgccgcaacattggatttgtttctgatgatgtgggtcttgatgctgacaactgcaaggtcctggtcaatattgagcagcagagccctgatattgcccagggtgtccatggccactttaccaagcgcccagaagatattggagctggtgaccagggccatatgtttggttatgccactgatgaaaccccagaattcatgcctctcagccatgtccttgcaactaagcttggggcacgtcttactgaggttaggaagaatggtacctgcccctggctaaggcctgatggtaaaacacaggttactgttgagtactacgacgatnatggtgccatg

SEQ ID NO: 8794 - DNA, 656 bp, Gossypium hirsutum
  Clone ID: LIB3828-020-Q1-K6-B10
cggacgcgtgggcggacgcgtgggcggacgcgtggggtgaggaggcgtaatgactggaggaaatgggtaccttatcaggtttccacggtgccgggatcactgtctcctggtggatcaagtgctgaaatgctggcaagttcttttcagcagattacagtaagggaagagtctactaaccaaagtggagcaggtaatgtgaaccctcatgctgaggatgctttaggaagacatccatctgatggccactctcatctctcaaatggggacggttctgaaggcacgtgtctgaactaaaactgatcaatcttgctgccacgaaagcacgatctggtaaggaagttgtgctttatttttttatatgagtgaagtgaatgatgcaccaaaaagaatgggacacctttttctttaattttcgccatcaccttatgtggttttgagggttgattggtgaggcgattggaggcaaacaataagaaagatacataattatctttgaaagatagagaaggagaagaaacattggggtaaaaaagaggaaaaaaagtaaagggttagttttgactgtggaggaataatgaggccttttggttgtatagttttgctattattatccatggacaattctttcttttcttttataatttgagtaggaaggt

SEQ ID NO: 8795 - DNA, 637 bp, Gossypium hirsutum
  Clone ID: LIB3828-020-Q1-K6-B11
cggacgcgtgggctttgctaagatcaaaggaggtggggatggcgcctgagtttgggtggcgcaatggtccctgcccttatcatcaccgttggatccctagttctacctgacacaccaaactccatgatcgaacgtggtcaaaccgaggaagccagagccaaactcaagaaaatccgaggggttgatgatgttgatgaggagtttaaggacctagtcgctgccagtgatgcctcgaagcttgttgatcacccttggaccaacttgttgcagaggaaatacaggcctcatctaaccatggccatcttaattcctttcttccaacaactaaccggcattaatgtcattatgttttatgcacctgtattgttcaacacaattggtttcggggacgatgcttccctcatgtccgcagtgatcaccggtattgttaacgtaggtgcgacattggtttcaatctatggtgttgataagtggggaaggaggttccttttcctagagggtggagttcaaatgttgatttgccaggctgttgtggcggcatgcatcggtgcaaagtttggggttagcgggaacccaggtgaccttcccaaatggtacgccattgctgtggtacttttcatctgcatttacgtggccg

SEQ ID NO: 8796 - DNA, 639 bp, Gossypium hirsutum
  Clone ID: LIB3828-020-Q1-K6-B12
gtaaacggcgttagaagccaatacagtcctccactcacctatctatcgtctttgccttcaatcgataacgcgctctctttttctctcatcgaaggttttgatggcgtcaaaattgcagcagttgcaatctaaggcgtgtcaagcgtcgaagtttgtggcaaagaacggaactgcttactacaagcaattgttggagcagaataagcaatatattcaggagccaccaacagtggagaagtgcaatgagctgtctaagcagctgttttatactcgacttgccagtatccctggccgtaacgaggcattctggaaggagcttgattatgtcaagaatctgtggaagaataggcaagaactgaaggttgaagatgctggtattgctgcattgtttggactggaatgctttgcatggttttgtgctggtgagatagtgggaaggggttttacttttactggttactatccctaaggaaaatcagctagtagaaggcagggagtctgatggatgtgtatgccttttatcatcgtttgcatgattgaattgcggccactttagatgcacatttttcttgtttcggtgaaatttttgaagctgagatatcagtggttaacttgctagcctgaataattttatagtcg

SEQ ID NO: 8797 - DNA, 634 bp, Gossypium hirsutum
  Clone ID: LIB3828-020-Q1-K6-B3
ccccgcgtccgcccacgcgtccgcaccctccccccttataacatcaagtcatcaatgtacctcttaatttctcaattttttttttttaatttccatctaccttaggctcaatactcttcaactccgcaaattcatgagaactgggaatataacattgaaccaaagctgaccagcaaaataatggagagcacagattcatcgtcggcgtccgcgcacccgcaactcccaccggggttccgattccacccgaccgacgaagagctggttgttcactacctcaaaaagaaggccgcctctgctcctctgcctgttacaatcatagctgaagttgatctttacaagtttgatccatgggagctgccaagtaaggcaactttcggggagcaagagtggtatttttttagtcctagagacaggaaatatccgaatggagcgaggcctaatagagctgcaacttctggttattggaaagccactgggaccgataagccgattgtaacttcaaatggaaatcaaaaggttggggttaaaaaggctctagtgttctatagaggtaagcctcccaaagggattaaaacgaattggatcatgcatgaatatcgcctcatcgacaacaattccacttccaaacctc

SEQ ID NO: 8798 - DNA, 570 bp, Gossypium hirsutum
  unsure (1)..(570): unsure at all n locations; Clone ID: LIB3828-020-Q1-K6-B4
ggactcccagcaaactttcatccctgttttctggaaccctagacaagtgtgcagcttgcngagaaaacagtgtanncccgttggaaaaggttactatggaaggtgaatgtttccacaagacatgttttaggtgcgcccacggtggctgcccactgacacactcatcttatgctgctctcgacggtgtcttatattgcaagcaccatttcgctcaacttttcatggtgaaaggaaactataaccacgttcttcaagctgctacccatagaaggaacaattcgacggcatcgtcgtctgagaatgtggaaactcgtgccgaaccggaggaaagtgctgctgatgaagaatccaaagaggcatctgataattgaaacacacaccatttggttcttttataatttcctaccaccatgacgatgatcttttagagcttttgcaaatgaaaccagtttgattgagtggcagaccatctcatcaaaaactgaatgttcttttttggattggattgatttctatgtatttgatgattcgaacaacttgcatgatcaattgataatatatactttgaat

SEQ ID NO: 8799 - DNA, 478 bp, Gossypium hirsutum
  Clone ID: LIB3828-020-Q1-K6-B5
atgttgaaatgaactgaattggttttgagttttggttatatttttgcctcccattttgagaaaaatgttcggattaaatttgtttgtttgaatgatcacttgttatgattatgtaagttgtatttgtcttaaaaaaaaaaaaaaaaaaaaaaaaaaaaaaaaaaaaaaaaaaaaaaaaaaaaaaaaaaaaaaaaaaaaaaaaaaaaaaaaaaaaggccactaaaaaaaaaaaaaaacaaaaaaaaacggttaataaaaaaaaaaaaaaaatttatttaatgggaccctaaatttaaaaaaatgggggggggggggaaccccgggggtggccggaaaaacctcggcgtgcccaaaaaaaaccttttttgaagtggggcccctttgaaaaagcccccaacgaccgattttccccacacttggggagaaaaaaaaggggttggcccccccattgggggaggggaacccccccgttgggggg

SEQ ID NO: 8800 - DNA, 649 bp, Gossypium hirsutum
  Clone ID: LIB3828-020-Q1-K6-B6
tcgaaaaacatggcaccacactttagtattgttccttccatgtttgtacttttattattattcatttcagcctctaaagttcaatcagatgcttttgatgttgttgccaagtttggcgcaaaagctgacgggaaaacggatttgagtaagccatttttggatgcttggaaagaagcatgtgcctctgtaactccatcaacagttgtgattcctaaagggacatatttattatcaaaagtaaacttagaaggtccatgcaaggctcctattgagattaatgttcagggcactgtacaggctccggctgatcctagtgctttcaaagaccctaattgggttagattatatagtgttgaaaatttcaaaatgtttggcggaggaattttcgatggtcaaggaagcattgcttatgagaagaatacttgtgagaatcgtgaatttcgttccaaacttcccgttaatataaggtttgactttgtgaccaatgcattgatacaagacataactagcaaagacagtaaactattccacattaatgtttttgcttgcaaaaacattaccctcgaacgtttgaagatagatgcaccggacgagagcccaaacacagatgggattcacatgggcaaatcagaaggggtcaatattattg

SEQ ID NO: 8801 - DNA, 648 bp, Gossypium hirsutum
  Clone ID: LIB3828-020-Q1-K6-B7
gaaaaaggttctgctagagaactttgggatgatgtagtggccggacctcaaccggaacgtggccttggccggctgaggaagatcacaaccaccccacccttgtccaccaaagatgaggcttcatcaatggcgatgccgacgagtccgacgacacctgggacaccgtcgacgccggtgtcggctcgtagggacaacgtgtggaggagcgtgttcaatccaggtagcaaccttgcaaccaaaggtattggcgctgaagttttcgacaagcctcaacctaactctcctactgtttatgactggctttacagcggggagacccggagcaagcatcaccgctgattgggcgatggctgacggcggcggagggtagcaaaaccactagcagaaggttgctgctactgaaggagcaggatttgcatgtaaatatatatatcgttctttttaaaagtttttcaatgggtcaattaagtagtagtagtagtaagtaagatgtttaaaagagtaagcggcagcgcagggtggtcgatgaccttatgtcattcaagattccggccgtgagcggcggcagctgctgctatattaaattattattaaataaagggaaggggtattgtacgaatgatgttgcgttagtatgtgatttgaaca

SEQ ID NO: 8802 - DNA, 637 bp, Gossypium hirsutum
  Clone ID: LIB3828-020-Q1-K6-B8
cggccgcgtgggttttgacacaagggaataagcccaacaacatcaagctctatgtcaggcgtgtgtttatcatggacaattgtgaggagttgattcctgagtttcttagctttgttaaaggtatcgttgactctgaggatcttcctctcaacatctcaagagaaatgttgcagcagaacaaaatcttgaaggttatccgcaagaatttggtgaagaagtgcattgagctcttttttgaaatagctgagaacaaggaagattacaacaagttctacgaggctttctccaagaacctcaaacttggtatccatgaggattctcagaaccgaaataagattgcggaattgcttcgataccactcttggtagagtgatgatgagatgaccagcttgaaggactatgtgacccgaatgaaggagggtcaaaatgacatctattacatcactggtgagagtaaaaaagctgttgagaattccccattccttgagaagctgaagaagaaaggttatgaggtgctctatatggttgatgccatcgatgagtatgccgttggtcagctaaaggaatttgagggcaaaaagcttgtgtctgcaacaaaggaaggtttgaagcttgatgagagtgaagatgagaaaaa

SEQ ID NO: 8803 - DNA, 596 bp, Gossypium hirsutum
  unsure (1)..(596): unsure at all n locations; Clone ID: LIB3828-020-Q1-K6-B9
aaaaacataaaacatggtaaaggttcctttagttgtgttctcattggctttggtgctctcaatccaattcgtaatgggacacgacgagaaggctttagatgaggcagcatccccggaagctgaagatgcagttttaagttcaggggcagctaaacttgttgaaaactttaaaagctctgctggagatgattcccagagtgtggatgggccaacttctgacttcgttgatgagattgcagcttctccagaatcagaagtagaagttgctactgaatctgtcgatgggccacattctggcttagctgatgagattgcagtttctccagaatcgtaagtagaagttgctactaaatctgtcggagggaggatgcgtaaaacggcatagtggaccccgatgatgtttagaaagcaacatagacccaaattttctttaaagaggcggctaaagcagctaaaaataataaaaacaatgaaaataataataaaagcaacatccatagtttttgtaaaatatgtcttgtagtaatttacttttaaaaataaaaaaagttactttcacatttgtttgcaaaanaaaaaaannnannnnnnnnnnn

SEQ ID NO: 8804 - DNA, 625 bp, Gossypium hirsutum
  unsure (1)..(625): unsure at all n locations; Clone ID: LIB3828-020-Q1-K6-C1
tttgttttaaaaatctgatcgctgctgctactctggtccgntcaagaaaggaaatgttaggtgcgcttagtgctgcaagtttaacacttggtctggctggtgcgccagcagcattcaccgcccaatgcggcaatggtggcgctgccaaagccttagcgtttcctagtagcagcaacagcaacaaccgcgcccaattgttggttaagagctcattcacttccacttccaggactccaccatcctttaggacagccgttgctgcagtcgactccgaccagctcagtcccgacatgcaacaatccaaaaaatactattttgttgttgcgaatgcaaagttcatgcttgatgaagaggagcacttcaaagaacttttgtttgagaggcttcgttactacggagaacgcaataaagagcaggacttctggcttgtaattgaacccaagttcttggaaaatttccctgacatcacaaagaggttgcgcaggcctgctgttgctctggtttcaactaacggcccttggatcacgtttatgaagttgaggttggacagagttttatctgatagctatgaagctgacaatcttgaagaagctttagcttcaaatcctaccactctggagtttga

SEQ ID NO: 8805 - DNA, 75 bp, Gossypium hirsutum
  Clone ID: LIB3828-020-Q1-K6-C10
aaaaaaaaaaaaaaaaaaaaaaaaaaaaaaaaagggcggacagatctaaaggaatccaaagacttacatacgaca

SEQ ID NO: 8806 - DNA, 616 bp, Gossypium hirsutum
  Clone ID: LIB3828-020-Q1-K6-C11
ggcgaggcttgtctcctcttgtccgagtcctgtttgcaaatcattcatacagtttgcaggacttcggccttgaaaaaaaccattcattttaatattttttttttctccaacagaatcgaataggaaatccgaacacagaaagaagctaaaagaaacaatggccggagtgggaaatagaagttttagcttgattttgtatttcctgtgcttgggggttataatccctagcctcgaggctcacatcgcagaatatgatgactattggagggaaagggaattgcaagctaaagaaaacctggagaaggcttacaatcctaacccagaggaagtcacccagcatttcaacgaccatgtggccagaaacttgatggggtttcgcaccaattccacaaggaggatgttgaagaagcgtaagggaggtccttgtgaagcaaccaaccctatcgaccaatgctggcgatgtgaccgcaactgggaaaagacaggaaaaagttggctgattgcgcacttggatttggccgtggtactaccggtggaaaggatggacccatttacgttgtcactgatcctaccgatgatgttcttaacccaagtcgcggaactttgcgtcatgctg

SEQ ID NO: 8807 - DNA, 631 bp, Gossypium hirsutum
  unsure (1)..(631): unsure at all n locations; Clone ID: LIB3828-020-Q1-K6-C12
cttattgtatcactttcgtccaatagcagataataggagagactatggngaatcaaccatttcatccttgcacttatctccctcacctgtctcttctccttctcaacctctaccgatgcacctccacccctttttgatgcttctggctccgcttctttgaaactttatgatatgattgagatcatgtcagaatcaccatctccatttgcattcgatggtacaatattggaaagtattgaggatgtgttaagcatactacctggaggtgttgaccctgcccttcaggaaatttgtgggaacactgaccaccccgtcgaatgtataaaagcaactatgccattcctagatgagaaagctcctattaagcctctttctgtccttaaagctggggttgaagcaatggataaccagaccaaaaatgcattggctgaggttacaaagctctcaatgaaccctactacccttaaaaatgttgttcccatccttcaaacatgcatcgatgtctacaataatattcttaacaatgaccaaaaatcccttgaagccatcactaatcataaccttgtcaagttgagcacagagttaggcgctaatgtggaaaacgtactcggttgtgaaaatgcattcaaac

SEQ ID NO: 8808 - DNA, 496 bp, Gossypium hirsutum
  Clone ID: LIB3828-020-Q1-K6-C2
caaccgttgttaatggcggcagaattctcagaattggccaagttaaagacgtgacggcaccatcagccgcttagaaaaacttggatagctctctttttagaacaataaataaaaaagtcaaagagagggttaaaacgaaaaaaaagaaaaagcaacttcttatagatgttgtaaaaaaaaatacagtaaaaaaaggagaatacccccccccctttttttcaaggaatgaaagcttctgagttttaccagagcggctgttatttaccaaaatttgtaacttatacaaaaaattttaaccctatatcaataataaataaaatatgcttttttttagcacatggttgataataaaaaaaactataataacataataaaaaaaatggaaagaaaaaaaaagaaagaaatgtgaaaccaaaaaaaaaattctcaatcaaaaacaagcgttaatttaagatatatctattagggggggcctctttaaaaaaaaaaatattta

SEQ ID NO: 8809 - DNA, 625 bp, Gossypium hirsutum
  unsure (1)..(625): unsure at all n locations; Clone ID: LIB3828-020-Q1-K6-C3
cccagcgtccgctgacgggtttcacttgcatagctagcaaagctaaagagtttgcaagatggggagcatggatagcttttggcagctgggggattatcttcgaggacaatcaaaagcctcagaggataaccaatggctgatggttgcctctaaactggctgagcagacgaggaaaaaggtgaacgcctgagcaatcttgatctttcgaagggtccagccgaaataaggacaagggataaatttggtttccgggaagacaacaaattcgagaaccttaacttcaatatgttaaacttggactccaagattggagataatgcaagcaaaagctcattccgaaatggtacctacaatataatatgctgtttaccatgaaaaataatatcaatagcctggaagacctggctggcaacaaatatagcggcaataatcatagcaacaaagatgtcaataataacagcagtaccagcaataacaacagcaatgagaacagtgcaaacaatgctgttgacaaacggttcaagacattgcctgcagctgatgcactcccgagaaatgaggtgcttggaggatacattnttgtttgtaacaatgatacaatgcaggaaagatctaaagcggcagc

SEQ ID NO: 8810 - DNA, 634 bp, Gossypium hirsutum
  unsure (1)..(634): unsure at all n locations; Clone ID: LIB3828-020-Q1-K6-C4
ccanaatcagcagttgctaaactctttgcatctgcaaanaggaaggacgcatcttatggtgctctttgccactgcttgcagctattgccttctgaaggacaagttcgggcaaccgcaattgaggtgcagaatcttctggtttctggtagaaagaaagaggctctacagcttgcacaagagggtcagttgtggggacctgcgcttgttctcgcgtcacaacttggtgaacagttctacattgatactattaagcaaatggcacttcatcagctggtagcagggtctcctttacggacattatgcctgctaattgcagggcaaccggcagatgttttttccacaggctccacaattgatggcatggatttgtctcaacagcatgcagaggtaaggactaatttaatgcttgatgattgggaagagaatttggccgtaataactgcaaatagaaccaaagatgatgagcttgtaattatccatcttggagattgcctgtggaaggaaaggagtgagataacggcagcacacgtctgttatttagttgcggaagcaaactttgagtcatattcaggtagtgctagactttgtcttattggagcagaccacttggaagttccccgaacctatgctagtc

SEQ ID NO: 8811 - DNA, 633 bp, Gossypium hirsutum
  Clone ID: LIB3828-020-Q1-K6-C5
cccagcgtccgttttcgctgatccggctagagacgggattagcttactcaagatttggaatgtaaacaagtgttccggtgtggttggtgcttttaactgccaaggtgctggttggtgcaaggtcaccaagaaaacccgaattcatgatgcatcacctggtacacttacaggttctgtttgtgccaacgatgttgattcgatcgctcaggttgccggtgcggactggaacggggagagtgtggtttatgctcatagatcaggagagctggtacggttacctaaaggtgcttcagtgccggtaacacttaaggttctcgagtatgaactattccacttctgtcccgtcaaggaaatttccaacaccatttcatttgcaccaatcggccttcttgacatgttcaacagcagcggtgccgtggagaagttcgaagtacaaatgacatccaatgagaaactgcagttctttgatggcgaggtttcctcggagttgacaacttcactcagcaacaaccggaatccaacagcagcgatcagtctcaaagtccggggttgtgggaggtttggtgcatactcatctcagcatccgttgaagtgttgtgtggacaatgccgacactcacttcaactatgactc

SEQ ID NO: 8812 - DNA, 619 bp, Gossypium hirsutum
  Clone ID: LIB3828-020-Q1-K6-C6
cccagcgtccgcccacgcgtccggtttggatacaaggcagttcatgtaccagaagggccaacattcggtgccccgttgggaaatggccaaattaagaacggggctgactctagccttaccgataatagccaacagactgacacttctactgatgctgacactgactataaaaaccagcttcatggagttcaacatgaagctgtaatggtgaatacggtggatcaatccaagtcaaaaagtggttatcaaaagacacttcgcaagcttgctcagaatcgaaaagctgcaagaaagagtagattgaggaaaaaagcttatgtccagcagcttgagagtagtcaactcaggctttcagaaatagagcaagagcttcaaaaggcacggcagcagggtatttttatcacatctggactttctggggaccatggccatacagttgcgggaaatgctgctctgggatttgacatggaatatggtcgctggcttgatgaacatcaacgactgataaatgacttaagattagctgtaaattctcatatgggagataatgaattgtgcattcttgttggggtgtcatggcacattatgatgaggtttacaggctaaaaagcattggtgc

SEQ ID NO: 8813 - DNA, 445 bp, Gossypium hirsutum
  Clone ID: LIB3828-020-Q1-K6-C7
cgcacctctattttctacctcaaaaaagcaccagcccaccgcaaggtgcggtgaccgacgccccaagcttcgaagtatggcctattttggcctcagatcccgcttctatctccgattacaacgaagtgataggggaccgacggcctagaagcgaggtacggaggaggacgtggaggcacgaggggcgctggggcgtacgagggtcgtgcgtgggagcttacggatgctggaggctgcggcgccaaggtggaaaccctaaggtttctatggatagtctgatcttgggccatttggacccaatttattgtatttggatattgggttatgggttttaaatgttgggtctagggtcatataaattgggcttgggtagttttgttttttgggctgtttaacattgtaaatggacttgaaatttggctatttggatttgttttttaatttt

SEQ ID NO: 8814 - DNA, 614 bp, Gossypium hirsutum
  Clone ID: LIB3828-020-Q1-K6-C8
aaataaaaccatcagagagaaagaagaagaaaactgtacgttttggaaaaagaaccaaaattgggtgagacaaaatttggaaaatacacaaagtcaggaagctgagtgggaaggtgtctgtttggttgcctgctggtgagcgcgatgatggagaaaggcaaagagcccgccgcagccaacgaggatggcgaagttggtaagaccgagagcgaggagattcaggaagccttagaaattgtcctctttcaagtctctgaatgttatgtttatttgatacctccaaggaaaactgcagcatcttacagagctgatgaatggaatgtcaacaaatgggcatgggagggaactttgaaagtcattagcaagggagaagaatgcattatcaggcttgaagacaagaatacaggtgaattgtatgctcgagcatttctgagagatggagagccacatccagtggaatctgtaattgatagcagtagatattttgttcttcggattgaggagaatattggtggtcgccttcggcatgctttcattggcattgggtttcgagagagaacagaggcttatgatttccaagcagccctgcatgaccatatgaaatacttgaacaa

SEQ ID NO: 8815 - DNA, 628 bp, Gossypium hirsutum
  Clone ID: LIB3828-020-Q1-K6-C9
cccagcgtccgggcttttttctccttcaagtcctgtctgcaaccaacctgttgtttgcaggatttgggctttgattacaccttttccaattttgctttataaaagaaaaaaaaaaaaaaaccacgatggctgctcatagttatagcttgtttcttttttccttgtcttttgttgtcttaatcccaacccttcaagctcacattgctgaatatgacgattattggaaggcacggaaattggaagccattgagaacctgaacaaggcttatcaccccaatcctgaggagatggtccaccattacaatgaccaatttgccaaaaccatgattaagcttaataacaccagaagggtgttgaagggaacgaaagaaaatggtccatgtgaaataaccaaccccgttgatagctgctggcggtgtgatcctaactgggaaaaaaacaggaagaggctggccgattgtgcccctggatttgctcgtggtactaccggtggaaaggagggtgagttttacgtggtcactgacccttctgatgatattcttaaccccaaacctggaactctgcgtcatgctgtcatccaaagaagaccactttggatcactttcaaaagatccatgatcatcaccct

SEQ ID NO: 8816 - DNA, 643 bp, Gossypium hirsutum
  Clone ID: LIB3828-020-Q1-K6-D1
gcagctgttcccggtggcggacttcatccgatcacacgttacgtaatgaactatctccgcgcggcgtgtcgatcacgacagacattggaacaagttttcgatgaaagtaatgcggttgttccatctaataagctagatgatcgacgggcatcttcgtcttcgatgtcggttcagatggcatggattatggagcttttggagagtaatttggagatgaaatccaagatttacagagactctgcattgtgctctgttttcatgatgaacaatggaagatatattgtacaaaaagtgaaggatagcgagttagagtcacttcttggtgatgactggatccgaaaacacaatgccaaagtccggcaatactgcaccaactatcaaagaagttcatggaacaagattattggaacattaaagctcgacaattcctcgatagcatcgaatgcgattgccaagtccatgaatcaaaagatcaaatcattcaatacccaattcgaggacgtatgtaaaactcagtcatcatggattgtattcgatgagcagcttagagaagagatgaggatatcagtgtctaggcttttgttaccagcttatagaaacttcatagggaggctccaatgtatgcctgaaatcgggagaacac

SEQ ID NO: 8817 - DNA, 616 bp, Gossypium hirsutum
  Clone ID: LIB3828-020-Q1-K6-D10
cggacgcgtgggcggacgcgtgggttttgtttcatccatgttaatactagtacttctgtccatatcatccgttgaaggtcaaggaggaggaggtggtggtgttattgatgttgttgcagggtttggtgcaaaggcagacgagaaaacagatttgagtaagccattattggatgcttggaaagaagcatgtgcctcgacatctccgtcaaaaattgtgattcctaaagggatatattttttaagtacagctaccatagatggtccttgcaaggctcctattgagcttcaagttcaaggcactgtgaaggctccggcagaccctggtgctttcaaggagcctaaatggattgctttcaatagaattgaaaatttcaaattgtctggcggaggagttttcgacggccagggaaccactgcttataaaagggaaggttgcaaaggtcatgattattgtggttcacttcctattaacctaaggtttgattttttaaccaacgcaatgatacaagatataactaccaaagacagcaagcagttccaggctaatgttctaggatgcaaaaacattactttcgaacatttcaccgtatctgcacctgacgaaagcccaaacaca

SEQ ID NO: 8818 - DNA, 550 bp, Gossypium hirsutum
  unsure (1)..(550): unsure at all n locations; Clone ID: LIB3828-020-Q1-K6-D11
tatcagattagggttgagcagtaatggccaagtcaaagaaccacaccgctcacaatcagtcttacaaggctcacaagaatggcatcaagaaacccaagagtcaacgccatacttccaccaaagggatggatccaaagttcttgaggaaccagaggtatgcaaggaagcacaacaagaagaatggagagtctgccgctgaggaagagtaaatttaaatggaaaagaaaattatcctttattaaagtttttctagttagggctgttttactatcttctatggaatttagtgttaaatttacgctcctttagtttttatattgttgttttatgggattgttgattatatttgttagaaaagatctgaagttgtgagcttattaatatcatgaacatgttttgagcttattcgctgttctttttccttgtttctttctcttattattttcatgtattaagttcanaaaaaaaaaaaaaaaaaaaaaaaaaaaaaaaaaaatacaaaaaaaaaaaaaaaataaaaaaaaaaaacaaaacaaaaataaaataaaaa

SEQ ID NO: 8819 - DNA, 437 bp, Gossypium hirsutum
  Clone ID: LIB3828-020-Q1-K6-D12
ggcttgtgtaggaagaaacagttgttctgttgaagtttcaaactctgggtttggaagtgacccttgccggggtgttctcaagacattggctgttgaagctagatgtgtgtcaacatcaactattggagtctcccagttctaattcgacaagagggtgatgcaatgaagatagttgttaactggtaaactacctctgcttagttgcaaaccagttgcaatgagcatttcagttacatcgtttgtacaagatttcagaagcttgtatgttcagacatgttttctgaataatgctggtatcaagcaattcctgtactatatgtatgtaataatgcggtgaaccctatatctgaagtttaatgttgtaaatcaactgtatatactttatatcatggcaatctgaaacacaataaacactggccttcctgcttctttcccta

SEQ ID NO: 8820 - DNA, 226 bp, Gossypium hirsutum
  unsure (1)..(226): unsure at all n locations; Clone ID: LIB3828-020-Q1-K6-D2
cttgacaaaggcagnaggtgtcagtgggacttatcgattcgccaacaatcttgggtacatgaagaaggaagctcttcctgatgcaaaaaattctcacagaaatgggatattttgaacttcaagatgaaattggggaggaagttgaaggtcattctactgccccatgatctcacttcttaaaacctttgcctatgtaataaaaattaattgcatctatagtaatatt

SEQ ID NO: 8821 - DNA, 629 bp, Gossypium hirsutum
  Clone ID: LIB3828-020-Q1-K6-D3
ggagagcaggaagaatagaatacagttgaatctgctaaagaaattcctaaatttgtagaatttttcaaggatcaaatcaatatggctgaagtcaagtatcctttggagcactttaagacatttaatgaatttttcgtgagagagctaaaacctggagcaagaacaatagcttccattgagcgtgatgatgttgcagtatgtgctgctgattgtcggttgatggcttttaagtcagtagaagatagtctgcggttttggatcaagggtcgaaagttttcaattcaaggtcttctggggaaagaagtctgttcaaatgcttttattgatggaagtttggtgatattcaggttggccccacaggactatcataggtttcatcttccagtttctggcaccattggaaaatttgtaaatattcctggatgcttatacacagttaatcccattgctgtcaatagcaaatattgtaatgttttcactgagaataaacgagtggtgaccattatttctactgcagagtttggaaaggtggcatttgttgcaattggagctactatggttggtagcattacttttgtgaagaaggaagtgactttgtcaaaaaggagaggagtttggatatttctcat

SEQ ID NO: 8822 - DNA, 511 bp, Gossypium hirsutum
  Clone ID: LIB3828-020-Q1-K6-D4
tggaactcccttttttggattgctcatcctggtggtccagcaatattagatcaagtagaagccaaattagcactgaagccagagaagctacgagccacaaggcacgttctttcagagtatggtaacatgtcaagtgcttgtgttctatttattttggatgagatgaggaagaaatcaagggaagatgggcttcagaccacaggagaaggattggagtggggagtgctctttgggtttggacctggcctcactgttgagactgttgtgctccatagtgttgctgcttaaagttaaacaaacatgccttttaagtaattggtcgtgctccacttggcttgcagttttatcttcttcttttttccttttttagaatcctatgaatttgtgtgtttattgttaaagactagaagcctttgatggtgtgggcgggaagcttaacgcctattcagttcatgtatcaacttatattaaatttatggcaataataagttactttgcaaactattctacc

SEQ ID NO: 8823 - DNA, 613 bp, Gossypium hirsutum
  unsure (1)..(613): unsure at all n locations; Clone ID: LIB3828-020-Q1-K6-D5
cgcaaatactttcaagnaattatngctcctgactagtccttaccatggaagaacactatcactgngaattcaatatcggaatgatcccaccatctttgcttgggagttgataaatgaaccccgttgcatgactgatccttctggggatactcttcaagattgggtagaagagatgtcggctttcataaaatcaatcgacaaaaaccatctcttgaccattggcttagaaggattttacggtccttcaagccccaaaaggcaactgtgaatccagaacagtgggcctcggcccttggagctgattttatgcgcaactcgaacattacaaatgttgattttgcctctgttcatatataccccgaccagtggtttcatggtcttgggttcgaagaaaaacggaactatgtttccaagtggatgcactcgcacattgaagattgtgacaaggaactgaagaagccagttatgttcaccgaatacggtctgtcagaccagaacaaagacttccagctatcccaaagagagcagctttatagaaccattcaggacatcatttataaatctgcaaagaagaagggtcgggggcaggtgctttagtctggcagttctttgt

SEQ ID NO: 8824 - DNA, 636 bp, Gossypium hirsutum
  unsure (1)..(636): unsure at all n locations; Clone ID: LIB3828-020-Q1-K6-D6
ccagtttcgagcaatatcagcggggccttaaagctttgaaacttctcggtttggaaggtgttgaattgcctatatggtggggagtggtggagcatngagtcgatgggtaaagtacaactggtctggctaccttaccattgccgagatggttcggaaagcaggtcttaaacttaacgtaacactctgctttcacgcttccagtcaacctaagatcccacttcccgagtgggtacttgacattgggaaaaccaagtccaatatcttcttcaaggatcgagccggaaagccttaccgaggatgtctttcactggctgttgatgagcttgctgttcttaacgggaagactccaatggaagtgtatcaggatttctgtgaaagcttcaagtcggctttttcggctttcatcggttctacgatcacgggaatcacaatgggtctcggaccagacggtgagctccggtatccatctcaccgtgggtttgccaaaagtggcacagttccgggagctggggagttccaatgttacgacaaaaacatgcttcaccttcttaagcaacatgccgaagcatgcggaaagccaaagtggggactaggtggccctcataatgcgcccgcttacagcgagttgccaactgc

SEQ ID NO: 8825 - DNA, 638 bp, Gossypium hirsutum
  Clone ID: LIB3828-020-Q1-K6-D7
gtcttgattgttgtcactctgagattgacgtcttgcaccatatcggacaatcacttttgaaacaaatgaaatcagtaatcacccttgttagacgtattagtatttaagtttgaaagtagacatgattgtctagtcttgattgttgtcactctgagattgacgtcttgcaccatatcggacaatcacttttgaaacaaatgaaatcagtaatcacccttgttagacgtgtaactatgtgcaacgctaatattagagtataaggctcctgaaaaacatcatcgactgttattttctgctaacagactcgtatgtggcttaacgaagtccacctatgttcgctactactcttacaataaatacaagagtggttgttattatgtttttatttctcaggttggagttggacctgtgttttacttaagaattgctctaaaacacaaataagtggttgctttgatacagggatctctttcatcaacctttcctattgagaaccagaacaacctcgtgacgatgaggacattgaagaatcatctagataggacaaagagccttccattcgtgaagcgtattgcggatttccatttgctactgtttctagccatgtctcatggccttggttccgatgttctagcact

SEQ ID NO: 8826 - DNA, 620 bp, Gossypium hirsutum
  unsure (1)..(620): unsure at all n locations; Clone ID: LIB3828-020-Q1-K6-D8
tttcacttcgtcttctccatttcctccgaagtaagaggctgcggatccctcagagcttaggtattatgaggatgatgacactccaacaatngaaaacaatcaagggtgcaactactggttttgttgctggaactatctggggaaccgttgttgctacatggtatgatgtgcctcgtgttgagagaagtgttgccatacctgggcttgtaagaacgctaaagatgatgggaaattatggaatgacatttgctgcaattgggggagtctatattggtgttgagcagctgttgcagaattataggatgaagagagactttgtcaatggtgctgttggtggtttcgtggctggggcttccattctcggtttcaaagggaggagcatctcaacagctatttctgccggatcagctctggcattcacctctgcggtgattgatgctggaggtcagactacaaggctggacacagggaaggagtattacccatacaccaccaagaaaaggcctgttgagtcataaatcttgcatgtctctgttgagaaggcacttccagtgaaacgtgagataatcgatcctgttcgatgatctgtctttgttttttgaagatataatcatactcgc

SEQ ID NO: 8827 - DNA, 636 bp, Gossypium hirsutum
  unsure (1)..(636): unsure at all n locations; Clone ID: LIB3828-020-Q1-K6-D9
ggnaaaagcttcctttttttttttttctctccttttccaccgccgtcgatctcgatccttatcctcgttttcaaacaagctcgaaaaagatggccaacgctgcatcgggaatggctgtgcatgatgattgcaagttgaagttcttggagctcaaggcaaaaagaacccaccgcttcattgttttcaaaattgaggagaagcaaaagcaagttattgtggagaagcttggtgaaccaaccgaaagctatgaggattttactaaatgtctccccgctgatgaatgtcgatatgctgtgtacgattttgattttctaacggccgagaacgtaccgaagagcagaatctttttcatagcatggtctcccgacacgtcaaggatcaggagcaagatgatttacgccagctccaaagatagattcaagcgagaactggatggaattcaggtggaattgcaagcaacagatccaactgagatgggtctcgatgtgttcaaaagccgtgctaactgaatacggttcttttaggcatttgcaaccgggaagcttccttccttcctacagtatgtctttacttaagtgaaatgtttataggtttcgaaacggcaaactcgggatttccagagttatgccataagac

SEQ ID NO: 8828 - DNA, 639 bp, Gossypium hirsutum
  unsure (1)..(639): unsure at all n locations; Clone ID: LIB3828-020-Q1-K6-E1
ccgaacatgcggaagccaaatggggactaggtggccctcataatgcgcccgcttacagcgagttgccaactgcaaacaccttcttcaaggatcatggtggatcttgggaaagtccttatggtgatttcttcctttcttggtactcaagccagctcatagctcatggagaccgcctactctcacttgcctcttcagttttcagtgatagtgcggtgaacattttcgggaaagtcccattgatgcactcttggcatggaacccgctcacatccttctgagctcacagctggcttctataacactgccacgagaaaaggctacaaagaagttgcagagatgtttgcaaggaattcatgcaaaatcatcttgcctgggatggaccagtcagataagtaccagcttaaggaatctctctcaagccctgaattattacttgctgaaattggaacagcttgcaataagcacggggtcagaatttccggccagaactcgactgtcggagctcctgatggtcttaagcagatcaagaagaacatgttgagtgagaatcttaatgactcattcattntccagaggattggagctcaattcttcgcaccggagcattttcctttgttcattgagtttgtccggaaactga

SEQ ID NO: 8829 - DNA, 300 bp, Gossypium hirsutum
  Clone ID: LIB3828-020-Q1-K6-E10
cacttttctcaacttcgagaggttatatctcgaaacagtgagtgaacggaagtccaaagtcgtcaaatttaaaatcaaaattaaaatatttcatgaatgtgcattagatgattgaaagatgaaaaagagatgggaaattgtgtataaagactctggtagactggtatcaattattccagcttagagagaaaaatagcaaaaagcaaccccaaagatgctagctagtaatagtactacaaattcatatggttgtatactgtactatatcaaattatggtagtaatctttggctttttgtct

SEQ ID NO: 8830 - DNA, 520 bp, Gossypium hirsutum
  Clone ID: LIB3828-020-Q1-K6-E11
atctcccttcccttcaatcttcaaactccttaatggctgactctcaacattcctcttctggtaaaacttatgtcaactctcaagaatttagttcagaggaggaaacaagtgaagaatcaaagcttaaattctctgaagatgaggaaacacttataattaggatgtttaatctggttggagagaggtgggctttaattgctggaagaatccctgttagaacagctgaagaaattgaagagtactggaataccaggtattcaacgagtgaatgagaaaaaaaaaggacatttttaaagaaaggggcaaaatttgagggactggatggcaattatgggcaagagagcaatgatgggtatttgttgtagtcaccaaaaaagggtcaagaatatggtataatcggttcaacccgacttagaaaattgagcattgttgtttgatgttttggggttttctcttgttttgatgaacttttactatgggggggatgtctccgtggctttatatatactttcaatagccc

SEQ ID NO: 8831 - DNA, 524 bp, Gossypium hirsutum
  Clone ID: LIB3828-020-Q1-K6-E2
aaagttcttccctcataactcagcacgattgaccgtcccgggaggagcaagtgtagcatgcagcacggccaaagctgtcgaatgggatgccacttggaagaacaaccttgacccgtcgggcagagcagcacttggagtgcatctctcagcttacgacgcggagacacctttcgataacaagccgtccaagattgttgagtcaataccgttgatgatggagattcctggagttgccatacatggttaagtgccatgaaaattgaagcaaaatgtgtgaaatttaatgattgattagtataatttgtgccatattatccatggaacttcagtatgctataatgtataatatgggtaatatataaaaccactatatatatatatatgtatgcatgtatgtatggaaggatggatggatggatgtatattgtgatcgtttgatcattgtttttgttatatttagttgttgtttatgttattaaagttcgtaatcatattttgaaatggaaatattccctttggttttt

SEQ ID NO: 8832 - DNA, 620 bp, Gossypium hirsutum
  Clone ID: LIB3828-020-Q1-K6-E3
aaaaaataaagttggctattcaatttaattttgtttcatccatgttaatactagtacttctgtccatatcatccgttgaaggtcaaggaggaggaggtggtggtgttattgatgttgttgcaaagtttggtgcaaaggcagacgatgaaaacagatttgagtaagccattattggatgcttggaaagaagcatgtgcctcgacatctccgtcaaaaattgtgattcctaaagggatatattttttaagtacagctaccttagatggtccttgcaaggctcctattgagcttcaagttcaaggcactgtgaaggctccggcagaccctggtgctttcaaggagcctaaatggattgctttcaatagaattgaaaatttcaaattgtctggcggaggagttttcgacggccagggaaccactgcttataaaagggaaggttgcaaaggtcatgattattgtggttcacttcctattaacctaagatttgattttttaaccaacgcaatgatacaagatataactaccaaagacagcaagcagttccaggctaatgttctaggatgcaaaaacattactttcgaacatttcaccgtatctgcacctgacgaaagcccaaacac

SEQ ID NO: 8833 - DNA, 595 bp, Gossypium hirsutum
  unsure (1)..(595): unsure at all n locations; Clone ID: LIB3828-020-Q1-K6-E4
cccagcgtccgggcaggcgcagcaaattgggtttccataaccttactgttttcagtatgtttatcggcgtcctatggtaagaggaccggaatctccaccatggctgacggagccgatgggtttcaaccaagcaacggttttccgcatgaagctgatcctgattcttcaacctctatcgatcctgatcctaccggattcggtgctggcataggtataggttatgaaagaagcccttactgtatcgactgcgacgatgtggatatcatgggcggcagcttttgcggcacctgcaattacggatgcccttaccgcaggttcaataatgggtgtggtggtggtatcgcttatatggatgaactcaaacgaacgattaaggaccttaccatgaaacttgatgccaatggtcttttagggaaaaagaaggccatgaatatacaagctatggcgccagaatcttcatagatttatatatagattatagaaactacggattctatacaaagagaaagaaaataaagaataaccaagcagcttgatatatgattgaattacaatgtgctagctgnttttttttatctttaattattatatgaat

SEQ ID NO: 8834 - DNA, 631 bp, Gossypium hirsutum
  unsure (1)..(631): unsure at all n locations; Clone ID: LIB3828-020-Q1-K6-E5
tggtcgagagctccgacacgatcgacaacgttaaagcgaagatccaatacaagnaaggcatccccccagaccagcaacgtctcatctttgccggaaaacaactcgaagacggccgtaccttggccgactacaacatccagaaggagtcaactctccaccttgtccttcgtttgcgcggcgggatgcaaatcttcgttaagacgcttaccggaaagacgatcactctcgaggtcgagagctctgacacgatcgacaacgtgaaagccaaaatccaagacaaggaaggcatcccgccagaccagcaacgtctcatcttcgccggaaagcaactcgaggacgggcggactttagccgattacaatatccagaaggaatcgactcttcatctggttctacgtcttcgaggtgggatgcagatcttcgtcaagactttgaccggtaagaccattactttagaagtggagagctcggatacgattgataacgtgaaagcgaagattcaggacaaagaaggaattccaccagatcagcaaaggttgatttttgctgggaaacagctggaagatggaaggactntggctgattacaatattcaaaaggagtccactcttcaccttgttcttcgtcttcg

SEQ ID NO: 8835 - DNA, 630 bp, Gossypium hirsutum
  Clone ID: LIB3828-020-Q1-K6-E6
cactgccgccctttcttttccctttcacgcagaaaccctcgccggcatcttgtccgactccgatccccttcgccggaacctttttaccgctttcttttagttatttcagaaatgtacaataacttgggagcccagcctggggtaccaagaccgccaacaaatcctcagccaaatccatttggcaattcattttatggggctggttctggtcttatccgaggtggtctgggtgcatatggagagaaaattttgggatcaagttctgagtatgtgcaaagcaatataagtagatacttctctgatccccagtactactttcaagtgaacgatcaatatgtgagaaacaaattgaaggttgttttactgccatttcttcacaggggccattggacaagaataactgagccagtaggtggcaggctttcctataaacccccaatttatgacataaacgcaccagacttatacatcccatttatggcatttggcacctatgtcgttcttgctggattgtcacttggccttcaaggaaagtttagccctgaagcacttaactggctgtttgttaaggggttgtttggctggtttctgcaagtctcgctgctgaaagtaacattactatcactgggc

SEQ ID NO: 8836 - DNA, 612 bp, Gossypium hirsutum
  unsure (1)..(612): unsure at all n locations; Clone ID: LIB3828-020-Q1-K6-E7
acgatccccatgatatgcaagaacgataccaacgatgggtggcccngacatggccgaaagtacaagagcaagaacgaatgggcattgcggttcgggatatacaaatccaattctcagttcattgattgtgtcaattcacagaacctatcattcaagttgaccgataacgaattcgcagacatgacaaatgatgagttcagagctatgtatttgggttaccaaagcataagatctccatgtgagagcaacagcaaaggcttcgcatatgacaaatatcacaatttgccaaaaagcatagattggagaaggaaagggaaagggaaaagcgtgaaagggaaagggaaagggaaagagaaagggagaagagggaaagagaaagagaaagggaaagggaaaaagagagggagagggaaaagaaggcgagggaaaaggagaagaggagggaatataatagtgatgatagcaaggaggagaaggaacgacataggaagcggcgaaggagggaacgcgatgacgaagatgactgtaacaatgattataaggagagggagagtaaatcgaataggggagagagtcctgttaggaaaaagagtggtgaagatgagttggaga

SEQ ID NO: 8837 - DNA, 623 bp, Gossypium hirsutum
  Clone ID: LIB3828-020-Q1-K6-E8
gaaagacgccctcgtaatctcgatttctactcagacccgacagaaaaggtcaaaggcgagacaatctctagcgatcaactatgttcaggctttacaaaggtttcaaggagctgttagcttcctcagcaacggcggcggtgccgttgacagcagccaagttttatgctgctgctgctgctgcgaaatcagcttctccaaagtggctcagaaaactcggaaaaagccgaccacttcaaaacccaagactaaaaaaccagctgctcttcgatccgagactcgacccactgggatttctaaagttaccccggtttctcctgccttgggacagttccttggagctcaacaggcttcccgtactgaagctgttaagcagatctggttctatatcaaatcccaaaacctccagaatcccaataacaggaaggagatcttttgcgatgagaagcttaagaccatttttaatggaaaagaaagggtaggtttcctggagattgggaaaatgttaacccctcactttgtgaagactacctagcctatattctcctatttggccctcggttgctcaataagcaatatcaagctagctctttccagtgtatgttaatgttattgccttttgtttc

SEQ ID NO: 8838 - DNA, 626 bp, Gossypium hirsutum
  unsure (1)..(626): unsure at all n locations; Clone ID: LIB3828-020-Q1-K6-E9
cttcttcatggcttctttttctttctgataaaatcggtaacattggcctccaactcttgtagtaattgaaatcttagttatcttaaacccatgttgatctgactttacattttgcttgaagtactcatgtccaacacaatattcaaacatggatgcggggatttgaacttctaaggatcttgcaaatacatgngaaaaatttggaaaaaaactacgccttcactcaagattttacggaattctgtttgatccattgtgtcatatttctctgattaatcttaattttaaaacctaatccatgcagtgttgtggcccttgcatgtctatcaccaaaagcaccctgtgaacttggttatcctcagcctcttcaccgtgtcattgagtctcacagttggtgtgagctgtgcaaataccgatggaagaatcgtgcttgaagcgctaattttgacagctgctgtggttgcatctcttactggctacactttctgggcatcgaagaaggcaaggacttcagctatctcggaccgattttgttcaccggccttattatcctcatcttaactggtctaatccagatgttcttcccgctcggcccaacatctactgctgtatatggtggaattagt

SEQ ID NO: 8839 - DNA, 614 bp, Gossypium hirsutum
  Clone ID: LIB3828-020-Q1-K6-F1
cttagttaagtaagagaaaagacagatttttctattttaaattgggattttttttgtgtgtgtggtttttgagaggatccatggctgcaccaccggcaagagctcgggctgattatgattaccttattaagcttcttttgattggtgatagtggtgtggggaagagttgtctgcttttacgtttttctgatggttcctttactactagtttcataacaactatcggcattgattttaagataagaaccattgagcttgatggtaagcgggtcaaattgcaaatctgggatacagctggtcaagagcgatttcgaactattacaacagcttactaccgtggagccatggggattttgctggtttatgatgttactgatgagtcatctttcaacaatattcggaattggattcgcaatattgaacaacatgcttcagacaatgtcaacaagatactggttggaaacaaggctgacatggatgagagcaaaagggctgtgccgacctccaaggtcaagccctcgctgatgagtatggtatcaagttcttcgaaactagtgcaaagacgaatttgaatgtggaggaggttttcttttcaatagccaccgacattaagc

SEQ ID NO: 8840 - DNA, 623 bp, Gossypium hirsutum
  Clone ID: LIB3828-020-Q1-K6-F10
cccagcgtccggcagaactcactgtgtgaagctggtgcatcgtttgtacccagaggttgaccctgccctcaaccccgaccatgttccacacatactccataaatgccctgatcagatcccagaccccaaggccgtccagtatgtgagaaacgaccgtgggacacccatggttttggataacaactactacaggaacatactggacaacaagggtttgttgattgtggatcaccaactggcgtacgacaaaaggaccagaccttatgtgaagaaaatggccaagagccaagactatttcttcaaggagttctcaagggccattactctcctctctgagaacaatcctctcactggtagcaagggtgagatcaggaagcaatgcaatcttgcaaacaagcttcactaaaatgcctcgccaaagagaaagccgagtgtggccgaataaaatgtttgtttactcagtttcttttccaagagacgagtttgttaatgtgcaggtgagtaatggtgcaatggtactggtttgtaacgatcgatccattgcatttttcttttagcataagccaggttgccttctcttgatgttggtcatgggcttggtggatgtagggatggatgtaata

SEQ ID NO: 8841 - DNA, 394 bp, Gossypium hirsutum
  Clone ID: LIB3828-020-Q1-K6-F11
gtttttatggtgttttatagggcgaataaggtcacagtcatgccccttctgtagggacagcttgaaaagagtggattcaggtgatctttggatatatacaagcaaaaatgaaattgttgatttagcttcaatctcgagggataatatgaagcgtcttttcatgtatattgagaagctgccgcagattgttccagatccaaagattgtttcttatgatccacagcatcaacgttgatcaccttattatttagaagtgtaaataacatatggttcattgtagatagaactcatttatgttcttctttcttcattagtttcattgtagtaagtgtagaagcactttgggggggggggggattacattctttgctatgaagttatatgctttttttag

SEQ ID NO: 8842 - DNA, 631 bp, Gossypium hirsutum
  Clone ID: LIB3828-020-Q1-K6-F12
tgattttcctttgccccttaaaccctaacaacaagcgtctaaggaattgcaaagtttagaaacttggaaggtcataggatacgatttaaaatgcgaccgttagagacactgccgccaacggaaaccctagaaatcgagaacggtttgtctctcgttccgcgcgtgaaactcaatctcacaatccacccttctctcccctcggtttcgaaaccgatcgacgaatggcagctcaagcgagccctgatagatttcctcaagacctcgctctccgtctccgttaccgttcccgaagaagacctccagatcaaacgactcaaagacctcaagaaacggaagcgagacgagccggtcgcccacggtgctctcttcattcgtgacattaggtttttgagcagtaagaagaaaattgaagaggttgataacgaagaagaggatgtgaaggaattggaaaagaaatttttggaatggagaagctatgtagcggagaaaatggatgggattgagctcaatcttgaaggagttaagtataatcttagtgttgagattccagcttcggatgattttggaagatgaggaaagattgggaggagtcgtatgcatttcgaaaccgatgttattcgaggggaggaag

SEQ ID NO: 8843 - DNA, 608 bp, Gossypium hirsutum
  Clone ID: LIB3828-020-Q1-K6-F2
ggaataacttcactattttgttgtttcattacgatggcctaaccagtgaatgggatgagtttgagtggtcaaagcgagcaattcacgtgagtgttcaaaagcaggctaaatggtggtatgcgaagcgctttttgcaccctgatattgttgcaccctatgagtacatcttcatgtgggacgaggatcttggagtggagaacttcaatgcggaggaatacataaaacttgtcaaaaaacatggtttagaaatatcccagccaggtttagatgcaaatagtgctgggctgacatgggcaatgacaaggaagagaaatgacaccgaagttcacaaggatactgaggagagacctggctggtgtaacgatccgcatttgcctccatgtgcagcgtatgaaacataatgaaccccctttgttaaaatgattaaacatattgttgcttatttcttgaatcgtagctaatcattcttgcatactggatgcttaggtttgtggagatcatggctacagtgttttctcgggatgcatggcgatgtgtttggcatatgattcaaaacgacttggttcacggatggggtctagatttctctcttaggaaatgtgtcgagc

SEQ ID NO: 8844 - DNA, 640 bp, Gossypium hirsutum
  Clone ID: LIB3828-020-Q1-K6-F3
acgatttcgatttcaccaccgatgagaattgccaaaatagcaagattttcttcatcgcatggtcaccagacacatcgagggtgaggagcaaaatgttgtacgcaagttccaaagataggttcagaagagaactggatggtgttcaagttgaattgcaagccaccgatcccagtgaaatgagctttgatatcgtcaaagaaagagccttctaaaataatgcttatattgccaaaaaatggggggcattaaatatttttctttttaaattttcctataatcataaatattattggaaatttaggaactgatcatattatgtgttatggtgtcaaagatggactcggcatcatcggcttggattcatggggttgttgaaaggttaagaaaaaactatgaatccaagccaccgatcccagtgaaatgagctttgatatcgtcaaagaaagagccttctaaaataatgcttatattgccaaaaaatggggggcattaaatatttttctttttaaattttcctataatcataaatattattggaaatttaggaactgatcatattatgtgttatggtgtcaaagatggactcggcatcatcggcttggattcatggggttgttgaaaggttaagaaaaaactatga

SEQ ID NO: 8845 - DNA, 625 bp, Gossypium hirsutum
  Clone ID: LIB3828-020-Q1-K6-F4
atcctcagttgaaagtgaagttagtggatgggagtagcttggcagttgcaattcttctaaatagcataccaaagggaacaacccaagtactccttagaggcaacttgactaaagttgcttttgcagtcgcctttgccctgtgcgaaagggcattcaggtcactgtattgcgtgaggatgaatatgagaagcttgataagtcacttggcaccaaatctgagggtaaattggttacctctaagagttatagctcttgcaaggtatggttagttggagatgacttgaccgaagaagagcaaagaaaggcaaataaaggaacactatttattcccttttcgcaacttccaccaaaaaaattgcgcaaggactgcttctatcacacaacaccagcgatgcagactccgacggcccttgagaatgtggattcttgcgagaactggttgccaaggagagtgatgagcgtatggcgcatagctgggatactgcatgctctggaaggatgggaagagcacgaatgtggttacaccatgtctaacattgacaaagtttgggaagcatgtctcaagcatggatttcagcctctgaaggtcccaactcaatcaaagtcctagaaagaatttggcgat

SEQ ID NO: 8846 - DNA, 634 bp, Gossypium hirsutum
  Clone ID: LIB3828-020-Q1-K6-F5
cggccgcgtggggtttggctgcacttcgatttttgttaagttgagcttaaattttattagtttttttggctcattgagcttatattttctttttatacatgcaaaatggaactggatttaattgcagttaaaaatgcgcaagttctgtgcctgtgccgctgatctttttgtttattttgtggcactaattcatagattagaaatcatgtcttctcggtaagggaacgttggtttggtactaatattctcttcttcttttttttgtcttgtatctatttattattatttttattttttgcatttgtatcattttacgtgacagtggctgtcctaaggcataccacccagcctgtatcaaaagggatgaggcattctttaaatccaaggcaaaatggaactgcggtatgtttggattaattatttatcacttttagttcgatttaattaatataagtgctggggagagttgaagcatgaattctactgtctaatatatcgtaaaatatgaaggtataatgtgtctctgcccttttcagaccttattttgttgcaagataattcatagttaacaactcaaaagataagtaatgcgcatccaatattattatagcatttttattttttgatattatat

SEQ ID NO: 8847 - DNA, 622 bp, Gossypium hirsutum
  Clone ID: LIB3828-020-Q1-K6-F6
gagtagttttggtggtttgctcccaaattgtcgagtggtgtcccacaaactcaacttaactgtttccttttggagaccccatccatatggatggttaaaattcaatatttgtggtgtagctaaagaggataaagccggctgtggaggaattttgagagatttggaggggatggcaagagggatattctttggtgctgcaggtacaaatgttgctgaggaagctgagattgaagcagtgaaaatttctctcgaagtgtttgaatcaacaatctcgaagtgttctaattcactggtaattgaagtaggctctacggtggtgttttttggtgtatcaacaaggggctgagaccttggtcgcttcagacaattttttcagaaattgaatcaactaagctcaaggctggatccattgtcttctctttggtggataggaatgaaaacgacctggcgttctctttggctttggctggggtaaatcagactcaattgtttaaagcttggtggtgatttttgctttgtttagtactttaatactgctggaactatgctttaatttttgctgtatttttatttggatactactctgctttgttaccattaacagagcagtgtgaatgttgcg

SEQ ID NO: 8848 - DNA, 622 bp, Gossypium hirsutum
  unsure (1)..(622): unsure at all n locations; Clone ID: LIB3828-020-Q1-K6-F7
ggaactccttcagcaaaaccaggatttgaagcctaacgttgtagttgctaaagatggtagcgggaaatatgatactattaacaaggcattggctgaagtccccgtgaaaagtcccgatcgatttgttattcacattaaggctggtacttacanaggaaaaaatcaacgtgaccaagcagatgactaatgttgtattcatcggtgatggcccaaccaagaccatcatcacaaatgacattagtgtcgctaagaatccaccggttagaacataccgtactgcaactgttggtgtggatggggctagtttcatggctaaggacattggattcgataactcagcaggacccgaaggtcatcaagcagtggcctttagggccactgctgataaggtcatcatgttcaactgccatttcactgggtaccaagacactctttacgctcacagagagagacaattatataccaactgtctcattaccggaacggtggatttcatcttcggggatgcgacgagcattttccagaactgtatgctcatcgtgaggaagccagggcctggccaaaattgcatggttactgcacagggaaggaatgatcttggaacaaactcagccattgtgct

SEQ ID NO: 8849 - DNA, 634 bp, Gossypium hirsutum
  Clone ID: LIB3828-020-Q1-K6-F8
taaaaagtaaaagagcaccaagcaaaacaacatggcggatggtagtgagaaaaatgcggtggtgagcaacaaaaagtgatattcaaggattatgtttccgggtttccaaaagaatcagacatggcggtcactgtcgacgagaatctaaaactgaaggttgccggtgattctcaaggcattctcgtgaagaatctttacttatcatgtgatccttatatgcgacttttgatgacgaaccgaagttcagaaatcttcggtacatacactccgggcgctccaataactgggtttggagtgggtaaagttattgattcaagaaacccagaattcaaggaaggagatctggtttggggcataacaggatgggaagagtattcattactgacatcaagtgaagggctctttaaaatccatcatactgatatacccctttcctactatactggaattcttgggatgcctggtttgactgcatatggaggattctacgaggtttgtgcaccaaagaaaggggaatatgtgtttgtgtcagctgcatctggtgctgttggacagcttgttggccaatttgcaaagctaatgggttgctatgttgttggcagtgctggcactcaagacaaggttgaattattga

SEQ ID NO: 8850 - DNA, 637 bp, Gossypium hirsutum
  unsure (1)..(637): unsure at all n locations; Clone ID: LIB3828-020-Q1-K6-F9
ggnaactggatcggcaaaagaagtaatagctttggcgatgattcggatactgcaatatctgtgcatgataacagagcttcctcctcatcatcacccaattggggatccagctcccaacattcccattctgatggtagaactgtagcatcaagcagtgtcngaaaaagaagtagtatcttctcctggtgatgagcctgaacctgctgatgctgagctagctgagaatctagatgagtcccttgtagagtatggaagtgacataaattacatctactcccgatatggaaactataccatagagcaacaccaagacaaggaaattaaagaaatcctcaactgtgatggggcaaatccaaatgtttatattctttcatccgggcgatggagtgtcaaccaagaggctcaacaaaccaaaaggaaaccgaccattgatcaagaattcgagcagtacttttcgatgcttatgctatagaggagggagtacttaaatccaaacatgtagttcatacattgtgtaagtggcttgacattaaagtcaaaatgtaaaaattagcttctttttgggattgtcttgaggtaactctaactntgtcttttcccattctatcttcaagtcaacttaagntgattgtatata

SEQ ID NO: 8851 - DNA, 587 bp, Gossypium hirsutum
  unsure (1)..(587): unsure at all n locations; Clone ID: LIB3828-020-Q1-K6-G1
gccttcttagtgacctattgaagagtcacctactattactcatattcaacttcacctgcgaccaacatttcaacctaatctcttcctttaaaggctattagggctagtttaggaatgcttttcaaatatttttgagacaaaaaaaaatactcttgggacaaaattatttctaaacaagctgtttttttagagaaaaagtgcttctcttaagccaaaaattagcccaaaaatacttttttcagatgaaaattttaacttctccccaaaagtgtttttttttctcaaaaataattttaagaagcatttctaaactaagcattagacaccatacaaacctccatctctttcaacgacatcaatagtgacaaagttggtttctcgacatagtcatctcgatacttgatggatatccgtttctttgtcgatatatgtgtttggctagaacattgaagttgttggatagtttgttcttgtacaatgtgttggaattttttaaagtatgatggtcttaattcaacaacatattgaatttcaagcaaagattcttgtnaaaaaataaatcttttatagtgtcacctaaatgggcg

SEQ ID NO: 8852 - DNA, 567 bp, Gossypium hirsutum
  Clone ID: LIB3828-020-Q1-K6-G10
ttgaaagaaagaaaatggttctgctagagaactttgggatgatgtagtggccggtcctcaaccggaacgtggccttggccggctgaggaagatcaccaccaccccacccttgtccaccaaagatgaggcttcatcaatggcgatgccgacgagtccgacgacacctgggacaccatcgacgccggtgtcggctcgtagggacaacgtgtggaggagcgtgttcaatccaggtagcaaccttgcaaccaaaggctttacagcggggagacccggagcaagcatcaccgttgattaggcggtggctgacggcggcggatggtagcaaaaccactagcagaaggttgcagctactgaaggagcaggatttgcatgtaaatatatatatcgtcctttttaaaagttcttcaatgggtcaattaagtagtagtagtaagtaagatgtttaaaagagtaagcggcagcgcagggtggtcgatgaccttatgtcattcaagatcccggccgtgagcggcggcagctgctgctatattaaataattattaaataaagggaagggggtattgtatg

SEQ ID NO: 8853 - DNA, 640 bp, Gossypium hirsutum
  unsure (1)..(640): unsure at all n locations; Clone ID: LIB3828-020-Q1-K6-G11
gtttttctttttggtagtngaaagataattgccctaataaattttgtctggctagtcttggttaataaaaaaaaaaaaaaaaaaaaaaaaaaaaaaaaaaaaaaaaaaaaaaaaaaaaaaaaaaaaaaaaaaaaaaaaaaaaaaaaaaaaaaaaaaaaaaaaaaaaaaaaaaaaaaaaaaaaaaaaaaaaaaaaaaaaaaaaaaaaaaaaaaaaaaaaaaaggggggggccccttttggggaaccccaatttcccccccccggccggccaaaataaagttttttttttggggcccccaaattaaattcccgggccccgtttttaccacccggggcgggggaaacccccggggtccccccactttatccccttggaaccacccccccttttcccagggggggtaaatccaaaagggccccccccgttcccccttcccaaaatttgcccccccctaatgggaaaggggcccccccccttacggggcctttaaccccggggggggggggggttcccccccgggggcccctttcctttggcaggccccttagccccctccctttggtttttttcccttttttttttcccccgttcggggggttcccccggaaaatttttaaaggggggcccccttggggggccc

SEQ ID NO: 8854 - DNA, 629 bp, Gossypium hirsutum
  Clone ID: LIB3828-020-Q1-K6-G12
gagaactgcatggagaattgaagtgcttaaacaaggcatacagaacaccgggaggtttaacatattgtcaaaggatataggagtaccgctggtggccttttctctaaaagatagcagcaaacatacagtgttcgagatagccgagaacttgcgaaggtttggatggatccttccggcttatacaatgcctgccaatgcacagcacgtggctgtcctccgagcagtgatccgagaagatttcagccatgggctggcgaaaagactggtggcacacattgagcaagtcctcaaggaaatggatggcctcccgagtcgccttcaacataagaagaccgaaagagaaactcaggaagaggtctttaggtactggaaacgccttgtagatcgcaagagagctggagtctgttgattttttcatctctgtttcccaacaccacggcccctcttcaacaatttttttgctttccataacaattatgctactcttttaaataaacattttctagtatcttggctattatgtatgttttccaggcgatgggtggattccttgtatgcttgaatcggagcatcatcactccattaaaatgcacattaatttctccaaaaaaaaaaaaaaaggcggccgc

SEQ ID NO: 8855 - DNA, 641 bp, Gossypium hirsutum
  unsure (1)..(641): unsure at all n locations; Clone ID: LIB3828-020-Q1-K6-G3
gttttagtcaatctagttgttatcagtaatttgcacctgctngaaattcattctatcgttcggtccagtagtcttcagaatcggttcaaaagtgctagaactgagaaagcataaattgacagctagcacatttgctggggctatcggcttctggcctttgcgaaggacccagctctggctagagaaacttggggcaattgagcctttttatggtaacttagctacatgttggggcaatatcaaagaagaggaagcatttgaaagatataaacagattactgggaatacaattgagtttcctgaatttcaagtttatggtaagatgaatcctgaagacaattggttagcagcttcacctgatggcttggtgaacaggtttgtttatgggttgcctcctgggggagtattggagataaaatgtccatatattgatgggaaaatgagcgaggctttcccttggaagcgcatccccctctattgcattccacaagctcagggtttaatggaaatcatggaccgggaatggatggatttctatgtttggactcctaacggaagcagtctgtttaggatttaccgagatgtaaaatactgggaatgttctngaaatcggcactctctgactttttggtggaagcatg

SEQ ID NO: 8856 - DNA, 431 bp, Gossypium hirsutum
  Clone ID: LIB3828-020-Q1-K6-G4
taataacaatcaccggcggatccccattctccagaaattaaacgcaggtctcgttcatttccggtgcgtttaataatccctttatacgccatggacatgaagaaggtctccaccgccatcattgttgctgctgcctcaatgagcgccgtcatggctgccggtgcacctgctccttccccttccgccggtggttctagtcctagctcctctcctgcttccgtcacagcatcagcaccagattccagcgtggctgccgcaaccttgcctgttcttggatcattggttggggcttccattgtttctttgttttcttacatgctgcagtaagctacatgtatcaaaaatgaacatgtgaacgcatattttattttatttattattttttgtaagaaacatgtgatgaatattgaaaaaattgaaatggagctttg

SEQ ID NO: 8857 - DNA, 636 bp, Gossypium hirsutum
  Clone ID: LIB3828-020-Q1-K6-G5
cccagcgtccgtcgatgcagcatcactgccccatatgttacgagtacctcttcgattcgttgaaagatcgactgtgatgaaatgcggtcacacgatgcactatgaatgttaccatgagatgctaaagcgtgacaaatattgctgtcccatatgctcaaagtcggtgatcgatatgtcccgagcctggaagaggatggatgaagagattgaagcgaccctaatgccggaggattaccgatataagaaggtttggattctatgcaatgactgtgacgacactaccgaggtttacttccacataatcggacagaaatgcagtcactgtagatcttacaacacccggacgatcgccccaccggaactccctcagtgatgagatcatgatcgaagaaccgaagccggtgagctcctgacttctaaaggtctgctcgttaactgtaaaagcggagatgaattcttctaatttgcatatcatgtctcgatcatctcgatccatcatcgtcattggatttgattatatgattcagtgtattattattcaaatgattgtgccatttttatgtcttccctcataaaacatttctcaagttatcggttccccatttcgggtgtgaatggttctatggttgatgtaaa

SEQ ID NO: 8858 - DNA, 635 bp, Gossypium hirsutum
  Clone ID: LIB3828-020-Q1-K6-G6
gcactattcagtcttcggtcgccgctccccctttctatctattcaatctgaggtatgtcgacggccgtggcagccaccgagaccagcaaagacccaacccaacctacctccgaagtcaagcttttcaatcgctggtcttttgaggatgttcaggttactgatatctctttgagtgactacattggtgtccaagcttcgaagcatgcaacctatgtgccgcacactgctggaaggtactcagtgaagcgtttccggaaggctcaatgcccaattgttgagaggcttacgaactcactgatgatgcacggccgaaacaatgggaagaaacttatggcagttaggattgtgaagcatgccatggaaattatttatctcctgactgatcagaacccaattcaagtcattgtcgatgctataatcaacagtggacctcgtgaagatgctactcgtatcggttctgcgggtgttgtgaggcgtcaggctgttgatatttctcctcttcgtcgtgtgaatcaagccatctatctcttgaccaccggagcacgtgagtctgcattcagaaacattaaaaccattgctgaatgtttagccgatgagcttattaatgctgcaaagggatcgtcgaacagctacgc

SEQ ID NO: 8859 - DNA, 565 bp, Gossypium hirsutum
  unsure (1)..(565): unsure at all n locations; Clone ID: LIB3828-020-Q1-K6-G7
cccagcgtccgggcgtggtggagtagcgcacatcgcggggtagtagcgtccggcgtgcgggggaggcgcgttgtttgctgaagcggcacccaaaatgggttgggcctagggtttgttgaaaatgcataagcattttgggccattaggctttgtttttgttgggtcttagggttttggttggtcctgggtattgtttttttatttggtttattatttttttgttttatagcgggccgggcaaattaggcctgctacatgaacgatatcaaaaatgtgttttccattatgtactaaaacatgcaaatgatgcagcatactatttggctagagagggattaaaaagatatgatacttatctttttggagggtttcctctctttgcgcagaaggcaattgaggcagatctgcgacatttgtgctccttgtgaccttatggcgaagattcagcttctttggtcaagaaatcgaagtttcaacttaagggtctctttcaggtttggtgtttgtgaggaatttttcattgaattgggcagggccccttcaagttaaaaaaaaaaaaanaaaa

SEQ ID NO: 8860 - DNA, 638 bp, Gossypium hirsutum
  Clone ID: LIB3828-020-Q1-K6-G8
cggtcgcgtggggtccgaaggcccaacaattgatttccaatgcagtcgcaaccaaatctgatagcgccgctgcttcttcatcctcgaaaccagggcactgagcccttttactttttagaagtctctgcaagaagggtgtctggaagcaagaaatggagagggatcttcgtgtatgtgtcatgggcgaagatgtgggtcactatggaggttcatacaaagtgaccaaaggactggcaaaaaaatttggggaccttagggttcttgacaccccaattgctgagaactccttctctggcatgggaattggggctgctatgactggtttgagaccagttgttgagggcatgaacatgggatttctcctccttgcttttaatcagatctccaacaactgtggtatgcttcattatacatccggtggccagtttaccataccaatagtcattcgtgggcctggtggtgttggacgtcaactgggggctgagcattctcaacgtcttgagtcatactttcagtcaatccctggaatccaaatggttgcatgctccaccccatacaatgccaagggcttaatgaaggctgcaatcagaagtcagaaccctgttatcctttttgagcatgttttgctttacaacctc

SEQ ID NO: 8861 - DNA, 501 bp, Gossypium hirsutum
  Clone ID: LIB3828-020-Q1-K6-G9
cggacgcgtgggtttatgatcatgattaacactaataaatggagtacaataagaagcttgctttggtgttggcgatgatggttgtggcagccaccacaacggcaaccgcggctcgcaacgagctgacggaaactctttccatcaaagcaagtttgaactcgagcttgactaacatcatcaagaaacccttgggcaatattttcgacgttaatggcgaacctgtagtggaatgcaacccagatgatcaaaactgcattaaaaaatatggattttgcttgtttcagaacaagatttgctgtgataactgcacgtgcttcgggttgtgcgtgctttgcggacaaaaataaagacagtgactgactgatcaggaagggatatcaggaatcaatgttttattgtttttctttttatacctaactatggtgcttgctggtactgttttcatgttttgttgatgtttgcgtacttaattattaaattatcaataagatcgcatttatt

SEQ ID NO: 8862 - DNA, 642 bp, Gossypium hirsutum
  Clone ID: LIB3828-020-Q1-K6-H1
cttaatgctgacttgatcattcaaaacgaaaggtcatcaacagaaatgtccctagttcttctattgagattgatctcatggacgattttcttgagatggagcaacttgctgcattacctgataccaagaatgaaaatcaatttcttgaatcaaaagctacagtcaaacaatccaatgatggtgatagctctttgaaggctgagcttgaagccatgattcatcgaacaacagaacttgaagagaagttggagaagatagaagccgagaaagctgaactagaaattgctcttgccgaaagtcaagaaagtctagaagcatcggaactagagttgagggacaatgaattaaaattggaggagttgcaaagagagctcagcaaggcaagtgaagcaaagcaacatctcgagtctcaactcagtatcatggaaacagatgcagagacaatgtcagcgaagattgatgcattaggagcagaaattgaaaaggaaagggcactgtcagtgcaaatttcagctgatgcaaatgagtcaaagcagcttctcgagtctcaacttgttagcattgaagcagaggctcggatgatgtctgcaaaggttggttcattggaaacagaagttgaaaaggaaaaggcattgtcagcag

SEQ ID NO: 8863 - DNA, 640 bp, Gossypium hirsutum
  unsure (1)..(640): unsure at all n locations; Clone ID: LIB3828-020-Q1-K6-H10
ctttgaatgatcaccatgtcatgctangaagtactcttttgaagcctaacatggtgacccctggttccgactccccgaaggttgccccagaggttattgctgagtacactgtccgtgccttgcagcgtaccgtccctgctgcagtccctgctattgtgttcttgtctggtgggcaaagtgaggaggaggctacccttaaccttaatgccatgaacaagctccagaccaagaaaccatggtcactctcattctcatttggacgtgcccttcagcagagcactctcaaggcctgggctggaaaggaggaaaacgtgaagaaagcacaagatgctttccttgttaggtgcaaggctaactcggaggccaccttgggtacatacaagggtgacgcaaagattagtgagggtgctgcagagagccttcatgttaaggactacaaatactaagaatttagtcttgtggtctgtgtatcagagaaattttctgtattgatgattttgggggttttccgtttcttctcatggaatttaggttgtgaaatcagaccgtttcttctcatggaatttaagttgtgaaatcagactcaaataagcttggggggccttagttctcgctgagtgttcatggntttttgtttgct

SEQ ID NO: 8864 - DNA, 629 bp, Gossypium hirsutum
  Clone ID: LIB3828-020-Q1-K6-H11
cggtcgcgtgggcggacgcgtgggcggtttcctattatggatttgtcagtgatgtcttaaagctttctgagaaatatcagaaacgatttggtcctctacgatattttgttgctgggttcttcaagtttttgtgtttgccaacatacaactatgaagtggagtaccttcctgcagagaaagaggatcgagaaggtaaaacctctgctgatcgggaagtagttgacatgtctgacctgtacacagacgttataaggaggtcatacatagatggcattcctagagcctcgagtttatctagtattgattcaataatgactcctagccgaatgtctggaggcgagatggacacttctagtaatatgcatgccagcactgaaccatctgaatatgtacgaggccttgatcctaagactaaacggctgtcatctagcagaagcaatgtaacagctgagcctgaagttattcatcctcagttaccactctcatcgactctaaactggccacggaccagatcaaaatcaaggacagataaaggatggagtggattgactgcagcacatgatccttcgagatgttcttggggtaatgctgcaacaaatgatagagaggatatatcttcaacattgtcc

SEQ ID NO: 8865 - DNA, 622 bp, Gossypium hirsutum
  Clone ID: LIB3828-020-Q1-K6-H12
cggccgcgtgggctaaaagaaaacaaagagaataaataaaaaacccttctctttctttttctgcctttaattatcatacttgcctttttctttaattttcctttcaagttaggaagcatggtgtaccccaacgaatcccttgaagactctccccagaagaaatggggagaggaaagatcgagatcaagcggatcgaaaacacgacgaaccgccaagttaccttttgtaagaggcgcaatggtttgctcaaaaaggcttatgagctatcggttctttgtgatgctgaggttgctttgattgtcttctccaaccgtggtcgactctatgagtatgccaacaatagtgttaaagcaacaattgagaggtacaaaaaggcttctgattcctccaatactgggtcagttgctgaagttaatgctcagttctatcagcaagaagctgacaaactccgaaatcaaatccggaatttgcagaatacaaacaggcacatgctgggggagtccgtagggggattgcctatgaaagagcttaagagcttggagactcgtttagaaaaaggaattagcagaatccgttccaaaaagaatgagctgttgtttgctgaaatagagtatatgcagaa

SEQ ID NO: 8866 - DNA, 630 bp, Gossypium hirsutum
  Clone ID: LIB3828-020-Q1-K6-H2
cggccgcgtgggtttcaagaaggatactggtgatactagggagaccccagccattgatgtatgcaaagggctattgggagataaagctcggttgagcatattcgatccacaggtcactgtggaccagatccaaagggaccttaccatgaaaaatttgactgggatcatccccttcacttgcagcccatgagtcccacaactgtgaagcaagtcacttgtgtgtgggatgcttatgaagctacaaaggatgctcatggaatatgtattctaactgagtgggatgaattcaagaatcttgacttcaagaggatatatgacaacatgcaaaagccagcttttgtctttgatggccggaacattgtaaacgtggaccagctgagggagattggtttcatagtgtactcaattggcaagccacttgatgcatggctcaaggacatgcctgcagtggcataaatgatgcatgcagaggttatcgatgcgcgtcaatgtcagtttgattctttactacctatctttttgacaagttttattgtttccttgctttcccttccccatggtagccaagcatttgaaggcagtaaacggctcttcgttgtgccacacattgtattcaataatatttaccat

SEQ ID NO: 8867 - DNA, 410 bp, Gossypium hirsutum
  Clone ID: LIB3828-020-Q1-K6-H3
cattaagatatgcattgatggcaccaactgtaatttatgtgacgcaggtgttacatctaattgacagggaaagcctggaggtgaccaaactcatcacacgtggtaggtattcctgactttatacacttgagtgtttacagaaagagcgccgtgcctgtatgccttacgaaactggggaatgagccggattggttaatgggactacccctggctggaaaaattaacgacgctgatatgagtggtacccccaacatgggcctgtgtcatttgcctcgtccttagtaaccgaatctttcaaataattctcgtacattcatatggagcatacacagcctaccccatcagtcaataagtgaacggctaactagagagctctcactaacagaattgaaggctccacatccataaaa

SEQ ID NO: 8868 - DNA, 597 bp, Gossypium hirsutum
  Clone ID: LIB3828-020-Q1-K6-H4
gcgttcgctctcatgggatctctaatgtcaacttacttagtctcccatctcttagaatccgaccgggacctatgcgcctccgggtttcttgtgcggccaaacccgagacggtggacaaagtttgtagcatagtgaggaagcaactagcactacccgaagattcttctgttaccggagaatctaagtttgctgcactcggagctgattctcttgacacggtcgagattgtgatgggactcgaggaggagttcggaatcagtgtggaagaagaaagtgcccaaagcattgtcaccgttcaagatgcagcggatctgattgagaagctcgtggagaagaaagatgcttaaaacaccattgaaaatggctggctgtccggcaacgagtccttaaaaaatatatcccctgtttttttctttttggctactcctatgttgttttaatgttagttttgtttttgttgcttatggaacatgtaaaccaacatgaagtttggctgtttcttcattgtggttacagttttaagggtagaaaactcaaaagtgtctcatttccatgttgtcttgagccatttgttctatgaaatctcggatttaattt

SEQ ID NO: 8869 - DNA, 629 bp, Gossypium hirsutum
  Clone ID: LIB3828-020-Q1-K6-H5
tagcaatgtgcagggacagtcgatggtacctggagctgcagctactgaaattgagttggctagaagattgaaagagttctccttcaaggaaacaggattggatcagtatgccattgccaagtttgctgaaagttttgaaatggtaccaagaaccctagcagagaatgctggtctcaatccaatggatatcatatctaagctgtatgaaaaacatgcatccggaaataccaaagtgggtattgacttggggggaggtgactctgaggatggtgtttgcaaagatgtgtcaatcctgaatatttgggatctttatgtcaccaagtttttcgctctcaaatatgctgctgatgctgcctgcactgttctacgggttgatcagattataatggcaaaaccagctggaggtcctggaaggagagagcagcctgcagggatggatgaggactaagtcttctgatctgcaacattatatgccattcctttctcttttttctcatcagggctggttcggactttgttaggcatcttcggagatgctaaaaacactttgaaacaaagtttttcttttgttttgaaaattgttatggttctgtgttttttgttttgtgctaatcaattctgtaattttt

SEQ ID NO: 8870 - DNA, 630 bp, Gossypium hirsutum
  Clone ID: LIB3828-020-Q1-K6-H6
gaagtgttatacctcctcctgctacttattttgagaagaacaagctgttgtgaaaaagttgacatactttttatcgccgatgaggttatttgtgcatttggaaggcttgggacgatgtttggatgtgacaagtacaatattaaaccagatcttatttcactagcaaaggctctttcttctgcatatatgcccattggagcagtcatggtgagccctgaagtttcagaagtcatttattctcaaagcaacaaacttggtagtttctctcatggattcacctactctgggcaccctgtatcctgtgctgttgcaattgaagcactcaagctctacaaggagagaaatattgttgagaaggtgaagagcatttcaccgaggtttcaagatggtctaaaatccttttctgacagtcctattgttggagagatcagaggtaccggcttgattcttggtactgagtttacagacaacaagtcgcctaatgatccattccctcctgaatggggggttggtacatattttggagcacaatgtgagaaacatgggttgctagtacgtgttgcaggggacaacataatgatgtctccaccatttataattactcctcaagagttgatgaattgataagca

SEQ ID NO: 8871 - DNA, 513 bp, Gossypium hirsutum
  unsure (1)..(513): unsure at all n locations; Clone ID: LIB3828-020-Q1-K6-H7
naaaaaaaaaaaaaaaaaaaaaaaaaaaaaaaaaaaaaaaaaaaaaaaaaaaaaaaaaaaaaaaaaaaaaaaaaaaaaaaaaaaaaaaaaaaaggggggcccgttttaaaggggcccggcgcttttgtgacgctccaattttacgtccctcgggcttgctatggggttaacctttatttatatggccccctccgttggcatttccactgggcccgcccttgtaaaacccctggcgttggccaaacccttggcggctcccatacttttttccccttgtaaccacttggcctttttggccagttgggcccttcccatagacggcccccaccaattggccctcccgaactggcgcctgggcctgctccctgatggggcccctccttgtcgggggcctttaagttcccccgctttgtggcctctcccttggcgagccccctaactccgcctccctttggttcctgccctttttttttgcttccttcccttggtttccccgttcggcggttttccggg

SEQ ID NO: 8872 - DNA, 625 bp, Gossypium hirsutum
  Clone ID: LIB3828-020-Q1-K6-H8
gggaaggaccttttatagttactaatgtctctcatggtgcagtggacataaaagctccaaacaagaccaaaatctacaagattaatggtgtcattgtttaagacctttctatgaaggttttcaggaacatgatgttgagaccgctaatcttgagatccttatctacgggacttgataggggcattttctctggccaaagacgttaaagaaaatcacttacggagaggcaactccgaattttatttttgtttttcgctttgctttcatttcctttttcccttctttatatttatttattattgttgattttatttttttatttcctttttaatttatttttattttaattttcgactagagttggggcacggctctcctggtgtcagggtcttgtcgaactttgatttttttgatcgtttgtccttccatcgatgtcaatggttgttccttaactctagtcgaaaaataaaatataaaaataaattagaaaggaaataaaaataaataaaatcaaagtgaaatgaaagagaaatattgaaatggaaacgaagcaaaaaacgaaaataaaatctgaagttctcagataggtgcttttctttaatgtctttggctagacggaatgccc

SEQ ID NO: 8873 - DNA, 626 bp, Gossypium hirsutum
  Clone ID: LIB3828-020-Q1-K6-H9
ggtaaaaccaagtccaatatcttcttcaaggatcaagctggaaagccttaccgaggatgtctttcactggctgttgatgagcttgctgttcttaatgggaagactccaatgcaagtgtatcaggatttctgcgaaagcttcaagtcggctttttcggctttcatcggttctacgatcatgggaatcacaatgggtctcggaccagatggtgagcttcggtatccatctcaccgtgggtttgccaaaagtgacacagttccgggagctggggagttccaatgttacgacaaaaacatgcttcaccttcttaagcaacatgccgaagcatgcggaaagccaaagtggggactaggtggccctcatgatgcacccgctaacagcgagttgcctacagcaaacaccttcttcaaggatcatggtggatcttgggaaagtccttatggtgatttctttctttcttggtactcaagccagctcatagctcatggagatcgcctactctcacttgcctcttcggttttcagtgatagtgcagtgaacattttcgggaaagtcccgttgatgcactcttggcacggaacccgttcacatccttccgagctcacagctggcttctacaacactgc

SEQ ID NO: 8874 - DNA, 593 bp, Gossypium hirsutum
  unsure (1)..(593): unsure at all n locations; Clone ID: LIB3828-021-Q1-K6-A1
cgttggtctgtttcccaaaactcctcatcaaanacttcataaactcaatttccccttccgcgacgccgtcgtttccgccgtctccttccgtttccgactggtggaaaaccgtctctctttacactgaccagactggagccaacgtttcgcggaccgtcgtcattgctaaagaacactccgatacgggttactcccacggttctcacctcacgcgcctttcagtccaacaagttatcgccaccgccgtcgaagccgctcctttccccgtcgaccaccgtaatgggatctacttaatccttacctcccacgacgttaccgttgaagatttttgccgtgccgtttgtggcttccattacttcacgttcccatccatggtgggtcacactttgccctacgcttggatcggcaactcgggtaaacaatgccccgaggtctgcgcttaccccttcgccgtcccgggctacatgggcggcggcggtccgggttcgttggccccaccgaacggagacgtcgggttggacggcatgatcagtgtgatcgcccacgagttagccgagctctccacaaacccactggtgaacgcatggtacgcc

SEQ ID NO: 8875 - DNA, 641 bp, Gossypium hirsutum
  unsure (1)..(641): unsure at all n locations; Clone ID: LIB3828-021-Q1-K6-A10
ctttaaaacccaaattttgtttattgcattcacagtgaaggaagggaaccacttctaatatatttctcctatgatacagagagacactactgggttgactactgagaacaaggaactgaaactacggctacaggctatggagcaacaagcgcagcttagggatgctttgaatgaaaaattgaaggaagaagtgcaacggcttaggatacaagctggtcaagtgtctgctatgaatggaaatcctttcaatagaggactatctcctcaatatttaacccaccaacctgctccacatcactttggcgtcctgcagacaccgcatcaacaacaacagcagcagcagcagcagcagcagctgcagatgcctcattcatccaccaataacccgactttgaacggacagcctcaacctcactttatggattttaaccagagggcatagtttcatgttggaaggaaatgcttggtaagcataagaaaatccaatcactgtaagcatcttgtacatagaaatatgtggtatgcattgcaggttctgggattagtcccttttatctgtttctcatatggctntatcaccattagagtagagaaatgaattgaaatgtgttggtcatagagattaggttctaattatatag

SEQ ID NO: 8876 - DNA, 645 bp, Gossypium hirsutum
  Clone ID: LIB3828-021-Q1-K6-A11
atgactttcaaaagtcattcgacatgctaggggaatacgacatgagcaagaaggaaaataccttttagaactaaagacctggctaagcggtgcattcacgagtcaacaaacatgtatagactcattcgcgcaatcaagcaacgaatcatcgcagaagatgcaatcaatcttgaagactagcatggagattactagcaatgctttagcaatgcttaatgggttatccaccatcgtgaaggaacttaacattccaaatgtcggcaacatcgacaccacgggggtcaatcgtaagcttttgtcagctgaggacatgcctgagtggattagtcaagctgaccggaaactccttcaagcaaaaccaatggatttgaagcctaacgttgtagttgctaaagatggtagcgggaaatatgatactattaacaaggcattggctgaagtccccgtgaaaagtcccgatcgatttgttattcacattaaggctggtacttacaaggaaaaaatcaacgtgaccaagcagatgactaatgttgtattcatcggtgatggcccaaccaagaccatcatcacaaatgacattagtgtcgctaagaatccaccggttagaacataccgtactgcaactgttggtgtggatggggctag

SEQ ID NO: 8877 - DNA, 629 bp, Gossypium hirsutum
  unsure (1)..(629): unsure at all n locations; Clone ID: LIB3828-021-Q1-K6-A12
cccacgccgtccgggaagtcccngaagactatactggagaagagttaatgttcacaacttttttgcggctctcctcggaaacaagtctgctatcaccgggggtagcgggaaggttgtcgatagtggccctgatgatcatatcttcatatactacactgaccatgggggtcctggtgtgcttgggatgcctaccttcccttatctttatgctgatgacttgattgatgttttaaagaaaaagcatgcttcagggacttataaaagcatggtattctatcttgaagcttgtgagtcaggtagtatctttgagggtcttcttcctcaggggttgaatatctatgcaaccacagcatcaaatgcggaagagagtagctggggaacctattgtcccggagagtacccaagtcctcccccagaatatgaaacctgcttgggagacttgtatagtgtcgcttggatggaggacagtgacatgcataatctgcggacagagactttgcaccagcaatatgaacttgtgaaaaagagactatcaatggtaattctgcgtatggctctcatgtcatgcaatatggtgatgtagggcttagcaaggacagtctctttgcatacttgggtacaaaccctgc

SEQ ID NO: 8878 - DNA, 646 bp, Gossypium hirsutum
  Clone ID: LIB3828-021-Q1-K6-A2
caaactttgacctacaggagattgtgttagatggtacaaaagtaaaagtactttcaaggaaaaagattcgtcatctgaatctgaaaaaaccactgagaaccaatttgaagatattgaatttgaaggcctgggtgaaatatcccctgaaactcataaatatattcttcatttgcagtctcgtctagcttcagtgaaaaaggaactacatgaattaaagaagaaaaatgaggccatgcaaatgcaacagtttgttggggaagaaaagaatgatttacttgactacttaagatcactacaacccgaaaaggtagttgagctttctgaaccgtcttcccctgaattgaaagaaactatccactctgtagtccatggtctccttgccactctttctccgaggatgcattccaaggttcctctgtcagagaacacggcaaccagaactgtaaatattggaagtgaaaattgttccgaactcgttgaggatacttcgctccagctacagccgttaatttccttaacacgagactatcttgctcgtcttctcttctggtgtatgctgttgggacactaccttagaggcctcgagtaccgtcaggaactaatggaacttttatccttgactagcagtgtcaacaataacgactgt

SEQ ID NO: 8879 - DNA, 629 bp, Gossypium hirsutum
  Clone ID: LIB3828-021-Q1-K6-A3
ctcttctgcacctgcaatacaaaacaaatcgaagggcatccccgtgcttttgctcccttacttggcagccatgattattccagagaagaatcgcagagaaatctgcaaatacctatttcaagagggagtttgctatgcaaagaaggattacaatcttgcaaagcaccccgagatcgatgtacccaatttgcaggtcattaaactgatgcagagcttcaagtccaaggaatatgtccgcgagacttttgcttggatgcactactactggtaccttactaatgatggaattgagtttctcagaacttaccttaatcttccatccgaaattgttcctgctactttaaagaaatctgcaaggccaccgggtaggctaggcggcccacctggtgatcgcgctcggggtcctcctcgctttgaaggagaccgaccaaggtttggtgacagagatgggtaccgtggaggtcctcgtgggggtgactttgttggtgataagggaggtgccccagcagatttccaaccatcattcatgggccctggtggaaggcctgcctttggtcgtggaggtggaggttacagtgcagctccatctggttcgggttcgggttttgcttgaaccaatgcttatcttt

SEQ ID NO: 8880 - DNA, 513 bp, Gossypium hirsutum
  Clone ID: LIB3828-021-Q1-K6-A4
cactatcactgctgcacatccatgtaaagctcctaggtttcagcctccactccatcactccttggcccaataacccctccattttctacctcaacggcaaacgaatctcacgcgttgaaatccttggtgtagtcacttcccgtgactataaacccaacaaattccttagattcaccctcgacgacggcacccattctattacttgcattctctggcttaaccacctcacttcccctttcttcgcttcccgtcaacccgctacgcttcgagttatttctgatttggctaaatgcttcgcggatgatatccagtttgggaaagtagctagagttcgtgggagggttagtagctatagaggtgatttgcaggtcactgtttctgatgttgttattgaaagggatcctgatgctgagactttgcatcgccttgattgtattagtttgggtcgccggtgttacttcggttagctccggccaagattaaaagcaaattaattgaattgggcagttttgt

SEQ ID NO: 8881 - DNA, 632 bp, Gossypium hirsutum
  Clone ID: LIB3828-021-Q1-K6-A6
ttgctctgtatattgaaattttctttctcgattttctctttagccaaaaaagagcagatcttcgtcaagactctaaccggcaagacgatcactctcgaggtcgagagctccgacacgatcgacaacgtgaagaccaaaatccaagataaggaaggcatccctccagaccagcagcgtctgatcttcgccggaaaacagcttgaggacggccggaccttggccgattacaacatccaaaaggagtcaactctccacctcgtcctccgtttgcgcggtgggatgcaaatcttcgtgaaaaccttgaccggcaagacaatcactctcgaggtcgagagctccgacacgatcgacaacgttaaggcgaagatccaagacaaggaaggcatccccccagaccagcaacgtctcatcttcgccggaaaacaacttgaagacggccgtaccttggccgactacaacatccagaaggagtcaacgctccatcttgtccttcgtttgcgtggcgggatgcaaatcttcgttaagacgcttacgggaaagacgatcactctcgaggtcgagagctctgacacgatcgacaacgtgaaagccaaaatccaagacaaggaaggcatcccgccagaccagcaacg

SEQ ID NO: 8882 - DNA, 644 bp, Gossypium hirsutum
  Clone ID: LIB3828-021-Q1-K6-A7
cggccgcgtgggcggacgcgtggggattaatcaaaggatgaagacattacagaagctggttcccaattccagcaagacagacaaagcttcgatgctagacgaagtgattgaatatctgaaacaactgcaagcacaagttcaaatgatgaacaggatgaacataccacagatgatgttgccgatggcaatgcaacagcaactccaaatgtcgatgatggccccagcgatggggatggggatggggatgggtatgggcatgggcatgggcatgggtgtcatggacatcaacactatgggccgtcccaacatcaccggcatctcacctgttatgcctaatcctttcatggctatgacctcctgggatggctccggtgagaggttacaacaagctgcctcagcagcagccatgatgccagacccgctttccacattcctggcttgccaaccacagccgatgaccatggatgcttacagtcggctggccgccatgtatcagcagatgcaacaaccaccagcgtctggttctaagagctaagcttcaagccagtactttttagctaatcttttctatacagaaacctgaagttgggtttcaattcttatacatttccctagcgtttagggtttggtacaatctagttcat

SEQ ID NO: 8883 - DNA, 627 bp, Gossypium hirsutum
  unsure (1)..(627): unsure at all n locations; Clone ID: LIB3828-021-Q1-K6-A8
aaaaataaaaataaataaagcttcgttaaacaaacatggcagacagtgaggatataccagagtcaaccgttcataacatattggagcaagataccctgaagtgggttttcgttggtggcaaaggaggtgtgggtaagaccacttgtagctcgattatttcgatgctcttggctcgggtgcgaccctctgtcctgattatttccaccgaccctgctcataatctcagcgatgcttttcaacagagattcactaagactcccactttggtctatggcttcaagaatttatatgccatggaggtagatcctagcgtggataatgatgaattcgggacggaaggaatggatagtttattttcagacttggcgaatgcaattccaggaattgatgaggcgatgagctttggagagatgcttaaattggtgcagtgtgaaaatcgaaattttgtctctgtgctaacaccagatcactaggtcccatgaagacattcatttcgagctctactcagcatttatttaaggtgagaaaccgatattcttattatatcttgaaggagaaagcctttgtaggttttctggttagaatggccctttaaaagagtgcatgcaccttcngttatttgttcct

SEQ ID NO: 8884 - DNA, 628 bp, Gossypium hirsutum
  unsure (1)..(628): unsure at all n locations; Clone ID: LIB3828-021-Q1-K6-A9
cgaaattgaaatctcccgaaaataatataaaataaaataaaaaatgttttttttgaattttttttctttttctggatttcttttcctttctctgttggagatgaatggagaaggaaaagaaagtaaggaagtgaaaatggaggaagcagttaacaaggagcgcgtggttttcatgtggggatatttgcctggcgcgttacctcaacggacgccgcttttgtcgccggtgaatgtacggattccggcttccgcaggttgttcttggaccgacgtctgtggtggtggttgtggattcgccatggccatttctgattcagggaagctcatcacatggggttcaacagatgatttgggtcaaagctacgtcacatccgggaagcatggggaaattccagagccatttccacttccaactgaagtttctgtagtaaaagcagcagctggttgggctcactgtgctgcagttacagaaactgcagaagtttatacatggggngtggaaagagtgtattccctcagggaaggtatttggtgatctacccatggggacaagcttagagaaggatgtatttgaaagacagaactcacttttggcggaacaagtgagccctncgtctcaaggctcaat

SEQ ID NO: 8885 - DNA, 650 bp, Gossypium hirsutum
  unsure (1)..(650): unsure at all n locations; Clone ID: LIB3828-021-Q1-K6-B1
gtcattttgtcatcttcaggtgttgtgcatcgtgacttaaaaccagagaacttcctttttacttccggtggtgaaaatgctgacatgaaactaattgattttggtctttctgactttattagaccagatgaaagactcaatgatattgttggaagtgcatattatgttgctcctgaagttttgtacagatcttatagtatggaagcagatatatggagcatcggagtaatcacctatattttgttatgtggaagcagaccattttgggcacgtacagaatctggaatttttcgttctgtgctaagatcagatcccaactttgatgatatgccctggccatctgtctctccagaggccaaagattttgttaagagactcctaaacaaggatcaccgaaaaagaatgacttctgttcaagctctagcgcacccttggttgcgggatgacagtcgtccaatccctcttgatatattgatatataggttactcaagtcataccttcatgcttcaccattgaaacgtgctgccctaaaggctctttcaaaagcattgactgaagatgagctggtttatctcagggcacaattcangctgttggaaccaaacagagatgggagtgtgtctctagaaaatntaaaatggcacttgct

SEQ ID NO: 8886 - DNA, 636 bp, Gossypium hirsutum
  Clone ID: LIB3828-021-Q1-K6-B10
ctctaatacacccactgtaaaaaaaaagaaaatctgtcagcggtgaaaatgggtagccttgaaactgagagaacaaccacaggatgggctgccagagatccttcaggagtattgtctccttacacttacactcttaggaacactggtcctgaggatgttttcgttaaggttatgtgctgtggaatctgccacactgatcttcatcaagccaaaaatgatcttggcatgtcaaactacccaatggttcctgggcatgaagtggttggtgaggtgttggaagttgggtcagatgtaagcaagttcagagttggtgatattgttggtgttggttgtcttgttggatgttgcagaaactgccgaccatgcgactcagacaatgaacaatactgtctcaagaagatctggtcgtacaatgatgtttacactgacggcaaacccacccaaggtggctttgctggttccatggtcgttgatcaaaagtttgtggtgaaaatcccagaaggaatggcaccagaacaggtggcaccgctgttatgtgcaggggtgacagtttacagcccattgaatcactttggtttaatggggagtgggttaaggggaggaatattgggacttgggagtgtagggcacatgggg

SEQ ID NO: 8887 - DNA, 646 bp, Gossypium hirsutum
  Clone ID: LIB3828-021-Q1-K6-B11
tgcctctgtaactccatcaacagttgtgattcctaaagggacatatttattatcaaaagtaaacttagaaggtccatgcaaggctcctattgagattaatgttcagggcactatacaggctccggctgatcctagtgctttcaaagaccctaattgggttagattctatagtgttgaaaatttcaaaatgtttggcggaggaattttcgatggtcaaggaagcattgcttatgagaagaatacttgcgagaatcgtgaatttcgttccaaacttcccgttaatataaggtttgactttgtgaccaatgcattgatacaagacataactagcaaagacagtaaactattccacattaatgtttttgcttgcaaaaacattaccctcgaacgtttgaagatagaggcaccggacgagagcccaaacacagatgggattcacatgggcaaatcagagggggtcaatattattgcctctgacattaaaactggtgatgattgtatttctatcggagatggcactaaaaatatggtcataaaagaaataacttgtggaccaggacatggtataagtatcggtagtcttggaaagttccaaaatgaagagccagttgagggaatcaaaatctcaaactgcaccattactaat

SEQ ID NO: 8888 - DNA, 635 bp, Gossypium hirsutum
  Clone ID: LIB3828-021-Q1-K6-B12
tgcaactcaaacagtcggagttgaccttgggcaagggctgcgagaagttgatattaagaagtacattaaagtagagaaagtaccaggtggtcagttggaagattctaaggtactcaagggagtgatgatcaataaagatgtagttgcgcctggcaaaatgaagcgaaagattgtcaacccacgtattattcttcttgactgtccccttgagtataagaaaggggagaaccaaacaaatgccgagttggttaaggaagaagattgggaagttcttttgaaaatggaagaagaatacattgagagcctttgcttgcagattctgaaattcaaaccagacttggtggttacagaaaaaggacttagtgacttggcatgccattatcttagcaaggctggtgtcagtgcaattaggagggtgagaaagactgacaacaacagaattgcaaaggcatctggagctgttattgtgaatcgtcctgacgaattgcaggaatccgatgttggtactggagctgggctatttgaggttaaaaaaatcggggatgagttctttgcattcattgttgattgcaaagatccaaaagcttgtacggttctcttaaggggtgctagcaaggatctcctgaacgaggttg

SEQ ID NO: 8889 - DNA, 356 bp, Gossypium hirsutum
  Clone ID: LIB3828-021-Q1-K6-B2
gccgcagcagttctcctccgccgttccagtcccctcccatgtccgactagatgacgacgaaacgaggacgctctctgacgactctcgcaacggtacgagcgtatggcgtgcgcggagtgctgaacgtgggagtgtggaggctagttgctgctagggtttctgctgttttaggtcaattgggccctataattgggtttagcttggcccaagttttattgggttcaattgtatttaatttgggctgtgtaaataattttggattggtcttattttgaatgggccgggcaaaaataggctattacagtcactatctaatgtaatttggcataatatcacacgatgaaagtagaggcacc

SEQ ID NO: 8890 - DNA, 637 bp, Gossypium hirsutum
  unsure (1)..(637): unsure at all n locations; Clone ID: LIB3828-021-Q1-K6-B3
ggcttctgcagaacatagcttcctctttgngaacatgttatctgaaaagaatcctgcaaaagaaaatggtcctccaagtggctctgaccaggatgttgctatggctgacactagtccaagttcagtcaaagcctcaccaagtgtaaggagtccatgtttcattgagggggtctctaaatcatcttatgtaaagcaggcatctgatcttaaaaattcttctctgaaggttatcaattgccatgattcagttatttaccttctagcgcctttgagatatgccaccatttatggatgctctgatgctactatagttcttggagctgttggcaaggcagtacgagtcgagcactgtgaaagagttcatgtgattatagctgcaaaacgggtctgcattgccaattgtcgtgagtgtgtattctttttgggagtgaatcaccgcccccttattgttggcgataaccacaagctacaggtggcaccgtataacacattattctcggttggaagagcacatgactgaagttggcatcgaggcaactatcaatagatgggatgatactttggaacttgggatgattgatccacacaattcattatctcatcctgcgggcgtttctgatgctcaagctgagtcagc

SEQ ID NO: 8891 - DNA, 636 bp, Gossypium hirsutum
  Clone ID: LIB3828-021-Q1-K6-B5
agccccacacttcaaagttttttttttcttttcctatctctgtttaaaatctgtttcaagggaaagggaggaggaaaattttataattttttgagggttttttaagaataaatagaaaactatggcgaacaatgctgctgttattggtatctgttcagtgttcttggtggcagcagtggtggcaacagtggtgggtgtcacacatttaaaaaacaacggtgattcgaaaagcggtgaaatatcgagttcgacaaaagcagtgcagacggtttgtcaacccacacagttcaaagaggtatgcgagaagagcctggagtcatctaattccaccgaccctaaagagctgataaggacgagtttccaagcagcgatagaggaaataaagaaagtgttggcgaattcagcgacgatacaagacttgaataaagatgacaacaacaaagcagcccttaaggtttgtaaagaagtgttggatttatcaatagctgacctgcaactttcatttgataagctggggggatacgagatgagtaagatcggtgactacatactgaacctgagggtgtggttaagcggtgccttaactaccttacaaacatgtgtagactcatatgcggaagtaaataatgaacaagc

SEQ ID NO: 8892 - DNA, 634 bp, Gossypium hirsutum
  Clone ID: LIB3828-021-Q1-K6-B6
gtcataagatttttttgattttgcattcttttttgaaggtgtagtttgcaaatggcaaaaggtggcaaaggacggcgtagaacagcaagccagcaaaccccattcttgttgcattgtcgccgccaaggcatctctggagatttacaccccaaaaaatgttccaaagctttggataatagggattgggaagatgcaacatgttctgtttgcatggagtgccctcacaatgctgttcttcttctctgttcatcccatgacaagggctgtcgtccatacatgtgtggaactagcttcagatactcgaactgccttgaccagtacaagaagttccacactaaagtagttccattcaatcatgaagaacggttgcatacttctattgataattcagttctggctgccggttctagtcggcctgttgataagtgtgaagtaacagaaatatcatgtccactttgcaggggtcaggtaaaaggatggactgtggtggaacctgcaagggaatatttaaatgccaaaaagagaaattgcatgcaggatgactgcacctttgttggtacttttaaggaattaaggaaacacatgaaagcagaccatccatgtgctcagccacgtgaagcggatcctaccattg

SEQ ID NO: 8893 - DNA, 658 bp, Gossypium hirsutum
  Clone ID: LIB3828-021-Q1-K6-B7
gattttcccatctcatgtagctagcacacttggtcgaagctcccgtgaaccaaaatacaagattgagttccattctgaagactctccctaccatcccgatgatgatcaggagtctgtttttatgcctaataaagatggaaagaattttttatgtttcttgcctaaggtggagaaaaccaagactctaaagccagttactcagcagaacgttagtaccatgattgtggaatctgagaaacaggttaaactgaagacgcctgatgagctgctggaagtactgaaagatcgatgctttatcagacaagagggttggtggtcttatgaattttgctatcaaaatcggttacggcaaatacatgtggaagaggataaggtggttcaggaatttgtcttgggtgtatatgatgaagaggccactgctgccttcaaccagaatctctctgacatatctgcattaaaagatcctcgctcaaaagatgcatcacaaaggtatcatgctcatcaatatacgaatggaacccaatgtgatcttactaatcagccacgagaaactgaggtgagatttgtctgctcggagccaagagcaatgattagttcaattacagagttatccacgtgcaagtatgcacttactattcaaagccctatgttatgcaaa

SEQ ID NO: 8894 - DNA, 646 bp, Gossypium hirsutum
  Clone ID: LIB3828-021-Q1-K6-B8
ggtaaatttccggtgcaccgatagttcggtcggggttgaaacacagctttgtagtttggcgacggtaactcaagttatcgacccgaaacttcatcagcacttagagacgctaggtggaggtgattatctctttgctttccgaatgctaatggtcttatttcgtcgagagttctcattttgcgattccttatacttatgggagatgatgtgggctctggaatatgatccggacttgttctaccagtacgaagattcgggttcagatatggagaaaaccgaaggtgctaaagtaagacagaaatcaacacgaaagtgcgggaaatacgagagggaaaatatgaaggtgaaaaaccctgaagctcatcttcccatttccgttttcctcgtcgccagtgtcttgaaagacaaaagctcaacgctactgcaggaagctcgcggtctggacgatgtagttcagattctgaatgacataactgggaacttagatgccaagaaagcatgcataggggcaatgaaacttcataagaaatacttaaaaaaggcgcaggcaactccttcaactcagaagctctttccattcaccttgtgatcacaggcacaggcaagtccttcaactcaaaaactctttccattcatcatgtgatca

SEQ ID NO: 8895 - DNA, 635 bp, Gossypium hirsutum
  Clone ID: LIB3828-021-Q1-K6-B9
ctacgattcaggtgagttacccgcttttatccttttcttttctttttataaacagtccaaaaaaaatgaaaaaagaaagaagaaccacgcaaaaaaaaaacagtgaaatattgggtcgaatcgaaagagaaaaaaaaaggaacaatcacctctttgctttgaaaatttttgattaatattctgtaacctcttttttgtatttcaaatctcttttttgtattcaaaataaagaacaaaacccccaaaataccaaatcgttttccccgttccaaatgatagattcaggctttttaaagccgatctaccaaacattcattccatattttttttgttttttgttcctttgtttatttttttcccatcattcgcatgctttctcttgcccttgtattcgtttctgttacaggtgccatgcgacgcgtggaagaggcgacagtcaggggcgtggtggccgaggcggcatgcgtgggaaagccaatggtggaagcggtggctgaagaagggggagcggctggaggcttggggcttgctaaaaatttttaagattagctgggttagggtttagttttaggcctattgggtttgggcttgtaaaattatttgctgggctattatattttatttgtttatgggcc

SEQ ID NO: 8896 - DNA, 245 bp, Gossypium hirsutum
  unsure (1)..(245): unsure at all n locations; Clone ID: LIB3828-021-Q1-K6-C1
gagaaaaaagnaatgcttacattcattcctgtgaatagcggtccaaactgccatgagcgatcggaggatgtgcagtaccatcaataatagtttttgagtactactaattgttctgttccttggcagtctgtgagtcgatacattttcatgtggtctttgtttaacccaattttggcctattgtgtgcgttacgcacgtaaaaccttcatggatttgcttttaggtctctaatcgtttcaggcatt

SEQ ID NO: 8897 - DNA, 622 bp, Gossypium hirsutum
  Clone ID: LIB3828-021-Q1-K6-C10
gcgtggtatcaccattgatattgccttgtggaaatttgagaccaccaaatactactgcactgtgattgatgcgcctggacaccgtgactttatcaagaacatgattactggtacctcgcaggctgactgtgctgttttgattattgattccaccactggtggttttgaggctggtatctccaaggatggtcagactcgtgagcatgctttgcttgcttttacccttggtgtcaagcaaatgatttgctgttgcaacaagatggatgccactacccctaaatactcgaaggctaggtatgatgaaatcgtgaaggaagtctcttcctacttgaagaaggttggatacaaccctgacaagattccatttgttcccattctggttttgagggtgataacatgattgagaggtctaccaacttggactggtacaagggccctacacttcttgaggctcttgaccagatcaatgagcccaagaggccttcagacaagcctctccgtctaccacttcaggatgtgtacaagattggtggtattggaactgtcccggttggtcgtgttgaaactggtgtcttgaagcctggtatggttgtgacctttggtcctaccggtctgaccactg

SEQ ID NO: 8898 - DNA, 637 bp, Gossypium hirsutum
  unsure (1)..(637): unsure at all n locations; Clone ID: LIB3828-021-Q1-K6-C12
gtcgacatcaaagcctcattgctcaatcagnatcaccttaaacaaacacatccagcaaaccctcttatcgcctcacaaaacaggaaacaccctccagaacgccaccgttttagaccccgcctatgccggttacagtttcgaccgttgcagaaaagttgacctgaaattctctgaaagaagaacaatcgaatggaaacctaaacccaataaattcttgtttgccatttgcttgtcgggtcaaatgagtaaccatctgatttgtttggaaaaacacatgttcttcgcggctgttctaaatcgggcattggtgattcccagttcgaaattcgattatcagtacaatcgagttttggataccgagcacattaacgattgtgttgggaaaaaagctgttatcccattcgaagacttcatggaaatgaagaagaatcacgctcacattgataggttcatttgctatttctccagcccgcatccgtgttacgtggacgaagagcatttgaagaagttgaggtcattaggaatttcgatggggaaattagagagtgcttggaagagtgaggatattaagaagccgagtcaaaaaacgattaaggatctggaagagagtttgcttcggatgatgatgtgatagcaa

SEQ ID NO: 8899 - DNA, 649 bp, Gossypium hirsutum
  unsure (1)..(649): unsure at all n locations; Clone ID: LIB3828-021-Q1-K6-C2
gngggggaagattgagatcaataggattgagaactcaagtaacaggcaggttacttattcaaagagaaggaatgggattatgaagaaagctaaagagattactatactgtgtgatgctaaagtttctcttattatctttggtagttctggcaagatgcacgagtattgcagcccttctactaatttggtcgatattttggaccaatatcagaagacttccgggaagaagttatgggatgctaaacatgagaatctcagcaatgaaattgatagaatcaagaaagagaacgataacatgcagattgaactgaggcatttgaaaggggaggatatcacctctttgccttacaaggagctgatggccatagaggatgcccttgaaaatgggcttacctatgttcgtggcaaacagatggatgtccttgataagacatggaaaaataccaaattcctggaggaggactacaagcagctcagtttcattctgaatcaacaacaagtcgcttatgaaagtgcaagagagcagatggatcatggataccagcgagcccgggactacaactcacagatgtcttccaccttccaagtgcagccaatgcagccaaacttacaagagagaatgtaataacactgtggattggggcttgct

SEQ ID NO: 8900 - DNA, 638 bp, Gossypium hirsutum
  unsure (1)..(638): unsure at all n locations; Clone ID: LIB3828-021-Q1-K6-C3
nganagggctacatatttctgatgaagctgtcaagnacattcgctccttggttatggaaagatatgggtcccggtttaccccagaaaatgcatgtaagtattataagaaggtcaagaatgctcaagaagcacatgaagcgattagacccaccaatattcggaggttaccatctatgcttgttggagcacttgatgaagattcattgaagttatacactcttatttggtcaagaacaatggcatgtcaaatggaaccttcaatcctagagcagatacaacttgaaactgggaattgtgatgagtccatcattttccgatcttcatgctcaagagtagagttccttggttatcagtctgcttatcaggatgtggaatctggaacaatcagatttaaggataatgaagccagccataatgctgaggcttttggcattcttagttccttgaagaagggggatcaattatgtattggtgaagtagaaatcaagcagcatcatactcaggcaccaccacggtattctgaaggatctttggttaagaaactggaggagcttggaattggtagaccttcgacatatgcctcaacattgaaagttttacaggatagaaattatgtgacagtaaaaagtcgtgtactg

SEQ ID NO: 8901 - DNA, 649 bp, Gossypium hirsutum
  Clone ID: LIB3828-021-Q1-K6-C4
aaagagaaatccctcttaaaacagcctcagtgaaacgtagtgagagaggaaaagcaaagattttcagtggaagaaagctagcaatttgaatcggtgtcgtacggaaatgttcaggaaccagtacgataccgacgtcactacatggagcccagctgggcgattgtttcaagtggagtacgcgatggaggccgtgaagcagggttcggcggcgatcggtctccgatccaagacccatgtggtgttgggttgcgtcaacaaggctaattccgaattgtcttctcatcagaagaagatcttcaaagtcgacgaccacattggggtcgccatcgccggtctcaccgccgacggtcgcgtgctctctcggtatatgcgaaacgagtgtatcaactacagcttcacttacgaatcgccgcttcctgttgggagactcgtcgtccagctcgccgataaagcacaggtttgcacccaacgctcttggaaacgaccttatggtgttggcctgttggtggctggcttggatgaatctggggctcatctttactataactgtccaagtgggaattacttcgaataccaggcttttgccattggatcacggtcacaagctgcaaagacatacttggaacggaggtttgagaactttacagac

SEQ ID NO: 8902 - DNA, 646 bp, Gossypium hirsutum
  Clone ID: LIB3828-021-Q1-K6-C5
gccatttctcattcacaaagcctgccatgccaccacatcctcagcattcgtatcctcatatgatggctggaggccatttgttgctgatgaacagtggagaatgcctgctggagaatataacactgataatcagcatggtgggtggatatcaggaagaaatccatcaccttgtggtccattgtttgtccgggaagcaggttactttagaccacctgttgaaagaccatcctcaaatgttgggttcccccttgcttctgccaataatttaccagctggtgctccaaattcaggtcatggtatttttccatgtcgaccagacatgtctgccattaattgttggaggccagcttgagactggggaaatagtatcattagttggctgcaagacaaattacatggaaggtggttcactttttgggcaaaataataccaccacatgaatgcagtgctgataacctctggagactcttggcaggattgtgcatattatattttttttccctgacaaatgtatcccaggaacatctacatatttctcccttggtttggcaaattgttcaacttgaaatgtctatttatggtgttgcaacttggaaatccaccattgttggcaggtgctagcagagcaaactactgcaaaatgttg

SEQ ID NO: 8903 - DNA, 369 bp, Gossypium hirsutum
  Clone ID: LIB3828-021-Q1-K6-C6
cccagcgtccgatcatccccaccacccacatccgcaaccccatgctccgcctccaggtccgccacatgctgatcatcctcctccaggccatgctcctcctcctgggccaggcccccatgcgccaccgccaggaccaggtggtccaggtcatcatcccgagccacacaagcctcgtccatgatccttataccgtgtatacaatattatgtaagcttaggctgggtaccgtacttatgtaataaattaagaaaacctatttctactataataataataaagatgtaatttctacgttatggaggccatggcttatatgggcacttttatttttgcttaatttgtcatgagcatgaggattaatttgtctta

SEQ ID NO: 8904 - DNA, 487 bp, Gossypium hirsutum
  Clone ID: LIB3828-021-Q1-K6-C7
acaaagtctatgatcggccattgtctgggcgcagcaggtggtttagaagccattgccactgtgaaagccattacaactggatgggttcatccaaccattaatcaatttaatccagagccttcagttgagttcgacactgttgccaatgaaaagcagcagcatgaggttaacgttgcaatatcgaattctttcggatttggtggacacaactctgtggtggcattttctgcattcaagccatgaaagtttcatcatttattagggaaaagatagaatcgttgttcattacagctgagggactgcttcaatctttgtaacatttcatgagagccatttttcatcattagttttgttataattttgacttggatattagctaccctaagaaaattgtgaacccctatttaaattagttgatttatgagggtaatgattttattgaagtcagaacagatagccggattgttaaaccggtgtaattgtacct

SEQ ID NO: 8905 - DNA, 641 bp, Gossypium hirsutum
  Clone ID: LIB3828-021-Q1-K6-C8
agcacttgtaaatttattattttttatttatttcttcttttggcgaaattcctatttgcaacaaagatgatagcttgcttgggtcgaatagtacacgacagcgacgccgagtcgaagctggacgacgacgtttccaccatattcaactctctcaatttacaaggcagcatcgaaaacggcgacgtttccggcatagccagtaaagatttcggcggtctttattcggttaagcccttgtatctaattagaccatcgggagccgaggatatatctcgggtcgttaaggccgccgccgggactccccacctgacggttgcggctaggggtaacggccactcaatcaacggtcaggctatggccgacggtggttacgtgatagacatgcgttccactggggaaaaccatttcaatctcttgaccgtcaatggctccccttgcatcgacgtctccggcggggcattatgggaagacgtcttgagacggtgcgtttcgaggttcgggttggctcccaggtcgtggaccgattacttgagcttgaccgttggtggaaccttgtctaacgccggcgttagtggacaagccttccgttatggtccccaaacatcgaacgtaacggaactggaagtcgtaacgggggaaag

SEQ ID NO: 8906 - DNA, 633 bp, Gossypium hirsutum
  Clone ID: LIB3828-021-Q1-K6-C9
gcggcgcctcccccaacttcacaccagcaaagcaaaagcttcaccaatggggatcgatttagtcgcaggaggtaagagcaagaagacgaagaggacagcccccaaatccgatgatatttacctcaaactcctcgtcaagctttaccgtttccttgtaagaagaactgggagcaaattcaatgctgtgatattgaaacgcttgtttatgagcaaagttaacaagcctccactatctctctctaggcttattgaattcatgaagggaaaggaggataagattgctgtggtagtggggacagtgacagatgatattagggtttatgaggttcctgctttgaacgttactgctcttaggtttactgagactgctagagctaggattgagaaagctggtggagaatgcttgacttttgatcagcttgctttgagggcacctttgggtcaaaacacggttctcctcagaggtccaaagaattcccgtgaagcagttaaacactttggtcctgctcccggtgttcctcacagccacaccaagccatatgtgcgctcgaagggaaggaagtatgagagggctagaggaagaagaacagcaagggatttagagtttaatattactgcactacttgattttga

SEQ ID NO: 8907 - DNA, 613 bp, Gossypium hirsutum
  Clone ID: LIB3828-021-Q1-K6-D1
cggccgcgtgggttctccttctctacttctacctctacccctccatcttattcctatcattactctttttctcactcatcatcttcagctccatctgcagcatttaatgttcatttttccaaatcttcaggaactcgaatggaccaaacatttaataaattacctacattacctaccaataacgttgaccctgggcttcagcaaatctgtaaagacactgaccatcctgaagagtgtatatcaaatattgttccattcctaggtcatagtaaatttgttgcagaacccgtatctgtcctcaaacttgagattcaagcaatggataacaaggttaaggaagccatagacaaggctacgaaacttatgcaagatcactcgacccaaaaaagactgcttcttgccttgaaacatgcttggatagctacaaatccatcctcgatagcgataagagagtccttgatgctctctctttgcatgacgtttaccaagtaagcatggaattaagctccaatatcgagaatgtacaaacttgtgaggatgcatttctagaagccaacatcaaatcgccgaatatacaaatggattcagcgatacgaaagatgattagcaatac

SEQ ID NO: 8908 - DNA, 618 bp, Gossypium hirsutum
  unsure (1)..(618): unsure at all n locations; Clone ID: LIB3828-021-Q1-K6-D10
accggacttagattcttcaccgtttattggtccatggggaagacccgatatggcttacttctttttcactaaagatattcttcaagggaaacccattgatatctacagaacccaagatcaaaaagcggtggcgcgtgacttcacttacatcgacgacgttgtgaaaggttgcttaggagcgttagacacggcggaaaaaacaccggtagcggcgngaaaaaagaaaggaccggctcaattaagggtttacaacttgggaaacacttcccctgttcccgtcggccgattagtctcgattttagaaggattactcaacacaaaagccaagaaacatgtggttacgttgcccagaaatggtgatgtcccctacacacatgccaatgtcacgttagcttacaaggattttgggtataaacccaccacggatttatcttctgggttgagaaaattcgtgaaatggtacgtgaattactttgggattgaatcgaaacactcgaaagaaacccaacatttcgatgaatccagttaagaacaagctttcatattttcatttccatggctgctgcccggtcctttttaatttttcattgttatttaatggttatattgatgtaaaaa

SEQ ID NO: 8909 - DNA, 637 bp, Gossypium hirsutum
  Clone ID: LIB3828-021-Q1-K6-D11
ccttctcccttttctctttctcttctcgttctcgctccatcaaggttgaagacgtcgagaggcctctagtatcagatgatgtcaatcacagtcaagatcaaagcaatgatttgacaagaaattatgacgtagagggtgcatgttaccaaagtgaagctcttttgcgctcacctcgtaataagggacttgttcacaaacagcggctcccccctgcgtctcaccatttggctcagggtgatagcttggttctagaaatatctgatccttcagaggatcttttggttggtcagacgctaaagcgcccattggcgacagagcacctaattgaagcgctaaaacttggtaggcctgaaaatcaaaatgaaaacagtatacaagagtttgtgcccaaagttatcagtgatcagcgaagttgcctctctcttgaggttgtctctggtccttctcgtggaattcgctgttctgtacagtcaacaaacccttcaaggttgccgttgaccctagggagagtttctccgagtgatttattattgaaggatgcagaggtttccggaaagcatgcaatgataacttggaattcaaataaactgaaatgggagctggtagatatgggtagtctcaatggaacgctactgaa

SEQ ID NO: 8910 - DNA, 632 bp, Gossypium hirsutum
  unsure (1)..(632): unsure at all n locations; Clone ID: LIB3828-021-Q1-K6-D12
gctccgctcatcgattcctctaaacgatctctgaacccctgctcaagctttgacgacaacagaaagaacaggattcgacgacgaggtattttttcccttttttaattccttatattatttcctttacaaatcacgaatcaaaataaacattgagaagaaaaaaaagaaaacataaaagaataccagaaatgaaaaatgaatcaccttctntgaaaaactcagtttttttttgcttttgattgatttttttatacaatccctatccaaaaaacttacaaaggctcttccttttgttttatagccaaaataaaatcaaaaataaaatatacaatcgtcctttttctttttgctgtgttgtttttgtttgtttgtttgctgcgcaagtacggtcgtacgatgacgtggcgcggtgcgacacgtaaaggagcagctcggaggcgcggtacgtggcagtggcgcacgtgcgaaggcaaagtctgtgttcgattgcggcgcgatagcttgcttcagaaattgctagggttttctgattctttctttgttttgggctcattgggctaaagttttttttaggctagtgggctaggttaaatttggatttagatttgggccgtgttgatttggtctgtatg

SEQ ID NO: 8911 - DNA, 270 bp, Gossypium hirsutum
  Clone ID: LIB3828-021-Q1-K6-D2
gctttagtgcccttcaccatatatatgtttaatgaaatgttgtaagacaaaattatatgtaaatggaggtggtgggattttctgattccttgtcatcaacgataaaaatcagaaaggaattaggtagggtgattgattgtatggaacgtatgtcatattttaagattttgattgttgttgccttcaaatcttcatgttcaaatccttgaacacatcaacacattttgtgagctttttgataataatatatataaagattgatttggagtt

SEQ ID NO: 8912 - DNA, 639 bp, Gossypium hirsutum
  unsure (1)..(639): unsure at all n locations; Clone ID: LIB3828-021-Q1-K6-D3
cacgcattgtgaatgtaccgtttgtcattgccgatgcaacaagtttaacacaggcaggttatgttggagaagacgtagaatcaatattgtataagctacttgtggaagcaaagtttgatgttgaagcagctcaacatgngaattgtatatattgatgaagttgataagataactaagaaggctgagagttcgaatatggggagggatgtgtctggagagggtgttcaacaagcattgttaaaaatgctggaaggaacaatagtgaacattcccatgcctgataaaggagctcgaaggaatcctcatggtgatagctttcagatagatacaaaagatatacttttcatatgtggtggagcatttaatgatttggagaaaaccatttcagaaaggcggcaagattcttctatcggctttggagcacctgtccgtgaaaatatgaggacgagtcccttgattactgctgcagttgcatcatcattgttggaatctgttgaaagtgatgatcttattgcatatggattgattcctgaatttattggccgctttcctattttagttggcttgtcagctttggatgaggaccaacttgttgaggtcctcatgaaaccaaagaatgctcttggtaagcagtacaag

SEQ ID NO: 8913 - DNA, 615 bp, Gossypium hirsutum
  Clone ID: LIB3828-021-Q1-K6-D4
cgaaagaaaggcaaatattcccataatcgctcttttctgcttcaccatttttgtttcgtcctcactcaatttcgtctatgggggctgaaaatatgagctacgtcgtcgtaggccatgtttactgtgacacttgccgtgttgagtttgagaccaaactcagcgaacccatcgctggagcagtagtgaaactggaatgcaggaatcgtacagacaatcaccttaccttccagagccaagaaatagtgactgacgaacgtggagactatcacattgtagtggaaggcgattatgaggaatcagactgcgacgtcgccttggtgaggagtcccaacccggattgcaatgatccctccgaaatgtggaggatatccagggtggttctcaccacacttgacggcgtcagcggtgaacttcggtttgccaacaatcttgggtttaagaagaaggttgctcttcctcagtgtactcaagttcttcaagagataggctattatgagcttagccaagaagctggagacattgccccttggtcagaactataatatgtattttcacttcaactttttctaaaagctcggcattagcctataataaaaattgaatcattattattct

SEQ ID NO: 8914 - DNA, 639 bp, Gossypium hirsutum
  Clone ID: LIB3828-021-Q1-K6-D5
caagaacatccgtggcacatctgcgcttccagcaagctatcaagtttattagcagcgggtcttcgccatgtcaaaatgtggaacttgcggacattgctattaagcacaacggagctgaacccgcaacatcccaatgttggaatgtcaagcctataactagtggcaaattaaacccgactcgcatgttacggccctgtcccaaaagacccctggcgccaccggttaaagcataccaacaaattcaatgcaattgtagttaatatatgaacttatattatataaaaacaataattcgttcattttactaatagagaataagctatcaaatagatacaaaagaatacttttcatatgtggaggagcatttaatgatttggagaaaaccatttcagaaaggcggcaagattcttctatcggctttggagcacctgtccgagaaaatatgaggacgagtcccttgattactgctgcagttgcatcatcattgttggaatctgttgaaagtgatgatcttattgcatatggattgattcctgaatttattggccgctttcctattttagttggcttgacagctctggatgaggaccaacttgttgaggtcctcatgaaaccaaagaagctcttggtaagcagtac

SEQ ID NO: 8915 - DNA, 643 bp, Gossypium hirsutum
  Clone ID: LIB3828-021-Q1-K6-D6
atcctttacccacatttccttttaccacagtctcttcatagtatcttctcatttgattcaatccgagttctgggtttagtttctttaacttcaaaatccattacccatattgggtttcttagggttttttgttttgttgttataaaacaaatcaaagatcttgatgctcaacctttttgtgttaatgtttgagattcatgtttccaattctcagtgaaatcttcttttctgggtttatgataaattccacattcatacgcaggacccatcttgttcaatctttctctgttgttttcctctactggttatattacgtttcataaagaaataatcatcttttttaacttatttatctttactactaagtttttttttttaattttatttgggtcctgctattatatatcataaataataactcctacaatggctacatcctcgggttcatcagcaacacaaatcaactcgggctcagaagaagcattaatggacgaaaggaaaaggaaacgaatgatatcgaacagggaatcagcaaggagatcaaggatgaggaaacaaaagcatttggatgatctaatgactcagttgactcagttgcagaaacaaaaccatgagatcatcacaaacataaacttcaccacac

SEQ ID NO: 8916 - DNA, 551 bp, Gossypium hirsutum
  Clone ID: LIB3828-021-Q1-K6-D7
gtgagaacaagcatgaaacagttgcggagaacactgaattcggttgttatctcttcttattgtgcactagccatggataatccccctcggaacaaaagaaggaaaaaggttctttcatctcaactatttccgaaagcttccatgggcataggtttcaaataaaagctataagagtttcatggtcaagcatccaactctcagattcaacttggaaacttttacaatcttattttgtatgtatatatatgttttaaagtcatacggcatgtacctaaataggtaggcttgttgcgtaagtaagttttgacacttttgataagtgacatgtaatgttatattggttgagctttaacttttgattactagttagttatatttgattatgcgagtttgaatctatgcaaattacttggtttagtaatgaaaaaaacaaaaaaaaccacttgagaggggtagagaaagatgtaaaaaggcagctccattatgtctgtaacggaaaaaaccatattatatatgtccgtaacgagaaaatatttagtagcgactaattt

SEQ ID NO: 8917 - DNA, 636 bp, Gossypium hirsutum
  unsure (1)..(636): unsure at all n locations; Clone ID: LIB3828-021-Q1-K6-D8
catggtagaagcttggccgatattggaacaattaccttagtcctcttaagaagccaacacaatccgagtaccacatcccacgggcatacttgaagccaaagaacctgattgtcctccttgaggaagaagaaggcaatcctaaagatgtccatatagtaacagtgaacagggatacaatctgcagtgctgtgagtgaaattcacccaccatccccgagattgttcgaaaccaaaaatggtactctccaacccaaagtgaatgatttgaaaccaagggctgaattaatatgtccaggcaagaagcaaatcgtggcagtggagtttgccagctatggtgatccatttggcgcttgcggagcctactttattggaaattgcacagcgccagaatccaagcaagttgttgagaagtattgcttggggaagcccagctgccaaatcccactagatagcattcatttcagtgaccaaaatggcgcatgtacccatctcatgaagactttggccgtccaagtcaaatgtgcctaaacaaatgcgtgcttcgacacagcttgggttaagcttcacattttattttttttaattgagctaagacggtgcatggaggagtgcttgaactatntatttgtatttctta

SEQ ID NO: 8918 - DNA, 641 bp, Gossypium hirsutum
  Clone ID: LIB3828-021-Q1-K6-D9
actggatcttcatttgaataagcagaatgcttcttctacgggaagtttttcatcatcacccttgcgccaatcttcaggctcatctcaggcatctaattcatctcatgcacagaacaattattcccccatattcttgcagtgggttgattgtgtttcacagttgttaaggatttatccatttgctttcgaattctcctcaaatttcctggtggatttcttggattgtgtgctttcttgccgttttggaaatttcttgtgtaacagtgagaaggagagacaaatatgtggtgtagatgaaagttgtggatgcttgtgggcctatttggctgatatgcgttcttcggaggggaggtcccatgcccattataaccttttctatgatacattgaaacacaacgggccacttttacctccagcagctgctttagccccaacactttggccccaattccatcttcgttgggcatgtcctttcgaatcccaagctggtgagcttgaggctgaatgcaggaacatggctataaagttttccgaactgcaaaaggctaaagaagtggctgaaatgaaagctaaagaatacttggcggccatggaaatattgaatgtggatctacaaaatgagaaacaggtcagcagctcag

SEQ ID NO: 8919 - DNA, 606 bp, Gossypium hirsutum
  Clone ID: LIB3828-021-Q1-K6-E1
tggcatcccacgtcagccctagatgttcttgaacgacagcgctactaataacaacagcggtagcacaaatggtttcagtctaataaaaaacgtctcccagctgctctggggcgcatccctccctcctggaattctaatctcaaccgtccgtacagcatggacttccacgtggcagatcatgatgtcccaactggctccctccgatccctccggcgcttacaccaggcctccctcaaaattccgcctcaacccaaccgccgcaaccaccaaacttcacctctacgtgggcctcccctgtccatgggcccaccggaccctaatcgtccgtgccctcaagggcctcgaagaagccgtccccgtctccgtcgcaggccacggtctcgacggctcttgggaattcaaagatgtccccgacaaggacaatgatatcctggttcctaccatggatagggtaaataggtgccggaatttgaaggaagtttataggctaagaaaaggcgggtatgatgggcgggccacggtgccaatgctgtgggatgtagagaagaaagaagtagtttgcaatgagagctatgatattattgagttcttcaattcgggtctaaa

SEQ ID NO: 8920 - DNA, 648 bp, Gossypium hirsutum
  unsure (1)..(648): unsure at all n locations; Clone ID: LIB3828-021-Q1-K6-E10
gaagaaaggcaaatattcccataatcgctattttctgcttcaccatttttgtttcgtcctcactcaatttcgtctatggggnctgaaaatatgacctacattgttgtaggccatgtttactgtgacacttgtcgtgttgagtttgagaccaaactcagtgaacccatcggtggagcagtagtgaaattggaatgcaggaatcgtacagacaatcagcttaccttccagagccaagaaatagtgactgacgaacatggagactatcacattgcagtggaaggcgattatgaggaatcagactgcgacgtcgccttggtgaggagtcccaacccggattgcaatgatccctcagaaatatggaggatatctagggtagttctcaccacacttgacggcgttagcggtgagcttcggtttgccaacaatcttgggtttaagaagaaggttgctcttcctcaatgtactcaagttcttcaagagataggctattatgagcttaaccaagaagctggaggctataatgagcttagccaagaagctgaagacatttccccttcgtcagaactataatatgtattttcacttccaactttttctgaaaagctcgcattagcctatattaaaaattgaatcattattattctaaaa

SEQ ID NO: 8921 - DNA, 644 bp, Gossypium hirsutum
  Clone ID: LIB3828-021-Q1-K6-E11
atcttcataaaatctttagattctgctatatgtatccaaggccaaatcctatcatcagtctgaacatctttgccttaacctctccatctcttgttgaacctgctctgaaatgtcgttctccaagtaataacccacatcttccttcaacgattcctttgctataagatgcgcaagaacattttctatttttggggtaaaatgaaagcctatttcttgaaaaaatggcttcgcatcttgaatatctcttacaatccctcctataatcgatttgtccctttccgtgctctgacattttttaataacggtccttgaatctccaaatataccacatgcatggaggctcaatgaaatccctaatcttactacttctaatccggcatatgcctccgccgcaaacggtgaggcaacatttgagtgaatgaccaactttaacgccaaaatttcccctcgcctatctctaaccaccagccctgtggcagatttggaagaatactggtcaaaagccgtattgaagtgaatgcttacgtttgtccttcggtcatcgtgattatgaagtctgcctgattcacagatacatagttttccctctaacccatgcacttctgagttatagcttattatttgtcttgaaatgtctctgttgt

SEQ ID NO: 8922 - DNA, 579 bp, Gossypium hirsutum
  unsure (1)..(579): unsure at all n locations; Clone ID: LIB3828-021-Q1-K6-E2
gtctttgcgcgtccaagnaagtccattgagaacattgaaagataggaataagaaacagacacgctatggaaaaaggatggcgattttatgatgtttctttccttgcggagattatattcataggtaaaaacataaacatactaaaaacaaaaaaacttgtgtccaccactatagaggaatccaagaccacttatctcttgctcaacgaccgcatacactccaatatctgtgtcacaataactacagctcactcgcgccaagaactacaacctgactactggaaaaaccctgaagaacccaacttactcgacttgcataacctcccctttgcacatcttgatatacaaaaagaatccaccgaccgaaagacattgctaaaatgaacacaatcttagagctgatcgacacgcacacctggaacggccaattaagatcgatatcatctgaaattaccagcatcctaaccggtaactttaccaatacattagcgacactaaatgtgcctttgttacactctccattgcatcaatccttcggattgactggtgaagatgcaatgacttgcctccctccaacatt

SEQ ID NO: 8923 - DNA, 422 bp, Gossypium hirsutum
  Clone ID: LIB3828-021-Q1-K6-E3
gcgaggttgtggaacatgttatacaagagcttgggggataagttactcgtaaaccggggccaattcctgggatcaacactaaaattacctctttcctagatcctgatggctggaaaactgttctggttgacaatgaggactttctgaaggaactcaagtaggcactaagaaagagtaatgctactatatgaataaatcagtatcttgttgtgtaagcgagcagatatgtctgttaaatatggtgtttgttatgcgacctgaaccgttttccgcttgtatctgttgtggattctagtatgttgcatagctatcagcaggttatgcttatgattgatgatattcacgatttacatccctgttttttagatgaggtcaataaaaagatgcacttggaccgtcatgccttgataatggtatagtcc

SEQ ID NO: 8924 - DNA, 650 bp, Gossypium hirsutum
  unsure (1)..(650): unsure at all n locations; Clone ID: LIB3828-021-Q1-K6-E4
atctgaaacctctggatttcatggnagactaccagttgacgaagcatgaatgttccagtctggggcgtggaaatagtgaatgcagcacaaccgaatcgtctgatgatattgagaaacaagagcttgaggaagtttcttatgaagaaggaaccttgttctttgatacagaggagtattttactgaacctgctgttagttgtggatctgtaagaggggcaatggatcatgcagatgatctccaagaaactaaaaaacaattggataatgtggaaaagattcattctgataacgaagattgtgattccagatatcctcaaattgagagacgaaaaaaacttcctgatccagttgaagaagtgaaaggggttagcctttggtctatgatcaaagacaatgtgggaaaggatctcacacgagtatgtctccctgtttactttaatgaaccaatatcatcccttcagaaatgttttgaggacctagaatattcatatcttttggaccgagcatacaagtacggaaaagaaggtaacagtctccaacggattcttaacgttgctgcatttgctgtttctgggtatgcttcctctgaaggccgacactgtaagcccttcaatccattactaggagnaacttatgaagcagactatcct

SEQ ID NO: 8925 - DNA, 601 bp, Gossypium hirsutum
  Clone ID: LIB3828-021-Q1-K6-E5
gtcatggaaacattgatccggagatcactgcaacttgcaaagatttggagctgttaagaaagtttttcagcttgcccttctatgcaccaagagacacccatcggatcgaccaacaatgcatgaagtgacacgagttctaggaagcctaatgccattggaacccccagcaaagcaaccaaccacaatcccaccggcaccactttcatctaccaaggtcacttcttacatggatgagtatgcaaatctcaagactccacacttagtcaattgcccatctatgagtacctcagatgcacaacttttcatcaactttggagaggttatatctcgaaacagtgagtgaaaggaagtccaatgtcgtcaaatttaaaatcaaaatcaaaatatttcatgaatgtgcattagatgattgaaagataaaaaaagatgatgggaaattgtgtataaagactctggtagactggtatcaattattgcagcttagagagaaaaatagcaaaaagcaaccccgaagatgctagctagtaatagtactacaaattcatatggttgtatactgtactatatcaaattatggtagtaatttttggcttttttgtct

SEQ ID NO: 8926 - DNA, 516 bp, Gossypium hirsutum
  Clone ID: LIB3828-021-Q1-K6-E6
cccagcgtccggaaaaagttgttcttctggatgttccggtaattgtaatcctggtggtttcgttctaccatttcctcaaattccagaaatcccaagaattccacagatcccacagatcccacaaatcccacaaattccactaatcccacagatcccacaagtcccacaaatcccactaatgccaggacagtcgggatgtgagagtggggagtgttgccgtcagggttgcggtgggacttgtgctgagtgtggtcagcccaggtgcgcatcaggatgttgccaggctgaaactgtaaagagcaaagggatagaagaggttatggacagtgaacccagtccaccaaagtagggagatgataccatattaagatgaaataatgaggaagagttggttgtcgtcgtattaattatacaaaataagaagtaatgatgttgcagaagggcttgctataaaatcctgttggataaaaagagtaattatgaagaataaatagctcaaaacaatatttgatttac

SEQ ID NO: 8927 - DNA, 360 bp, Gossypium hirsutum
  Clone ID: LIB3828-021-Q1-K6-E7
acttgctctaacaccatggttcctgtaccaccaccaccttctctggtggccccaccacctttattgccaccaccacctccatcaccagtcccatttttttcttcccctgaagatgattttctggtgcctgccccattaccggctgatagtagccaacatatttctgggtcttcaaagttatcattaggtagaaaaatgttgaaatcaatggctaccattttggtaccactaatgattggtgtttccatttgaaaagttgataagtatttggtgaaattgttggcaatagttttaagattaagtgtttgaaaattaatgcatatgtatgtgagcaatattctagtaaaccttatttcaatt

SEQ ID NO: 8928 - DNA, 642 bp, Gossypium hirsutum
  Clone ID: LIB3828-021-Q1-K6-E8
tgctttcactcttcctggtctctaccgtgttgtacatggtatcgatgtgtttgatcccaaattcaacattgtttcccctggtgctgatatggagatatacttcccttacaccgaagagaagcggaggttgaagcatttccatcctgagatcgaagaccttctttacagcaaagttgagaatgaagaacacttatgtgtgctcaatgaccgcaacaagccaattctgttcacaatggcaaggcttgatcgtgtcaagaacttaaccggactcgtcgagtggtacggcaagaacgcaaagttgcgtgagttggctaacctcgtagttgtaggtggtgataggcgaaaggaatctaaagatttggaagagaaggctgaaatgaagaaaatgtttgagctgatcgacaagtacaacttgaacggccaattcagatggatatcatctcaaatgaacagaatccgaaatggtgaactttaccgatacatttgcgacacgaaaggtgcctttgtacagcctgcattgtatgaagcctttggattgactgttgtggaggcaatgacttgcggtttgccaacattcgcaacctgtaacggtggaccagccgagattattgtccatgggaaatctggtttcaacattgatcc

SEQ ID NO: 8929 - DNA, 637 bp, Gossypium hirsutum
  Clone ID: LIB3828-021-Q1-K6-E9
tgtatcccaacttctccaaaaacccagtatcgaaatcccaccatgacatatactgcactaaaagcggtaagtttaactcatgtaaggtatcaaagaggtgaccaactaggccatttcttagcctgggtttctttagttcccgttttcatttcccttggtggcttcgtttctcatttcatcttccgtagagagcttcaaagcatgttctttgcattaggcctagtaatatcacagttcatcaatgaattcatcaaaaaatccgttcaacaagcccgccctgaaacctgtgctcttttagaaatgtgtgattctcacggctggccttcaagtcactctcaatacatgttctttttcgctgtttatttcacccttttgacatgcaaagggatcggtgggatttggaatgttagaaccaagtgggctgctttgtttttaccttggtctttggctgtcttgactatgtattctagggtttatttgggttaccatacggtggcccaggttcttgctggagcttctttggggattttgcttggtgggctctggttttgggtggtgaattctatgctcttctgttatttccctttgattgaagagagttcctttgggaggtttttttatgttaaggatacttctc

SEQ ID NO: 8930 - DNA, 640 bp, Gossypium hirsutum
  unsure (1)..(640): unsure at all n locations; Clone ID: LIB3828-021-Q1-K6-F1
cttccatgtttgtacttttattattattcatttcagcctctaaagtccaatcagatgcttttgatgttgttgccaagtttggcgcaaaagctgacgggaaaacggatttgagtaagccatttttggatgcttgngaaagaagcatgtgcctctgtaactccatcaacagttgtgattcctaaagggacatatttattatcaaaagtaaacttagaaggtccatgcaaggctcctattgagattaatgttcagggcactatacaggctccggctgatcctagtgctttcaaagaccctaattgggttagattctatagtgttgaaaatttcaaaatgtttggcggaggaattttcgatggtcaaggaagcattgcttatgagaagaatacttgcgagaatcgtgaatttcgttccaaacttcccgttaatataaggtttgactttgtgaccaatgcattgatacaagacataactagcaaagacagtaaactattccacattaatgtttttgcttgcaaaaacattaccctcgaacgtttgaagatagaggcaccggacgagagcccaaacacagatgggattcacatgggcaaatcagagggggtcaatattattgcctctgacttaaaactggtgatga

SEQ ID NO: 8931 - DNA, 638 bp, Gossypium hirsutum
  Clone ID: LIB3828-021-Q1-K6-F10
tgattgggaagccactgccatggcgtctctttcaatccgcttcctggctctttccctttccgtcactgctttattcacttgctcctccggccatggtcacacttacgatccttataacgacaaggcacggatgatccaccacggtggtcctatgctcaacgggaccgttaaattagccatcatgtggtacggaaattgtggcaaggaaataaagaacaccatgagaaacttcattaaatcattgaccgtcccagccaaagccaaacttcaacctcaagttacctgttggtggaaagtagtggaaagttaccaatcaatgataccagacgcaaagcctgggaaaagccccaaaatcaaggtcaaagtggtgaaacaatcaggagagaaaacatataaatatgggaaagttttgactttgcaagggcatatcccggagcttatcgagcatgtcactaagggcgatactgaactcttaccggtcatcgttgctgcaagggatgtctctattcaaggaatttgcaacgggcaatgtgcagatcatttacttactgaggatccccatccgcgaccatacatcatagtcggtaacccagaaacggagtgccctggagaatgcggatggcctttcttcccggctg

SEQ ID NO: 8932 - DNA, 639 bp, Gossypium hirsutum
  unsure (1)..(639): unsure at all n locations; Clone ID: LIB3828-021-Q1-K6-F11
gaagccatggcctcttcacacggtaagttttccttcttttatttctttctttcggttttntgaatggtgaaaaataaactaaaaaaaataaatcgaaaagaaaatcaagaatctcaagaactttcaatcactttttaatttcagtaactttttttattttggtatgcatgtgtatttctgaaaaaaagaagaagatcccccatttacatcgtttacattcggttttatagccaaaaaatgagtaaataaaaatacaaaaaatccttgctgtaatctgttattgtttgctgtcattttctgttgtggttttcgtttgttgcaggtgtgcatggcgtggaggagttatttgcggaacatggcacgagtggaagaatcaactaaaggctgcggtggctgaagcttctaaggtttctgctgaaaattcccttggggtatttattttgggttatttaggctagttggattaagtttaataatttgaacccattattttggttgctggactatgtaagaaatggacattggactattatttatatattttttagttttatttttttgttttggttttggtgtaagcccgggcacaaattgggtcttagggtcttacagtaataattaaatattaatatgttttta

SEQ ID NO: 8933 - DNA, 638 bp, Gossypium hirsutum
  unsure (1)..(638): unsure at all n locations; Clone ID: LIB3828-021-Q1-K6-F12
gttttattaatttttttccttgttttccatgttgtttntgaaagctcatggcatgcttagacatgtataattcggagcacaaaggtcatcatcatcactgccccccaatgagtccaagaatctcattctcaaatgattttgttgagactcagcaggttatgaagcaagagaggaactcaagggaggctccagtgtcgtcagactttgaattctcagtatcaaactactccatgatgagtgctgatgagcttttttttaagggtaagctttttccatttaaagataattgtaataatcaaatgcaaaggactttgagggaagagcttcttgctggagatgatgatgataataatgtgacactaacgcctcctaagggttccacaaggtggaagggatttctggggctcaagagaacccacattggttccaaaaaagctgataagattaatgaagtgtccatggagagaatgggtgacaataaaaggtttgcttttgttcatgaggacacccatgtcgccaaaacttcacaggaacttttgactgaaggagggtcaggttacaggaatgtggagattggaatatagttacatttctttgaaggcatcataacttgtagaaatatggagtatgtttttaaa

SEQ ID NO: 8934 - DNA, 636 bp, Gossypium hirsutum
  Clone ID: LIB3828-021-Q1-K6-F2
tttctttattgtctcttccttcttttcttgtcatttcataacaaaccctaggcacttccgcggcatcaacaccttccggcgtcttacctccgatcaaagggcagcttccttcccattattcgaaatttgaatcctcaaatctatctcttctatccatagcaccctatttattcgccgactccctctctctctctgtctgttttgaatttcttcctctcatttttttagttttgggtcaccgaatgccaaaaaaaaacacggaaagacgctacactaggttttctttgccgtttctggtttttgtgattttttggaattccctgcttcatcggtgactgatttcagatatatttatttatcactcgaagcaaagcaaaagggaaagtaggtgggtttttaggatatgataaatggttggtcctgctttatgggagattgatttgaggtgtagaagccactgtttctttctacttccgtgggaatgggaaacccgaagtctgacgttcctgtttttatttatttatttaaattttcgtaaccactgcttgatcactgatttcagctttgaatgttaatttcaacaattgtcttcatttttcatctctgctttgttgtctggcatatatagctctgtgg

SEQ ID NO: 8935 - DNA, 635 bp, Gossypium hirsutum
  Clone ID: LIB3828-021-Q1-K6-F3
atccatatgagtaatcatatgggtccagtccttactgctaatatcaccatccacccaatctggtacggccggtggcagaaatcccagaagaaaatcatccgtgagttcatcaactcgatctccgccgttgattccaaacacccttcggtggctgggtggtggaagaccgtacagctttacaccgaccaaacgggagccaacatttcccgtacggtgctattaggtgaagagaaaaacgatcgtttttactcccacgggaaatccatcacgcgcttatcgatacagtccgttatcaaaagcgctgtaacatcccgtacgaaaccgttaccgatcaatcccaaaagcgggttgtacctcttgctcacctccgacgatgtgtacgtcgaagatttttgcggccaagtttgtgggttccattacttcacgttcccgtcaatcgtggggtacacgctcccgtatgcatgggtgggtaactccgcgaagctttgcccatgagtatgcgcttaccctttcgccgtacctcaatacatgccggggttgaagccgttaaagtcacccaacagtgacgttggagttgacgggatgataagtgtgatcggacacgaagtcgccgaattagcaaccaacccactggt

SEQ ID NO: 8936 - DNA, 643 bp, Gossypium hirsutum
  Clone ID: LIB3828-021-Q1-K6-F4
aaacaggaggtatgaactgtcaagattgtggtaaccaagctaagaaagatgtgcgcatttgagatgccggacctgttgcaagagccgagggtttcagtgccaaactcacgttaagagtacatgggttcctgctgctaaaagcgagagaggcagcaacaactcgcagctttgcaacaaacacaacagcagcagcaaaatcaacaacaagaacaccaacaactgtttagaggagacaatcccaaaaggcagagagataatcatggttctccctctcttgcctgcactcgtttatcccccaccacgtcagggttggaactgggccaattccctcccgaagttagttctccagcagtgttccgctgtgtaaaagtaagcgctatggacgacgtagagggggagtttgcatatcaaacggctgtaaacatcgcaggtcatgtattcaagggaattctctacgatcgaggccctgaaagtcgttatacttgtggaggtgaaagctctcagcaactcaatctcatcacaactgcttctactactgcagcagctgctacaacgacaacagcagctacttccagcaatccaggcacaagtatgattgacccttccctttatccagctccacttaatgctttcattgccggta

SEQ ID NO: 8937 - DNA, 451 bp, Gossypium hirsutum
  Clone ID: LIB3828-021-Q1-K6-F5
gttctttctcacttgacaaaagtgctatattttatttcctagcacaacttgtctgtctttgtactttattttctgcttatcttcatgcactatatggctacttatggcatatcttgtgatagcagtgtagctttcatgtccttgacctctcttctttgatcttccatgatctcttttcttgttttcacacgtgttatcttccttttcatgggtgtatagccggtgggtacactgtaagtcggccaatattggccggtatgatagtgagcctccattgtgttatttgtaggggtaatcatataggagttacttcggtggtgcagtgatgttgctaattctcttcagttatggtctttgaatttggtcatgtgtatactacctcatgtattgttattctaatacatgaacagtggaatttactaactatagcacgcataagaagtgttgatgt

SEQ ID NO: 8938 - DNA, 636 bp, Gossypium hirsutum
  unsure (1)..(636): unsure at all n locations; Clone ID: LIB3828-021-Q1-K6-F6
gccggacctgattaaaaaagctaagcaggnaggcatcaatgcgattgagacgtatgttttctggaatggacatgaaccagttgagggacagtacaactttgaaggagaatttgacttggtgaagttcatcaagttgattcatgagcataagttgtatgcagtcgttagggttggcccctttattcaggctgaatggaatcacggaggattaccatattggttaagagaggtccccggcatcattttccgatccgataatgaacctttcaagaaacacatgaaaaggtttgtgaccttgattgttgacaaactgaagcaagagaagttgtttgctccacaaggaggacctattattttagcacagatagagaatgaatacaacactattcaaagagcattcagggaaaaaggggatagttatgttcaatgggccggtaaactggcccttagcttgaatgccaatgtcccatggatcatgtgcaagcagagggatgccccagatcccattatcaatacatgcaatggaaggcactgtggagatactttctatggtccaaataagcgcaacaagccggcattgtggactgagaactggactgcacagtatagagtattcggtgatccaccatcccaaag

SEQ ID NO: 8939 - DNA, 412 bp, Gossypium hirsutum
  Clone ID: LIB3828-021-Q1-K6-F7
ggcctcaactggtacactctaaattgaattttcaggtactggggtattctgtaggtttaccatttttatgcccttgaagaaatattccaaattttaaactagcttagggaactttcatcagtggtatgttttacctacttcttgttagggaaagagatcgatgaaccaaagtttcaactcttgagccatagatatagctaaatttttattaatatctagtgttaaacatatacatatacatatagcttgatgtagaaaaagaaaaaagaataaaactgatagataatatatacatatgtatatatactatattatatttaatttgctgtaggaataacagtgaaatattgtatagaaatccttcttgttgtagaatcttattattaatgatgatgcgcagttttaggaatat

SEQ ID NO: 8940 - DNA, 87 bp, Gossypium hirsutum
  unsure (1)..(87): unsure at all n locations; Clone ID: LIB3828-021-Q1-K6-F8
naaaaaaaaaaaaaaaaaaaaaaaaaaaaaaaaaaaaaaaaaaaaaaaaaaaaaaaaaaaaaaaaaaaaaaaaaaaaaaaaaaaaaa

SEQ ID NO: 8941 - DNA, 645 bp, Gossypium hirsutum
  unsure (1)..(645): unsure at all n locations; Clone ID: LIB3828-021-Q1-K6-F9
ggtagacacttttttgccaagaacattgcgtntcgatatactcggccgggtccatttgaaagcacaagcggtggcgttaaggttacagtcagattttggagtgttctacaactgctcgatagatggttaccaagacacactttacgtattcagcaaacgccaattcttccgtgaatgcaccatctctggaacaatcgatttcgtattcggcgattcggcggcggtcttccaaaaatgcaaattccttgtccggaagccacaatcaggacaacaaaacgttgttacggcacaaaaaagattggaccataatcagcccacagcttttgtgatcatggacagtgaaatcatcccagatgctgagcttgcaccagcgaagaacgaattcccagcattccttggtcgtccatggggtaagctatccagagctatcatcatgcaaacttacattgacgatatggtacaccccgaaggttggactagttgggatcccaaagaaccgacaaatctttgccaatacgccgagttcaataacactggccctggtgcttccacttcccttcgtgttaaatgggccggagttaggttgcttaacgaggcagatgccattaactacactccacccaagttcttcgacgtcggcgatgc

SEQ ID NO: 8942 - DNA, 444 bp, Gossypium hirsutum
  unsure (1)..(444): unsure at all n locations; Clone ID: LIB3828-021-Q1-K6-G1
gaaagtaagatcttagtgcttgacgaagcgaccgcatcggtggatacagccactgacaacctaatacagatgacgttaagggagcacttctccgattgtacggtcatgacgatcgctcaccggataacttcggttctggatagcgacatggttctgcttctaagtcatggagtaatagaagaatatgatagtccatcaagtttgctggaaaacaagtcttcatcatttgcacagcttgtagcagagtacactgtgagatcaaattctggtttgaattagatgatgatgaagaagaaaatttacgagtgtaaacaattcgtgatgtttttaatttgtaattgtgaatgtttttcattgtttcgtgccattttctttggctcccaataaacgatttaaaaaatgcgttggtgtcaaatacatatctatactttatatnttgcnnaa

SEQ ID NO: 8943 - DNA, 438 bp, Gossypium hirsutum
  unsure (1)..(438): unsure at all n locations; Clone ID: LIB3828-021-Q1-K6-G10
ngacatctcctttcctttgaaaaagggtcctttaagcttcgtcgcaatgcgccttctatcactctcaaaaccctttttgcccatgaccccaaagttgcagaggtttataacattatggccgtaccggtggtgttactgttcaaaaacggagagaggaaagagtctgttgttggtaccatgccaaaggagtactatatagctgccatagaaaggattctgaaatcatgaacgatgaaacggtgcgtaaccaggatctacggtaaagctttttgccctctctggtgtatataatgttaatcggtgcacaagttgttcatcctttagttggcatcatggtagtgaaactggagtccctaaaactataaaactgatgttaccgatgcaatcttcccggtgtacccagattctcttttggattactttgtgtactgttctatc

SEQ ID NO: 8944 - DNA, 609 bp, Gossypium hirsutum
  unsure (1)..(609): unsure at all n locations; Clone ID: LIB3828-021-Q1-K6-G11
cgnaaaagataaagaattgaagaggtttcctttgttatcttgtgtgtggtggcactagcggtggtggtgttttcgggtgaaacatgcatggtggaggcagtgacatgtaaccccatcgagctcagtccatgcttagcggcaatcatggtgccgtcgcagcctccttcagccgcttgttgcagtaagttgaaggaacagcaaccatgcttttgtggttacattaaggacccaactcttaaacagtatatgaacaatcccaacattccaaaggtagctagctcgtgtggagttgcatatcctcctaagtgttaaaatgttgcttcattagagcatttccttcttcaaggactaatatgaataaatgaataattaaatgaaacataagtttatctattattaaactcatagtccaaataattttcttaattttaatatatatacatgcataatgattcaaaattcaaataaaggagagagataatgttgaaatctatgttatttaatttttttttgaagtatttgtacattttattcttgattataagttttaaaatatgattctttagataaatgaaaaagattaaaaataaatatattttatttcttttc

SEQ ID NO: 8945 - DNA, 634 bp, Gossypium hirsutum
  unsure (1)..(634): unsure at all n locations; Clone ID: LIB3828-021-Q1-K6-G12
caaacctggtttggaggagtcccagnagcagattcacaagatcaggatcactctctcctccaagatgtgaaaaaccttgagaaagtttgtgctgatttggttcgtggtgccaaggataagagactgagggttaaggggccagtgagaatgcccaccaaggttcttcacatcacaacgaggaagtctccctgtggtgaaggaacaaacacatgggatagatttgagctccgtgttcacaagcgagttattgatcttttcagctcccctgatgtggtcaagcagatcacctctatcaccattgaacctggtgttgaggtggaggttaccatcgcagattcttaaatatgcctcacttatgctttttggcaaccactagttttagtcaattagaagacttccatctgatatagccctcgatgtcctaaataatcttaagcttgagtggttggttacagggcttttgtagtttgtgattttcccatgctagtattaaagttaaggttctattttgtcctgtggctctggattctctttcctttttgttacctaaaaagatcatgtctggatgattttgtttattgcattatttgacattaaatatcacgaagctagctgcttcattttcattttgctt

SEQ ID NO: 8946 - DNA, 642 bp, Gossypium hirsutum
  Clone ID: LIB3828-021-Q1-K6-G2
gttttggtttttttgctttgctctgaaactccaagctctcatcaatggcggatccagcgactatctcaccagccacgctgttgaaagatgagcttgacatcgtgattcccaccattaggaacttggatttcttggagatgtggagaccctttttccaaccttaccatctcatcatagttcaagatggcgatccttcaaaggccatcaaagttcctgaaggctttgattacgagctttacaacaggaacgatatcaataggattttgggtcctaaagcttcttgcatctctttcaaggactctgcttgtcggtgctttggatacatggtttccaagaagaagtacatctataccattgacgacgattgtttcgttgctaaagatccatctggaaaagacattaatgcattggagcagcacataaagaaccttctgagtccctctactccgtttttcttcaacaccctttacgatccataccgagctggtgccgattttgttcgcgggtacccatttagtctccgcgagggtgttcccaccgccgtgtctcacggtctctggctcaacatcccagattatgacgcaccaactcagcttgtcaagcctcttgagaggaacaccaggtacgttgatgctgttatga

SEQ ID NO: 8947 - DNA, 574 bp, Gossypium hirsutum
  Clone ID: LIB3828-021-Q1-K6-G3
gcaatgcgatgtttgtggagaaaatacgacatttaaccaacagcaattcaaagatcttgattatgagaagttcactcaatcgccattgtcaacctctccgcaaaagctgaaactactctccccggattctagaataaccagtaaagagtacaaagagaggatcataagtggggaaccacatgttttggtggatgttcgaccggaacttcactacaagatagtttctatccccaactcattgaacattccgctcgcgagcttggaggctcgactgcccgaaatatcttccgcacttaaagaacaacagaaggaaagcactggatcgggagctaacctatatgtaatatgcagaagaggtaatgattctcaaagggccgttgattacctccgaaacaagggattcgatttagctaaggatattgtcgggggcttggattcatgggccaatgatgttgatcccaattttcctatgtattaagtacaaaagctattccagttttgcctgttagaactgaaacatgtcttgttataatctcatatttatatttatcttcaacgaacaccttttaccttc

SEQ ID NO: 8948 - DNA, 626 bp, Gossypium hirsutum
  Clone ID: LIB3828-021-Q1-K6-G4
aaaaacatggcaccacaccttaatattgttccttcctgtttgtgcttttattattattcatttcagcctctaaagttcaatcaggcgctattgatgttgttgccaagtttggcgcaaaagctgacgggaaaacggatctgagtaagccatttttggatgcttggaaagaagcatgtgcctctgtaaccccatcaacagttgtgattcctaaagggacatatttattatcaaaagtaaacttagaaggtccatgcaaggctcctattgagattaatgttcagggcactataaaggctccggctgatcctggtgctttcaaggaccctaattgggttagattctatagtattgaaaatttcaaaatgtccggcggaggaattttcgatggtcagggaagcattgcttatgagaagaataaagatccccacaatcgtgcatttcgtgtcaaactccccgttaatataaggtttgactttgtgaccaacgcattgatacaagatataactagcaaagacagtaaactattccacgttaatgtttttgcatgcaaaaacattaccctcgaacgtttcacggtagaggcaccggcagatagcccaaacacagatgggattcacatgggcaaa

SEQ ID NO: 8949 - DNA, 640 bp, Gossypium hirsutum
  unsure (1)..(640): unsure at all n locations; Clone ID: LIB3828-021-Q1-K6-G5
cccacgcgtccngaaaaccaaatagtgaaaaacaaaaagcaaaaatggagaaatctcagatctggttggcctttggagtcttggccttgctattggcatcggcaacggcggatgacgtcgttgtactaacggaagataacttcgagaaggaagtcggtcaagatcgaggagctctcgtcgagttctatgctccttggtgtggtcactgtaagaagcttgctcctgagtacgagaagcttgggtcaagttttaagaaggctaaatccgtcttgattggaaaggtggactgtgatgagcataagagtgtctgcagcaaatacggtgttcagggctacccaactattcagtggttcccaaaaggctctttggaacctaaaaaatatgaaggaccacgaactgcagaggcccttgctgagtttgtcaacactgaaggagggaccaatgtgaagatagccacattaccatccagtgttgtagtgctaaatgctgataattttgatgaggttgtccttgatgagaccaaagatgtgttggttgagttttatgcaccttggtgtgggcattgcaaaaaccttgctcctacctatgaaaaggtagcattggcattcaaaatggaagaagacgtagttatagctaatct

SEQ ID NO: 8950 - DNA, 460 bp, Gossypium hirsutum
  Clone ID: LIB3828-021-Q1-K6-G6
gtttttcgtcgcagcaggtctctcgactctcagtcagcttactattcttcaataccatggacgtgaagaagatctcatgcgccgtcattgtggccgtcgccgcctctatgagcgaagtcatggctgctggcgctccatctccagctccagcttcagctccaggtgcagcttcagcttcagcagctgccccaggcccagactccagcgtcgcaatctcaacaatgcctgttcttgggtccttggttggagccacccttgtttctttctttgcctactattttcagtaagccagcaagaatatacgaaagcatgaagtgttgaagaataaaaaatgggggattaataaatgtaaaatattactcggggttcaatccatttttacctgcttttcttcttttttttgttcatcacttcatttgtacgttcataaaaaaaagttgaattccatgtgatactttgc

SEQ ID NO: 8951 - DNA, 243 bp, Gossypium hirsutum
  unsure (1)..(243): unsure at all n locations; Clone ID: LIB3828-021-Q1-K6-G7
agcctttctgctnaattttcccagnatnaaaacatgaaaacatgtagnatgagnaaaacttccaagcaagttcatcctcatattatgcattttggtctacttttttaaactagtgcaattttcttcacttgtgtagatttcgtaatacataaaactatttaaggttgtctaaagttgtactgactcatgcctactcattgacattttgaaatgtaattaggaagttgttccaaaacgtacaat

SEQ ID NO: 8952 - DNA, 646 bp, Gossypium hirsutum
  unsure (1)..(646): unsure at all n locations; Clone ID: LIB3828-021-Q1-K6-G8
cggacgcgtgggcggacgcgtgggnctctaacaaagtggctagcagttctgacccatctgtgtctgggacactaggggagagtccagactggcttgagttcaatgaaggaagcggtgatgataaagtctttgaaaatctagaacaggccctattcaccgctngaaaaatcaaatcaagaagcatttgagaagttggaccggcttctgaaagctgaaaaagatgctctcaatgcagtagtaagccaggcaaatgaaatgaaaagttcatacattggagagttaagacgcaggaaggaaattgaagcaatgcttagaaaacagaacgaggagcttgaacaagtcacgcagcaaagagatcaagcacgcaaaatcgccagaactcataagttattattggagagtcgaggtgccaaatccgatcatgttaaagtattggaagctaagttatcatctgcaatggagcagttacaaatttgccagagagaacgagatgatttgcggacaaagctcgaacgtacttgcaattcaattgaagatcattcaacaaaacaggaagaagggagttctaatgtgcatatgcagcaattcttctcagagttctctgttgccgaaatccatgatgcaactgaggactttgacccttctt

SEQ ID NO: 8953 - DNA, 636 bp, Gossypium hirsutum
  unsure (1)..(636): unsure at all n locations; Clone ID: LIB3828-021-Q1-K6-G9
gnaacttgaggggacgaatcttgctctaccttgcttttctctcgcaaaaaatctcaaacttgtttttaacgttagctgaatactatcgctcatttcttcccgcagaaccctaatcgataactgaagccatttaatcatgtttgggcgtgttccaaaaaaatctgataacaccaagttttatgaagtacttggggttcccaaaagtgcaagtcaggatgaattaaagaaggcttataagaaagctgcaattaagaatcatccagataaaggtggagaccccgagaagtttaaggaactggctcatgcttatgaagttcttagtgacccagagaagagagacatatatgatcaatatggtgaagatgctcttaaagagggaatgggaggaggcggttcttctcacaacccatttgacatatttgagtcattttttggtgggggagcctttggtggcggtggtagctcgagaggaagaaggcagaagcgaggtgaagatgtggtgcatgctcttaaagtttctctggaagaattgtacaatgggacagcaaaaaagctctctctttccaggaacgcaatatgcagtaaatgtaaagggaaaggttcaaagagtggagcctcctctaagagttatggttg

SEQ ID NO: 8954 - DNA, 611 bp, Gossypium hirsutum
  unsure (1)..(611): unsure at all n locations; Clone ID: LIB3828-021-Q1-K6-H1
gagaaggaatggaatttcttctccgactgtatcgaacagtgccagggactccaatatcaccaatggccctgcctccgatccttctctccttcacgccgttaaaaagctctgcgagttttgcaagcgagaagataaaacctccgatgatttggttgctagggtttaccctcatctcaacaagcttttccaacgatccgttgcttccctctctcaatctaactcttccaacggactcctcttactgggaattcttcaatttttccttgattttggagaggtggttctacatgatgctgatccaagtttgcatacattcatccgttcatgtttgagccgtgagtttgcagatcctattgttgcagcagcaactcttgattttctttatgtaaacaagaacaaacttctcatatctttccccaacttactacctcagtttttccctttgattctgaagctgactgcatggaatggaggaaaattagagaagccatttctcaaggttctaccaggattggtgtcacctgngtcatttctcccactatttccatctttaatggacttgccaatcttggttgtggctttggaaaagtagaacgaagctcaggatcact

SEQ ID NO: 8955 - DNA, 615 bp, Gossypium hirsutum
  unsure (1)..(615): unsure at all n locations; Clone ID: LIB3828-021-Q1-K6-H10
gctttgctgaagctaacaaggnacaagttgtccgctcttatggttacttatccttcacacatggagtgtatgaagaaggcatcgatgagatatgtaagattattcatgacaatggaggtcaagtttacatggatggggctaacatgaatgcccaggtcggtttgacaagtccgggttttattggagccgatgtttgccatctgaatctccacaaaaccttctgcattccacacggaggtggtggacctggcatgggacctattggtgtcaagaagcatttggcaccatttttgccttcacaccctgtggtacccacaggaggtatcccagccccagaaaaatcagaccctcttggtaccatttccgctgcaccttggggctctgcacttatcctgccgatatcttatacttatatagccatgatgggatccaagggactcactgatgcttcaaagatagctattttgaatgcaaattacatggcaaaacgcttggagaaacactaccccgttcttttccgcggagttaatggaacagttgctcatgaattcattatagacttgagaggttttaagaatactgctggaatagagcctgaagatgttgccaaacgtc

SEQ ID NO: 8956 - DNA, 627 bp, Gossypium hirsutum
  Clone ID: LIB3828-021-Q1-K6-H11
atagccaacaagctcaacagtaagaagaataagaagaagaagaaaaaatcgagataggcgatgaaataattcgaagcaaaattggtatcatgagagcacttgcagagagagatgacccatcagttaaggaagtggatgattttatgatacggagattccttagagctcgtgatttggatatagagaaagcaaacaccatgttattgaagtatttgagttggagaagaacgtttttgcctaaaggattcgtatctgaatcggagatttcaaatcaattggctgataataagctttgtatgcaaggagttgataaacaaggtcgacctattgtcgttgcttttggtggtagacataagcctactaaagggaaccttgaagaggttaaacgctttgttgtctatggtttagagaaaatttgtgccagaatgccaagaggacaagaaaagttcgtggcgatcggagatctcgaaggatggggatattcgaacagcgatattcgtgcatacgtcgcatctctatcgattctccaggattgttacccagagaggcttgccaaattgtttattgttcatgtgccttacatattcatgactgcctggaaagttgtttacccattcattgacagca

SEQ ID NO: 8957 - DNA, 628 bp, Gossypium hirsutum
  Clone ID: LIB3828-021-Q1-K6-H12
aaaaaataaggtggcttgaaagaaataattttctttctattcattatttggtagagttgaaaaatgagaggaaagaaaatgaaatttttgaaaaatgcataattttaaactaatgcatatccctctctcatcttctctccttttatttgtgtttatgcaataggacggaaaatagcctatttttatactttttcactcaaccaagcacactctaagggtcttgaatgttgttgccctaatgcacttcttattacttggattcattatgattgtttctatgatcctcaatctatctgcgaaggaaatatcctctcttttttttttcttttacaggggatggaagagttaagatgccactaagtccaactgttcatggtagtcaacagacaccatttggcttgggacatagtcttggcagcagtatccagctgactgagtcttccttgtacccatcaaccagcagtgtttcacatagttattcctcaagtagcttggggcagatgcaatttgacaatagtagcgtgggttcattctggtcccctcacagaagtcagatgcgactgcaaagtaggagatcacagtcacgagaagaccttaactcctcactagctgagacacaaatggtgaa

SEQ ID NO: 8958 - DNA, 583 bp, Gossypium hirsutum
  unsure (1)..(583): unsure at all n locations; Clone ID: LIB3828-021-Q1-K6-H2
atacgcttngaaggttgtaggcagactgtggtcaagaagagagagagaaagtttctattacccttgtccatgtgatccgttttaagcgctgaaagtagtttgattcatcatttgagctgcccgtggatggcttattacctgttttaacaaatggggcgatttcagacattgacaaaattgatcttggtcagtaagactgttgcctaccttcttttgaagtagatggtacaacttattgttcatttttcttcacaaaaccatacttgaagcccatggtcatttgccatacactttgaacctgtaacatttgacagttctgtatacaacaaaaagaacaatatgcctataaaatgaaagcaagagagagagggaacattgaagaagaaaagaaaccattttcagattgaattggcaagggaggttgaaagaaaatttgacattcttttaagtggttgtatgaagcaatatgcttcagttttcttgagggttgaccttgttaccgagtattaattagtataaattcataaccttgttgatttttcttctactacactctcatttgaatacactgtntttagtttat

SEQ ID NO: 8959 - DNA, 465 bp, Gossypium hirsutum
  unsure (1)..(465): unsure at all n locations; Clone ID: LIB3828-021-Q1-K6-H3
cttcgatcttgcatctccnggggtgcaatcatagaagataccttactgatgggagcagattattatgagactgatgcagacaggaggtttttgtctgcaaagggcagtgttccaattggtataggaaagaattcacatatcaagagagccattattgacaagaatgctcgaattggagacaatgtgaagatcataaacagtgaaaacgtgcaagaagcggcaagggaaaccgatggatatttcataaagagtgggattgtgacagtagtcaaggatgccttgattcctagtggaactgtaatctgagaagattgcattatgatacagcaaaccaccattagtgtttctagatagagaaagtaatgcaatagcaaatcacttccactttatcccttatcatgtatattttgagctactgcggtataattatattaataaaatgaaatggagccgataatggccggc

SEQ ID NO: 8960 - DNA, 559 bp, Gossypium hirsutum
  unsure (1)..(559): unsure at all n locations; Clone ID: LIB3828-021-Q1-K6-H4
ctcaaattccataaatcccaataattccagnaaatcccacaaatcccacatatcccacaaatcccacaaattccactaatcccacanatcccacaagtcccacagatcccacaagtcccaaaaatcccactaatgccaggacagtcgggatgtgagagtggagagtgttgccgtcagggttgtggtgggacttgtgctgagtgtggtcagcccaggtgcgcatcaggatgttgccaggctgaaactgtaaagagcaaagggatagaagaggttatggacagtgaacccagtccaccaaagtagagagatgataccatattaagatgaaataacgaggaagagttggttgtcgtcttattaattatacaaaataagaagtaatgatgttgcagaagggtttgctataaaatcctcttggacaaaaagagtaattatgaagaataaatagctcaaaacaatattcgatttgcaatatcctaaagttccttgaatcttgttttgtagccatatgtaattaatgcatgtgcatgctaatatatatgattttctttgttatttt

SEQ ID NO: 8961 - DNA, 595 bp, Gossypium hirsutum
  Clone ID: LIB3828-021-Q1-K6-H5
ctcaactggaccaggctgcgtcgggtgagcatcgtgagcacaatattgatattattttcattgtgctgaacggctgaacccaagacctcttcgtacaagagttcactttgcaattctaataactcaccaacctaccaacttttttttttttcttttttatattatatatttataataagtttataatatttataataacaaattactacctttaatcttaatatatactctaaacctcaaatataaaatttgagcttgaaattaaacttgaaaaaaaaaaaaaaaaaaaaaaaaaaaaaaaaaaaaaaaaaaaaaaaaaaaaaaaaaaaaaaaaaaaaaaaaaaaaaaaaaaaaaaaaaaaaaaaaaaaaaaaaaaaaaaaggggggggccgtttttaaaggatcaaagtttacttcccggggcttggaaggtaatagtttttttttggggcccccaaatttaatttactgggccggggtttaaaaacggggggatgggaaaaacccgggggtacccaaattaattggcttggaagaaaatccccttttcccaagttgggttaataccaaaagggcccgccccgatggcctttcc

SEQ ID NO: 8962 - DNA, 626 bp, Gossypium hirsutum
  Clone ID: LIB3828-021-Q1-K6-H6
accatctcgcgctgtcatcatcttctgcaaggtaaatggtatagattatacggagcgcaaggtagatatctcaaagagagagcatttgactcctgaatttgctgaaatccatcccatgaaacagctggctgccattgttgacggaaattttaagttgtttgagagccactccattcttatatatcttgcttgtgcgtttcctggagttgcagatcattggtatccagctaatcttttcaagagaagtaagatgcattcggtgttgtattggcatcactccaacttacgtcgtgctgcagatacatatgttactaacactacaatattacccgcgcttggccatccatcgaatcaacaagcagctgctgaagctgagaaacttctcttctcatctttgtcaaagatagagtccttttggttgaagggtgatgggccatttttgctgggtaggaatcaaccctccatagctgatcttagccttgtttgtgagctaatgcaacttgaggttttggatgagaaggatcgtgagaggtttttgggtccatacaagaaagttcagcagtggattaagcatacaaggaatgctacgagtcctcactttgacaacgtgcataatatcctcatga

SEQ ID NO: 8963 - DNA, 611 bp, Gossypium hirsutum
  Clone ID: LIB3828-021-Q1-K6-H7
ctgctttagagttctggtccgctcacactcttccttctctctaaatctaatactcagatccgcgagtaatttttgtcacaggcttaaattcttgcccctctgaaagtgaataattccaaaggctgtgacaataagctcgttagaatggagacctttctattcacatctgaatcagtgaacgagggtcacccggacaagctctgcgaccagatctctgatgctgtgctggacgcttgccttgcccaggaccccgacagcaaggttgcctgtgaaacatgcaccaagaccaacatggtcatggtctttggagagattaccaccaaagccaatgtagactatgagaagattgtccgtgacacatgccgctctatcggatttgtttctgatgatgtgggtcttgatgctgacaactgcaaggtcctggtcaatattgagcaacagagccctgatattgcccagggtgtccatggccacttcaccaagcgcccagaagaaattggagctggtgaccagggccatatgtttgggtatgccactgatgagaccccagaactcatgccccttagccatgtccttgcaactaagcttggggctcgtcttactgaggttag

SEQ ID NO: 8964 - DNA, 624 bp, Gossypium hirsutum
  unsure (1)..(624): unsure at all n locations; Clone ID: LIB3828-021-Q1-K6-H8
ctcttcctctanaagggataattaataaattactgtcgggcgaaaaaaaaggtaagagatggctcgattaatgttaatatcgatgctatttctcttggcaggatcaatgcttatggtccagggcggagatcccaccctttttttcgaatggaacgtcacctatggcaccattgctcccttgggagtgccagtaaagggtattcttattaacgggcaattcccgggaccaaatcttaactctaccaccaacaacaatatcgtggtcaatgtgttcaataaccttgatgagccattccttgtaacatgggacggcgtgcagcataggaagaactcttggcaagatggtgttctgggaaccaactgtcctatcccccctgggaagaattacacctataaattccaggtgaaggatcagattggcagctacatgtactatccggtgacggctatgcacaaggcggttggtggtttcggtggcctccgtgttaacagccgtctactcatccctgttccctacgctgatccggctgatgactatactctcttagtgggagactntttcaacaagggacacaccagcctcaagaagattcttgatagcggtcgcaaccttgggagatgtga

SEQ ID NO: 8965 - DNA, 626 bp, Gossypium hirsutum
  Clone ID: LIB3828-021-Q1-K6-H9
aaacccttaactaaaccaccattcttagcttttctttttaaattattctattactaatccatcgatttttgcacaattgatcaactcttcttcgatctactcctcaaattccaccaaaaactcctgggtttattgaattttttttaatattttcttatataggttttttgtttttttttctctttcaatcgtgattcattgattgatttggcaattctgggatttacccatttcatattattgtgaaatattggtggggttttgattttctcctcgtgatcttcttgtttgcatttatttgctttgattatgaacgaatgttcaaatttatcatcttttttttttatagcttttttttcctttgctggattataccttccttgtgttgtctgtaatgaatttggcatattttcttattgattatgattattatttttaataataactattattttatggtgtatgctcataatcttttttcagaaaccaatgctctcatattatgctgtagatatcatttttaatagcttcagcctgctagcaagattgttccttctcaaaggttagaagagagttagctggttttcctcttggcatgcttgaattagtgaaatggacaggagtag

SEQ ID NO: 8966 - DNA, 353 bp, Gossypium hirsutum
  unsure (1)..(353): unsure at all n locations; Clone ID: LIB3828-022-Q1-K6-A1
tagcagnanaatttggttcaggcactagccacccaacatatatgtggtctccttaaattatttattttgcttactcaaaaaagatcataagattatatattgaaaatataataaatttgttttacttctgtttgcagttctcaaaaaaaaaaaaaaaaaaaaaaaaaaaaaaaaaaaaaaaaaaaaaaaaaaaaaaaaaaaaaaaaaaaaaaaacaaagaggacccaacacatagaaacacaagacataacatcttctatcgtgccaacacaaagtacaactaaattggccggcacttaaacaacgtgaaagagcggggaaaactgagaacgtcccggaacgtaaaacacctt

SEQ ID NO: 8967 - DNA, 538 bp, Gossypium hirsutum
  unsure (1)..(538): unsure at all n locations; Clone ID: LIB3828-022-Q1-K6-A10
gacaaatatgcagctgatgaggatgctttctttgctgattacacntgaagctcacctgaagctctctgagctaggatttgctgatgcataagctgatgatgattgcaaaaataggaagaagccaacgacacagatgttttaggttttgttttctctctaaagttggcttaaggaatgaatttggggaggtttccgagacaagcttttttcgataattttattctaaactcacattccccatcttcttgttcgtagctgttgcattttctttcttagtggatgctccatagatatgtttggtgaatgcattccttgaagtagacgttgtgttgaaacttgttatccgttgttggaattatttgcggagtataaattaaatgatacaccattgatgaaaataactggaaaagaggtcagtgactcgatatgcttatttcagtatcaaattggttacttgagaaccgttataatcggttaccactcgtttgtagcaatgttaccccacttttctgttggagcaaagatccgtttccatgct

SEQ ID NO: 8968 - DNA, 636 bp, Gossypium hirsutum
  Clone ID: LIB3828-022-Q1-K6-A11
ctcaatccaaacatctcaagctccccccgggacctactggttggcctattgttggtaatcttttccaggttgctcgctccggcaagcctttctttcaatacgtcgacgatcttcgccgtaaatatgggcccattttcactctcaggatggggactcgaacgataattatacttagcgacgccatgctttgccatgaagctttcatcgaaaaggtgctatcttcgccagcagaccccgagaaaatcccactcgaaacatctttagttgcaacaagttcaccgtaaatagcgccgtttacggccttgagtggcggtctctaagacgaaacttggttcaaaatatgctaagctcaagtaggattaaagagtttcacagtattagaagtcaagctatggataaactcatagatcgtcttcgagccgaagctaaggccaatggcggcgttgtttcggtgttgaaaaatgctcgtttcgctgtgttttgtatactcttaatgatgtgttttgggattgaaatggatgaagaaactattgagaaaatggatctaataacgaaaaatgttctgattacattagatccaagaatcgatgattttcttcccattttaagacccttttttggcaagcaacgcaagcg

SEQ ID NO: 8969 - DNA, 633 bp, Gossypium hirsutum
  Clone ID: LIB3828-022-Q1-K6-A12
catttctgctcccataaggagctccctgtttgttgtgggtgtcaatgagaaggaattaagcctgaccttaacattgtctccaatgctagctgcaccaccaactgtcttgctccattggctaaggtgatcaacgataaatttggcattgttgagggtcttatgaccactgttcattctattactgctacacaaaagactgttgatggtccttccatgaaggactggagaggtggtagagctgcttccttcaatatcattcctagcagcactggagctgccaaggccgtcggcaaagttttgccagcactgaatggcaagctgactggaatggctttccgtgttcccactgttgatgtctctgtggttgacctcactgtgagacttgagaagaaggctacatatgatgaaattaaggctgctatcaaggcggaatctgaaggcaacttgaagggaattcttggttatgtggacgaagatttagtctcaactgacttcatcggagacaacaggtcaagcatttttgatgccaaggctggaattgctttgaatgacaactttgttaagcttgtgacttggtatgacaacgaatggggttacagttcccgtgttatcgacttgatccgacacatgtct

SEQ ID NO: 8970 - DNA, 632 bp, Gossypium hirsutum
  unsure (1)..(632): unsure at all n locations; Clone ID: LIB3828-022-Q1-K6-A2
ctccgataatctcatcccaatttcctccccagcatcactctgttttgtttcttggtcagtttccgttattaaacaatgngaaaagattcagcacagccatgtccaagcgcgaggattaaagcttcacgtagcccaaagtggaacaggtttgaagtatactatataatataagattggttgatgttggttccattggaattaatgggataattaatggtgttgtgcaggtcctaaggtggtgcttttcctgcatggcttcccggagatttggtattcatggaggcaccagatgattgctgtggctaatgctggtttccgagcaattgcttttgatttcaggggctacggactctccgaccacccaccggagcccgaaaaagctagtttcaaggaccttgtcgacgatgttgttgcccttcttgatttgttgggaatcaataaggtttttcttgttgggaaggattttggagcagtgcctgcatttatggtagctgttatccaccctgaaagggtgttaggtgtcataacactaggcattcctttccttatacctggtcctgttggtatccaatttgatctcctccccaaaggcttctacatattaagatgggcagaaccaggaagagctgaag

SEQ ID NO: 8971 - DNA, 577 bp, Gossypium hirsutum
  unsure (1)..(577): unsure at all n locations; Clone ID: LIB3828-022-Q1-K6-A3
ggaacccctcagtggcatatacatttgacgctgggccngaagcagttttaattgcacgagatagaaaggcagctgctcaattaattcagcggctgctattctacttccctccaaagtctgatactgatctggacagctaccttctcggtgataagacgatacttaaagatgctggactcgagggattgaaggatgtggaagctttgtccccacctcctgaaaatggttcagctcagaaataccctggggatgtcagttacttcatctgtacaagacctgggaaaggccctattctgctttcaaatgacaaactggctcttcttgacccagaaactggacttcccaagtaagaagtgccatactttctctccgcaacattggtaaaacttatcttcaaggagagctgaatgtctttgagctgcaaaagtgtcagataggttatttcttcagcttgttttcgttttatttatgtatttgtagttttctttttttgcccttatgtccaattgaggtttgaatcctcaccatgattgaaacaataatgaataaattggttgctntattgaccctctaaaaa

SEQ ID NO: 8972 - DNA, 389 bp, Gossypium hirsutum
  unsure (1)..(389): unsure at all n locations; Clone ID: LIB3828-022-Q1-K6-A4
caacgtgttaaggctaagaaggagaagcttgacaanaagaggaagcccatttctaaggaggaggcaacagcaatcaagtcagcaggcaaagcatggtatcagactatgatctccgacagtgattacacagaatttgagaacttctctaagtggttgggtgtgtctcagtaattttagtttttgatttagatatttgttgcagacaatgttttcagctttgttatggtgttgtccttttagttattttggtgttttgagttgtgggtggaaggaaaattagtgaaatatcatgctttaatacgcttctgttttgtcctcctcccctgttttcgcattctatggctagtggaatagtttctataatatgagaacaagaaattaatcagttt

SEQ ID NO: 8973 - DNA, 631 bp, Gossypium hirsutum
  Clone ID: LIB3828-022-Q1-K6-A5
ggcggatcacctatcaaaaagcatctgcaggggagttgcgtttacacaaagacatttctgagctgaacctgcctaaatcatgttccatatcatttccaaatggaaaggaagacctgatgaatttcgaggtttcaattcgacctgatgaaggatattatttcggtggcacatttttgttctccttccaagtttctcccatctatccgcacgaggcaccaaaagttaaatgcaagaccaaggtctaccatccaaatattgacttggaaggaaatgtttgcttaaacatcttgcgtgaagactggaaaccagtgctaaatataaacactgtaatctacggattataccatcttttcacggagccaaattatgaggatcccctcaatcatgatgctgctgcagtgttgagggataatccaaagatgtttgaatcaaatgtgaaaagggctatgtatggtgggtatgtggggcaaacctatttcccgcggtgtatgtagcttttacgatgtagctgaaagcgcaaactcactatgttatggacagttggtttctgtgggttgtataatttgtctggaaattaccctttgtcatcccctttgattttctcaagtgaacctgaggaaatattttctgc

SEQ ID NO: 8974 - DNA, 529 bp, Gossypium hirsutum
  unsure (1)..(529): unsure at all n locations; Clone ID: LIB3828-022-Q1-K6-A6
ttttttttgattgcttgatcgtgtgtgtcacatttttttgtgtttgtggctatatagccaaatacaaatatgcttttctgttccttgctactgttttgcttcgtttctgcctcttgctttctttttgtctctatttttgcaggttctaagggtcaacgaggcaaaagcttgccattttggtgtaaccggtgtcaggggggccgtcccttgagcggagcgcgccccaaggacgcacatggaggctgcagcgcctagggcttccttggctgaagggtggattatggagagagtggatttgtggtatctcaacagctctactcagcacttgcaaatatacagatgggtcttatagaagataaaatgggttggactacattgttaaactagttaaacgaacaaaggtatttacttattttctagaatatttaacatcgttgaattaccaaggtgtagtagggtacctattcaaaggtcagaaaggttgtaagacattaaagagatggttaaattcagaccttacacatttngg

SEQ ID NO: 8975 - DNA, 641 bp, Gossypium hirsutum
  Clone ID: LIB3828-022-Q1-K6-A7
ccacattggctgtttgtaatcatccgaaaaagatggtgaccgtggaagaagttcgtaaggctcaacgtgcccaaggccctgccaccgtgttggccatcggcacatcaaccccgcctaattgtgttgatcagagcacataccctgactactatttccgtatcacaaatagtgagcacaaaaccgagttgaaagagaagttcaagcgcatgtgtgaaaaatcgatgatcaagaagcgatacatgtaccttacagaagagattttgaaagagaatcccaatgtatgtgaatacatggctccttcactggacgctaggcaagatatggtggtagttgaggtgccaaagctaggcaaagaagcagccaccaaggccattaaggagtggggccagcccaagtccaagatcacccaccttgtcttttgcaccactagcggtgtggacatgcctggggctgactaccagctcaccaagcttttaggcctccgcccctccgttaagcgcctcatgatgtaccaacaaggttgcttcgcaggggggacggtgctccgagtggctaaggacttagctgagaacaacaaaggtgctcgtgtacttgttgtgtgctcggagattactgctgttacctttcgtggacctagtgac

SEQ ID NO: 8976 - DNA, 625 bp, Gossypium hirsutum
  unsure (1)..(625): unsure at all n locations; Clone ID: LIB3828-022-Q1-K6-A8
gtgatcagcttcattttattaggcatgtcacttccagctataacctgacaaagattcaatcaaagagaagaatggctgcccaaaaacaatcatacttgtcgatatcaagctcaacgagcactttagcatgtgaacataacggtgaagatgacgaagatgaagatgatatggaggctgggacatgcaagagtggaaatgacaagaagcgaagtatgattgtacaacaagaatgccaatttggtcagttatggagaagttggtcctcgcattcaaagacgtcaaccattagaagaaaaggatcaagccaaggcaaggtttgccagcctagagatggtactagttttgtggggaattttaggaaaatctatcaactttggggtactactaaatattctccaaagcccaaatgaagggaccactcggaggttgcctatatgcattcattactgctactgttgctttgacttagcttagcactaaggctgttttgttctgaatccttaacattatgttttgtgtcacaactttttaaaagttgtttacttgcattatgtttcatgtttgattgttggagtaatggagaaacaaattcatcggcttgcatttttaanaaaaaaaaannnaa

SEQ ID NO: 8977 - DNA, 605 bp, Gossypium hirsutum
  unsure (1)..(605): unsure at all n locations; Clone ID: LIB3828-022-Q1-K6-A9
cccagcgtccgtgcaggacggttctctaatcctttttttcgggtgtagcgttgtttatacgtttggttgttgttgaagaagtgctactaccatggctacaaataatacgttggggacttgaaggaagctgatttgaagggaaagaaagtgtttgttagagtcgatctgaacgttccattggatgataacttcaacataactgatgacacaaggatccgtgccgctgttcccaccatcaagtatttgatgggtcatggctctaaagtcatcctctctattcatttgggacgcccaaatggtgtcactcccaagtacagtttgaagcctcttgtgccaaggttatctgaactccttggagtcgaggttaaaatggcaaatgactgtattggtgaagaagttgagaaaatggtggctgccttaccagatggcggtgtattgctgcttgagaatgtgaggttctacaaggatgaagagaagaatgatcctgaattcgcaaagaagctagcttctctcgctgatctctatgttaatgatgcatgtggcactgcgcacagagcccatgcttacacanatggagtggctaagtacttaaagccttctgttgc

SEQ ID NO: 8978 - DNA, 656 bp, Gossypium hirsutum
  Clone ID: LIB3828-022-Q1-K6-B1
ctttctctcttccgcgccggcgatagtcccttcttcttcccttgccgctgtggactccctttagtcagcttcttgtcagggactatgagtcatcaggagagtcagaagttggataatgtgaaccctttggagacgagagttgaggatgtcattgagagaggcgataatgatttcttggacgataatcatgatcaagatgagcatagtgaaagctcccaatcccatcaagcagttgatgagagtgactcatctgaagatgaggtggctcctcgaaatacaattggtgatgttccattggagtggtacaaggatgaaaaacatattgggtatgacattgccggtagaaagataacaaagaaagaaagacaagataaacttgattcctttctcgcaagtgctgatgattcaaagaattggcgcaagatttatgatgaatataatgatgaggaagttgagctgactaaagaagagatcaaacatattcgtagattgctcaaagggaaggcaccacatgctgaatttgatccatatgcgccttatgttgattggtttaagtgggatgatgcgaaacatcctttatctaatgctccagaaccaaagaggcggtttattccttcaaaatgggagagcaaaaagttgttgagtatgttagggca

SEQ ID NO: 8979 - DNA, 649 bp, Gossypium hirsutum
  unsure (1)..(649): unsure at all n locations; Clone ID: LIB3828-022-Q1-K6-B10
ggggttggcaaaagcactttctctgcccaactctcatttgcactagcagctaaggatttccaggtgggtctactggacattgatatttgtggtccaagcattccgaaatgcttggcctagaaggtcaagacattcaccaaagtaaccttggctggtctcctgtttatgttgagtccaaccttggggtaatgtcaattgggttcatgctccccaaccctgatgaagctgtcatttggagaggaccgcgtaaaaatgggctcatcaaacaattccttaaagatgtatactggggagagcttgattttctggttgttgatgcccctcctgggacctctgatgagcacatctcaatcgttcagttcctacaggctactgggatagatggagctatcatcgtcactacgccgcagcaagtctctttgattgatgtgcgtaaagaagttagtttctgcaaaaaagttggagtaccagttcttggagttgttgagaacatgagtggcttgtgtcagccattgaaagatttcaggtttttgaggatgacagagaatggtgaacatactgatctcacagagaaggttattgagtatatgaaggagaaagcacctganatgctagatctcattgctgccagtgaaatctttgatagcag

SEQ ID NO: 8980 - DNA, 641 bp, Gossypium hirsutum
  unsure (1)..(641): unsure at all n locations; Clone ID: LIB3828-022-Q1-K6-B11
aaaaaccttggcaatttaatcaatttgttcgtttgctaagaaaagagaagaaaaatgaacgacggggatgtatcgaagcaaatccagcagatggtgagattcatccgccaagaagctgaggagaaagccaatgagatttcagtatctgctgaagaagaattcaacattgaaaagctgcaaatcgtagaagctgaaaggagaaagattaaacaagagtacgagcgcaaggcaaagcaggtggaaatacgcaagaaaattgagtactcaatgcagctgaacgcgtcgaggataaaagtgctgcaagggcaggaagagttggtgaactccataaaagaaagcgcgaggaaagagctgcagcgtttgggcactgacaaaagggggtataaaaacctggtgaaggcattggtggtgcagagtctggttcggctgagggaaccgtcggtgttgttgaggtgccgagaggtggatcgtaagctggtggaaactattatcgatgaagctaaacgagagtacgcagagaaattcaatgtacctccacctaagattgttatcgacagtgtttatctcccaccaccaccgnccgctaacggagatgagtttgcccatcaaccttactgctcgggcggagttgtgttggcttc

SEQ ID NO: 8981 - DNA, 421 bp, Gossypium hirsutum
  Clone ID: LIB3828-022-Q1-K6-B12
gaataaggccgcctcaaccgattgccatcggcttgtgttggagacatggtgatggctactgtcaagaaaggaaagcctgatctaaggaagaaggtcttgcctgccgtcattgtgaggcaacgtaagccttggcgccgaaaggacggtgtttacatgtactttgaagataatgctggtgtcattgtgaatccgaagggagaaatgaaaggttctgccattactggtccaattgggaaggagtgtgctgatctgtggccaagaattgcaagtgcagcaaatgccattgtttagggatttgaatttttctagagatttttgtttccttgagtcatggtttttgctggatcaagattttgttatatgtgtttttttaggggttcttgaaaaatatcgtatggatagctttgatttggattttgat

SEQ ID NO: 8982 - DNA, 644 bp, Gossypium hirsutum
  Clone ID: LIB3828-022-Q1-K6-B2
ggaaaacaaaagcaaaaatggagaaatctcaggtctggttggcctttggagccatggccttgttattggcatcggcgacagcggatgacgtcgttgtactaacggaagatatcttcgagaaggaagtcggtcaagatcgaggagctctcgtcgagttctatgctccttggtgtggtcactgtaagaagcttgctcctgagtacgagaagcttgggtcaagttttaagaaggctaaatccgtcttgattggaaaggtggactgtgatgagcataagagtgtctgcagcaaatacggtgttcagggctacccaactattcagtggttcccaaaaggctctttggaacctaaaaaatatgaaggaccacgaaccgcagaggcccttgctgagtttgtcaacactgaaggagggaccaatgtgaagatagccacattaccatccagtgttgtagtgctaaatgctgataattttgatgaggttgtccttgatgagacgaaagatgtgttggttgagttttatgcaccttggtgtgggcattgcaaaaaccttgctcctacctatgaaaaggtagcattggcattcaaaatggaagaagacgtagttatagctaatctagatgctgacaagcacaaggatctagctgaa

SEQ ID NO: 8983 - DNA, 637 bp, Gossypium hirsutum
  Clone ID: LIB3828-022-Q1-K6-B3
attttggtagaattcttttgttgattgcgtgggagtgaaatccgaagtggtttccgatggaaatataagatcataatttggactttgattatcgctcaatccaggtttttcttgcttcaccttattctttttaaaatatttctttttttacttcttttgattcgtcgcaaaccttagtttttggttaggctagttttgagggatttaaagaaaaagaataaaaacgaatttgagattaggaaatttgatattgattttattttcccgggtgtatacagaagtcagttacgccgccgtttttgttttcccttttttggggttttcagtttgatgttttggtattttaatgcaagaaacactctgtgaaatttttgatgccttgttttagtatgccatccaaaatcgagggtttttcttgttagattagatcctctgctaaattacccccttttttttgttgttttaattttgattttccatttttttattaaaaaaaagagagagagagagaagacaagtgaggaggaaattttttgggtttgcattttaagaaaggtcgttagggtttttggttagaattaccgtagatattgaggaaagaaagatttgggagttggttgtttgtagaacaatggcg

SEQ ID NO: 8984 - DNA, 655 bp, Gossypium hirsutum
  Clone ID: LIB3828-022-Q1-K6-B4
taaaaagaatgcaaagttcaaaaagatgaccaaaacaacgaacagatctctggcctaaaacatgttgtagacgaggccaagcagcatcataatgtgaagaatgtgtatgtgtggcatgctttggctggctattggggtggagtcaaacctgcagctgctggtatggaacattatgatacagcattggcatatcctgttcagtccccaggtgtgatgggcaaccagccggatatagttatggacagccttgctgttcatggccttggtttggtgcatccgaagaaggttttcaacttctacaatgagcttcatgcctacctggcttcatgtggagttgatggtgtgaaggtcgatgtgcaaaacatcatcgagacacttggtgctggacacggtggtagagtatctcttacccgcagttacgttcaggcccttgaagcgtcaatttcccgaaacttcccggacaatggatgcatagcatgcatgtgccataacactgatggaatctacagcaccaagcagaccgctgttgttagagcttctgatgacttttatcctcgtgaccctgcttcacatactatccacatttcctcagtggcttacaacactcttttcctcggagaatttatgcaacctgattgggatatgttccatagct

SEQ ID NO: 8985 - DNA, 641 bp, Gossypium hirsutum
  unsure (1)..(641): unsure at all n locations; Clone ID: LIB3828-022-Q1-K6-B5
ggaaaaccaggttttaccaacctacatagaattgccataggcctagtgctatcaacgttgggaatggcggtcgcggcactagccgagaagaaacgattggcagtggcgagaaccgtgggtgccaacacaacaacgctgcctataagcgtcttcatgctgatcccacagttcttcctagtgggggctggtgaggccttcatctacacaggccaacttgattttttcatcactcaatcccccaaaggaatgaaaaccatgagcactggtctcttcctcacgacactatcgctgggtttcttcgtcagcagtttcttggtatcagtagtgaaaaaagtgacgggaagcaatgatgggcaaggatggctagcggataacataaaccatgggagacttgattgcttttatggacttttagcagttctaggcgtgataaacttcgtactgtatcttgtttgtgcggtgtggtataaaccaaagaacccaaaacctgccctacagatggagaccattgtcaatggctcatctgctgagaataagtgctagaaacgtgttataattgcattttgttggtgttgttgtaactntagtttcatcgccttcttttgtgtattaataactggtttgggtttggtttcctttct

SEQ ID NO: 8986 - DNA, 622 bp, Gossypium hirsutum
  unsure (1)..(622): unsure at all n locations; Clone ID: LIB3828-022-Q1-K6-B6
gnaaaaaacagaagatctgatgtacttgcctgtggatcttaattatagacaagatcatgatggcccttgaaataaagaaacatgcagaactgtgaggcaaccttaaaatgcctccagacaaaggggttcccgtacaacctgcaatgtaacaggaattcagttgaaggcattccagagcttaaacatgaattcggtactcatccgggcagagatgttgtagaaccagtttgctctttgagtggagagtttgtggaacttccgaatgaattttaccacaaacctacactccaccacgaatgtggctcatggtcgaccttctatcctgactctcataagttgcaggcataccagttgaatgcttttgggggccaagtttaccactttcctgtggataaccgatttcattatgccccatttaatgtgatcactcatggatacccttgtgaattccagttccaagattttcagtactttgtggtcatagattttgaggctacctgtgacaaggagagaaacccacatccacaggagataatcgagtttccatctgttattgtgagtagtgttactgggcagctggaagcttgttttcagacatacgtccgaccaacttgcaaccaac

SEQ ID NO: 8987 - DNA, 654 bp, Gossypium hirsutum
  Clone ID: LIB3828-022-Q1-K6-B7
gccacacagtccctatttacgagggttatgccctcccgcatgctattcttcgtctcgatttggctggtcgtgatcttaccgttaacttgatgaagattctgaccgaacgtgggtattcattcaccaccacagctgagcgggaaattgtaagggacgtgaaggaaaagctgtcatacattgctctcgactacgaacaagagctagagacctccaaaacagactcatcggtagagaaaacctacgaattacccgacggtcagattattaccatcggtgctgaacgttttagatgccctgaagtgcttttccaaccatctttgatcggtatggaagctgcaggcattcatgagacaacatacaactccataatgaagtgcgacgtggatattaggaaagacttgtacggtaacatcgtcctcagtggtggtacaaccatgtttcccggtatctccgataggatgaccaaggagatctcctcattagcacccagcagcatgaagatcaaggttgttgcaccacctgagaggaagtacagtgtctggatcggtggctcgatcttggcttccctaagcaccttccaacaaatgtggattgccaaggcagagtacgacgaatccggtccgtcaatcgttcaccgcaaatgtttctaaacag

SEQ ID NO: 8988 - DNA, 505 bp, Gossypium hirsutum
  Clone ID: LIB3828-022-Q1-K6-B8
ggccgtcggagtttccgacggccctttccgatcaatctacgaaggatgtttatctagttgtgatattgtcattgaacgtcgaccgtaccaccgtaattgtggttgtgcccttcacgacaaatcacgccgaaattgtctccacaagttctccaaaagcacgaacgtgtcttacccaataaggagaatctggaacgagggatgtttggctttagatgcgaccaccatggcttcgccatcttcttcgccgtgcattacgagttttcacaaggctgtaaagcaaccgttggaattatgtaaagaagaagaagatgatggttatgaagacaattactatatggctaagttgtggaactgaaatatggaaagggaatgaataaatttttagaccaattttttttagaattaaaaaaaaaggattagagggtaatttttatttttgatggtctaataaaaaatctagaaaaaaaatgttttttgatttatgccattttttattaattgccct

SEQ ID NO: 8989 - DNA, 636 bp, Gossypium hirsutum
  Clone ID: LIB3828-022-Q1-K6-B9
cggacgcgtgggggagatcactgcagtagcagaaaatgaactaaaaaagcaaatcagcaactgaagttattagatctcttactgctcagttgaaggaggtgactgataaacttccagcaggcaagagtgcgctccacaattccagttctattgccacaaacacccagcgcatgcactcggataatagccatgcgaccagcataaggcttccacgaagtgaagtaagttgtaatctagacaacatctccatgtctcatggaaccaaaggacaaaccgaaaagtcggagacaataatacaagatgaaccaggagtgtacttaactttgtcacccttgcctaatggcaatcatgaactcaagcgtgttcgctttagtcggaaacatttcacagaagaacaagcagaaaactggtgggctgaacatggggataaagtatgcgaacgccataatatccgaaatacatgttagtcgtgaagcttggacaccattagattttctaagaacactggattgggtactgccatcgccattttacttgaagcttatatcaaacattttacttgtaactgttgatttcttctccaaattacgtggaggagcttatatcaaggatcatgtcagaaattatcaggtagtg

SEQ ID NO: 8990 - DNA, 578 bp, Gossypium hirsutum
  Clone ID: LIB3828-022-Q1-K6-C1
atcatccaatgctattctgcaaagaggatgtgctcaaagccggggaccgggaggcgtgggtgcttcatggatgatccatgcagagctactcatccctggttgcaaaagcataagacaagaccttggctgagcacgcattcgactcaatggtggactatcgaaaggatgcacacactaccattttgcaaaagatcacaacattaccaagatgaattcaaagctgcattgacaaaagaagtagaagggacaagggtttcacttgaaaatggaaatgcaacaatccctaacaagatcaagggtagcagatcatatacattgtataaattgagagggaagagcttggaactgggttgatgagtggtgaacaaaggaagtcacctggctgaagaatttgataaggtattcatagctatgtgtgaacggaagattatcgatccaatgatggaatgtgtaaagggttggaatggagctccactttcaataagttagtgggcagtgacacatcgtttacctacagaatcactttctatggatcagcagcctacttgtcacccaatgtcattgcgaaaaaatataga

SEQ ID NO: 8991 - DNA, 645 bp, Gossypium hirsutum
  Clone ID: LIB3828-022-Q1-K6-C10
ggatgaattaaggagtggaggtacagttgattttgaggatgattttgctggtaaggatagatatatgggatccattgagagcctcataaggaataacattcaacagtataaaatcgacatggccgatgaagtaatcaatgctggacgttttgaccagagaacaacacatgaagagagacgcatgactttggaaacattgttgcatgatgaggagaggtatcaagaaactgtccatgatgttccctcattgcatcaggtaaatcgcatgatagcaagaagtgaggaagaagttgagctgtttgatcaaatggatgaagaactggattggactgaggagatgacttgtcatgaacaggtacctaagtggcttcgagccagtgtaagagaagtaaatgctgctgtagctactttatcaaaaaagccatcaaagaacattttatttactgctggtggcggtactgaatccaaagaaacagacacaggtaaaaggaggccaagccatttatgactttctagtttctagatcatcaccttaaaaaagaaaaagaaaaagaaattgctgccattgagtgcaagtgcctagtgtattttgtggctcttcatggcctgtacaactgcaattagatcataccattaatgtagtgt

SEQ ID NO: 8992 - DNA, 618 bp, Gossypium hirsutum
  Clone ID: LIB3828-022-Q1-K6-C11
ctaatggcaactcgcgccttttcaaaatcgaagttcccaattttaacgtcaatcctccttcaaaacctcacgaaaacagtattacgaggtccccgtttcttgtaaaacctcaaattccacctgtacaacccgatatccataaacccatttcagggtttaagctatatcatgatgggagaccgagaggtcccctttggaaaggcaaaaagctgatagggaaagaagccctttttgtaatattgggtttaaagagatttaaggatgatgaagataaagttctgaaatttatcaaaacccatgttttaaggctattgaagatggatttgattgctgttctttcagagcttgaacgtcaggaggagacttctctggctgtaaaggtttttgaggtgattcaaaagcaagactggtataaacctgacgtctatttgtataaggacttgattattgcattagcgaaatgcaggaaaatggatgaagcaatgaagttatgggaatctatgagaaaggaaaatctgttccctgattctcagacatacaccgagatcattaggggcttcctgagggatggttctcctgccgatgcaatgaacatatatgaggatatgataaaatctc

SEQ ID NO: 8993 - DNA, 587 bp, Gossypium hirsutum
  unsure (1)..(587): unsure at all n locations; Clone ID: LIB3828-022-Q1-K6-C12
ggcggnggttcaaatgctatgggacttttccatgagtttgttaatgacaaggatgttaggttgattggtgtagaggctgctggttttggtttggacagtggcaagcatgctgctactttgaccaagggagaagtgggagttttgcatggagctatgtcctacttattacaagatgaagatgggcaaatagttgaaccccattccattagtgcaggcttggattatcctggggttggaccagaacacagttttctgaaagatgtagggcgagctgagtaccacagtgtcacagatgaagaagcattggaagctttcaagagattgtctcgactggagggtataatcccagctttggagacatctcatgcactggcttatttggagcagctgtgtccaactctaccgaatgataccaaagttgtggttaactgcagcggcagaggcgataaagatgttcagacagtgattaagcatttgcaggtatgattacgatgcttttcgtggaaataaatggttgccctttatttctacaaccatgctgtcagtctttctctctgtttctttatatgtactactacttgctttgc

SEQ ID NO: 8994 - DNA, 638 bp, Gossypium hirsutum
  unsure (1)..(638): unsure at all n locations; Clone ID: LIB3828-022-Q1-K6-C2
gccgcaagcgccgacgaaaaggcagtctccgagggattggttctccgcggcaccatgcgagcccacaccgatatggtcactgccatcgccactcccattgataactccgacatgatcgtcacttcctcacgtgacaaatccatcatcctttnggcactnntaaccaaanacgataaaaacctacggcgtcgcgcgtcgtcgtctcaccggccactctcatttcgtccaagatgttgtcctctcctcagattcccagtttgctctctccggttcctgggatggtgagcttcgtctatgggacttaagcgcaggaacttccgctcgtcgtttcgttggccacaccaaagatgtgctttccgttgccttttcaattgacaaccgtcagatcgtctcagcttctcgtgatcgaactatcaagctttggaatacccttggagaatgcaaatacactatccaagagggcgatgctcatacagattgggtaagctgtgttcgtttcagcccaaatactcttcaacccaccatcgtttcggcttcctgggataagaccgtgaaagtttggaacttgactaactgcaagattcgtaacacattggccggacacactggttatgtgaacacggtggcggtttcgcctg

SEQ ID NO: 8995 - DNA, 111 bp, Gossypium hirsutum
  Clone ID: LIB3828-022-Q1-K6-C3
gtgaatttatcattttgcaatagttctaatctcttatgtatgcttctgtgcttgagctccattgtagcagccctttcttatgcttaatggagttttttctatgatatgatt

SEQ ID NO: 8996 - DNA, 648 bp, Gossypium hirsutum
  unsure (1)..(648): unsure at all n locations; Clone ID: LIB3828-022-Q1-K6-C4
caacaagggacacaccagcctcaanaagattcttgatagcggtcgcaaccttgggagatgtgacggtgtccaccttaatgggaaagttgcgaaaggtgatgggaaggatgaacctctgtttacgatggaggcaggcaaaacgtacaagtacaggatttgcaatacgggtatcaagacatctctgaacgtcaggttccagggccacaccatgaaattggttgagatggagggttcccacacaatgcagaatgactatgactcccttgatgtgcatgttggacagtgcttcagtgtgcttgttactgccaaccaggaaccaagggattactatgtggtggcctctacccgttttaccagacgtgaggttacagcaaccggcatcatccgttacaagaatggcaagggagctgcctcatccgagttgccaccgccacctgttggttgggcttggtcactcaatcaattccgtaccttccgttggaacttgacttctaacgctgctaggcctaaccctcagggctcctacaaatatggttccattaacattacccgcaccatcaagcttgccaacactgcacaaagagtagatggcaagctccgatatgctcttaatggagcctcctatgtcgaaccaaccactccactaaa

SEQ ID NO: 8997 - DNA, 631 bp, Gossypium hirsutum
  unsure (1)..(631): unsure at all n locations; Clone ID: LIB3828-022-Q1-K6-C5
cactaaatatacaaaacaaaacaagctctcttttttttttcctttttcatcagtaactgttcccatccttacaccaaggggcaggctcgttttcgggcaaaaccaacagtcatgaatgctgaatatgactatttattcaagcttttgctgattggagactctggagttggcaaatcatgtcttcttctgaggtttgctgatgattcatatctggagagttatataagcacaattggcgtggactttaaaatacgcacggtggagcaagatgggaaaactctaaaacttcaaatttgggatactgcagggcaagaacggtttcgaacaatcactagcagctactaccgaggggcacatggcattataatagtttatgatgttaccgaccaagcgagcttcaacaatgtgaagcaatggttgaatgaaatcgatcgctatgcaagtgggaacgtgaacaagcttctggtgggaaacaagtgtgatcttactgctaaaaaagtggtttcttatgaaacagccaaggcctttgcagatgaccttggcattccatttatggagactagtgcaaaaaagccactaatgttgagcaagctnttatggccatggctggtgatattaagaacaggatggc

SEQ ID NO: 8998 - DNA, 634 bp, Gossypium hirsutum
  unsure (1)..(634): unsure at all n locations; Clone ID: LIB3828-022-Q1-K6-C6
ngagaagtgcgccactatgacttccggatttgaaccctcgccgtccaaagactgccagcggcggaggaggaagaagacgattggaggagttcgtcctcccccatgacctcctcttcgatcgggaggaacagtgatgctgacgtgtctggaagatcatcggacggcgacgatgaaaatgaggttcaaagctcttataatggtggtttaaacatgatggattccctccaacaggttttgcctatgaggttcgttcatcatcatctcctctctcactaaatggctcagatcggtgtcaaaactagggatagtttgctataatttcgatttgagtccctctaatcctcctattattaatactgtgagatctaccgctttaagcggactctgataactaaacaaattaggttttagtaaagtaaaattaaattacaaattcccttctttttaataaactaaaattcatttttgaacaggagaggcatctcgagtttctacaagggcaaatcaaggtctttcacaagcttagccgatgcttctacagcttcaacgattaaagacatagcaaagcctgaaaacgcttacaccaggaggagaagaaatctattggcaatcaaccacatatgggacaaaaaca

SEQ ID NO: 8999 - DNA, 650 bp, Gossypium hirsutum
  Clone ID: LIB3828-022-Q1-K6-C7
tccttctacttttctttactttcctctcatttctcttcttccccctccattctcaatctggttctcatctccagtcaatcctttgtttccattgccaatatatgtgcaagggcatttgcagatcttagtacatgtttgaatatgaaacttctaggtctgtttagtttctgttgaatatcgtatatatatgctctaatatgtgaacgatcttgactttttattgcacatttattgattattgtgagggagtctccttctattacaaccttcggccattcctgttccactcctactaggaccgctttcctacacgcgattgcttcagctgcaaatgcggaagttaccccgtgatggatctctgagcaggaaagtaagacaaccccttcttcgtttctgacaacaatccctgaggcagattggtggtgatttgaatcatacgcaccatcaaaattaatttttacgaactctctagatagcccaaagtccacaacaaaagaggcggctctggtataaagtaagctgatcaaagattcaggatattcgcgaaaatatggtcgattgtttcaactctttctccacatcgaaggcagcttgtactactgacaagctttcggtgctgcatattaaccctcgtcggcaaatagttccat

SEQ ID NO: 9000 - DNA, 488 bp, Gossypium hirsutum
  Clone ID: LIB3828-022-Q1-K6-C8
gtccatacttctgccaacctgtaattgctggattaggagatgaagacaagcccttcatttgcaccatggattccatcggagccaaggagcttgcgaaagattttgttgtagctggcactgcctcggagtctctctatggtgcctgtgaatcaatgttcaaggagggcatggaacctgaggaattgtttgagacggtttcccaagctctcctttcatcagtagatcgcgactgtctgagtggttggggaggacatgtctatgttgtgacgcctacggaagtaaaggaaaggatcttgaagggaaggatggattgaatgccggcaactggttcattcgtaaactccttttaaactatttcagtcaatttgtgtctctagagtgttgctggatttgatgtactctttataaatttgatagaccaagttcgacattattgagagcaatgatggatttgtagtgcatttcgcgagttaaatttgtttttttgt

SEQ ID NO: 9001 - DNA, 631 bp, Gossypium hirsutum
  Clone ID: LIB3828-022-Q1-K6-C9
cggccgcgtgggctgaaagtaactgctaacaaatctccctatttcttttgcagatttacctcctttgttatgtaacctgttgttcctatcaccccaaatggcccagactgcaacacagaaaatccgacggtgggatgctgagcactgtgaaaaaacccaggcactctcaaaaaagatgttccatggattcagatccagatccgcaccgagggcacattgcagtactcgttagccttctaaatagtagattggcacgagtagcaaggaaattccacgagatcttccaaactgtaattttaatttttgagggtaaatcaagaagccaaagttttctgtagaaatccttagtcaagttgtaaagcataagctctaggatcatatgcagtattttgtaatagtttataggagctacgtactgtgaactcccccgacgcttcagcactccaaacttgaaagtcttcgtgtggtctctcagccaacgggatgctgagaatcatatctgctacatccatcgggaaggtggtatctgagtgcaactgctcaacccatgccccattcttcaacatctccacaaacttcagatctaaggaccccaccaatagcaggcagtaaatctttcttatcaaattct

SEQ ID NO: 9002 - DNA, 380 bp, Gossypium hirsutum
  unsure (1)..(380): unsure at all n locations; Clone ID: LIB3828-022-Q1-K6-D1
gnacagcttgggaggaggccatatcatagagacccaaagcttcataaagagggtttttaggactgggagcccaataaccactgccggcaatgacatcgacgttgttttgcttgatttggatggggaggtcaagcaatgatctcacaacttgcttcanntttcctgcatcaattcaaaagggatgttgtggttgactaccctgaaacaaccccattcttcagatgatcgccttagtttctcatactgtgctggaaaatctgaaagatcaatggttggaatactctgggttttatccatttttttttcacaactttctctgcttattcaattcttcatatgggaactgaaaaattatgagggtattaagtattgaattcttc

SEQ ID NO: 9003 - DNA, 631 bp, Gossypium hirsutum
  unsure (1)..(631): unsure at all n locations; Clone ID: LIB3828-022-Q1-K6-D10
gtgaaacaacttagcaaaanactttatttgattagcaaaataatatgaacaccaagcttaactcttaaatattgtaatctagagtttaaatgacccatgtatcctttgaacaccaagcttgttattgaggctaacccatccaagtctttcacctccaatggtgatccacaaaatcacttgcaaccttctccaagttaaggaatttcttcgagctagcaaagtgactcaaggtcataatcaaacgttttcccttgcttctatctctctgtagcaaaaacctccctagagagaacagtactctctaggcttgcatgacatatggcataggctaaggaagttagtgtatttgcaaaaagcgaagtacttgatttttttttctttattgtcaaatggcaatctctgactgatgatttcagtaattttttcctaatcgtttcctccaatagtagacagaatactctaaaataagatcattaataagccaggtatttaagtggcgaattgccttatgactaagcgttattttgtaacggttgataattttgttcaaaatgtagtgttgataatgacgaagttcttcctttagaaagattttctctacactgcatatacatacgtagatatatatatg

SEQ ID NO: 9004 - DNA, 380 bp, Gossypium hirsutum
  Clone ID: LIB3828-022-Q1-K6-D11
cccagcgtccggcgcatcatgatgttgccaggctgaaactgtaaagagcaaagggatagaagaggttatggacagtgaacccagtccaccaaagtagagagatgataccatattaagatgaaataacgaggaagagttggttgtcgtcttattaattatacaaaataagaagtaatgatgttgcagaagggtttgctataaaatcctcttggacaaaaagagtaattatgaagaataaatagctcaaaacaatattcgatttgcaatatcctaaagttccttgaatcttgttttgtagccatatgtaattaatgcatgtgcatgctaatatatatgattttctttgttatataaatttctgctaaaaccttcaacacgct

SEQ ID NO: 9005 - DNA, 615 bp, Gossypium hirsutum
  Clone ID: LIB3828-022-Q1-K6-D12
gtagtgttgcttgaaactagggttagtggtttgagagcggacaaggtgattaagaaatccagctttaattggtctcatagagtggaagctaaaggtttttctagtgggatttggattcattgggatgaatcagtgcgcgtcgaggttctatgtaatcatagccagtttgtgcattttgcaatagtttcgaattcgttgcagcaacgagtcttatatgctgcagtttatggtagttcgaatagccggaaatagagatccctgtggacgggactgaatgcagtagcacagggtatagttgaaccatgggtacttttgggtgattttaatgctttgttgcatacggatgagaagcagggtgggttggtgagtcgtgtggcaacttgcaaacgctttcaaacctttctatttgacaacaatcttaaggatttggggttcaaaggacctaagtttacatggtgccaaggtcgggttcacgagctgctcgacggagttctttataatgcatcatgggaacgacgatatcagttttcttctgtgtatcatctccagcgcattaaatttgatcattggcctctccttttagtgttgaatgactcttgtcgacccatgggactg

SEQ ID NO: 9006 - DNA, 644 bp, Gossypium hirsutum
  unsure (1)..(644): unsure at all n locations; Clone ID: LIB3828-022-Q1-K6-D2
ccaaattcanatcaggggatcccaagaaaagatcctagtctgggttcaaacacttcaaagacccctaaatccccttggatgcctttccctatgttgtttgctgctatctcaaataagattccccgtatggatatggaccaagttgctaatcattatgaactgttcagggcaaagaagataactcgtgatgattttgtcaaaaagttgagattgatagttggagataatttgctgaggtcaacaataacttcactgcaaagcaagataccatcgaggcatgaattagaggtggcaaagcagaacatgaagggtcccggaagcctctgagttttaccattttctcgtttaggtgaggaaggctttgctgcttggtatcctcaaaagctgttggtgctattgggtgactttagcttgcttcttgttatcaaaatgcgtcgacatgataaggacatgtttgaaggtacttgtagtagtcttagcactgctttgttttttaatggtgtaattgtttggtatatctcctagtctctagtagcattgatttggtgtttgctcaaaaccgacgaactcattttcaacctgaaccggcttgctagccaactctatcctgttttttttttttggttttcaaattttttttttct

SEQ ID NO: 9007 - DNA, 629 bp, Gossypium hirsutum
  Clone ID: LIB3828-022-Q1-K6-D3
ggtgcttcagagtatgggtatggggatgcgaatcatgaaaaagaaggtctggcggtgccactcgggaaaaagacgggcttctgagcgtgagtggtcaggcaactctgaaaggaggcatcatgatgagaaggaacgggaatcggacaggcctgagagggagcacagggaacaccgttacagggaagagaaagacagctatagagagcatcgacatcgcggacgtgacgtggattatgatgatgactgggataggggacagtcttcttcaagatctcggaacagtcccatgcaacacgagaagaagagcacaggtctcgatcaagggatgtggactatgggaagaagagacgcctaccatcagagtgacaaactatgctgtgcatgcttctttacactttcttatgagacctttaattaagttttcactctcagtatctcttcccttggttgttatatcatttcagcattctctgtgatgattgttggtccaggtgccaaacgtcgcttcttaaagggagaagtaagtgctacttgcgtgggtggtggggaagaatagacttccctttttgtttcttactgcactctaaagagccactattagatgaaaaacttggtattcctatgttggc

SEQ ID NO: 9008 - DNA, 651 bp, Gossypium hirsutum
  Clone ID: LIB3828-022-Q1-K6-D4
catccaacagcaaataagcttttgttactttgtgacgaatggagggtccttagctttctcttttaaattaagaaaaaaaaatcacacattaaaaatatttaagaaaaaattaaactttgaacaaatttcaaagattttggttttcttctgcaatttctcatccaccaattgaatcaggttgtgaagtattgagggtgtttattatttgttgtttttttataattactgatgtctccgccgctgcttggcgtggaggaggaagggattcagagcaatgttactttactcggttcttcaggctcaatggaaagtgtgtgccagaatagtgctgacttgaaggaacggaactacatgggcttgtctgattgttcttcagtggatagctctgttttttcccctccgtccgaggaaagaaaggctagtttgaatctaaaggcgactgagcttaggctcggacttcctggattgcagtcgcctgaaagaaatccagagctttgcttgttaagttcttctcagcttgatgagaagccgtttttccctttgcatccttcaagtgatggtcactgctttgcatcacagaagagtgttgtttcagggaataaaagaggttctctgatgcaatggatgggttctcagaaggcaagtttcttt

SEQ ID NO: 9009 - DNA, 555 bp, Gossypium hirsutum
  unsure (1)..(555): unsure at all n locations; Clone ID: LIB3828-022-Q1-K6-D6
gaagaacttaaagagctttcaggtgtttgacaagnaccattgattttcctgaattccttaacctaatggcaaggaagatgaaggatactgattccgaggaagaacttaaagaggctttcagggtgtttgacaaggaccagaatggtttcatatctgctgctgagcttcgccatgtcatgacaaatctcggtgagaagcttacagatgaggaagttgatgagatgatccgtgaagctgatgttgatggtgatgggcagatcaactatgaggagttcgtcaaagtcatgatggccaagtaaggataaaaaatgggtaaaaaggggaacagggcagataagtttgctaagatctctatttatatcaatagggcatctatgtttttatgttactaccttttgttggattgttgactgtttctttgtacgcattatttcgtggactagaccctaatatctacctgtttgctctgttttttgttcattagtctgggttgttagtgtcttannnaaaaaaaaaaaaaaaaaaaaaaaaaaaannnaaannnnaanncccccc

SEQ ID NO: 9010 - DNA, 638 bp, Gossypium hirsutum
  Clone ID: LIB3828-022-Q1-K6-D7
ctttctctcctccattatcttctctttcaggcttccttcgtttaccactattacttttcctactcgttgcttagactagtatttttttccatttatatattcatttttctcatagacgttcgtttataacaagaaattagataacagtgcgagagacaaacacagagagagagagagagagagagagagagatctttgattgattgatagtttttttattatagatttagatttacagagatcaaaggaggagtgaatgggcagcaagagaacagcggaggagaacaagaagaaaggaattttgcaattaggaaattacgaattagggaggaatctcggcgaaggaaatttcggcaaagttaaattggctaagaatctccattccggcctcactttcgccgttaagatcctcgaaaagtccaagctcattcaactcagcatcgccgatcagataaagagagaaatcgctactttgaaactcctcaaacatcctaacgtggttcgcttacacgaggtgttggcaagcaaaaccaagatttacatggtcctagagtacgcaactggaggggaattgtttgtcagaattgcatccaaagggaagctatcagaagcagaaggaagaaagttcttccagcaat

SEQ ID NO: 9011 - DNA, 644 bp, Gossypium hirsutum
  unsure (1)..(644): unsure at all n locations; Clone ID: LIB3828-022-Q1-K6-D8
agaaataacaaaaccagaaatgctgttgaaacttggtctcgcccgtttagttgaaaagcgtttgttggcagtttatcactctagttttattgatgaggaaggaattactaaagcttgtggcttccctttnnacttcctttgaaaagtcatataaagggtcctgctcctgtttcagatcaaggtaaaactgatattgttgatgaagcgatcacattctttcgtgccaatgtgttctttagaaactttgatgttaagagccctgcagataagctccttatatatttgactttctacataaatgtggctttgaagaggcttgagggctgtaggaccttggctgaagggaccaaggcaatcattaacttgggcttggaaaacgttcctgtacctggagaatctggttttccttttccggggctttttgtgctcccacagtctcaaaaggaagcagaactactcaggaattatctgaagcaaatcagagaagaaacgagtgggagattgttgagtgttgcctataggcccaatggaactccaaataaatggtggttagcttttgcgaaaagaaaatttatgaatataattattccatgaaatgaaaaacgttgtatattgaatcaaaagtagaatgtaaaagcctacca

SEQ ID NO: 9012 - DNA, 376 bp, Gossypium hirsutum
  Clone ID: LIB3828-022-Q1-K6-D9
cccagcgtccggcgcatcaggagttgccaggctgaactgtaaagacaaaggatagaagaggttatggacagtgaacccagtccaccaaagtagagagatgataccatattaagatgaaataacgaggaagagttggttgtcgtcttattaattatacaaaataagaagtaatgatgttgcagaagggtttgctataaaatcctcttggacaaaaagagtaattatgaagaataaatagctcaaaacaatattcgatttgcaatatcctaaagttccttgaatcttgttttgtagccatatgtaattaatgcatgtgcatgctaatatatatgattttctttgttatataaatttctgctaaaaccttcaacacgct

SEQ ID NO: 9013 - DNA, 583 bp, Gossypium hirsutum
  unsure (1)..(583): unsure at all n locations; Clone ID: LIB3828-022-Q1-K6-E1
cttngacagaccaatatccacctanaaaaagagcgaaaactttgaagagtggagggacatcaacatctcccgatatcgaggcaataaaagctgaagctagggaagaagcccagaaggaaagcgaagcagagctgaatgatttactcgtgtgcctcggacaagagcagagcaaggtggaaaagttgagtgcaaggttatctgaattaggcgaggatgtagacaaactgctcgaaggtattggagacgatatggcgcttcctgaagatgaagacgaagaagattgatggagcttgtgttagtactactagtaccaaatattattatgtcttcaacctctcttgaggtaggctggttgtatgttgtcagctcccaatttgtacatttcctggggaaactgtgcagtttattatttaccaaggaggagtaattaatctttgttcatttggatttgtgtcatgatttctatagacctttccggagcatgtcagaaagctggatttatcgtccacccaatacaacctgttcatgtctaaatcatgtcggatttatttattttatttctggaattatatttcgttgttat

SEQ ID NO: 9014 - DNA, 637 bp, Gossypium hirsutum
  Clone ID: LIB3828-022-Q1-K6-E10
cggtgttggcattcacgaagacatgttgtcccaaaggttccgaaattggtactcttggttttggttttgaaggtggtcctgaaaaatgttgttcttctggatgttccggtaattgtaatcctggtggtttcgttctaccatttcctcaaattccagaaatcccaagaattccacagatcccacagatcccacaaatcccacaaattccactaatcccacagatcccacaagtcccacaaatcccactaatgccaggacagtcgggatgtgagagtggggagtgttgccgtcagggttgcggtgggacttgtgctgagtgtggtcagcccaggtgcgcatcaggatgttgccaggctgaaactgtaaagagcaaagggatagaagaggttatggacagtgaacccagtccaccaaagtagggagatgataccatattaagatgaaataatgaggaagagttggttgtcgtcgtattaattatacaaaataagaagtaatgatgttgcagaagggcttgctataaaatcctgttggataaaaagagtaattatgaagaataaatagctcaaaacaatatttgatttacaatatcctaaagttccttgaatcttgttttgtagccatatgtaattaatgc

SEQ ID NO: 9015 - DNA, 644 bp, Gossypium hirsutum
  unsure (1)..(644): unsure at all n locations; Clone ID: LIB3828-022-Q1-K6-E11
atccccgataactttgttaagaaatttggggacgaactttctgttgctgctgctctcactgttcctgatggtcatgtttggcgtgtaggaataaggaaagccgacaacaaggtttggtttcacgagggttggcaggaatttgtagagcggtaccatatccgtgttggctacttactggttttcagatatgaatggaattcttgtttcagtaaaaccgtatccatttgaagaacttgaagatgacgaatgcatctctccggcactgcagaatttgttttctgcgtctaaagttaataactgcatgaactggagtggtgaaatcaattttcgtgcgttaaagggcatgaatagccaatcttttcgaggtgcagtgctaccaaaaccaaacaagcctgggaggaaaaagcagaagtttgatcacgctgaaccagattcatctgttggacacgaatatgatgtgtatacaaactttagattatatgaaagtgcttcagccagaaagagaactgtgacaacggaagaaagagagagagcaattaacgcagccaaatcgtttgagccgatgaaccctttctgcagagttgtcttacgaccatcatatctataccggggatgtattatgtacttaccatcatgctntgctg

SEQ ID NO: 9016 - DNA, 636 bp, Gossypium hirsutum
  Clone ID: LIB3828-022-Q1-K6-E12
gggaatttgagagaacaaatggaagggataccacacccgataccgagaacggtagaagaggtcttcaacgactttaaaggcagacgtgctggcttgattaaggccctcaccactgatgttgacaagttctaccaacagtgtgatcctgagaaggaaaacttatgcttgtatggactcccaaatgagacatgggaagttaacttgcctgttgaggaggtgcctcctgagcttccagaacctgcactaggcataaactttgctagagatggaatgcaggagaaggactggctatccttggttgcagttcacagtgattcatggttgcttgctgttgctttctattttggtgcacggttcgggtttggcaagaatgagaggaaaagactctttctaatgataaatgatcttccaagcatattcgaagttgttactggaaatgtaaagcaatcaaaggaccaatctgctaatcataacagtagtggcaaaagcaaatcaagtgctaagtctcgtcaatctgaaccccagagtaagatggtaaagatgtctccaccatccaaggatgaagatgagagtggggaagaagaggaggaagatgatgaacagggtgccacttgtggggcttgtggagatagctat

SEQ ID NO: 9017 - DNA, 635 bp, Gossypium hirsutum
  unsure (1)..(635): unsure at all n locations; Clone ID: LIB3828-022-Q1-K6-E3
gntgattgtatttctatcggagaggcactaaaatttggacataaaagattaacttgtggaccaggacatggtataagtatcggtagtcttggaaagtacccaaatgaagagccagttgagggagttaaagtcacaaactgcaccatcactaatacttcgaatggagctcgaatcaaaacttggccaggcgaatctcctgggatagtatcagatgtacattttgaggatattatcgtgaataatgtctcttcccctatcctaattgatcaaaaatattgcccatggagtaaatgcaagataaatgaagaatcgaaagttaaactaagcaacattagcttcaagaacatccgtggcacatctgcgcttccagaagctgtcaagtttatttgcagcggttcttcgccatgtcaaaatgtggaacttgcagacattgatattaagcacaccggacctgaacccgcaacatcccaatgtttgaatgtcaagcctaaaactagtggcaaattaaacccgactccatgttccagccctgtcccaaaaaccctaagtgccaccgcttaaaccataccaacagattcagtgcaattgtaattaatatatttattcatattacataaaaacagttctttttcaaa

SEQ ID NO: 9018 - DNA, 635 bp, Gossypium hirsutum
  Clone ID: LIB3828-022-Q1-K6-E4
cttaattctgtcggtgtttttatctgtacgcttcagttcgggtgttaggttgctccaggaacagcccaatgatgaccccaaaacatggacgctattcctcccattgatgcactcaaccctaccgagttgaatggacccggtgttggcattcacgaagatcatgttgtcccaaaagtgctgaaattggtactcttggttttggttttgaaggtggtcctgataaatgttgttcttctggatgttccggtaattgtaatcctggtggtttcgttctaccatttcctcaaattccagaaatcccaagaattccagaaatcccacaaatcccacagatcccacaaatcccacaaattccactaatcccacagatcccacaagtcccacagatcccacaagtcccaaaaatcccactaatgccaggacagtcgggatgtgagagtggagagtgttgccgtcagggttgtggtgggacttgtgctgagtgtggtcagcccaggtgcgcatcaggatgttgccaggctgaaactgtaaagagcaaagggatagaagaggttatggacagtgaacccagtccaccaaagtagagagatgataccatattaagatgaaataacgaggaagaagtggttgtcgtc

SEQ ID NO: 9019 - DNA, 446 bp, Gossypium hirsutum
  unsure (1)..(446): unsure at all n locations; Clone ID: LIB3828-022-Q1-K6-E5
cggcggcggatatggtggtcgccaagnaggatatggtggcggacgccgtgaaggtggatacggaaacggtggggggtatggtggaggtggatacggaggtggacgccgtgaaggaggatacggtgacggcggatctcgttactcaagaggcggcggtgcatctgaaggcaactggaggtcttaaatttagggtttcaaagtgggcttgggcctatattgttatgggtttggtttgggtttggtagttggtaattctaaagttactctgttactgtttggtttgggttctctcgtttttgatcgatgttgttactgttctcttaaaagcataaaaatggaatgaagtatcttcttttcaatttcctgccttatttcttacgaccttactttttttaaaataatgttaaaaattcattatattaaaaaaattttgtatcttaatttgt

SEQ ID NO: 9020 - DNA, 630 bp, Gossypium hirsutum
  unsure (1)..(630): unsure at all n locations; Clone ID: LIB3828-022-Q1-K6-E6
cggacgcgtggngaaataataaagnagggaaaaaaggaaaaaaaagatttctgtaactaggtttttagcaaatttttgtaccgaaattaaagaaaaaaaatcaaaagagaaagaaacgatcttttgaaggtgaccactggggttttgtcttttccctttcctgtttactgttttttatttcattttcctctttggttttgtttaaaacaaaacgcaagaaaagggagcggaggaagacttaccgtcgcggcgtcgttggaaaaccctttcatttcgcggttgtcggagcgaagtgggtcggaaatgatggagagcagaggtgctgctgcggcacattttgggaatggcagaggggaattattttttaggatttgagaaaaggggtttatttgatttgaaaaacggcagcatccatttatttcttcaaaatggacccttttcgcaattgaccccctaatttttacaatgtgtttaaattaaatttattacttcttttaaattccactgcacattttattctttgtttcaaattggctcaatgatgggcagtgttttgggcagctagggtaattntctctttcggtccttttcctattgtgcgtgttttaaattgctccctttctcattttc

SEQ ID NO: 9021 - DNA, 636 bp, Gossypium hirsutum
  Clone ID: LIB3828-022-Q1-K6-E7
tttgtattgatcccccatttgatatattcaatgagatgaaccagaatagacgcctttcacctgtggttagagttgaaaaaatgtttgagcagatacaatctaaacttcctggagctccgcagttccttctttgtctgcttcctgataggaaaaactctgatctttatgggccatggaagcggaagaatctttctgagtatggcatcgtgactcagtgtatggcaccagctagggtgaacgatcaataccttacaaatcttcttctgaagatcaatgctaagcttggaggtcttaattcaatgctaactattgagcaaacaccttcaatccctatgatttcaaaggttccaactatcatccttggaatggatgtatctcatggttctcctgggcagtctgatgtgccttcaatagctgcggtggttagctccaggcaatggccattgatttcccgctatagggcatcagtccgtacacagtctccgaagcttgaaatgatagattctcttttcaaaccagtttctgacaaaggggatgagggtatcatgagggaggctctcttagacttttatacaagttcagggaagaggaagcctgatcagatcattattttcagggatggggttagcgagtctc

SEQ ID NO: 9022 - DNA, 653 bp, Gossypium hirsutum
  Clone ID: LIB3828-022-Q1-K6-E8
cggacgcgtgggcaaaacgacatccctgttaagacactgttgacggttattgaaggagagcaatctgatggagatgtgctgattttccctgaaatgatcaaatacaagggtttgactgagggtgatgtggatggctttgttgaggatgtgcttgtgaatggcaaaccatgggcttccggagtgcaggagacgtttactggttcttatgtctttgtgtgtgctcatggtaatcgtgacaagagatgtggtgtatgtggaccaatcctgattgaaaagctgaatgaggagattgcattgcgaggattgaaggatcaggtgtttgtaaatgcttgctctcacattggagggcataagtatgctgggaacttgattatcttcagtccagattccaagggaaaaattacgggccactggtatggctatgttactcctgaagatgtacctgaattgctggatcagcacattgcgaatggcaaaataatagaacgtctttggaggggtcaaatgggggtttctactgaaagtggtgatggaacaggggaacagaagcttccgaatgggacagaagtgaagaaaatgagaagcctgaagagtcaactgttcaaaagaccagggaaaatgtcggcggttgttgccagggtgctaatgggtct

SEQ ID NO: 9023 - DNA, 636 bp, Gossypium hirsutum
  Clone ID: LIB3828-022-Q1-K6-E9
gcagcggcagcattagtagtacgctacagtactatcacataaagcgtaacaaacaaatccccagcgtcaaaagaatcctcctctctcgctttcgctctccgttagatctttcctttcctctctttcgtctttcttttagttatagtttcagcttcttttatctgcctcgatccccagtgaataattataatttgaaagttgaagaaacgaaacagggggtggggttttattttcttgtggcccagaccacttttaggtttcagaggaatggcggagaaatcgtgtgttaagcgccttcagaaagaatatagagcactttgtaaggaaccagtttctcatgttgttgctcgtccatccccaaatgacattcttgagtggcattatgtgctggaagggagtgaaggaacgccttttgcaggtgggtattattatggaaagatcaagttccctccagagtatccctacaaacctcctggaatcaggatgatcacccccaatggacggtttatgacacagaagaaaatatgcttgtccatgagtgattttcatccagaaagttggaaccctatgtggtctgtatctagcatacttaccgggcttctctctttcatgatggataatagtcctaccactggc

SEQ ID NO: 9024 - DNA, 649 bp, Gossypium hirsutum
  Clone ID: LIB3828-022-Q1-K6-F1
aaaaagagagaggcgtctgtaataaaatctgcaatcttaattctgtcggtgtttttatctgtacgcttcagttcgggtgttaggttgctccaggaacagcccaatgatgaccccaaaaacatggacgctattcctcccattgatgcactcaaccctaccgagttgaatggacccggtgttggcattcacgaagatcatgttgtcccaaaagtgctgaaattggtactcttggttttggttttgaaggtggtcctgataaatgttgttcttctggatgttccggtaattgtaatcctggtggtttcgttctaccatttcctcaaattccagaaatcccaagaattccagaaatcccacaaatcccacagatcccacaaatcccacaaattccactaatcccacagatcccacaagtcccacagatcccacaagtcccaaaaatcccactaatgccaggacagtcgggatgtgagagtggagagtgttgccgtcagggttgtggtgggacttgtgctgagtgtggtcagcccaggtgcgcatcaggatgttgccaggctgaaactgtaaagagcaaagggatagaagaggttatggacagtgaacccagtccaccaaagtagagagatgataccatattaagatgaaataa

SEQ ID NO: 9025 - DNA, 641 bp, Gossypium hirsutum
  Clone ID: LIB3828-022-Q1-K6-F10
aaacatccaaaagctttgttgggaaagcccttggacaacctggtttgaaactatctgtccgagtaggggagacaggttttagagaagttgtggcttaccttctggactacggtcattttgcgaatgtgcctccgactgctctggtgaagattactcactcagtcttcaatgtcaatgatggggtgaatgcacataagcctctcaagaagaatctggttagcaagattgcgtctttccaacaatttataccacatgattttgatgctagcgatcatggaacctcaagcttccccgtttctgctgtgcaccgtatagggatacttgatatacgaatatttaacacagacagacatgcaggaaaccttttagtgcggaagcttgatggcattgggaggtttggtcaggtagaactcattcctattgatcatggcctttgcttgccagaaactttggaagatccatactttgagtggattcattggcctcaggcttcaattcctttctccgaggatgaacttgagtacatagagaagcttgatcctgttaaagattgcgagatgctgcgaagggaactccccatgatacgggaagcttgcctacgtgttctggttctctgcacaattttcctcaaggaagctgca

SEQ ID NO: 9026 - DNA, 544 bp, Gossypium hirsutum
  unsure (1)..(544): unsure at all n locations; Clone ID: LIB3828-022-Q1-K6-F11
ggggattagggttttctctgaatagtcttttaaaaaaaatcgaagatgatcgaggtggtgttgaatgatcggctagggaagaaagtgcgcgtgaagtgcaacgacgacgacacgattggagaccttaagaagctggtcgcggcccaaactggaactcgagcagacaagatccgtatccagaagtggtacacggtttacaaggatcatattaccctcaaagattacgaaatccacgacggtatgggtctcgaactttactacaanttaaaaaaaatatatttatgtaatccgtgtggtctttgcttgaacaagctctaaattttatatatgaatgtaatataatcgtggatgatggtnaaaaaaaaaaaaaaaaaaaaaaaaaaaaaaaaaaaaaaaaaaaaaaaaaaaaaaaaaaaaaaaaaaaaaaaaaaagannnannnaaaaaaaaaaaaaaaaaaaaaaaaaaaaaaaaattgggggggccgtttttaaagaatcaagttttacaaacccgttcttgggacggtatattttttttttggg

SEQ ID NO: 9027 - DNA, 492 bp, Gossypium hirsutum
  Clone ID: LIB3828-022-Q1-K6-F12
caatgggtgttagtaatcaaaacttggccaggtgctgaacctggcacttgttcgaacattcactttgaggatattaccgtgaccaatgtcagttctcctattataattgatcagaaatattgcccatggaacaaatgcaaaataaatgaagaatcgaaagttaaactaagcaacattagtttcaaaaacattcacggcacttctgcgcgtccagaagctgtcaagattatttgtagtgctactttgccttgtgaaaatgtagaacttgcagacattgaaattacgcatagtggaccgactggacctgcagtatcacaatgttcgaatgtgaagcctaaagttagtggcaaacaaaatccagctgcatgttctgcccctatcccagcaaaacctaccccgactgcttaatcaatagcagaggtataattttttttgatgacgttgtaactcttataattatatttatttcgcaaataaattttgttttttttt

SEQ ID NO: 9028 - DNA, 638 bp, Gossypium hirsutum
  unsure (1)..(638): unsure at all n locations; Clone ID: LIB3828-022-Q1-K6-F2
catggctggtttagcacctngaggatcccaattcgatgctcgtcaatatgatcagaaaatgagtgatttgctccaaacagacggagatgattttttcacttcttatgatgaagtttatgacagtttcgatgcaatgggacttcaagagaaccttctgaggggcatctatgcatatggttttgagaagccctcagcgattcagcaaagaggaattgttccattctgcaagggtcttgatgtgatacaacaggcacagtctgggaccggaaagactgcgactttttgctctggaattttgcagcaacttgattacggtatagtccaatgccaggctctggttttggcacccactagggagttggctcaacagatcgagaaggtgatgcgggcacttggtgattaccttggtgtgaaggtccacgcttgtgttggtgggactagtgttcgcgaggatcagcgaaatcttcaaagtggtgttcatgttgttgttggtacacctggtcgtgtcttcgatatgttgagaaggcaatcactccgtccagattatattaagatgtttgtcttggatgaggctgatgaaatgctctcccgtggttntaaggatcagatctatgacatcttccagcttcttccgggca

SEQ ID NO: 9029 - DNA, 539 bp, Gossypium hirsutum
  unsure (1)..(539): unsure at all n locations; Clone ID: LIB3828-022-Q1-K6-F3
gnaaaacacatcctgggatctaagtttcctgggtttctttttagcagccgaatcaccattattttggtggccatctgcatgcaaaaagcacccgctttccccgttgaagacacttgaacaagttttaaaagggtttaccgaagagaaaaaagaaagacaaaatggaaaataaattccaaatataattcccgttcccttccatttgttgttctgccatttttgtttgtatctgccgttatggggtggtgtttgcgcgtgtatgagagcatggcgctgctgagggtacagaggcggtacggaggccgaggatgctgaggtgcaaacacgtgctgctagggcttcagtctttgtttaatgttctgggcctaccgggccttgtaaatttgggccaagttttaaaattgggtttgggtctgatagggttatttaatggactgaggtttatttatttatttatttattgtatatttgggtttctaatgggcccgggcaaatttgacccactacagatataatttaaataaacaaatttaagtgtt

SEQ ID NO: 9030 - DNA, 650 bp, Gossypium hirsutum
  unsure (1)..(650): unsure at all n locations; Clone ID: LIB3828-022-Q1-K6-F4
cggccgcgtgggcggacgcgtggtcggacgcgtgggccgaccgatactttcaaggctcttctcgatatggctgcggttcattcgtcatgccgtttgtgcattcacatagcaaccgccatttgggagaaagaagaaaagattctgatgccaagaaacgtccctgcaagtgtaacaaaggatcagaaaccgtatatcatttatacgtacgagaacgagggaggtttgagatggattctattttcttaaggtccgggaatatgaccttaaaggccttggaggctgccgttcacacgcatttcaagtttcggaaacacgttcctatttggaaaccggaaaggccagaaagccttcgaggtggagatgaactaaaagtatacagaatatatcctcttgggttgacacaaagacaggctttatatacattcaagttcaaaggggatgctgatcttaagaaccatatcgaaaacaacccttgcgcgaagttcgaagtcatattcgtgtaagactggtggtttccgttatctcatcttcgagcaccgatgacagattcctgatatcgatgatggtttgctgaggaacatttcctcaaagatcgaaggcagcctcatgcaggttatgaatntcatccaatgcttctttttgaattatgt

SEQ ID NO: 9031 - DNA, 623 bp, Gossypium hirsutum
  Clone ID: LIB3828-022-Q1-K6-F6
aattgtaaataattataattaaaattaattattccaaacataatcacactgataattaaaatatatcgaatactgcttccaaagatactcttcaccatatttctcaaacattttatattattaaataatctcaagcgcccaaacaaaaaacttgcacctggatttcacaccaaccggaaaggaatatatataatgacagacaaaccctgtattgcactccctattgtgataataatttcataagatctatatgataagaataaggagaaagattaccagcagcaccactaaaattaccagcacccaccagcactgccaacccaaaaacaagagatgtcatacatacatatactcgattcgtacaaaggttaaggaaatatgttttatcagaccatattacactaatcaatcttaacatatttaaagttgcatcttttacttctcagagagcttcatctagaagcatttcatattcctactccttgtgcatgggactacaactatgacttaatctgttattgcagttcacagcagcaagtttatgaactagctagcactatctcattaactggtaaaagtactatggaggcccttgtactaaaagtttatgaattagtccctta

SEQ ID NO: 9032 - DNA, 650 bp, Gossypium hirsutum
  unsure (1)..(650): unsure at all n locations; Clone ID: LIB3828-022-Q1-K6-F7
gccgctgcacgtatacaaaatgctttccgtgcacattctttcaggaagcgacaacagnaaagaagatgctaatattgcagctagtgtagatgagtatggtatcagtttgggtgaaatccaaaatctttctaccatgtcaaagctagcttttggaaatgcccgtgattacaactctgcggctttatctattcagaagaaatttcgaggctggaaaggtcggaaagactttctggcacttcgccagaaagttgtgaagatacaggtatctttactatttatcagaatttactaggttgtaaagattttcttccctttcttctctctatgtgagtgtcagatttcagtatgtgcctaacacagctatgttcaattttcttttaagttttccatgtattggaggatctttggaggattatagccccatacctatatgttcgaatatacttgaaccaaagtagtcttcccatctctaccctgtcctctccttattcaccatggtgtgtatgagatgtggaattatacacagatatgttcagtttcctccaagtttttcatatatggggatctttggacggggttttatcccacatgtttagattgcatgggacacggattctggtaaaaaaaaaaaaacagtctcctcttgcttc

SEQ ID NO: 9033 - DNA, 625 bp, Gossypium hirsutum
  Clone ID: LIB3828-022-Q1-K6-F8
aaccggatctaaatagctcagaggtgacagtgataggagtgtttgaaccgccaaaactggtggagtacgtctacaaaagaaccgggaagacggcggtgatagtgaaacaagaagcggagacaccgaagacggaagaagaaaaagccaaagatgccaacaaggacgagaaaaaagtgaagaatgtggcgataaaagacaagaaagaagccggtggagaagaaaaagacgacggcaaagacaagaaacaagagggtaacaacaaagaagcccccgccgccgacgcagctccggcgactgaaggcgctacggaagagaccaaagtggcggtggagctgaagaaaaatgaatattattattacccgccaaggtatgccactgagttttacgcataccctccacaaatgttcagcgatgagaaccctaatgcttgcactgtaatgtaaaaaactccaatgtttaggggcattattggaattgaaagtattggatcttgctcttcatgtgcccccttgtagaatctccgaacctataatctgcagatggaactgtagaattttgcaaagctttttgtattttatttttgaagtatttataaaaagaatataaataataagacattaatttc

SEQ ID NO: 9034 - DNA, 629 bp, Gossypium hirsutum
  Clone ID: LIB3828-022-Q1-K6-F9
tgcttctgctgtatctcatggttcgactctgaaaatccatgcaattcaatggtcaagctgagaatgtgcgaaaagaaagaggaagaaccagtatcgtggaatccggcagcgcccatggggtaaatgggctgctgagatccgtgacccaaggaaaggggttagggtctggttaggaactttcaatactgctgaagaagctgcgagagcttatgatgctgaggcgcggagaattcgtggtaagaaagcgaaggtgaacttccctaacgagactccgcgtacctctccaaagtgtgcggtcaagacaaattctcagaaaccactttccaagtcgaatttgagcctgttcagctaaatctcaaccagaattacaattacttgagccagcctgagcaggaatacttcgataccatgggtttcgtagaagagaagccactggtcaatcagtttgcatatgtggaccctgttcctacgtctatagatgctggatttaatcaatcagataatgcccccttgtacttcaattcggaccagggaagtaactccatcaattgttccgactatggctggggagaacagggtgccagaactcctgaaatatcatccattcttgaagcttctgtagtgggtga

SEQ ID NO: 9035 - DNA, 643 bp, Gossypium hirsutum
  Clone ID: LIB3828-022-Q1-K6-G1
catccgtagggtagcatggcaaaggtatcaaaaagaagatataaatgaagccaacaaaggactcctcgcgtctatcttgaatctgagacttggatcccgagttccggcattccctatagtcccgcatggtccctggagtctagacagcttattatcgataccaacgccattagtatgcttattatcatatcattgatctaattatgtcgatggttactaataaattaaacagattatctaatctttaaaaaaaaaaaaaaaaagagagcaaaaagctgcttgaaaagggcaactcttgcaaaaaaaggatatgaaacgtggccagaaagagctcatgaattctggaggtcagattcaccgtcttgctaaatcagtttacaaggttgaggctgaagctgtagatttgatggacggactgcgagaaatccctggaagggaggcattgaaactacgagcagaggttgcttcaatggcatcacttttgaggcagcaaagggtttcacttgacagaaggataaggaaaatatctgaattggggatacctgtctgatacactgtgtgtggacctctcttgttatatttgatattatttgataaggatttttgaactgatgctgcattttctagaatcccatgtactcat

SEQ ID NO: 9036 - DNA, 479 bp, Gossypium hirsutum
  Clone ID: LIB3828-022-Q1-K6-G10
gggttaaaccttcccgaacatttaaacacaactggttacaacattaacccatgaaaactaccggccctattgggttattcccctgacaaaacaagcccagccaaaccaatcttaacttttccacggggatggggccattttttgacaagaaaataaagccctaacatttcgggccggaattcaaaatatttataaaataggatataccccccttaacaagaccccggggggtgggaaccccaacaaggttgtcattaaaaaaactttcttacaaaacaaagggccgggccatattttttggaggaattgaatccccacatcccgtggacctggacccgtcctttattgcccttttaaaaccccgggtcacttttgcaacaattttgcccggcttggtgggttgaaaacccggtcctttacccggttaaataaaaacagggggaataaattatccaaatgcaaaaataatgcccccaaaa

SEQ ID NO: 9037 - DNA, 654 bp, Gossypium hirsutum
  unsure (1)..(654): unsure at all n locations; Clone ID: LIB3828-022-Q1-K6-G11
caacagggagttgtgcaatctaagtttgtctgaagatggaacatcaattcaagcaaaccagaaaacagaactggttccagaagcagttttcaagtcgaaacggtgaagataatcgtccgaaaccaggcgcacatgaagccgccattgcggcggctgcatttgctattcaatcagtcgaagaggctaaagcagcgaagctcaagagagggaggttcaagaaagaaaatagcaggaatggtgtgcttcattctaatagaataaccactcaattctccctcaagaaaactaaaagtgcagtggaaaattccaaggataagccaatgaaacataaatgtaaggaagtagaaagagtacattcatattccaaaccaagctctcaatctgctacaattccaatagcaccaggagatgaatggtatgacaagctgaaatcagttgtttgcggaggtgacaagttgcccaaaacctacggttaaaacttattaaaacactggagctgcgaagggcaagaaatgtacaagatttacaaagaaaacaggacagtaatttagattcatcactatgtgtgaaaatatattaagagattgttagaaaatataaacatcacatatattatatacttagntatatgttattattatttaatatcataat

SEQ ID NO: 9038 - DNA, 588 bp, Gossypium hirsutum
  Clone ID: LIB3828-022-Q1-K6-G12
ctcatttagcccctttcattagcatcaaaatcactccagttttcttttcactgaaaaagtcttgctgtggtggaaactgtggctgcggtactggctgcaagtgtggcagtggctgtggaggatgcaagatgtatccagacctgaacgctgccgagatgaccacaactgagactctggttcttggtgtagcaccccagaaagcacactttgagggagctgagatggaattcggggctgagaacggctgcaagtgtggagacaactgcacctgcaacccttgcaattgtaaatgattagagaccaaagccaaagctccctggaagcagaggcgcctttgtctttaagaaataatatgttttgttgtttgtgtttttagaataaagtagccatggcttgtcgtaggttttgcctgttgccgccacggttacttggtgcttgccaatagatagagtgaagtactaatatttacttgtttttctgtccagtgtgagcatctctgctatctcaggatatattgtgactattacataattaatgtaaggaagtgagtcagattcatattgaatgaaaagaagctcctatttcgtt

SEQ ID NO: 9039 - DNA, 653 bp, Gossypium hirsutum
  Clone ID: LIB3828-022-Q1-K6-G2
ttccccaatttcctaacttcgtttcccctaaatttccctaagttattcttcctcaattatttttcccaattcccaaacttccaatccctttgtgatccaaactcccaatttcccaaatccctttatttcttatcgggttcctccatgctacaccttccattttctcccaaattcaaacttttcctttcaaaatttaagctcccaatccgccgcaaagctcgattcttcaacaaaaaggtgctggaacaatgccgttcctctattctgattcctgtaggagcattcgacccattgctttatgcaacgattactttcagatttttgggctgtaagtgttcttcctttttttttccgctagtatagaatttttagatattttggttattcattgtgatcctagttgatgctttttagatattttgggtaaaaaatgtagagaagttagaagaattatagttgccatgctgaaagtaaagatgcagcaggttggtgaaatgtttttaatttcacatagatttggcttctttatacgttttcttgatcttttgcagtaaatttggtgggacacagcactatgcagtgttcaactttgatgagactaatgttagatgagccatcaattttgttttatctttccgtattgaagttatgtt

SEQ ID NO: 9040 - DNA, 631 bp, Gossypium hirsutum
  Clone ID: LIB3828-022-Q1-K6-G3
tatccatggtcctccatattcatcacattgttccgggcaatggcggcatgatcagggattccgtaaaccactatggattcaggacaaagagcgatggtgatgggatttctctttttggagcaacgaacgtttggcttgatcacctttcaatgtataagtgtagggatggtctcattgatgccattcagggatcaactgccataacaatctccaactgccatttcactcatcacgaccaggtgatgttgtttggagcaaatgacaaccacaaaatggatgagaagatgcagatcactcttgctttcaaccacttcggtaaaggattggtacaaaggatgccgaggtgtcgatgggggtttatccacgtggtcaacaatgactatactcattggctcatgtatgccattggaggtagtagccaccctaccgtcatcagccaatgcaaccgatatattgctcgacgtcacgtggcatccaaggaggtgaccaagagggactatgcaccaccagaagtatggaagacgtggaattggagatcagaagggacctgatggtgaatggggcttttttctctcaatccggtgatccaaaagccagctcgaaattcaaaggcgacactaaggtttctgct

SEQ ID NO: 9041 - DNA, 649 bp, Gossypium hirsutum
  unsure (1)..(649): unsure at all n locations; Clone ID: LIB3828-022-Q1-K6-G4
caggtaacaagnacatcatcatggttgatcacatgaagaagagaaaaacacgccatcgtttgcaacatcggtcatttcgataacgagatcgacatgttaggcctcgagaatcatccaggtgtcaaacgaatcaccatcaagcctcaaaccgataggtgggtattccccgataccaagacaggtatcatcgtgttagccgaagggcgtctcatgaacttaggatgtgctaccggtcatcctagcttcgtgatgtcttgttcgttcacgaaccaagtgattgcacagctcgagctatggaaggagaaatcaaccggaaaatacgagaagaaggtttacgttttgccaaaacatctcgatgagaaagtcgctgctcttcaccttgggaaacttggggctaagctcactaagcttaccaaggaccaagctgactacattagtgtcccaattgaaggtccttataagcctcctcattacaggtactgaggagagaatttgaggcagaatcaataacgaaaacggtacattcagacgattccatcgtttgcatctgaattattgttagattgttaggtttttgattaatgtangagtttttgtttgggtcatgggaaaagtttgggggtaattgtctttcattgggaaattttaa

SEQ ID NO: 9042 - DNA, 328 bp, Gossypium hirsutum
  Clone ID: LIB3828-022-Q1-K6-G5
ctcttgctcgcatttgggccgcattcatgctatttgtggcacttcgatactatcagcaaaaaagacggatgaatggatggagagggaagaaggtctatgtggaaatggatcatccattggaaatttaagacaaagacatcatcggcttaacacatctaaagtagaaccacttaaagttaagagcggattctgactcaccctgcctgccttgccccataaaccttataagcttcttccatgcatcacatgtgttggtgctctgtaatatttgtagaaaaacatatatattttttctatggtaatatattttatttgtttttttggctgt

SEQ ID NO: 9043 - DNA, 439 bp, Gossypium hirsutum
  Clone ID: LIB3828-022-Q1-K6-G6
gtcgtccacaggccttgagtttgtgcaaaaggctctattttggggggttcctactactctaaagttgggtccagatcaacaggtaagcaatgcaactatatggagtaatcgaattggatatttgggtaaatagatattggttagtctactagggaatttattgaagcaatggttagcatgtagcaatcacatgttttattattgttattattattattattattattattattattattattattattatttggatggaatgatgtaacttagttgtattccaactaagtttgttagtggtagtaggtggtgatttattttaagtggatgtaatgatgaaacttagttgtattccaactaagttgtcaagttgtaagcttgtataaataggctttatgccattttaaaaaaatgaatgaattcaatcaagatttcatcc

SEQ ID NO: 9044 - DNA, 564 bp, Gossypium hirsutum
  unsure (1)..(564): unsure at all n locations; Clone ID: LIB3828-022-Q1-K6-G7
cggccgcgtgggagaaaaataaccaatttactctctctgcgtcggctgtcctatgccattcaatttttgaaaggcagcgcagagagagatccactatttattttattcttttcatttattggggaaataaatatggcagttcttagattttgttttgtgcctgttctagcggctctcgctattggtatgattgcctcgcctgttactgttcaagcccagtcccccgcccttgcccctacccttgcccccaccaccaacgacggaacatcgattgaccaaggggttgcatgtgtattgatgctggtggcattgttgcttacatacatgattcatgtcgctgacttatgcttcaacttttgagccatttgttagattatcaaatttctagggagagggggggatatgctggatgatttgtaactatgcttgtataagtttaggcaaactcttgttggctttttcccgtggataatttgatgacttcaattttattaaaaaaaaaaaaaaaaaaaaaannnnnnnnnnnnnnaaaaaaannnnaaaaaaaaaaaaaaaaagggcggc

SEQ ID NO: 9045 - DNA, 652 bp, Gossypium hirsutum
  Clone ID: LIB3828-022-Q1-K6-G8
aaaaccctaatcccccctttcatgcgctgcacgacagatcatcgcccccttttcggagactcctcgaaccttgcccccaagctccgatgacgatggtagaaagagcaacggttcagtcgcgaggtatgtctctttcctttttgttttttctttcaaagacaatcgatagataaaaaataaaagaaaagaaagaaagaaaaaactgcgaaagaaaaaagagatccggaaatcaccttttggtgtttttgtattccgattgcgaaaaaaatccaggttgtagcctattctcagtcttttatagtgtctattttacaaaatataatgacaaaatcaaaaataaatcaccccgttctgccccttttcattttctctctctgttcctttttgtgtgctgttggagtctgctgtgttgctggtttgtgcgtctcttgcaggtacggagtgcagggtctaggatgtggcatgtacgggtgggcgtggccgcgtgcgtacggaggcccgtgcaagtggtgctacgtgcgtaggaagtggctcggggaaggcggcggttgaagaccccagaaaccctagggtttctgcttgtttcagttttgggttaggggtatcgggccattgtaattgggccgtttgggtttaggctagttgggctatc

SEQ ID NO: 9046 - DNA, 629 bp, Gossypium hirsutum
  Clone ID: LIB3828-022-Q1-K6-G9
gtttcggctttcgaagggaactccaatctgttctgggcggacggtttggaaaacagtttttggggatgaacgatttgtgggttaaacactgtggaatcagccacactggcagtttcaaggatctgggtatgactgttttggtcagtcaagttaatcgactccgaaaactgaaacgacccgtcgttggagtcggctgcgcttccactggtgacacatcagctgccttatccgcttattgcgctgccgcgggtattccttccattgtctttttacctgcgaataagatctccattgcacaattagttcaaccaattgcgaacggcgcgttcgttttgagcattgacaccgatttcgacggttgcatgaagttaatccgggaagttaccgccgagctaccaatttaccttgccaattcattgaacagtttaagactcgaagggcagaaaacggctgcgattgagattttacagcagtttgattgggaagttccagattgggttattgttcctggtggtaatttgggtaatatttatgctttttacaaagggtttaaaatgtgtcaagaactagggcttgttgataggatacctagattggtttgtgcccaagcagccaatgccaatccactt

SEQ ID NO: 9047 - DNA, 649 bp, Gossypium hirsutum
  Clone ID: LIB3828-022-Q1-K6-H1
tgcagagaacttatggagcacattaagttgttctctactcgtctcaatattcccaagctgataagagcatgtgatgagcagcagcactggaaggaacttacctacttatatatccaatatgatgagtttgataatgctgcaactactgtgatgaaccactctcctgaggcatgggatcatatgcagttcaaagatatcatagtcaaagttgctagtgttgagctatattacaaggctgtccacttttacttgcaagagcatcctgatctcatcaatgatatgctaaatgtgcttgcgcttcgtgtggatcatactcgtgttgttgacattatgagaaaggcgggtcatctgcgtctggtgaagccatatatggttgctattcagagcaacaatgtatcagcagtaaatgaagcgttgaatgagatttatgtagaggaagaagattatgatagattgagagaatctattgacttgcatgataactttgatcagattggccttgctcaaaagattgagaaacatgaactacttgagatgagacgtgttgccgcatacatatacaaaaaggcgggcagatggaagcagtccattgccttgtcaaagaaagacagcctttacaaagatgctatggaaactgcttcacagtctg

SEQ ID NO: 9048 - DNA, 645 bp, Gossypium hirsutum
  unsure (1)..(645): unsure at all n locations; Clone ID: LIB3828-022-Q1-K6-H10
ataaaaaatattaagcctgaaactcganaagaggatcatatgccatctgtttcacgtggacttgacttaaatgttgtctcagtacctgatctaaatgaagaactaactcctccatttgaatcctcgagggatgaagataatggttgcactttagagctggctgtggaggcggatgacgatgctgcttcgcttgaaatagagaagaacaggctagcaagatcacatggtagtggagattcccagacctggactaatggggcgacaggggaagtgcctgctgtggattctcataccgagttgtgcaggaaaagagcagcaaactcaaatgaagagacacatgactgtgatagtactcttataaatggctcgccattccgaatcaccaatgattcaggttccttggatgagaatttcgagtactgtgttaaggtaatcagatcactagaatgcgagggtcatatcaaccaggaattcagactgaaattactaacatggtttagcttgaggtcaacagagcaagaacgcagggtggtcaacacattcattcaaacactgatcgatgatccaaatagcttggcagggcagttagttgactcattttcagatatcatatctagcaagaggcctcgaaatggattttgtagt

SEQ ID NO: 9049 - DNA, 620 bp, Gossypium hirsutum
  Clone ID: LIB3828-022-Q1-K6-H12
cccagcgtccgtgtacgatgaaccagtacgtcttcctcctcctatccctctcatgtctcttctccttctccgtttcagctgcccccgggcctgaaccctctttcatcaccttggatacccatgtggcaaaaccggtttccataatgccaggcaactttcactccggccttcagaaagtctgctccgccaccgatgaacccgtcgattgtatccagctgctttctcccttgatgaccgacaggaccgccgtcgatcccatttccatcctcagggtgggtatcgaggcgaccaaccagaaggtgagagaagccttggacaaagctaatattatcatgaaagatccatccaccacccccgaatgcggcgagatcctctggacttgcgtcaagaacttcgaggacatcatctactcggatcagaaagccatggaagccatcaccgagcacaacgccaaccacatcatcgaagaactctccgccgattccgcgtctgtgtctccctgcgaggacgagttggaagcggctaacatccagtcgccggtgagggatatcgttaagtcgattcacaagacgattcgcatcaatttggccatcgctgctgtacaggtccatttttgaagg

SEQ ID NO: 9050 - DNA, 650 bp, Gossypium hirsutum
  unsure (1)..(650): unsure at all n locations; Clone ID: LIB3828-022-Q1-K6-H2
gcacatcaaggnnaaatggtcatgaagggattttggtaatgacgagcgtgtgtacatcctggatatgtacaatcctggaatctacccatttgatatgactgctagaaattatattaaccagaaggttgaagtgatgactgggactacaactgatgaatacttgaagcaattggataaagcacttgcggtagcggggagtaattttgcccctgagttgattgtgtacaatgctggaactgatattctcgatggagatccactgggtggattaaaggtcagtccagatggggtgatccaaagagatgagaaggtcttcaggtttgctcgtgagagaaacatccctattgtaatggtcacatcaggtggctacatgaaaaccagtgccagagtcatagcaaattccataataaacctctcaaagaaaggcttgatagagacaaatgtccacagcggaagaaaataatgatataaggctactttgctatcaataaacaactccattacaaaggtcagttccactgatgaatcccaaggcatgaatactatctaacttacgtgtttgtaaccgaaagtgatccttactatataagcaggcaaataggagaaattaggatatagaagtttgagttttacataggaataatactcat

SEQ ID NO: 9051 - DNA, 623 bp, Gossypium hirsutum
  Clone ID: LIB3828-022-Q1-K6-H3
ctcctccctcactacccaatcccatcagccaaacaccacctcctcaatctcatctccgaccaggagcggggtctcaaaacccaaaacgacactaacaaacgcgattcaataatcaaagccattgatgccatggccgttctgggccgcaatactgtcaccacaggcgactccctatccgccacgtggcggcttctatggactacggagaaagagcagctcttcattatagagaaagcttacctcttcggtactcaagcaggcgacgttttgcaggtcatagacgtcgacaacaagactctcaataacgtcattacctttccacccgacggagttttcttcgttcggtccagcattgaaattgcgtcgtcccagagagtgaatttcaagtttacgagtgcggttctcagggggaaaaactgggagttcccattgcctccatttgggcagggttggtttgaaactgtctaccttgatgatgagatacgagttgtgaaggatatcagggatgattatttagttgtcgagcgtgcaccatataactggaaagaataaagtggatgaaccttgcctctctttgtaatcaaatgtgtttgcagtcgatgctgccaatgattagttgcaaa

SEQ ID NO: 9052 - DNA, 279 bp, Gossypium hirsutum
  Clone ID: LIB3828-022-Q1-K6-H4
gtgagctcgctcctcaataccgatgatttcgtggtttcttcgtccgtgaaagagagtccgaatgtgttcggttggtagttaaacgtagctactattgaaatattgtgatgtttagtatgttgcaaataatgtgccatctatatggtgctttgaacttgatgttctgttgtaatgagttcagcttttgatggttcatctttttatgagtggtggttgtcatccaatgaaggagagcctatatgtaccctttcgtttttcttcaagtatcttcatactaat

SEQ ID NO: 9053 - DNA, 649 bp, Gossypium hirsutum
  Clone ID: LIB3828-022-Q1-K6-H5
cgcctctctcatcttccgttgtttatacgtttggttgttgttgaagaagtgctactaccatggctacaaagaagagcgttggggacttgaaggaagctgatttgaagggaaagaaagtgtttgttagagtcgatctgaacgttccattggatgataacttcaacataactgatgacacaaggatccgtgccgctgttcccaccatcaagtatttgatgggtcatggctctaaagtcatcctctctagtcatttgggacgcccaaagggtgtcactcccaagtacagtttgaagcctcttgtgccaaggttatctgaactccttggagtcgaggttaaaatggcaaatgactgtattggtgaagaagttgagaaaatggtggctgcattaccagatggcggtgtattgctgcttgagaatgtgaggttctacaaggaggaagagaagaatgatcctgaattcgcaaagaagctagcttctctcgctgatctctatgttaatgatgcatttggcactgcgcacagagcccatgcttccacagagggagtggctaagtacttaaagccttctgttgctggttttcttatgcagaaggaactcgattatcttgttggagctgtggcaaatcccaaaagccatttgctgcaatt

SEQ ID NO: 9054 - DNA, 613 bp, Gossypium hirsutum
  Clone ID: LIB3828-022-Q1-K6-H6
gttgacagttgctggcgatgtgatcctgctgggaaaagaatagaagaagttggccaactgtgcccctggatttgctcgaggtactaccggtggaaaggatggtgagttttacgtggtcactgaccctattgataatgctgctgaccccaagcctggaactctgcgtcatgctgtcacccaaactggaccactttggatcactttcaaagggtccatgaccatcaagctgcaacaggagctcattgttacaagtgataagaccattgatgcgaggggagccaatgtggaaatttgtaatggtgctggtatcactatccaatttgtgaagaatatcattatccatggccttcaaatccatcacattattcccgccaagggtggcaagatcaaggatggtgaaaaccaccatgggttacggggtgacagcgacggagacggggtgtctattttcggatcaaccaatgtttggcttgaccatcttgcccttcaccattgcgccgatggccttatcgatgtcgttcaaggatcaactgccgttaccgtttctaactgccacttcactgaccataacgatgtgatgttgtttggagcaagcgactcttacagtgccgac

SEQ ID NO: 9055 - DNA, 420 bp, Gossypium hirsutum
  unsure (1)..(420): unsure at all n locations; Clone ID: LIB3828-022-Q1-K6-H7
gggnaaattcccaacccttgttactcaccagnaatctttggagtccaaagtgaatgagacaaaggcaatggtgaagttccaattgaagaaagttctttgcatgggagtcgccgttgggaatgtagcaatggaggaaaagcagatcttccaaaacgtgcaaatgagcgtcaatttccttgtttcattgttgaagaaaaactggcaaaatgtgaggtgcctttacttgaagagtaccatgggaccttcaaacaggatcttttgaattatgcatggagtgaaatcatttttttaattgagaatgtttcaaaaattatgttatttgatgttggaaatcatgaatttttgagacattgaaaagtttttgttttgcatttcaactgaactttcgatgaatgtcaaatttccattttttttcctttt

SEQ ID NO: 9056 - DNA, 644 bp, Gossypium hirsutum
  Clone ID: LIB3828-022-Q1-K6-H8
gaagatcgagaatgaattagcaagttgcgtaggccaatcttagaaacaccaccgtgtggctaacgtaactgcacgccgactcatctgaccgcaattttctcgtttcctccagaccttccaacctaagaaaatccacaccctctcttctatataagcatcgcctcaccccttctctctccatccaacgcaaaccgattcaagctcttctcaaatcttttttcaatcaactctctccaaagatgcagatcttcgtcaaaacccttaccggcaagaccatcaccctcgaggttgagagttctgacaccatcgacaatgtgaagtctaaaattcaagacaaggaaggcatcccaccagaccagcagcgtctcatcttcgccggaaaacagctcgaggacggccgtaccttggccgattacaacatccagaaggaatctaccctccaccttgtcctccgtcttcgtgggggtatgcagatcttcgtcaaaaccttaaccggcaagaccatcaccctcgaagtcgagagctccgacaccatcgataatgtgaagtctaaaattcaagacaaggaaggcatcccaccagaccagcagcgtcttatcttcgccggaaaacagctcgaggacggccgtaccttggccgattac

SEQ ID NO: 9057 - DNA, 618 bp, Gossypium hirsutum
  Clone ID: LIB3828-022-Q1-K6-H9
gcgtttgcagcaacttcgtgataccacgttaattatcggctccggtgaaagccccacacggacggcattcacatgagcaaaacaaataaggtcagaataagcgacagtatcatcggcactggcgacgattgtgtctcaatgatccatggaaccaccaacgtcaccattgagaacgtcaaatgtggccccggacacggtttcagtattggtagtcttggacactacgaagatgagttcgatgtttttggaatcaccgtgaggaattgctcattatcccacacagaaaatggtgcaagaatcaaaacatacagaaatgaaagtccatctaaagcttcaggcattattttccaagatctcatcatggacaatgttaagaaccctattctcatcgatcaagaatatgcaacgattaaaggcagtgtggactcaaaagtgctcatctccgacgttgaattctcaaacatcagaggaacaacaataagcaaaattgctatagtcctagcttgcagcccaacatttccatgccaaggcattaccctcaaggacattcacttagagtattccggtcctcccgatcataatgaagacactcccttcagttctaactgcaccaacgtc

SEQ ID NO: 9058 - DNA, 403 bp, Gossypium hirsutum
  unsure (1)..(403): unsure at all n locations; Clone ID: LIB3828-003-Q1-K6-A10
taagccgttcgaactttggagtccctgtttcagtcttaagaccccctctacagttcgattccggcgaagaggaagggatctcgtggcgcgttttctatggaaggcgttacccttctttttttttgatgtaaaatgaaaacgaatcaactgaaataggtataagaacaggggattaaaagaagagggaaaaccaccttctctgcttttcgattgattgtgttctatgcgtgttcttacaatatgtctttgtatttttgttttttttttttggttgcttcaaaaaaataccttagctattacatggcttttatagcccaaacagaatcaaaaagatcccacaaataaaaataaaaatacgaattccaattctttttcctatttgctgttattttgtttgncttct

SEQ ID NO: 9059 - DNA, 450 bp, Gossypium hirsutum
  unsure (1)..(450): unsure at all n locations; Clone ID: LIB3828-003-Q1-K6-A11
ccaacccgacaatggtatttatcctcttacaatggnaagaataattaccaagaaccaaaatcaatatttatttaccccattgatttcccatacctgtgtgtgccaaccaaatccgtgtgctttaagatgcagaggaagacagggagatggttcatgttaatttggagtgttggggttttatctggaaatatgtagctggccataaaataaagtaattgcagaaataatgagcagaaaagttgttggtggaggaggatcagatgcagaatgaataaccatttggtcaacctgttggattataaaaaatttaaatttgtctgtagatagatttgaatttgatttgttggaataatttggtctctactgtgagatgcagctaatataaacttttcttgtttcatttgtaatccttccttcattcattcataacacagagnagctttacttcaa

SEQ ID NO: 9060 - DNA, 432 bp, Gossypium hirsutum
  Clone ID: LIB3828-003-Q1-K6-A12
attgatggaactagtcctgttgctgaggaattggccgtcactcttacatacggtcggagatcccattgtgaatatttgtagatgagctgtgtccaacctataaagagttgcaacgattactataaggattgattgtgatgggtccgtcaggtttgcccgatacaatggtcaaccagacctactggaaccttttagatatttggttgactttcaatggtatacctgtccttggcaataaaactttccgtctctacaccaatttcgaacacacctaaggtggcctttctattcgttgtgtagggttcttagtttcatcaattcagtaataagcattgctgtctttagtatttgttgtgagaatcaggagacttggatgagcctgatgttgagctgggaccgttttaaggcaaaatctgatcaatttctttctta

SEQ ID NO: 9061 - DNA, 611 bp, Gossypium hirsutum
  Clone ID: LIB3828-003-Q1-K6-A7
cggccgcgtgggttcgaggattccccgtatgacgttgtttcaaaaaactccccttttcatcccagtatgatatccccgttttcgcttttcttttttgggtttatcttttactcttaaattttgcattttatgttatgttattcagggccactttcttcaacccagctccctaattctgtctctgctggctctcgccttcgcgttgcgtatcagggagttcgtggtgcctacagtgaagcagctgctgagaaggcctatccgaattgtgaagctgttccttgtgatcaatttgatgctgcttttgaagctgtagaaaagtggatagtggatagagcagtattaccgatcgagaattccttaggtggtagtattcatcggaattatgacctcttgcttcgccatagcttgcacattgtcggggaggttaagcttgcagttcgtcattgcttactagccaatcatggtgttagagttgaggacttacaaagggttcttagtcatcctcaggctctagctcagtgcgagaacacgttaacaaagttaggcttgagcagagaagcaactgatgatactgctcttgcagcaaagtacgtggctttcaacaaactaaa

SEQ ID NO: 9062 - DNA, 587 bp, Gossypium hirsutum
  unsure (1)..(587): unsure at all n locations; Clone ID: LIB3828-003-Q1-K6-A8
gcccaatttgagaatggtggagggatcgccagcttggggaagcgacttcttacccgcacctccactcgcaccccttctcttttccactccacttcttcacctaccaggagtcctcacgccgtcggcatacgaacaataacctggatgatcaggtccatgccggctgtggttcctgatgatgtgattcagcctcaatcggacaagtacctgggctcctgacccgcggacaggggtatttggccctgctacggagcaacttaacgcatctgcgggtggggagcagggcatccattcgagtggtgcaaactcggtcctggaggaaaaggcgtggttccgccccactagtattgaggacttggagaagccacaccatcactaagtcgctgataatgagcctgctactatatagtctataggtaaaacaaagacataggtgtggtttgcttggatcaaataaactggaaaaacgttttaatggttcatgttctatttctacctggttgttacatgnggaatttgcaaatctagttactgcgaactctgtaacacaggaacttattatatttgtgatgcttgcgcgctatctt

SEQ ID NO: 9063 - DNA, 593 bp, Gossypium hirsutum
  unsure (1)..(593): unsure at all n locations; Clone ID: LIB3828-003-Q1-K6-A9
gcggnagtaaataaagaacaagcggnaaaanagaattcaattttgaagacttcaatggagcttacccaaaattctttaaccatggtgactaagttatccaccatcttgaatgaccttaacattccaggcatcaatatcgacacaactgggtttgaacgtaagctcctgtctaacgatggacctgagtggatgggccacgctgagaggagactacttcaagcaaaaccaacagatttgaagcctaacgttgtggttgctaaggatggtagtgggaaatatgataccatcaccaaggccttggctgaagtccctcaaaaaagccccaatcgatttattattcacattaaggctggtacttacaaggaacaagtccttttacctaaggagatgactaatgttatgttcatcggtgatggtccaactaagaccatcatcaccaatgaccttaactgcattagggatcatccgcttaaaacattcggcactgcaacggtgtggatggggctggtttcatggccagggacattggattcgagaacacagcaggacctcctggtcatcaagcagtagcttttagggcaacatgtgatatg

SEQ ID NO: 9064 - DNA, 101 bp, Gossypium hirsutum
  unsure (1)..(101): unsure at all n locations; Clone ID: LIB3828-003-Q1-K6-B11
ctggtcgcctgcagtaccgtccgnattcccggtcgaccagcgtccgcccagccacgtcttaaacatctgtttagaatggatcttaactaagctgtgcctag

SEQ ID NO: 9065 - DNA, 784 bp, Gossypium hirsutum
  unsure (1)..(784): unsure at all n locations; Clone ID: LIB3828-003-Q1-K6-B12
tttaaagtctgtcatagtgtcttcagtcttcccatccggtcgacgtcatccttgaaaaaaaaaagttcaatctannnnnnnnnnnnnnnnnnnnnnnnnnnnnnnnnnnnnnnnnnnnnnnnnnnnnnnnnnnnnnnnnnnnnnnnnnnnnnnnnnnnnnnnnnnnnnnnnnnnnnnnnnnnnnnnnnnnnnnnnnnnnnnnnnnnnnnnnnnnnnnnnnnnnnnnnnngnnnnnnnngngnnnnnnnnnnnnnnnnaacacttctttgcaacctattgatcctcgaaaacagttgacttaaagatcggtgttgccttctgctcgtgcaataggcgggtttgattagtgccgcttttctgtggattactatgagcttcaccggtccttcggttggccctggtggtagaactgctagaagggcacttgagtttggaagaacctatgtggtcaggccaaaagtaggcaccaagctaccatagtttggctacatggtcttggtgataatggttcgagctggtcccagctcctggagacgctccctcttccaaatattaaatggatatgtccaactgcgcctactcaaccaataagcatatttggtggctttccatcaactgcttggttcaatgtcggcgagctttcagaagatgctcctgatgatatagagggtttggatgctgttgcagcacatgttgcaaacttgctggcagcggnagcctgctgacattaaacttggtgttggaggcttcagtatggggtgcagctacctcactatactctgca

SEQ ID NO: 9066 - DNA, 62 bp, Gossypium hirsutum
  Clone ID: LIB3828-003-Q1-K6-B7
aaaaaacaaaaaaaaaacaaaaaaaaaaaaaaaaaaaaaaaaaaaaaaaaaaaaaaaaaaaa

SEQ ID NO: 9067 - DNA, 570 bp, Gossypium hirsutum
  Clone ID: LIB3828-003-Q1-K6-B8
ggccgcccttttttttttttttttagcaattcatatttgatttataccattgcaaagattaaaaaacatccaactttaaatggcggaaccgtcaaaataaaaatttgatttatgagcatttttttaaagagaaaaagttatgatttagagcatcagattcttgagttcatgagacgagacgagacaaaccaaagaaaaagctccctaacctgaatccgaatcggaacccgaacccgaaccagaatcggaatccgatttacgagtgtcggcagtgacatgtgctttgtccttggcttcagcttgcttgacagcctttctcagctcaccaaccggaatcaatggcagatacgcaaacacaggatatcctttcccgctcaagtctttaaccaaacagttatacttatcggacaaattcgaagctgtgggaacgatcttctctgcaaccgagtggaaagcagaactgcgattcagttttacccataccttggttgagctaaccagaaccagctgcttgtactcggtcgcggcgtagtgcaaagcgccgcgcgcaccgttggttcgagcctcgtc

SEQ ID NO: 9068 - DNA, 479 bp, Gossypium hirsutum
  Clone ID: LIB3828-003-Q1-K6-B9
cgagagtgtcaaaagaagctgtcgaagtgatcgtgccggataagtggaaggaaggtgccagcaacacaaacgaaagcggtggccggaaaataacgagaataaactcctctctaaaaagcgaaggtggactccttatggaaatactaagtgcatcatttgcaagcagcaagtgcaccaagacggcaagtactgtcacacttgtgcttattccaaaggtgtatgtgcaatgtgtggcaagcaagtgctcgacaccaagctttacaagcagagcaatgtataataaggaaggggcattagctgttcttcaagtagataccttagttcctctttgttattgacaacgcatgaatatgatcgcgaaggctgtataagattgtcaatgttaatgtttatcttgcatacccaccggtcttctttctggtcatttgtatttcatttccttccatggtttttactagcaaatggaacccttttaattt

SEQ ID NO: 9069 - DNA, 756 bp, Gossypium hirsutum
  unsure (1)..(756): unsure at all n locations; Clone ID: LIB3828-003-Q1-K6-C10
gtgcaatgttgctctaaaatctctatgcaagaaaaaggtctccaaatagaggaagctaatttgattggagtcgatagnnnnnnnnnnnnnnnnnnnnnnnnnnnnnnnnnnnnnnnnnnnnnnnnnnnnnnnnnnnnnnnnnnnnnnnnnnnnnnnnnnnnnnnnnnnnnnnnnnnnnnnnnnnnnnnnnnnnnnnnnnnnnnnnnnnnnnnnnnnnnnnnnnnnnnnnnnnnnnnnnnnnnnnnnnnnnnnnnnnngnnnnnnnnnnggnnnnnnnnnnnnnnnnnnagtctcggcattgatgtaagaatattctctggtgtggaagtacggacttgtcgttttccattcaaaattcgggctatgtctgaagccgcagctgaaaagaaaatccgacaactactcttcccccggtctcgccggaagaaattccagtctcatggagatgaactcagagacccaggtccttagtttttaccctttgtagccaatcaaccatttttgcggctttattcaaagagggtatcaatgtcatccggactcaaaatgagcgtcggatacaaatgcacgttcaacaaaagtaatcatattcatatctcgatatccatgttcaaacgtattatccattggtgttatgagtattttaagaaaaatgaagggtccttgtatcgtagacaggcattgccttttaaggcaggaagtttaaaccatttagattgaagttgtaataaatgggtggctagataggcattatct

SEQ ID NO: 9070 - DNA, 496 bp, Gossypium hirsutum
  Clone ID: LIB3828-003-Q1-K6-C11
gctcctttttttggcttcctcggtgccgctgctgccctcgttttctcctgtatgggagctgcgtatgggacggctaagagcggtgttggtgtggcgtcgatgggagtgatgaggccggagctggtgatgaaatcgatcgttcccgttgttatggctggtgttttgggtatttatggtttgattattgcggttattatcagtactgggattaacccaaagctaaatcttattaccttttcgatggctatgctcatctttcctctggccttgcttgtggtcttgctggtctctccgccggcatggctattgggatcgtcggcgatgctggcgttagagccaatgcccaacagccaaagctttttgttggaatgattcttatcctcatttttgctgaggctttggctctgtatgggctcatcgtcggtatcatcctctcttctcgtgccggtcaatcccgagctgaataagatgcaatattccaaaactcggggatttg

SEQ ID NO: 9071 - DNA, 386 bp, Gossypium hirsutum
  unsure (1)..(386): unsure at all n locations; Clone ID: LIB3828-003-Q1-K6-C12
tccggcaatacaactccaccgtttcattccatcttcgttagttgggtttcggctcagaacgactcccggggagaaaagaagtttgggagtatgatccggtacttttcaacgaaacccaanccgaaaaagaagccaatcgagttgaaaacgtcgctagagcaaacgcagaccataaccagagtcatctttgaaattcttaaagagcatgggcccctcaccgtcggtgatacttgggaacgagtcaaagaagttgcattgagaagacttacaagcaagaagcacatgaagatcgtgctgagaaggatgagagagagaaaaaagaataggctaatatgcaaccatgtggggcctcacaaacaatttctgtatacaacttggttcactaa

SEQ ID NO: 9072 - DNA, 615 bp, Gossypium hirsutum
  unsure (1)..(615): unsure at all n locations; Clone ID: LIB3828-003-Q1-K6-C7
ggnagattttattactagttctttttatgaatgctgtctttttcatagtgaatgctgtaccagaaacatgccctgctgatctcggtggaaaatgtggtgaagatggtgaatgggaaggggaatttttccctggagttcccaaaattaagtatgagggtccttctagcaagaatccactttcatacaaatggtacaatgcagaagaagtgattctcgggaagaaaatgaaggactggttgagatttagtgttgcattttggcatacatttcgtggaacaggtgccgatccttttggtgcacccacaaagtattggccatgggaagatggtaccaattccattgctatggccaaaagaagaatgagagccaacttcgaattcctaagcaagcttggagttgataggtggtgtttccatgacagggacattgctcctgatggcaaaacactaaaggaaactaattcaaacttggatgaagttgtggcacttgctgaagaacttcagggggacaagatccgtccactgtggggtactgctcaactatttatgcatcctcgttacatgcatggtgctgctacaagctctgagttgggtgtttatgcctatgctgctgctc

SEQ ID NO: 9073 - DNA, 584 bp, Gossypium hirsutum
  Clone ID: LIB3828-003-Q1-K6-C8
caagcctcaaaccgaaggtgggtcttccctagaaacaacaccggcatcattgtgttggctgaaggacgtctcatgaacttgggttgtgctactggccaccctagctttgtcatgtcatgctctttcaccaaccaggtgatcgcccagctcgagctgtggaaggagaaggcaaccggcaagtacgagaagaaggtgtacgttttgcctaagcaccttgatgagaaggtggctgctcttcaccttggaaagcttggggctaacctcaccaagctcaccaaggatcaggctgactacattagcgtccccattgagggtccttacaagcctcctcactacaggtactgaggagagaatacgagagagagagagggagagagttggactagaaaaaggaaccatacaacgggatggtttgattgtttgtttttactaaaatttattgatgatttgtggttagatggttagattttgattttgataggagtttgcgtgtgggatggatggtaagttttggtggaaaagaaatgaggtctctgcttgaagaagacaaatggggtctgaataaggtgatggggattgtgtgg

SEQ ID NO: 9074 - DNA, 597 bp, Gossypium hirsutum
  unsure (1)..(597): unsure at all n locations; Clone ID: LIB3828-003-Q1-K6-C9
ggnaggtttgcaactggctatggcattggtattttctcttatgtggtccctatcttcatagctgaaatagcaccaaagaacctcagaggaggactcacaacattaaatcagctcctgattgtgattggtcaatcaacagcattcttaataggaacagtcatatcatggagggaactggctctagcaggtcttttgccatgcattgtcctgtttgttggcctttgtttcattcctgaatctcccagatggctggcaaaggttggcgaccagaaagaatttcatgcagctctaagggaacttcgtggtaaagatgctgacattaccgaagaagctgaagaaattcaagaatatattgaaactcttcaaagtcttcccaaaacaacaatatgggacttgtttcagaaacaatatattaagtcagtgatcattggagttgcattaatggtgttccaacagtttggaggaataaatggagtaagcttttatgcaagtcaaacttttgcattagctgggctttcctcagcaaaagctggaaccgttgcatatgcttgtgttcaggtccctataacttttctgggagcaatgctaatggacaaa

SEQ ID NO: 9075 - DNA, 783 bp, Gossypium hirsutum
  unsure (1)..(783): unsure at all n locations; Clone ID: LIB3828-003-Q1-K6-D11
naaanaaaaaaaaatgaaggcctcagtttcaaaatggcttcaatgaggctccttgcaataattgccattctggttnnnnnnnnnnnnnnnnnnnnnnnnnnnnnnnnnnnnnnnnnnnnnnnnnnnnnnnnnnnnnnnnnnnnnnnnnnnnnnnnnnnnnnnnnnnnnnnnnnnnnnnnnnnnnnnnnnnnnnnnnnnnnnnnnnnnnnnnnnnnnnnnnnnnnnnnnnnnnnnnnnnnnnnnnnnnnnnnnnnnnnnnnnnnnnnnnntcagggcttagttaatggtgattctcacgaattgcctagtttcgatccggaactagccgtagccaagtttgggaagttgctgaaggcaaggtcggccctgatgttaaagtttttaatgtggtggatttcggtgccaagcccgatggaaccaccattagcactatcaattttattagggcattcaaagcagcttgcaatcacaatggccgtgcaatgctggtgatccctgagggaaatttcttattaggatcgatgttattgtccggaccttgcacttttcaacctccgttgatggttcaattcaacggaaaccttttgccgcaggttcaacgtccacgccgaaaatgcagactggatcacattcataaactttaatggcttgttcataagtggaaaagtaccatcaatggcctaggcgagaaggaggcatggnaaggctgtatgcgatggttgccgtcgaaagctgctaattgaagttaatcaattgaacgacgtgctcattagtggcattacc

SEQ ID NO: 9076 - DNA, 450 bp, Gossypium hirsutum
  unsure (1)..(450): unsure at all n locations; Clone ID: LIB3828-003-Q1-K6-D12
ttccaagtggaatacgccctcgaagccgttcgtaaaggtaacgccgccgttggcgtacgcggcaccgacatcgttgttctaggcgtcgagaaaaaatccgccgccaaactccaggactcacgatcggttaagaagattgtgaatttggatgatcatattgcattggcatgtgctggactcaaagccgatgctcgtgtcctcataaacagggnctcggatcgaatgtcaaagccataggctgactgttgaagatcccgttacggtcgagtatattactcgttacattgcgggtcttcagcagaagtatactcaaagtggnaggtgttagaccatttggntctctcgactctgattgttggcntttgatccatatagcggtaccactggcactatatcaaactgnatccgtcagggnacatttttccgcttggnaaaggctaatgcaactgg

SEQ ID NO: 9077 - DNA, 595 bp, Gossypium hirsutum
  Clone ID: LIB3828-003-Q1-K6-D8
ctccacctctctttcattcaccaccgtccctatttccataaacccatcttctctctttccttcaggcttcgtcttcgttcaaattatcctccatcagggcttcctcttcctccactcccttctttgaacccccaaagccttcgccttcgctcctccaaacgctgacgcccctcctcaaaaccacctgcattaccgtcaccgctgctgccgcgcttttcttcgcccgcttctaccagaaacccgctctcgccgccctgacgacacccatcgtggagaccgccacgagggaatcgatggtctccttagaagagcaagagaaaaccctggtacaaaaattagggaagactccgaatgacgttgaaacgctgcggtctctgatggaggtccggatcaaattaaagaaactgcaacaagctatcgatgttatcgagcgtttgattcgtctcgaaccccaagacccggaatggcccatgttaagagcccaaattcatagctacgctggcaatttcgagctagccaaggaggagttcgaagaaatattggctaaagacccagatcgggtggaagcttttcacggccttgtaatggcttattc

SEQ ID NO: 9078 - DNA, 595 bp, Gossypium hirsutum
  unsure (1)..(595): unsure at all n locations; Clone ID: LIB3828-003-Q1-K6-D9
cggncgcgtgggcggacgcgtgggtgaatctagggatttgcgggtggagaagacgagagctcatctctctgcttcaaagctcctgtccaggtagaattctcttcttcctttgcgttgtgttctttgttgttcagtcgccatggcttcaaagcggattttgaaggaactcaaggatttgcagaaagatccacccacttcttgcagtgctggtccagtagctgaagacatgtttcattggcaagcaacaatcatgggaccctcagatagcccttatgctggaggtgtgtttttagttaccatccatttccctccagattatcctttcaagcctcctaaggtcacgtttaggaccaaggtcttccatcctaacatcaacagcaatggaagcatttgtcttgatatcctcaaagaacaatggagccctgcactaaccatttccaaggttctgctctcaatctgctcgttgctgaccgatccaaaccctgatgaccctcttgttccggagattgctcacatgtataagactgatcgggccaagtatgaagccactgctcgtagctggacccagaagtatgccatgggatgacagtggttg

SEQ ID NO: 9079 - DNA, 524 bp, Gossypium hirsutum
  Clone ID: LIB3828-003-Q1-K6-E10
tattcacttccaggtgaagaaactgaattccacaacaccaaagcttcggatctgctcaaattaagctctcccaagaaccaaaacaaccacgaaaacaccggttccatcttcaaaacctgaaaagaaaccgacaacagcccagattcagaaacaacaaaagaagcaacccagttgggtcgacgacgatgatgaatcggatttagtgtcggagttccgggatctaccggctaagttccagcaaacacttataccggacctggagagaatctcgacaacctcgaaagtttacatcaacaaatacaacaaagagttcaccaaacagttcaaaccatatgtcggcaacaaacatgctcccaccattgctactgtaatctcttgtgctttccttttaatccctttactattagtttccctcatttttaaccgcatcaaagcttatttttcactccaaagaattctcatcttcatccaaatttacctctcgatttactttttcaatcctttgccttacctccctcgtcacc

SEQ ID NO: 9080 - DNA, 185 bp, Gossypium hirsutum
  Clone ID: LIB3828-003-Q1-K6-E11
taatcatttacagattctaagactttttttcggtgttcaacttcaataattcaagcctaagtttcctaagaattaagaactgaccacagtttttacctaaacttataacatgtgggacaagtcacgagagttaatggcttctaatttagttcataaatgctctttacagagaactttgaaccttt

SEQ ID NO: 9081 - DNA, 312 bp, Gossypium hirsutum
  unsure (1)..(312): unsure at all n locations; Clone ID: LIB3828-003-Q1-K6-E12
gctactggttggnaccaagtgaacacnncagccgtcctggnaatggttcaacatgnaaggnaaaagtacaagtgggatgcatggaaggctgttgaagggaaatcgaaggaggaagcaatgaacgattatatcactaatgtaaaacagctgcaagaggctgctgctgcatcttcttgacgtgtgtgtgagaatagaaaaggtgtaattttcaagccctttgatacctatgggtttgaaaagtctaaaactatgaataagcaatgtactatgttttattgctattaagttatattaatgaattatggtttattt

SEQ ID NO: 9082 - DNA, 602 bp, Gossypium hirsutum
  Clone ID: LIB3828-003-Q1-K6-E7
ctgctttccttcaattatttcccacttccttttgccttcaaaattccttgggattcctatggctaccgctgaggttgcatcagttcaaactgcacttcatgaggagaaaactgaagaatcagtgaaggatcaagaagctacaacagatgaagtagttgccgaagctccagcagcggaaccagttgccgaagagccaaaggaagcggagcctgcggcggtggtagtcgaggaacctgaagcctcagttgaagttgaaaccaaggaggtggtagaagaaccaaaggctgttactgaggagccagtagtagaggaggctcctaaggaaacaatgccagaaccagttgccgaggagatcaaggaaaccactgaacaaaccgttgaaaccaaagaaactacagagtctagtgaggcagcagcagaagcacccaaagaggaagttaagaaggaagaagaagcaaaaccagctgaagtggaggagaaagttgaaacagaagctgatccagcagagaagactgagtaaataataaagcttttgtgatgaaaatgcgggtgtcaatggaagtgtgtttcaaatggctacagtttgataagtttgcatgtca

SEQ ID NO: 9083 - DNA, 589 bp, Gossypium hirsutum
  Clone ID: LIB3828-003-Q1-K6-E8
cttaagtgggatttcaggtgcgagtcaaggttttagcaagaaggtatactcaaggaactatgacgtacatattcactaggaaggtgattagtactacatgcgtagggcgctcaggatagatttgtctatgttgtaagagggtgaaagcggagtagagtttattccttttttattcaattgacctaatatttgcttcacaagaaaggtgataacttcgagtaccagggaagaaacttaattccgagtgctttccactgttgatatggttatatagagtgacactcgtaagaaggttggaaaatggcttttgtttcaaaggaagaaaaaattgaggattaccttttcaagattgtacttgttagtgattcaactgatgggatattgaatttacttgcaagatttgctaagaatgagttctacccaaattcaaagtcaaccataggagtagagtttcaaactcagaagttagatataaatgggaacgaagttaaggcacagatgtggataatgcttacaagaaccaagtggatataccttaaatatgttcgtatctgagttaggctcatcaagcatgattgagaggtgaaaa

SEQ ID NO: 9084 - DNA, 593 bp, Gossypium hirsutum
  unsure (1)..(593): unsure at all n locations; Clone ID: LIB3828-003-Q1-K6-E9
ctttgggataccagaaagagtcctccattacctcttgcaatttagggtttaagacttatgactgggattacagatggatggactacccgccacaggctagagatttgaagcacccatctgaccaatccattgctacttataaaggtcactcggtcttgcgaactcttattcgctgttacttttccccagaatacagtacgggtcagaagtacatttacactggatctcatgactctagggtttatatctatgatgtggcaaccggagcccaagttgcagtactcaagcaccatacatcaccggtaagagactgtagttggcacccatactacccgatgctggtcagctcttcttgggatggagatgtggttaagtgggaattccctggtagtggagaagcaccaacccctgtgagcaagaaaagaatccgaaggagatattactactgaagggttaaggccaaccgtaacatctgtaagttgtaaatcatatatatactattctatatantgttgtttaaatatatatcagctccaataatgataaattgtttgaacaaaataaacatacttccatgcatatatatnttttcg

SEQ ID NO: 9085 - DNA, 779 bp, Gossypium hirsutum
  unsure (1)..(779): unsure at all n locations; Clone ID: LIB3828-003-Q1-K6-F11
cttttcttcatcttctcctcctactattcccatgtcttcaagctctagacttgttcccaaaccttgacgagccagnnnnnnnnnnnnnnnnnnnnnnnnnnnnnnnnnnnnnnnnnnnnnnnnnnnnnnnnnnnnnnnnnnnnnnnnnnnnnnnnnnnnnnnnnnnnnnnnnnnnnnnnnnnnnnnnnnnnnnnnnnnnnnnnnnnnnnnnnnnnnnnnnnnnnnnnnnnnnnnnnnnnnggnnnnnnnnnnnnnnnnnnncccaatcatatttacttatatacgtgtattaattgtggaggattatcactcctttcctttccactgaattctcaggatccacttgatcatcccaagatcatcaataccccatttttcccagaaagttctggaatgggttaatttaaagtctgcggatttattgtggagaataagtgaagtgaaagcatagaaaacaacaatagaattaagcaaagaaaacaacantccgatgtcgacgtactttcatgggaaccctgnaaatccaagcaagtactgacggccttcaaacccttgtacttatgaaccctgcctatgttcagtattccgatacccctccaccacctccggccaacaacctccttttcttcaaccctaactccctctctccgccccaaactcagcaactcgtcggcatccccctccccgctacctcagccgccaatcaaggccctacctcacacgatatctcccccttgcatggcctcgtccagcgcgtccattacaacttgtaccaaccc

SEQ ID NO: 9086 - DNA, 723 bp, Gossypium hirsutum
  unsure (1)..(723): unsure at all n locations; Clone ID: LIB3828-003-Q1-K6-F12
gctaaattaaccattagtgagcttaaaatgatctatcaaagtgttaaattcattgttcaatgtgatgttatttnnnnnnnnnnnnnnnnnnnnnnnnnnnnnnnnnnnnnnnnnnnnnnnnnnnnnnnnnnnnnnnnnnnnnnnnnnnnnnnnnnnnnnnnnnnnnnnnnnnnnnnnnnnnnnnnnnnnnnnnnnnnnnnnnnnnnnnnnnnnnnnnnnnnnnnnnnnnnnnnnnnnnnnnnnnnnnnnnnnnnngnnnnnnnnngngnnnnnnnnnnnnnnnnnnnnntatgctaatgtattgagtatattaagttgtgcaatttgatgttatatgtggcgttaatgttgacttgttattgcatattttattattaatttgacgttatatgtgtcattcattaacttttgtttcttttttctcaggtttgagtttttgttggatgcatggtccaggattagctgaattcatgcatagtgacgacttgtttgagctaattgctgatcttaaagtgtgcattctatcattattttgttctatttgtattttgttagatttctagtgtagtatgataagtgtggtattttgtttgattgttattgataaactttctatttggtgggatatatatttatatcatagatataaaaaaaaaaaaaaaaaaaaaaaaaaaaaaaaaaaaaaaaaaaaaaaaaagggccggcccccctaaaagaaaccaa

SEQ ID NO: 9087 - DNA, 602 bp, Gossypium hirsutum
  Clone ID: LIB3828-003-Q1-K6-F8
ttggattcttccatgactatgtgcaaatccgtcacctcaacccctggcttattcttgcggagaaatacaagtagtaggagtttccaatgtacctttaaggtgggaaccaggatcaactttcctaggcagaaagctcaggtaacccaagttagatgtaaatccagtaaacgtggaggagccctcggtgccacatgccgtgctgagaaaatcctggtggcaaatagaggagaaatcgctgttcgggtaatccgaactgctcatgagatgggaataccttgtgttgctgtttactcaaccatagataaggatgcacttcatgtaaaattggctgatgaatcagtttgcataggggaagcaccaagcagtcaatcgtatttattgataccaaatgtcctatctgctgcacttagcctgaattgtactatgcttcatccgggatatggtttccttgctgaaaatgcagtttttgtggaaatgtgcagagatcacagaatcaactttattgggcctgatcctgacagtattcgtgttatgggtgacaaatcaactgcccgagaaacaatgaagaatgcaggtgttcctactgttcctggaagtgatgg

SEQ ID NO: 9088 - DNA, 387 bp, Gossypium hirsutum
  Clone ID: LIB3828-003-Q1-K6-F9
cgcctccaaagctttgtttcgtcagttgttcgagaaagatcatctacttatacttaccttcttgctgattgttcccaccctgataaaccagcgcttttgattgaccctgtagacaggactgttgatagagatttaaatttggttaaagaattggggctgaagcttatttatgctatgaacactcatgtacatgctgatcatgttactggaactggcctcatcaagggcaaggtgcctggtgtcaaatccgttatttcaaaggccagtggttccaaggctgatgtttttgttgaagctggtgacaaaatctcttttggggatctctttcttgagggtggaagttcacagcaactctacaagtcagtgcattcacagatttttacatta

SEQ ID NO: 9089 - DNA, 600 bp, Gossypium hirsutum
  unsure (1)..(600): unsure at all n locations; Clone ID: LIB3828-003-Q1-K6-G10
cggncgcgtggggaggcctgttcccaaggtattgtctatggtaagcccacaaaccaaggtgttacccatnnnnnnnnnnnnnnnnnnnnnnnnnnnnnnnnnnnnnnnnnnnnnnnnnnnnnnnnnnnnnnnnnnnnnnnnnnnnnnnnnnnnnnnnnnnnnnnnnnnnnnnnnnnnnnnnnnnnnnnnnnnnnnnnnnnnnnnnnnnnnnnnnnnnnnggnnnnnnnnnnnnnaattggaaggttccagcgcagcaannncggtctgttgcagnnaggagcgagctggnntcgaaaattaggnagggtctcagnatgttgttaactttcatactggnnatcaacgaggnnattctacnnttacaagtactttgnaggggttatccnnttgttgatnngttgcacacannatgcaatccnngcaacgacccgnagnaattttaactggnnatctgcnannatcccgtnntcacaagnncacagggnnnaacttcgnagggactttcacattctgcnnnaggtaagnaaaaaacnnaggggtctnngcattgggaaagggggtcanncttgcnnnaccacaagnaatatcggccatttctc

SEQ ID NO: 9090 - DNA, 699 bp, Gossypium hirsutum
  unsure (1)..(699): unsure at all n locations; Clone ID: LIB3828-003-Q1-K6-G11
ctgtaataaaatctgcaatcttaattctgtcggtgtttttatctgtacgcttcagttcgggtgttaggttgctccnnnnnnnnnnnnnnnnnnnnnnnnnnnnnnnnnnnnnnnnnnnnnnnnnnnnnnnnnnnnnnnnnnnnnnnnnnnnnnnnnnnnnnnnnnnnnnnnnnnnnnnnnnnnnnnnnnnnnnnnnnnnnnnnnggnnnnnnnnnnnnnnnnnccaggacagcccatgatgaccccaaaaacatggacgctattcctcccattgatgcactcaaccctaccgagttgaatggacccggtgttggcattcacgaagatcatgttgtcccaaaaggtgctgaaattggtactcttggttttggttttgaaggtggtcctgataaatgttgttcttctggatgttccggtaattgtaatcctggtggtttcgttctaccatttcctcaaattccagaaatcccaagaattccagaaatcccacaaatcccacagatcccacaaatcccacaaattccactaatcccacagatcccacaagtcccacagatcccacaagtcccaaaaatcccactaatgccaggacagtcgggatgtgagagtggagagtgttgccgtcagggttgtggtgggacttgtgctgagtgtggtcagcccaggtgcgcatcaggatgttgcccaggctgaaactgt

SEQ ID NO: 9091 - DNA, 719 bp, Gossypium hirsutum
  unsure (1)..(719): unsure at all n locations; Clone ID: LIB3828-003-Q1-K6-G12
ctcgatttctccctctttctcccctaaagacgaagttcaggaagcttaatcgacccactggtcatcgcatgtcccccnnnnnnnnnnnnnnnnnnnnnnnnnnnnnnnnnnnnnnnnnnnnnnnnnnnnnnnnnnnnnnnnnnnnnnnnnnnnnnnnnnnnnnnnnnnnnnnnnnnnnnnnnnnnnnnnnnnnngnnnnnnnnnggnnnnnnnnnnnnnnnnaatgctcagaacaatggtttcccagttggtaaagcacgagcgcattgaaactactgttgccaaggcaaaggagattcggcgacttgctgataacatggtacagcttgggaaagagggttcactttttgctgcaaggcgtgctgctgcttttgtccgaggagatgatgtcattcacaagctatttacagaactggcatatcgatacaaagacagggcaggtggatatacaagactgcttcgaactcgcatccgagttggtgatgctgcaccaatggcctatatagagttcattgatagagaaaatgagcttagacagtcgaagccacctactcctcagccaccacaaagaccttctctggatccttggacaagatcccggcttagcaggcagtttgcaccccctaaagaggagaaaagctctgaatctgatatatgaatcaggaagccctntattggatgatagtgttttacagatacaacagattaaaacaactggc

SEQ ID NO: 9092 - DNA, 270 bp, Gossypium hirsutum
  unsure (1)..(270): unsure at all n locations; Clone ID: LIB3828-003-Q1-K6-G7
tggttatctgngataattggtcaattatcgcaagtgattttgaagcttttaatattttttctagaaacttttttgtgtgcatgtgattatgaccttggtgacttatcctagagaattcctatattaagatcaatttccttgttaatctagaatttcgcttggtgggttcttattcttaccaccatttgtacttacagttgttagtttatggatatgggagcttcatgttgttttgaagagaacaagtttaatgtgtattcacatgtttat

SEQ ID NO: 9093 - DNA, 600 bp, Gossypium hirsutum
  unsure (1)..(600): unsure at all n locations; Clone ID: LIB3828-003-Q1-K6-G8
tgagccccctaagccaaanaccaaacataaggtagacattgatacggtggagaagtttcaaactttgcgtctgcaagagcaaaagtattttgatgacatggttcagaagtgcaaggatgttggtgccaccttggttatctgtcaatgggggtttgatgatgaggcaaatcatttattaatgcaccggaacttgcctgctgtcagatgggttagtggtgtggagttggagctcatagcaatagctacgggtggaaggattgtaccaaggttccaggagttgaccccagaaaagttgggaagggctggtttggtgagagagaagtcttttggcaccacaaaagataaaatgttgtacattgaacattgtgcaaattccagggctgtaaccatatttattcgtggaggaaacaagatgatgatagaagagacaaagcgcagtatccatgatgcattgtgtgtggccaggaatctcattcgcaacaattctattgtctatggtggtggctcagctgagatttcttgctcaattgctgtggaggcagctgcagataaatatccaggagttgagcagtatgcaatccgggcatttgctgatgcttt

SEQ ID NO: 9094 - DNA, 577 bp, Gossypium hirsutum
  Clone ID: LIB3828-003-Q1-K6-G9
agcatcctcaaccaactacaatccgacgacctccataaactcgcgcaccctttaatccccaaactccaaacctaccatgggaggctgtgcgagcaaacctaaggagttcgacggccctgccgacgctcctataagctctgacaccactgctcagagcagcactaacggaggtgagagtcagattgagaaacctgcggtagatggttctgaaccggaaaagaaggctcaaacggctgtttctgcagaaacagacgctggtaagagcgtgaaaccagcggaggatgacgctaaagccgacgacaagaatgctgaagataaggtggaggctaccccaaaacaggaggctgaagagcctgagcataaatcaaatgatgccccaagcaaggaagaagttaaaagtgaggcccctcttgcctcgctttgatcatggatcaacaattcaagcctagtgggtttgatcacgtttccataattagaaaggcttgaattttatgttatagtaatatttatcactttcatcagatcagctttatatttatttgtggtaattaataaattattatatccctattagaac

SEQ ID NO: 9095 - DNA, 765 bp, Gossypium hirsutum
  unsure (1)..(765): unsure at all n locations; Clone ID: LIB3828-003-Q1-K6-H11
gcaaaagcagtaccatttttccatattagctttgctctcatatttttcttcttcttagggtaggatttnnnnnnnnnnnnnnnnnnnnnnnnnnnnnnnnnnnnnnnnnnnnnnnnnnnnnnnnnnnnnnnnnnnnnnnnnnnnnnnnnnnnnnnnnnnnnnnnnnnnnnnnnnnnnnnnnnnnnnnnnnnnnnnnnnnnnnnnnnnnnnnnnnnnnnnngnnnnnnnnnnngngnnnnnnnnnnnnnnnnnnggcagacgacaacactgttaaattcgatgaaaactatgtaattacatggggaaatgatcatgttttgtctttaaatcaagacactgaaattcaactctcaatggataagtcttcgggagctgggtttggttcgaagctgagttatggtactgggttttttaatatgaggataaagctacctgataaagattcagctggagttgtcactgcttattacttaacttcgaaaggaaacaagcatgacgagctggattttgaattcttagggaatagagaagggaagcctattagcttgcaaaccaatgtgtttgcaggtggtgtggggaatagggaacaaagggttattctctggtttgatcctagtgctgattttcacaactatcgaatcctttggaaccaacaccaaattgtattctatgtggatgacatcccaattagggtattcaaaaacaacacaaacattggcgttgggtacccatcacaagcaatgnaaaatagaagctagcttatgg

SEQ ID NO: 9096 - DNA, 793 bp, Gossypium hirsutum
  unsure (1)..(793): unsure at all n locations; Clone ID: LIB3828-003-Q1-K6-H12
gttatatcccacacattgtgtcggttggaagccctgcaccgagttcaagtagggttaccattgcaagtaggtccnnnnnnnnnnnnnnnnnnnnnnnnnnnnnnnnnnnnnnnnnnnnnnnnnnnnnnnnnnnnnnnnnnnnnnnnnnnnnnnnnnnnnnnnnnnnnnnnnnnnnnnnnnnnnnnnnnnnnnnnnnnnnnnnnnnnnnnnnnnnnnnnnnnnngnnnnnnnngnnnnngnnnagagtgnnnnncagaggnnnnggagntnttttgttactggnaanaattcctgctaaacaggaaggatttggtcttcaacagctttccttaaagaattttcgccttcaagtttgtttaatgccgtgaagctgaggagagatggccctctctgtctcatgacagagcataaggaggcaatttggagcacttatgttgcaactacaaagcccgacacttctatcttgaataggcttattgatgctggaatgtcaccaagggtcgaggaatctatgtctgttgttaataatgagatattacggcgacacttcttggagctcacgaccaactttttggcaccttttggaccatattttagggctactactccttctgaaggttcgtcaccatacgctgacccccctccattacctccatttaatgctgatgattttcttatgagcttatcagcaagaggggtggngaaagtttctctcgaagcgaatgagatctaactggctggaacctgtataggcgttttcttaaaggacccaactttttgccatggttttcaa

SEQ ID NO: 9097 - DNA, 576 bp, Gossypium hirsutum
  unsure (1)..(576): unsure at all n locations; Clone ID: LIB3828-003-Q1-K6-H7
cgctcacagananagacaattatatacccaactgtctcattaccggacggtggatttcatcttcggggatgcgacgagcattttccagaactgtatgctcatcgtgaggaagccagggcctggccaaaattgcatggttactgcacagggaaggaatgatcttggaacaaactcagccattgtgcttcaaaactgcaccatctcgggcgcccctgattacatcccagtgaaggatacgaacaaggcatacttggggcgtccctggaaacaattcgctaggtctatcataatgcaatctcagatcgacgacatcattcaaccagagggttatgcccccatgacaggcaccataggaatagacacttctttcattgccgagtttggaaacaggggacccggtgccgataccagccgtagggtagcatggaaaggtatcaaaaagatagatataaatgaagccaacaaatggactcctcgcgtctatcttgaatctgagacttggatcccgagttccggcattccctatagtcccgacatggtccctggagtctagacagcttattatcgataccaacg

SEQ ID NO: 9098 - DNA, 574 bp, Gossypium hirsutum
  Clone ID: LIB3828-003-Q1-K6-H8
atcaatctcgcaaaaactccacccttcgtcgatcttcattcagagcttcttccacaccagaagtgagcgtattctgcagataagttgtctccttcttctgtaaaccttccttagcaataagatgagccactttgtttgcctctcttgatacaaatcgaaaaacacaggactcaaaaccgaaacttagatattttgaatcttgtataaaagcttcgatttttgatctgtcatcgactttctcttgcagtttccgagtaattattcgggagtcgccttcaacttctacctttcgcagcctttgaagtatcccaacatggattgcctagaggcacgccatcgcttcagcagcaaaagtagaagcatcaaagttgatctttacccaaggatccgttggggcatcccatcgactaataagaacctgcatcgttgggcactccttgaatacatgctcactggattccggtccattatgacacctccggcaaatagcagatcccatcagtctcctgtagtgaagattacaaaaagtaggcaagaagttgcgaaaaagcctccaatttgtaattttaatctt

SEQ ID NO: 9099 - DNA, 587 bp, Gossypium hirsutum
  unsure (1)..(587): unsure at all n locations; Clone ID: LIB3828-003-Q1-K6-H9
ggaagctccgtgatcagaattttccttcttaatgaagctgtgtttcaaattggtgttgaataaagatgccttttgggttcgagtggttagagcgaagtatcaagtaaaggagaaaatccacagtgcattaataggaataaatgctcttttctttggaaatcattatccaaaatttgggcattatttcgtgaaaatctgtactggtccattggagatggccataaaattcagtgctggaaggacaattggattcctcatattggacctctcattcgatatattactccaaatctcaatctaaatcctaattgccttttacatgagatgacttcagaagatggttcgtggaaccttgatctcttttagacttggttatctgaagatgtgattcaggccattaagggtatcctacctcctcagcattctgaaggtcctgacagaatctcttggaggcatacttcatttggggacttctctgttaaatctgcttataaagcacttaatgagggggaactggaacccgagagatgagaaatgaaagattgtgtggaagagccttggacctcatagagttcgcgttntcattt

SEQ ID NO: 9100 - DNA, 580 bp, Gossypium hirsutum; identical to SEQ ID NO: 5821
  Clone ID: LIB3828-004-Q1-K6-A1

SEQ ID NO: 9101 - DNA, 63 bp, Gossypium hirsutum
  Clone ID: LIB3828-004-Q1-K6-A10
cccagcgtccgatcagaatcatcctcaaactgttcaacaatttcgtctcccataccaaattcc

SEQ ID NO: 9102 - DNA, 471 bp, Gossypium hirsutum
  unsure (1)..(471): unsure at all n locations; Clone ID: LIB3828-004-Q1-K6-A11
agaatggaccgtgccaatgcagctaataagcgcctctcggggtacaaagaaggcatccttaaattacaggaccaggattgcagtcaccaatggcttacgtaacaaactgaaggagctgatgatggattttcaaggtttaaggcaaaaatgatggctgagtataaggaaactgtggggagaagttattttaccgtgactggagaaaacccagatgaggaaacaatcgagaaaatcatttctgatggcagtggcggtgaggggttcttaacaagggcggttcaagaacatgggcgagggaaggtgttggagacggtagttgagattcaagataggcatgatgctgctaaagagatcgaaaagagcttgctagagttgcaccaagtgtttttggacatggcggtgatggtggaggcacaaggggnaacaaatggatgatattgaacaccatgtgatgaatgccagccattatgt

SEQ ID NO: 9103 - DNA, 500 bp, Gossypium hirsutum
  unsure (1)..(500): unsure at all n locations; Clone ID: LIB3828-004-Q1-K6-A12
aattctcctttatttgatctaaatgctttagactcaatactcaatgaaggttcaattcctgtggaggctgtcaagagaggttggtaccataacgttgtctaccttgngaaagaaggatgatatacctatactgactatgacgtgtcccctctctgtgattgaaagctttaagtcgggagagattcctttatgtgctcctagcaaagattatgctgacaccttagtaagaggccttgttgaaggcaaacaactttcggaaggggatgcgacgacttacattcaggtagcatccaccaaacccttatgattgcttattgcaactctttgttgccatattttagatgcaaatttctgaagtaattagccattaatggtacagagctaagccattctggtcccaacaattgacaatagatgatagggtaatctcctgctattatgtgtgatattgatccattttgtgtatttaaattggtatttaaagcagctgtataactaac

SEQ ID NO: 9104 - DNA, 591 bp, Gossypium hirsutum; identical to SEQ ID NO: 5822
  unsure (1)..(591): unsure at all n locations; Clone ID: LIB3828-004-Q1-K6-A2

SEQ ID NO: 9105 - DNA, 587 bp, Gossypium hirsutum; identical to SEQ ID NO: 5823
  Clone ID: LIB3828-004-Q1-K6-A3

SEQ ID NO: 9106 - DNA, 579 bp, Gossypium hirsutum; identical to SEQ ID NO: 5824
  Clone ID: LIB3828-004-Q1-K6-A4

SEQ ID NO: 9107 - DNA, 584 bp, Gossypium hirsutum; identical to SEQ ID NO: 5825
  Clone ID: LIB3828-004-Q1-K6-A5

SEQ ID NO: 9108 - DNA, 582 bp, Gossypium hirsutum; identical to SEQ ID NO: 5826
  unsure (1)..(582): unsure at all n locations; Clone ID: LIB3828-004-Q1-K6-A6

SEQ ID NO: 9109 - DNA, 579 bp, Gossypium hirsutum
  unsure (1)..(579): unsure at all n locations; Clone ID: LIB3828-004-Q1-K6-A7
ccaaaggnacggatttcttctccttgactccgaattcaacgttaaagggaggtgggagaaaccggggcatagtcctatgttcggctacgatttttggtaccaacctcgacataaaacaatgatcagctcatcatggggtgctcctgttgccttcaccaaaggtttcgatcttcagcatgtcacggatggtctgtatgggagacatctgcatgtgtatagttggcctgatggtgaacttaaacaaacgttggatctaggtgacaccggtctcatacccttagagacaagattcctgcatgatccttctaaagatacagggtacgttgggtgcgccttaacaagtaacatggttcggtttttcaaaaccaaagacggatcatggagtcatgaggtggcaatctcagtgaaaccattgaaggtgcaaaactggattcttcccgaaatgcccggacttataaccgacttcctaatctctctcgatgatcgttttctgtatttcgccaactggctgcacggagatgtccgacaatacaacatcgaggaccccaaaaacccggtcttggtcggccaagtatgggt

SEQ ID NO: 9110 - DNA, 591 bp, Gossypium hirsutum
  Clone ID: LIB3828-004-Q1-K6-A8
cgacttttcacgcgctcataatgaagtaaacttagctgcacttgctatcgataggataggaagaggctgcgtggatgagataattgatccatacctctgatccacatagagatgcttggacactttcatcaattcataatgtggccgagctagcatttagatgcctcgcttctcatcgggacatgaggccaaccatgatcgaagtcgcagaagagctagaacacatcagactcagcgcttgggttccaggcatgtgcatcgagtctcctgcagcttcctcagacgaagaaagtgagaaatcattcaacaagtcaacggagatgtccgatgtgggaagccggaggctgatgaagttgaagcaaagggaaggagaatgtttaaccaccttattagaagacgtaaaaaataggtctcctatatcagtacaagatcattggtcaagtggacagagctcaccttcaacaaacagcttgttgggtaattcatctcggcgagaatgatgagacctgaacaacaactgctttgtgaatactattcatcctataaaaattttcttttcttttcacaaaatgttaatcaatgttgaaaccc

SEQ ID NO: 9111 - DNA, 261 bp, Gossypium hirsutum
  unsure (1)..(261): unsure at all n locations; Clone ID: LIB3828-004-Q1-K6-A9
caaatgacccgatgaagttgattttagatccgtaagagtggtgcatcccggaatcaagtgcaaagaactagagttttgagtttcggccattcattaccttgccatcccacacctcagttctgatccatttgcttctttacaatatattggtttgtaatttgtactataagaattatggttaatttaggatggaaataaatgtatttgtttgcttaacatcagttcactngaaaatcaataattactgattcttacttgatt

SEQ ID NO: 9112 - DNA, 490 bp, Gossypium hirsutum
  Clone ID: LIB3828-004-Q1-K6-B11
gtgcagggaagcacactttgcacaaggttacacagtacaagagggcaaagatagtttggctgctcaagggaagcgccgttacgatcgcaaacaatcaggttatggtggtcagaccaaaccagtgttccacaagaaggccaagaccaccaagaagattgtgctgaggctgcaatgccagggttgcaagcatgtatcccaacatccaatcaagaggtgcaagcattttgaaattggtggcgacaagaaggggaagggaacatctcttttctaaatggtgtttatttatttcatgtcatgtcatgttgttgggaaccttttaagacagtatggaatttttgtttttctaatgtaatgttttccgagggatatggtgttctttaagcacttaatagttaatggcatcgtttgatctcattgtcgccatttgttttaaatactgtattttaatttaattgtttttggaaacttcaataatctttgctatattttt

SEQ ID NO: 9113 - DNA, 482 bp, Gossypium hirsutum
  unsure (1)..(482): unsure at all n locations; Clone ID: LIB3828-004-Q1-K6-B12
ncggnagctaggcgatggtggcgtcaaggctctctgctggttaggctagggatttgggttntgacttagctnnnnnnnnnnnnnnnnnnnnnnnnnnnnnnnnnnnnnnnnnnnnnnnnnnnnnnnnnnnnnnnnnnnnnnnnnnnnnnnnnnnnnnnnnnnnnnnnnnnnnnnnnnnnnnnnnnnnnnnnnnnnnnnnnnnnnnnnnnnnnnnnnnnnnnnnnnngnnnnnnnnngngnnnnnnnnnnnnnnnnnnttgtaatgggtttgggccttaggcgtagttgggcccggacaataattgggtattacatatggcattgagatatagtgttaaaagaattatgcgttcatgaataaaacgtcaaatgatttggtattgggctatgcactntaagacatgaaaatgcaaattgatttagttgatagttgagtcacataatgattgtattgacactatgtttctattgattattgattt

SEQ ID NO: 9114 - DNA, 590 bp, Gossypium hirsutum; identical to SEQ ID NO: 5827
  unsure (1)..(590): unsure at all n locations; Clone ID: LIB3828-004-Q1-K6-B2

SEQ ID NO: 9115 - DNA, 515 bp, Gossypium hirsutum; identical to SEQ ID NO: 5828
  Clone ID: LIB3828-004-Q1-K6-B3

SEQ ID NO: 9116 - DNA, 576 bp, Gossypium hirsutum; identical to SEQ ID NO: 5829
  Clone ID: LIB3828-004-Q1-K6-B4

SEQ ID NO: 9117 - DNA, 556 bp, Gossypium hirsutum; identical to SEQ ID NO: 5830
  Clone ID: LIB3828-004-Q1-K6-B5

SEQ ID NO: 9118 - DNA, 593 bp, Gossypium hirsutum; identical to SEQ ID NO: 5831
  Clone ID: LIB3828-004-Q1-K6-B6

SEQ ID NO: 9119 - DNA, 593 bp, Gossypium hirsutum
  Clone ID: LIB3828-004-Q1-K6-B7
tgttggagctcttaatggaaagaatttgctgataaagaatggtatgttggaaaaccccgaaaaaatctgaaagaagcacgagcaaaactcatttgagcaaagtatgaaggaagctgcagataaatctcagggtgcaaatttatacattaaaaacttagatgaatagtattggtgatgaaaacattgaaggaacttttttcagagtttggtaacattacatcttgcaaggttatgcgtgaccctaatggaattagtaagggctctgggtttgttgcattttcaactcctgaagaagcctctcgtgctcttgctgagatgaatggtaaaatggttgttagcaaaccactttatgttgcagtggcgcagaggaaagaagaaagaagagcaaggctacaggctcagttttctcaaatgagaccaattatcccctcagttgctcctcgtatgccaatgtttcctcctggtgctccaggtcttggccagcaatttttatatgggcaagcacctccagctatgcttcctccacaagctagttttggttatcagcagcaactgcttcctggaatgaggcctggtggcccccctgtaccaaa

SEQ ID NO: 9120 - DNA, 591 bp, Gossypium hirsutum
  unsure (1)..(591): unsure at all n locations; Clone ID: LIB3828-004-Q1-K6-B8
ttttagatttcactttttaaaaaaaccccctttctttcacttgttttgcatttaagtaatggngaaaagctacaaggtggctaaagagcttatttgggataaagaacaccaaagaatgcccaagttccggtnngaccggaaagataagaaacggtgtagcattgggcattcagggcgggaatcaagcggcggattatgtcacaaccctacaacgataccaccaaatatatcaccggcagaggtggtttggctgagatcattctacaatgaaacggagaaagagcagaataagcacgcaattgcggtggcagctgccacggctgctgctgcagatgccgctgtcgccgccgctcaggcagctgtggcggtggtgaggcttacgagtcatggaagaggtaccatgttcggcggtggtggacatggaaagtgggctgccattaagattcaatccgttttcagaggctatctggctaaaaaaagcattacgagctttgaaaggattagtgaaaattcaagcacttgttagaggatatttagtgagaaaacaagcttcagctacacttcatggcatgcaagcattgataagagcac

SEQ ID NO: 9121 - DNA, 598 bp, Gossypium hirsutum
  unsure (1)..(598): unsure at all n locations; Clone ID: LIB3828-004-Q1-K6-B9
gtctgaatttgaaaagagtttgaggatgtgccgctaatgaagagaagcaattgctgcaaaagtggcagaactgcttgcaggttcaagtgctaggaagaaaagctggtccaaatggcagtccacgatctccggngaaaatgcatccagcaaaaccagtaaactacagaaagaaatgtctaccatgcaagagtccacttctgttgttaaagcagaatggaatgttcacatgngaaagcacagaatcccactatattgaggatacttctgctgtagaaagtggaaagaaagacatggaagatgttcttcaaaattgtatgaagaaagcaaagatgagtgctcagcaatggaagaatgctcaagaatcccttctcagtttagaaaagagtaatgttgattctgtggattccattgttaggggaggaatggaagccaatcagatcctccgagatcaattttcttgtgctgtatccactgctcttgaagatgtagacactgcaaacaacagttgcctaacatccattgattattcattacaactntgatcgtgatgcatgtgggaacatgaattcgatgattattccttgttgtgaggaattga

SEQ ID NO: 9122 - DNA, 587 bp, Gossypium hirsutum; identical to SEQ ID NO: 5832
  unsure (1)..(587): unsure at all n locations; Clone ID: LIB3828-004-Q1-K6-C1

SEQ ID NO: 9123 - DNA, 477 bp, Gossypium hirsutum
  unsure (1)..(477): unsure at all n locations; Clone ID: LIB3828-004-Q1-K6-C10
gccaaattgaagcatttcaaatgttctattggctggttttatatctttctactgtggacattacgtgcttcnnnnnnnnnnnnnnnnnnnnnnnnnnnnnnnnnnnnnnnnnnnnnnnnnnnnnnnnnnnnnnnnnnnnnnnnnnnnnnnnnnnnnnnnnnnnnnnnnnnnnnnnnnnnnnnnnnnnnnnnnnnnnnnnnnnnnnnnnnnnnnnnnnnnnnnnnnnnnnnnnnnnnnnnnnnnnnnnnnnnnnnnngnnnnnnnnngngnnnnnnnnnnnnnnnnccatcccgactaagttgtgtatctctaccaaaatcatnnactctttaccagnaacctagtcatggnagagaactattagtatcttgatttatagagtttggccttttactgtaaccttggtttatgattttggttccattgctaccgactcatgccacaagctgggaatgaaagcaggaagtttttttcgtc

SEQ ID NO: 9124 - DNA, 504 bp, Gossypium hirsutum
  unsure (1)..(504): unsure at all n locations; Clone ID: LIB3828-004-Q1-K6-C11
tttctgagctttgcaggaagagagaagctgggtaccatatagacaaagcccttcatgcccttggcaagggagaatttcttctactttttgagtatatacgagagtggaacacaaagccaaagctgtgtaatgttgcccaatctgttcttttccgagctttcaacattcttcttccgacagagattatcgagataaaaagcattagtgaactacttgaaggtcttatcccatattctcagagacatttcagcaggatagacaggcttataaggagcacatttctgttggactacactcttcttcgaatgtccgttattgaacccgcgactcaggatgatttgaagaccaaatctttattacattccgagaaaaatgaggaagatgcacttttaacagataatgcagaagaagatcaaaagcaagtttccgaagagcagaaaccaaaggcctctgggnaaaaagaggaaatctcacaaatctggnagaaccattcacgctcacata

SEQ ID NO: 9125 - DNA, 469 bp, Gossypium hirsutum
  unsure (1)..(469): unsure at all n locations; Clone ID: LIB3828-004-Q1-K6-C12
caattcagtctgctactggtgtggtatataatattactgngagnaaaagatataaccttgcaggaagttaatagagtatcacaggttgtgactagtttggctgatccttcggctaacatcatatttggtgctgttgtcgatgaccgctacaatggggagatccatgtgactattattgctacaggcttctcacagtcatttcagaagacattattaactgaccccaaggctgcaaaacagaatgacaaagttgcagggggacaagaaagaaaggggatacccttacccctcaaaccatcttccccttcaactgttccgtccggatcatctcaacgaaggctattcttttaatttccctgatctcttctttctacctgctttttgctgttagatgtgtaaagatcttgaagctcatgagtctttagttgccatttgttttatatgaattgtgcgcctcttcaataattaa

SEQ ID NO: 9126 - DNA, 581 bp, Gossypium hirsutum; identical to SEQ ID NO: 5833
  Clone ID: LIB3828-004-Q1-K6-C2

SEQ ID NO: 9127 - DNA, 582 bp, Gossypium hirsutum; identical to SEQ ID NO: 5834
  unsure (1)..(582): unsure at all n locations; Clone ID: LIB3828-004-Q1-K6-C3

SEQ ID NO: 9128 - DNA, 587 bp, Gossypium hirsutum; identical to SEQ ID NO: 5835
  unsure (1)..(587): unsure at all n locations; Clone ID: LIB3828-004-Q1-K6-C4

SEQ ID NO: 9129 - DNA, 579 bp, Gossypium hirsutum; identical to SEQ ID NO: 5836
  unsure (1)..(579): unsure at all n locations; Clone ID: LIB3828-004-Q1-K6-C5

SEQ ID NO: 9130 - DNA, 626 bp, Gossypium hirsutum; identical to SEQ ID NO: 5837
  unsure (1)..(626): unsure at all n locations; Clone ID: LIB3828-004-Q1-K6-C6

SEQ ID NO: 9131 - DNA, 542 bp, Gossypium hirsutum
  unsure (1)..(542): unsure at all n locations; Clone ID: LIB3828-004-Q1-K6-C7
acttaacaanaacaacaacaataaattaatcaatcatgagggttttcccagcgctttttcttgcatctcttgctttagtgttgggcgcctctcgtgctgatcctgacttgcttcaggatgtatgtgttgccgatctttcttctggaataaaattgaatgggttcccctgcaagcacccttcaactataggagcaaatgacttcttctttgccggtctagccaatccaaacttccctaacaacactttgggatcgcttgttacggcagctaatgtggaaaaaatcccaggtttgaacacccttggagtctccatgtctcgtatcgactatgccgttggtggggtcaaccctccccacacccatccacgagcatcagagattgcattcgtgttggaaggagaattagaggttggcttcttcactacatccaatgtgttaatatcaaagcatatcaagaaaggagaaatatttgtgttccctaaaggattgatgcatttccaaaaaaacattgggaagacacgtgcatctgctattactgcgttc

SEQ ID NO: 9132 - DNA, 288 bp, Gossypium hirsutum
  unsure (1)..(288): unsure at all n locations; Clone ID: LIB3828-004-Q1-K6-C8
ccagnaatccaagcaagttgttgagaagtattgcttggggaagcccagctgccaaatcccactagatagcattcatttcagtgaccaaaatggcgcatgtacccatctcaggaagactttggccgtccaatcaaatgtgcctaaacaaatgcgtgcttcgacacagcttgggttaagcttcacattttattttttttaattgagctaagacggtgcatggaggagtgcttgaactatttatttgtatttcttaaatattaaatgaagatctgcgaattccagaattac

SEQ ID NO: 9133 - DNA, 591 bp, Gossypium hirsutum
  Clone ID: LIB3828-004-Q1-K6-C9
gtttcctttctcgattttctatttagccaaacaaaatgcagatcttcgttaagactctaaccggcaagacgatcactctcgaggtcgagagctccgatacgatcgacaacgtgaaggccaaaatccaagataaggaaggcatccctccagaccagcagcgtctgatcttcgccggaaaacagctcgaagacggccggaccttggccgattacaacatccaaaaggagtcaactctccacctcgtcctccgtctgcgcggtgggatgcaaatcttcgtgaaaaccttgactggcaagacaatcactctcgaggtcgagagctccgacacgatcgacaacgttaaagcgaagatccaagacaaggaaggcatccccccagaccagcaacgtctcatctttgccggaaaacaactcgaagacggccgtaccttggccgactacaacatccagaaggagtcaactctccaccttgtccttcgtttgcgcggcgggatgcaaatcttcgttaagacgcttaccggaaagacgatcactctcgaggtcgagagctctgacacgatcgacaacgtgaaagccaaaatccaagacaagg

SEQ ID NO: 9134 - DNA, 271 bp, Gossypium hirsutum; identical to SEQ ID NO: 5838
  unsure (1)..(271): unsure at all n locations; Clone ID: LIB3828-004-Q1-K6-D1

SEQ ID NO: 9135 - DNA, 109 bp, Gossypium hirsutum
  unsure (1)..(109): unsure at all n locations; Clone ID: LIB3828-004-Q1-K6-D10
ttttaactggtcgcctgcggtcccgtccgnattccgggtcgaccccgcgtccgggngattgtagtctgggagagtgggagggtttgcactttgcagatatttggtttcg

SEQ ID NO: 9136 - DNA, 486 bp, Gossypium hirsutum
  unsure (1)..(486): unsure at all n locations; Clone ID: LIB3828-004-Q1-K6-D11
tgttgtttaagaattaccagcagggatgatacggaagagactgctcgccgcagcagtgggtgtggaaagaatgccttagaagctgctgcatcccaagagcaaagcttcctttattgctttcaggaaactgaacaatattgagagtgaaaaagttgtgcttggaattgagaataaagatccccctgttgcttttcttgactcgctcattcttggggagtgggaagatcggatgcaaagagggctctttcgctatgatgttactgcctgtgaaaccaaggtgattcctggtgaatatggcttcattgcccagctgaatgagggtcgccaccttaagaagaggccaactgagttccgtgttgataaggttctccagcccttcgatgggnaacaagttcaacttcaccaaggtcgggcaagcagcaggttctcttnccagtttgaagcaagtgaagatggtngaagttcagttctacccaagtgctccca

SEQ ID NO: 9137 - DNA, 699 bp, Gossypium hirsutum
  unsure (1)..(699): unsure at all n locations; Clone ID: LIB3828-004-Q1-K6-D12
cacagccattgtgcttcaaaattgtaccatctcgggcgcccctgctacctcccggtgaagacagataagacnnnnnnnnnnnnnnnnnnnnnnnnnnnnnnnnnnnnnnnnnnnnnnnnnnnnnnnnnnnnnnnnnnnnnnnnnnnnnnnnnnnnnnnnnnnnnnnnnnnnnnnnnnnnnnnnnnnnnnnnnnnnnnnnnnnnnnnnnnnnnnnnnnnnnnnnnnngnnnnnnnnngngnnnnnnnnnnnnnnnnccgtaccttggtcgtccctggaaacaatttgcgacaactatcataatgcaatgtcaaatcgatgacatcattacaccagagggttactcccccatggaaggcactgtaggactggacactggttactttgccgagttccaaaataggggacccggtgccaacaccgagggcagggtcacatgngaaagctatcaagaaaatcgatatggatgaagccatgaaatggactcctcgcgtatttttgcaatccgacgaatggctggcacaaactggtgttccctttgatcccgatatgacccctggagtttaatcttccaaaaccatcgccattagtcttcttttattatcattatttgaaataatgttgtcgattattgattaatctgaacaactttgtcctatttttataataataataatacctatattcaactcttaanaaaa

SEQ ID NO: 9138 - DNA, 590 bp, Gossypium hirsutum; identical to SEQ ID NO: 5839
  unsure (1)..(590): unsure at all n locations; Clone ID: LIB3828-004-Q1-K6-D2

SEQ ID NO: 9139 - DNA, 601 bp, Gossypium hirsutum; identical to SEQ ID NO: 5840
  Clone ID: LIB3828-004-Q1-K6-D3

SEQ ID NO: 9140 - DNA, 251 bp, Gossypium hirsutum; identical to SEQ ID NO: 5841
  Clone ID: LIB3828-004-Q1-K6-D4

SEQ ID NO: 9141 - DNA, 588 bp, Gossypium hirsutum; identical to SEQ ID NO: 5842
  unsure (1)..(588): unsure at all n locations; Clone ID: LIB3828-004-Q1-K6-D5

SEQ ID NO: 9142 - DNA, 443 bp, Gossypium hirsutum; identical to SEQ ID NO: 5843
  Clone ID: LIB3828-004-Q1-K6-D6

SEQ ID NO: 9143 - DNA, 88 bp, Gossypium hirsutum
  unsure (1)..(88): unsure at all n locations; Clone ID: LIB3828-004-Q1-K6-D7
naaaaaaaaaaaaaaaaaaaaaaaaaaaaaaaaaaaaaaaaaaaaaaaaaaaaaaaaaaaaaaaaaaaaaaaaaaaaaaaaaaaaaaa

SEQ ID NO: 9144 - DNA, 579 bp, Gossypium hirsutum
  unsure (1)..(579): unsure at all n locations; Clone ID: LIB3828-004-Q1-K6-D8
aaagtgcgattgggaggaagaaaccaccaaataaaagcggacagtgaggagcaacagcagcaacaatggtgaagttcctgaagccaaacaggcggtggttgtccttcagggtcgctacgccggtcgtaaggcggtgatcgtcaaatccttcgacgaaggaacccgcgaccgcccttacggtcactgtttggttgcagggattaagaaatacccaagcaaagttatccgaaaggactcttccaagaaaacggccaagaaatcccgcgtgaaatgcttcctcaagctcgtcaattaccagcacgtgatgccgacgcgttacaccttggatgtggacttgaaggatgtggtcaccgtcgactccctccaaagcaaggacaagaaagtctctgcttgcaaggctaccaagcagaagctcgaggagaggtttaagactgggaaaaacaggtggtttttcacaaagttaaggttttgagatctgggtttctgttattttggattgattttgagagtttatttagtgttttgaccatttgttttatcatcacatattattngctggtttgagcatcgttttatgat

SEQ ID NO: 9145 - DNA, 600 bp, Gossypium hirsutum
  unsure (1)..(600): unsure at all n locations; Clone ID: LIB3828-004-Q1-K6-D9
tgagatttggagactctgagactgctttccaagctggtaccctgatattgttactctttagatgaggagggaatttgcaagactgcttttgaattgatctttgcttttgatgaagtcatttgtcttgggcacaaggnaaaacgttacagttgcacaagttaagcaatactgtgagatggagagtcatgaagagaaattgcacaagctggtattgcagagcaagattaatgaaactaaggatgtcatgaagcgtaaagctagtgagattgataagagcaagattgataagaataaaggtgataaaggagggttcatgtcaatgggctctggaagaattgaaagtagctttagtgatatgagcatttctagcagtggaagtggctttggaagtagttctgggttgggattaacaactgatgttgattccttctctaccaagtctaaaggccgccaactgtcatctgcaaccgcccctcctaaaggtcttggcatgcagcttggtaaatcacaaaaaacaaaccagttcttggaatctctgaaagcagaaggtgaactgatagttgaagatgtgcagccaagggcaggccaggccagagtggc

SEQ ID NO: 9146 - DNA, 66 bp, Gossypium hirsutum; identical to SEQ ID NO: 5844
  Clone ID: LIB3828-004-Q1-K6-E1

SEQ ID NO: 9147 - DNA, 513 bp, Gossypium hirsutum
  unsure (1)..(513): unsure at all n locations; Clone ID: LIB3828-004-Q1-K6-E10
aaacatgcagaactgtgaggcaaccttaaatgcctccagacaaagggttcccgtacaacctgcaatgtaacaggaattcagttgaaggcattccagagcttaaacatgatttcggtactcatccgggcagagatgttgtagaaccagtttgctctttgagtggagagtttatggaacttccgaatgaattttaccacaaacctacactccaccatgaatgtggctcatggtcgaccttctatcctgattctcataagttgcaggcatacccgttgaatgcttttgggggccaagtttaccactttcctgtggataaccgatttcattatgccccatttaatgtgatcactcatggatacccgtacgaattccagttccaagattttcagtactttgtggtcatagattttgaggctacctgtgacaaggagagaaacccacatccacaggagattatcgagtttccatctgttattgtgagtagtgttactggggcagctggnaagcttgttt

SEQ ID NO: 9148 - DNA, 796 bp, Gossypium hirsutum
  unsure (1)..(796): unsure at all n locations; Clone ID: LIB3828-004-Q1-K6-E11
gttggttgaaggtggagacccgagacgcacacattccacttccagtggagagtgcactatcactttggnnnnnnnnnnnnnnnnnnnnnnnnnnnnnnnnnnnnnnnnnnnnnnnnnnnnnnnnnnnnnnnnnnnnnnnnnnnnnnnnnnnnnnnnnnnnnnnnnnnnnnnnnnnnnnnnnnnnnnnnnnnnnnnnnnnnnnnnnnnnnnnnnnnnnnnnnnnnnnnnnnnnnnnnnnnnnnnnnnnngnnnnnnnngngnnnnnnnnnnnnnnnnnnnngaagagtcaatatgcaattgggattaccggtggacgggtacccagtcaccgggtctgttcaatttggcgattggggagcggtgtgctacgagcttttaggcgctattccggagaaaattaacggaggttagatcgagatgggctggttacaagacacattcctagatccggatgatgattcaaccaaagtagaaagaatccgatatgctcgggcatacattcttcagataattggaggttatctgatgccggacttgtcacgaaaccttgtacatctaatatggctgctaaaactcgttgattttagagcagctggagaattgagttggggctctgccgtgttggcaacattatatcgggagatgtgcggggcgacgcgaccgagtaaagcgaaaatcggaagttgcctgtcactactgcagtcacgggcacgatttcgctttccatttttacgtcctcgagtgtaccacccatatacattcccactaataacgaggtgggaaccgtccggcaact

SEQ ID NO: 9149 - DNA, 802 bp, Gossypium hirsutum
  unsure (1)..(802): unsure at all n locations; Clone ID: LIB3828-004-Q1-K6-E12
aaagaaccctctccaacatggcttctaatcccaagtcttcttcgacatgaccgtcggtggccaaccagctggnnnnnnnnnnnnnnnnnnnnnnnnnnnnnnnnnnnnnnnnnnnnnnnnnnnnnnnnnnnnnnnnnnnnnnnnnnnnnnnnnnnnnnnnnnnnnnnnnnnnnnnnnnnnnnnnnnnnnnnnnnnnnnnnnnnnnnnnnnnnnnnnnnnnnnnnnnnnnnnnnnnnnnnnnnnnnnnnnngnnnnnnnnnggnnnnnnnnnnnnnnnnnnnngtcggattgtgatggagctctttgccgattgcactccccggactgctgagaacttccgtgctctctgcaccggcgagaaagggtaggccgtagcggcaaacctctccactacaaaggctcatccttccaccgggtgatccccaatttcatgtgtcaaggaggcgactttaccgccggaaacggtaccggaggtgaatccatctatggagccaagttcgcggacgagaacttcatcaagaagcacacgggacctggcatcctttccatggcgaacgctggacccggaacaaacggatctcaattcttcatctgcacgaccaagacggagtggctggacggaaagcacgtggtgttcggacaggtagttgaaggcatggatgtggttaaagcgattgagaagtggggtctagcggtgggaggacttccaagcctgttgttattgctgactgtggacagctttgaaaaaggcttattgnaattgtgtttccttcataatatctggtctttttaggctcctttt

SEQ ID NO: 9150 - DNA, 584 bp, Gossypium hirsutum; identical to SEQ ID NO: 5845
  Clone ID: LIB3828-004-Q1-K6-E2

SEQ ID NO: 9151 - DNA, 593 bp, Gossypium hirsutum; identical to SEQ ID NO: 5846
  unsure (1)..(593): unsure at all n locations; Clone ID: LIB3828-004-Q1-K6-E3

SEQ ID NO: 9152 - DNA, 601 bp, Gossypium hirsutum; identical to SEQ ID NO: 5847
  Clone ID: LIB3828-004-Q1-K6-E4

SEQ ID NO: 9153 - DNA, 392 bp, Gossypium hirsutum; identical to SEQ ID NO: 5848
  Clone ID: LIB3828-004-Q1-K6-E5

SEQ ID NO: 9154 - DNA, 600 bp, Gossypium hirsutum; identical to SEQ ID NO: 5849
  unsure (1)..(600): unsure at all n locations; Clone ID: LIB3828-004-Q1-K6-E6

SEQ ID NO: 9155 - DNA, 601 bp, Gossypium hirsutum
  Clone ID: LIB3828-004-Q1-K6-E7
ggaaatatgacaccatcaccaaggccttaggaagagtccctaagaaagtcccaatcgatttgttattcacattaaggctggtatttacaaggaaaaaacaatgtgaccaagcaaatgactaatgttatgttcatcggtgatggcccaaccaagaccattatcaccaatgactttaactgcattaagaatcatccgcttaaaacatttcaaactgcaactgttggtgtagatggggtcggtttcatggccaaggacattggattcgagaacacagcaggacccgaaggtcatcaagcagtggcctttagggcaactagtaataaagtcatcatgttcaactgccatttcattgggtaccaagacaccctttaccctcacaaagggcaacaattttatagagattgtgtcatcagtgggacagtggacttcatctttggggattcggcgagcgtgttccagaattgtttgatcattgtgaggaagccaggtgagaaccaacacaacatgattacagcacctggaaggcaatatatagacactgactcagcccttgtacttcaaaactgtaccatcacgggtgcccctgattaccttccggtga

SEQ ID NO: 9156 - DNA, 385 bp, Gossypium hirsutum
  Clone ID: LIB3828-004-Q1-K6-E8
ggcgtagtggagattggatgtgtgcaaaatgcaacaatcacaattatgcatctcgagctcaatgcaacaggtgtaagactcagagagagacagtgacttagctggtaaatgctgcagtgttgccatttaatgcaagttttgattcataagaatttttctagcacagtgcgcaggttctctccctctctctcttgtacaacataaaaaccaaaagctgtagatttggtttgattagttatgataccgattatgagttttgaattgacaatggtggagagctttatataacttctctataatactaaattgtataatttggctagtatttcttgtataaaatgttgaaaaccttgtggtgtatatgcatctgatgtgttggactgag

SEQ ID NO: 9157 - DNA, 601 bp, Gossypium hirsutum
  unsure (1)..(601): unsure at all n locations; Clone ID: LIB3828-004-Q1-K6-E9
gcaaataacaacaatcgccggggnaaaccccattcgcctttaataaaacaggtctctttcatttcctttacgtttaataatcccttcatagcaccatggacatgaagaagatctccaccgccatcattgttgccgctgcctcaatgagcgccgtcatggccgccagtgcaccagctacttcaccttccgcaagtggtactgggcctgggcctatctcctctcctgaatctggtccagcacctggaccagactccagcgtcgctgctgctaccttgcctgttcttggatcattggtcggggcttccattgtttctttgttttcttacattctccactaaggtgataaatggatgaagaaatgcataaccggaggttaaagatgaagaacatggagctttatatttatactgtaaactgattactatatatatatataagttatatttatatatgtaatcactttggggctcaattgagatatgaatatggggaccttttcaatttcttgttaaaattttgcttgagaaattgtttttataaatttttgagtttttttaaaatattcgataattaattaaatcaatgaaatttaagtaataat

SEQ ID NO: 9158 - DNA, 583 bp, Gossypium hirsutum; identical to SEQ ID NO: 5850
  Clone ID: LIB3828-004-Q1-K6-F1

SEQ ID NO: 9159 - DNA, 771 bp, Gossypium hirsutum
  unsure (1)..(771): unsure at all n locations; Clone ID: LIB3828-004-Q1-K6-F10
aaagagcaaaaaaacatggccaagttctgttgttcattgcactatgtgtgcttccagctttggttagtgnnnnnnnnnnnnnnnnnnnnnnnnnnnnnnnnnnnnnnnnnnnnnnnnnnnnnnnnnnnnnnnnnnnnnnnnnnnnnnnnnnnnnnnnnnnnnnnnnnnnnnnnnnnnnnnnnnnnnnnnnnnnnnnnnnnnnnnnnnnnnnnnnnnnnnnnnnnnnnnnnnnnngnngnnnnnnnnnnnnnnnnnnnnnnnagctacacgcattctgaataatcaattggtggtagaaggctatgtgtactgtgatacttgccgtgctggttttgaaacccctaagactagaagcctagctgatgccatggttaggttggtatgctccgacaggaagagcggccaagttgtcttcaaaaaggaggatacaccgacaaaaccggnaaaataccagattcgtgtatccgaggatcacttggatcagatctgtgatgcagttcttgtgaagagctcccagcttggttgtgccacaatgtcccccggtcgtgaacgtgcccgtgttatcttgaccaacttcaatggcatttcatccaccacccgttatgccaatgccatgggcttcatggttgacgagcctgaagcagctgtgctgagatgatgaagatgtatcaggaggatgaggaggatgtctagtgtgttggtttggatttatttgcatatgaaatatgatgttgtctgctatttgttatgtgaattgctccgttatttcta

SEQ ID NO: 9160 - DNA, 253 bp, Gossypium hirsutum
  Clone ID: LIB3828-004-Q1-K6-F12
cacaagcgggccaataataagcgtgaggagatgtctagcgttctccgcaaaatgaggtcagctggaggtggagagaaaaagaagtgagttgccctgcgattgtgcttcaaagcaagtattgagttttttagatttgttaaattttctctttcagttttgttttgagagtttggagtactgattcggatagcattcttttacttgtgtgggatatttaaaaaaaaatgaaatttgcatcacttaattgcaatct

SEQ ID NO: 9161 - DNA, 580 bp, Gossypium hirsutum; identical to SEQ ID NO: 5851
  Clone ID: LIB3828-004-Q1-K6-F3

SEQ ID NO: 9162 - DNA, 581 bp, Gossypium hirsutum; identical to SEQ ID NO: 5852
  Clone ID: LIB3828-004-Q1-K6-F4

SEQ ID NO: 9163 - DNA, 580 bp, Gossypium hirsutum; identical to SEQ ID NO: 5853
  Clone ID: LIB3828-004-Q1-K6-F6

SEQ ID NO: 9164 - DNA, 583 bp, Gossypium hirsutum
  Clone ID: LIB3828-004-Q1-K6-F7
aatgctcgtggacttctcaaactggtattagagatcctgacccggttgttttccttgagaatgagttgttatacggtgaatccttcccttttctgatgaagttctggattccagtttttgtcttccaacttggaaaagctaagatagagaggaaaggaaaggatgtgaccattgcagcttattcaaaaaggtgggctatgctcttaaggcagccgagacgcttgaaaaggatggaatcgatgctgaggttataaatttacgttccattaggccactagatagatccacgatcaatgcctcggtcaggaaaaccaacagattagtaacagttgaagaagcgtttccacagcacggtgtcggtgctgaaatctgcgcatctattgtggaggaaagttttgcatatctcgatgcaccggttgagagaatcgccggagctgatgttcctatgccatatgcagcaaatctcgagagaatggctgtgccacaggtcgaagatatagtccgtgctgcaaaaagaacttgctatagatcggtatcgtaggctgctgctccataatcaaaaccagtccaggcagctttcttt

SEQ ID NO: 9165 - DNA, 489 bp, Gossypium hirsutum
  unsure (1)..(489): unsure at all n locations; Clone ID: LIB3828-004-Q1-K6-F9
gttatttgatgggtacttttttttgaagctttaaagctgttgttttcattttcatggcttagggtttttgttcttgtatttttgttgaaccattttcatctacttgataaatgttatttgagtttttaaggattgaaatgatnnttgaattggaaaaaaaaaaaaaaaaaaaaaaaaaaaaaaaaaaaaaaaaaaaaaaaaaaaaaaaaaaaaaaaaaaaaaaaaaaaaaaaaaaaaaaaaaaaaaaaaaaaaaaaaaaaaaaaaaaaaaaaaaaaaaaaaaaaaaaaaaaaaaaaaaaaaaaaaaaaaaaaaaaaaagaaacagccaaaaaaaaaaacaaaaaccaaccaaccccnccacacaaaaaaaaccccctcatttccaactcacaaaaaaaacaacacaaccccccccnctttttcaaaaaaccaacaatttaaaaaaaccccaatttcaaacaaaaactcccccctttaacaaaaaaacca

SEQ ID NO: 9166 - DNA, 376 bp, Gossypium hirsutum; identical to SEQ ID NO: 5854
  Clone ID: LIB3828-004-Q1-K6-G1

SEQ ID NO: 9167 - DNA, 278 bp, Gossypium hirsutum
  unsure (1)..(278): unsure at all n locations; Clone ID: LIB3828-004-Q1-K6-G10
aaaagggtaagagaggctcgattaatgttaatatcgatgctatttctcttggcaggatcatgctttggtccagggcggagatcccaccctttttttcgaatggaacgtcacctatggcaccattgctcccttgggagtgccagtaaagggtattcttattaacgggcaattcccgggaccaaatcttaactctaccaccaacaacaatatcgtggtcaatgtgttcaataaccttgatgaagccattccttgtaacatgnggaacggccgtgcagcat

SEQ ID NO: 9168 - DNA, 772 bp, Gossypium hirsutum
  unsure (1)..(772): unsure at all n locations; Clone ID: LIB3828-004-Q1-K6-G11
gttcgctgttcatctcatttttgcttgtttcagaacggggcagcggtcaagcgaagagaaagagacaggnnnnnnnnnnnnnnnnnnnnnnnnnnnnnnnnnnnnnnnnnnnnnnnnnnnnnnnnnnnnnnnnnnnnnnnnnnnnnnnnnnnnnnnnnnnnnnnnnnnnnnnnnnnnnnnnnnnnnnnnnnnnnnnnnnnnnnnnnnnnnnnnnnnnnnnngnnnnnnnnngngnnnnnnnnnnnnnnnnngcgaccaagtatcgaacttttcggatctgatacaacgtgttgcagcttcttgtttattgcacccgctcgccgccggtaggcaagaatccggcgaagctgacgccctgactgacgatattattgaggaggaccctgatgaagaagaatactacgagtataacaattcgagtgaggatgaagagaaagaaaatggggtgaagggggcggaaaagtcgaggagaatagcgacagtttggaacaataacggagagaaaacgaaggaaatggtgacgttaatggaggaggttttcgaggcggtggcggaaatgaagaaggcttacgtaaggttacaagaggcgcattgtccgtgggacccggagaggatgagggcggctgacgttgcggtggtgggtgagctgaggaggcttggggtgttgaggggaaaggtttaggagaaggacgcgcggtggtgggcggtcgaggggaaagnacacgtgggctatgctgaagaagtggtggggcgccatacgaagcgggcggtg

SEQ ID NO: 9169 - DNA, 459 bp, Gossypium hirsutum
  unsure (1)..(459): unsure at all n locations; Clone ID: LIB3828-004-Q1-K6-G12
gggagttttcaggacgaccaaaggtttaggtggttggaatggagataactatcagcgagttaatcagaatggaagaggtggccgtcaaggtggtgcaggtgccgcggcgaaaccatgatttggttcttcataattgactgagaaagtgaccagatgatttttttttttgacaacataaaacaaaggtaatggaaggcactagaagaattgaagttcttgattttcataaattcaactatttatgagtagactactgagttcccgcgccccccccacccggccctaaactctctttttcttgtgttatttgttcaagtaatgtgtttgaggattatatgatcaaattttgatttaatcgtcatgtcattgttatatagttttaatctgttactgactgattccttgnaaaattggnagctaatgacatttatttggaaaaaaaaaaanaaagggcggccg

SEQ ID NO: 9170 - DNA, 586 bp, Gossypium hirsutum; identical to SEQ ID NO: 5855
  unsure (1)..(586): unsure at all n locations; Clone ID: LIB3828-004-Q1-K6-G2

SEQ ID NO: 9171 - DNA, 587 bp, Gossypium hirsutum; identical to SEQ ID NO: 5856
  Clone ID: LIB3828-004-Q1-K6-G3

SEQ ID NO: 9172 - DNA, 189 bp, Gossypium hirsutum; identical to SEQ ID NO: 5857
  Clone ID: LIB3828-004-Q1-K6-G4

SEQ ID NO: 9173 - DNA, 588 bp, Gossypium hirsutum; identical to SEQ ID NO: 5858
  Clone ID: LIB3828-004-Q1-K6-G5

SEQ ID NO: 9174 - DNA, 417 bp, Gossypium hirsutum; identical to SEQ ID NO: 5859
  Clone ID: LIB3828-004-Q1-K6-G6

SEQ ID NO: 9175 - DNA, 318 bp, Gossypium hirsutum
  unsure (1)..(318): unsure at all n locations; Clone ID: LIB3828-004-Q1-K6-G7
gnatttctaacctttgcagcggagccaggcctgtgtgaaggcgttgaggttatgctccgatctagatgtacaaaacctggaggtggagggggactctctaacggtgaatgagaaggcgcgcgactacagatgacacagattcctcagaaataacgggatatatggaagatgtgaagagactaagtaaagtttttcgaagctgtaccttttatgtantgcgaaaagatcggccaacgaagcagcgaactagttagccagagaaggccttcaacaagaacaagaattatttttgaggaatgggattccacaggttgcggc

SEQ ID NO: 9176 - DNA, 585 bp, Gossypium hirsutum
  Clone ID: LIB3828-004-Q1-K6-G8
aaatattagtgctggctctctcacccctccattttaaaaaattatatttaaaaaaaaactatcattgcgtaatgatgttttaatgattatgtaaaaaaaattgggtgtcgcctcctccatgccctccacctcttggtattattataaataccatttaggtatttatttttatttttgtccaaaaataaaaaataaatgtgacaggtgataaaaacaatttaactatggttgttataattagtggctaagcatgactatctccattaactcattctatttagtttcaccaaaattaaaattatgaattaagtatatctaagagtgagaaacgggaactgtaatgatccaatcaccctatttcatgaatccagctaattgaattttttaaattgagatttagcaaaaagaattatttaagtattttgtaaattaatgagtagggactatattgaaagggagctaaaatttaaggattgggtaaagtattaaaccaaggacctaagcataattaaccactattaaaagcaagcttagtggataagctcgattctatccatcaatttagactaagtatgtgggcattaa

SEQ ID NO: 9177 - DNA, 583 bp, Gossypium hirsutum
  Clone ID: LIB3828-004-Q1-K6-G9
cccttccaaagcctttgcagctagctcaccaaaccatggcttctaaaccaggaattctcacagactggccatggacacctcttgaaagctttaagtacataatcctgggtccttgggttacggagaccatatactcaattatggttaaggatccaaaggaatgggacctgaccaacttttcggtaatcccattcatgttatggagaatgttgcacaaccagctatggattagcctttctcgttatcgaactgccaaaggcactaacaggattgtggacaagggtatcgaatttgaccaagtcgacagggaaaggaactgggatgatcaaatattgttcaatggaatcctgtttttcttggctaacaaatacgttcccggggcttcacacttacccctatggagaacagatggtgtgattataaccatgttgctccatgtcggtcctgtggagttcctttactactggcttcatagagctctgcaccatcattatctttactctcgttaccattctcatcaccattcctccattgtcactgagcctatcacttctgttatacatccatttgcagaacacatagt

SEQ ID NO: 9178 - DNA, 602 bp, Gossypium hirsutum; identical to SEQ ID NO: 5860
  Clone ID: LIB3828-004-Q1-K6-H1

SEQ ID NO: 9179 - DNA, 75 bp, Gossypium hirsutum
  Clone ID: LIB3828-004-Q1-K6-H10
gtcaccacttatcaaaagatcaatcacgtgccatagaatggtcagttcatagatgcacaccctgggatcttgcca

SEQ ID NO: 9180 - DNA, 420 bp, Gossypium hirsutum
  unsure (1)..(420): unsure at all n locations; Clone ID: LIB3828-004-Q1-K6-H11
aagccgctccggctcccattcaggtgtctacaagatggcggcattggaactgtgcctgttggtcgtgttgagactggtgtccttaagcctggtatggtagtgacctttggcccctctggtctgaccactgaagttaagtctgttgagatgcaccatgaagccctctctgaggctctccctggtgacaatgttggattcaatgtcaagaacgttgctgttaaggatctcaagcgtggtttcgttgcttcaaactctaaggatgatcctgcaaaggaggctgccagcttcacctctcaggtcatcatcatgaaccaccctgggcagattggnaaacggatatgccccagtccttgactgccatacctcccacattgctgtngaaattttccgaattgctgaccaagatcgacaggcgatctg

SEQ ID NO: 9181 - DNA, 630 bp, Gossypium hirsutum
  unsure (1)..(630): unsure at all n locations; Clone ID: LIB3828-004-Q1-K6-H12
gggaggtgcttcgtctgaagtcttagttcgtttctttcctgtttagantgtgagagacaagacagtttnnnnnnnnnnnnnnnnnnnnnnnnnnnnnnnnnnnnnnnnnnnnnnnnnnnnnnnnnnnnnnnnnnnnnnnnnnnnnnnnnnnnnnnnnnnnnnnnnnnnnnnnnnnnnnnnnnnnnnnnnnnnnnnnnnnnnnnnnngnnnnnnnnngngnnnnnnncngagnnnnnnngnnnnnngttatgctgacccgatctacagcaagctgaagctggacctaatcccanaactatgagttcattcagttcattattattatggatcttgggaggtgcttcgtctgaaggtcttagttcgtttctttcctgtttagantgtgagagacaagacaggtttatgctgacccacgcagaaacggcatgcaaactgcataccccagtccttcgaagaataagttgtagatttatgtttaattatgttgatactaatgttatatatataaactaattgcttaatactggacaaaacatgaacaattccaacttaaaagtagaaattgtattaaaaaaaacataactgttaagacttttttgaagttttatgttatgttattaactatttggc

SEQ ID NO: 9182 - DNA, 608 bp, Gossypium hirsutum; identical to SEQ ID NO: 5861
  Clone ID: LIB3828-004-Q1-K6-H2

SEQ ID NO: 9183 - DNA, 480 bp, Gossypium hirsutum; identical to SEQ ID NO: 5862
  Clone ID: LIB3828-004-Q1-K6-H3

SEQ ID NO: 9184 - DNA, 593 bp, Gossypium hirsutum; identical to SEQ ID NO: 5863
  Clone ID: LIB3828-004-Q1-K6-H4

SEQ ID NO: 9185 - DNA, 588 bp, Gossypium hirsutum; identical to SEQ ID NO: 5864
  Clone ID: LIB3828-004-Q1-K6-H5

SEQ ID NO: 9186 - DNA, 593 bp, Gossypium hirsutum; identical to SEQ ID NO: 5865
  unsure (1)..(593): unsure at all n locations; Clone ID: LIB3828-004-Q1-K6-H6

SEQ ID NO: 9187 - DNA, 599 bp, Gossypium hirsutum
  unsure (1)..(599): unsure at all n locations; Clone ID: LIB3828-004-Q1-K6-H7
gctttgtctgccatttcccanaaccaggtaaaactcgtgatgacgttttggccgacttctataccaagtggcaacataactacctggttgtaaacaaatggtttgcccttcaagccatgtctaacattcccggtaacgtcgagaatgttcgcaaactcttaaatcatccagcatttgaccttcgtaatccaaacaaggtgtactcacttatcggaggattttgtggatctcctgtgaatttccatgccaaggatggttccggctacaagttcttgggtgaaatagtactacaacttgacaagctaaatcctcaggtggcctctcgcatggtgtcagccttctcaaggtggaggcgtttcgatgaaagccgtcaaacactagccaagcaacaactggagacgataatgtctgccaatggattatcagagaacgtattcgagattgctttaaagagcttagcttagttttatagcttagctgtttaaatggtatcaaataacatttgctgctctgctcattgagttatagacaaagaaatattaaaccaaaaaaaagctgttaattatgtcataaagtgaagagtgtttttgtgtgtgttt

SEQ ID NO: 9188 - DNA, 646 bp, Gossypium hirsutum
  unsure (1)..(646): unsure at all n locations; Clone ID: LIB3828-004-Q1-K6-H8
ccccgcgtccgaaaaaaaaacgaacaaaaggagtccctctctgcccaaatccctccctgctgggccttaatgatggctgcctgtttgctgatagcgcatcaatggaagcgtacatggagctcacatggagatcgattactatgctttgtctctaaaatggcccggcaccatctgccacaagactcgccatagctgctcctccaaagcctgctgcctaagctcaaactctccaactagaattgtaccattccattggtgtaagtaggcaccatattagtaaatgcactggnaacactgttccactcacatgtatgcttatcctgtattctcatgttcaagaatgctcaaagatgagcatgttacaaacactatagctgtgtatcgtcaccttagtacaaatgtaactaatccaatcgttatattagagagcaaatcatcaacttgctcaagtggcaaaagggttatttagagctcatgagtcggataagcatggaactagctcatctacggttattacagatgaatacagctactttataacaaccctcaatgtttacttacaaatataatgtcactaaaatactgaatgactctggatatatcccttctaatagtgaaaggtatcctcttgcgagcattgtctctg

SEQ ID NO: 9189 - DNA, 350 bp, Gossypium hirsutum
  unsure (1)..(350): unsure at all n locations; Clone ID: LIB3828-004-Q1-K6-H9
cccagcgtccngattatcgtgaggagtcgccttcgattatcatcttctgccattgttgttctacccctacttggaccgctttcctacacgctattgcttcagttgcaaaagcagnaaaataccccgtgatggatctctngagcaggaaaataggacaagcccttcttcatttctgaccacaacccctgaggtagatttatgatagcccacagtccacaactgaagatgcgcctctggtacggggagaactgctcaaaaatccaggacattcacgaaaaacatggtcgactatgtcagctctttcaccacacccgaggtaatttgtattactgacaatctgatggtgctgc

SEQ ID NO: 9190 - DNA, 442 bp, Gossypium hirsutum
  Clone ID: LIB3828-005-Q1-K6-A10
aagtcccacaaatcccactaatgccaggacagtcgggatgtgagagtggggagtgttgccgtcagggttgcggtgggacttgtgctgagtgtggtcagcccaggtgcgcatcaggatgttgccaggctgaaactgtaaagagcaaagggatagaagaggttatggacagtgaacccagtccaccaaagtagggagatgataccatattaagatgaaataatgaggaagagttggttgtcgtcgtattaattatacaaaataagaagtaatgatgttgcagaagggcttgctataaaatcctgttggataaaaagagtaattatgaagaataaatagctcaaaacaatatttgatttacaatatcctaaagttccttgaatcttgttttgtagccatatgtaattaatgcatgtacatgctaatatatatgattttctttgct

SEQ ID NO: 9191 - DNA, 744 bp, Gossypium hirsutum
  unsure (1)..(744): unsure at all n locations; Clone ID: LIB3828-005-Q1-K6-A11
cttccctcttctctcgccggtttcctagctcaaccggttcccggttnnnnnnnnnnnnnnnnnnnnnnnnnnnnnnnnnnnnnnnnnnnnnnnnnnnnnnnnnnnnnnnnnnnnnnnnnnnnnnnnnnnnnnnnnnnnnnnnnnnnnnnnnnnnnnnnnnnnnnnnnnnnnnnnnnnnnnnnngnnnnnatnnngggggnnnnngggggggnngngnnnnnngttttccgatgagccgttaaagcctggaggctactcatccccaaacacggtccccgcattccctgctcaaacccaagctcaaatttgccggcttgacttgtcagccgagctattcggcggtgtcaacgacgcctgtggccacaacctggacagaggccgctgctgtcccgtcttagcagcgtggctgtttgcagctcacgccaggtatgctttggaggtcacggctcctgctccagcggaatcggagttgccggagcagcccatgaggccggacgattcgcaaaagtgtgtgaactcgttacaagactcgttgttaagtaagcgtgtgaggattcctcaaccaaacgccagttgcgatgcgattttatgtttttgtgggataaggcttcaccagattagttccttgagttgcccagctgcgtttaacgtttccggccaccaccgaaatgcaacacccactgctgctgtgaaaaaatttgggagaaaaattgcaggnaactctacttatgctgggtgtaccaa

SEQ ID NO: 9192 - DNA, 770 bp, Gossypium hirsutum
  unsure (1)..(770): unsure at all n locations; Clone ID: LIB3828-005-Q1-K6-A12
acccttcttgtatcttgcctggttgagtgcacggaattcatgccctctttgccgcttgagcttctactgtgnnnnnnnnnnnnnnnnnnnnnnnnnnnnnnnnnnnnnnnnnnnnnnnnnnnnnnnnnnnnnnnnnnnnnnnnnnnnnnnnnnnnnnnnnnnnnnnnnnnnnnnnnnnnnnnnnnnnnnnnnnnnnnnnnnngnnnnnnnngnnnngnnggagtgnnnncgaggnnggagnttntgtgttacaaanttatgaacaagggaaacaaaattgaatagtaggatgaggatgcatgaaagccagcagcaaaatgcaagtgaggacagttcctctgagaactctgatgaagctgatgcagatgaagcttctgaatttggtccacatcaatcacatgatgtgccacatgtggatcctaccatcaatagctcttccagggagattggtagagactggcttttccgtgctgctgctcccgttgctggtattattggtgttgttcttatcttatggttaggcaagccactaattggaagaagaggatcaataccgtcatggggccagcatcaaattcaggttgcaaatgcatcatcactaaaccaaaggggcagcaggggtaggagatggtggtctctcttttgagaggcttcagtaatctggtggtccagactcaaattatgtatttatattctaatttcacccgtggattgttgtgagttgcatccttgccatcgcattggtatattagtttcatttatttattttg

SEQ ID NO: 9193 - DNA, 599 bp, Gossypium hirsutum
  Clone ID: LIB3828-005-Q1-K6-A7
attaatagaacgcgccgcaatccctcgtcccttccgatctccgactaccaagaagcggactagggttcgatgactcgatggtttcgacacacaggtgagccttttccctcatcgccaccttgaaagccagaacactcctctctctcattccgattcagacagagtagaggatggctccaaaggcccgcgaaggtatcattatacctttaactcttttctttttttatatctgaatgtatacaaaaaataaaaaaatgaaagaacagaaaaacgcaaagaaaaagaatcaccttaatatcgatctttttatttctcttttttttcatcattttacagatttcgttatggctttatatagccaaaagaaaaatacaaaaatcgcccctctttctgttttttcttcgctattacaattttttttctccttttgttgtgctgtttctgcttgtcttttgctcgtttgttgcgctctttgcgtgttgattttctgcaggtgtacggaggccgtacggtgacgtggagggcggcgtacgtgcggaggtgcgcgtgggaggaggccacgcatgggagcttgcggcgccaggggatttagggtttgc

SEQ ID NO: 9194 - DNA, 592 bp, Gossypium hirsutum
  Clone ID: LIB3828-005-Q1-K6-A8
cggccgcgtgggcgtcaccaaaaacccaaacctatttctttgcataacttcctcacccccccccccttttttctctgatgaatcttcgtctttcttctgccctcctcaccgtctttctagccttatcggcgttgtcatcgtcttcccatgccaccgagaattggagccgatccatgttctggagcaagctccaggtccgtgaccgacgtctctccagtgaccaaatatgtcatggtcactccggcaagtgcctggaagaaaccgatttggatatacaccgcagagaattaagcgcaagaaagtacattagctacgccgccttaaggatgaatgctgttccatgcaatcaaccaggtcgatcctactataattgtggcattggtgaagttgctaatccatacactagagggtgcagcgtcttaacccgttgccgtcggttcactgcttaaaatgaagcaatttctattctatgcccatcataatttctcgtacactttctcttttccattattgtaggacaagcttttcttcttttctctaattattactagtattttctttttcaacgtcgataatatataagtgtgggttg

SEQ ID NO: 9195 - DNA, 780 bp, Gossypium hirsutum
  unsure (1)..(780): unsure at all n locations; Clone ID: LIB3828-005-Q1-K6-B10
tccggtttaatccttgcaaaaccaaacttaataattgtgtttttccttctatgcaatgatctccgacaagagacagnnnnnnnnnnnnnnnnnnnnnnnnnnnnnnnnnnnnnnnnnnnnnnnnnnnnnnnnnnnnnnnnnnnnnnnnnnnnnnnnnnnnnnnnnnnnnnnnnnnnnnnnnnnnnnnnnnnnnnnnnnnnnnnnnnnnnnnnnnnnnnnnnnnnnnnnnnnnnnnnnnnnnnggnnnnnnnnnnnnnnnnnncgaatgcctgggaggcaagactgctagagcctgcgatggctgtctacgaaagcgtgctcgttggtattgttcagctgatgatgccttcctttgccaggttgcgatacatcagtccactccgctaaccagttagccagtagacatacaagggttaggcttgaaactgcatcttccaggttcaatgcttctgttatcaacaacagtgctactgatcaagatgctctgccagcatggcaccaaggtttcactcgaaggcaagaacaccaaggcaaaacaggtccatacaggggcaacaaaaaagtgaggggaaaagtatgggatttgaaccctcttgttcctgaggttggttgtgaagacgggtcagctgaagagactgaagaccagctgctttgcagagtccctgtattcgatcctttttctgctgaattacgtgatatggcaaatgaaaacggaatctagtagttgatggttttgaagatgaaggaacatgccagttggatgatggtttacatggtttt

SEQ ID NO: 9196 - DNA, 497 bp, Gossypium hirsutum
  unsure (1)..(497): unsure at all n locations; Clone ID: LIB3828-005-Q1-K6-B11
caaaccaccttcaaacggnaatcaactacctctttctgcgcaactaacccttttccagagagataccaacaggcttgactactgagaacactgagcttaagcttcggctacaagctatggaacagcaggctcagctacgtgatgctctaaatgaagcactgaagaagggaagtagagaggctcaagatggctaccgccacggcaagttgaaacccagaatatgcaaatgccaccatttcatcccttgcaatctaacatgttggcatctaatcagtctatggtagctgcctctggcccacatgcctttgcggatatgatgcaacaggatcctcttggccgattgcaggggcttgatatcagtagcagagattcacacttggtgnnaaatctgaaggcccttcaatatctgcccggtgaaagtaatggnaacattatgataccaaattttgctgatcctacacccttgccctgtcctnatnnttgttgggttggttcat

SEQ ID NO: 9197 - DNA, 776 bp, Gossypium hirsutum
  unsure (1)..(776): unsure at all n locations; Clone ID: LIB3828-005-Q1-K6-B12
cttttatgctacaacttttgattcaattcttgaagacagtgggttgatttaaaatttttggtttaaacgtttnnnnnnnnnnnnnnnnnnnnnnnnnnnnnnnnnnnnnnnnnnnnnnnnnnnnnnnnnnnnnnnnnnnnnnnnnnnnnnnnnnnnnnnnnnnnnnnnnnnnnnnnnnnnnnnnnnnnnnnnnnnnnnnnnnnnnnnnnnnnnnnnnnnnnnnnnnnnnnnnnnnnnnnnnnnnnnnnnngnnnnnnnnngngnnnnnnnnnnnnnnnnnnnttccagaaggagnatggnaatctccaactacccacaggnacttgttttggttcctcggggaacagatgatagtgttgttgttggtcctcatatacgaggtagacgtcttcgagcttcatctgcaggtgatgaggaagtagatctccttctccctggtacagccagactccagatccagcttggtgtgaacatgccagcaagggctgagctgattccagggaaagaagaaaacatgttccatgaagcatatgatgttgttctgtatctaggcatgatcgacattttgcaagaatataacatgtctaagaagattgaacatgcctataaatctcttcagtttgattctgtgtccatatctgctgtcgatcctacattttactcgcaacggttcctggaattcattcagaaggtatttcctcaaaactccattaaaggttgacagtttcggctctgttttgtcctcctgtgaagtttccttaagaatggtcatcacc

SEQ ID NO: 9198 - DNA, 588 bp, Gossypium hirsutum
  Clone ID: LIB3828-005-Q1-K6-B7
gctctcttgacattgagcgacccacttacaccaatcttaaccgtcttgtctcccagtgatctcctctttgactgcttcacttaggttcgatggtgccttgaacgtggatgtaacagaattccagaccaacttggtcccttacccaagaatacacttcatgctttcttcatacgctccagtcatctccgctgagaaggcttaccatgagcagctatcagttgctgaaatcaccaatagtgcctttgagccctcatctatgatggccaagtgtgatcctcgccatggcaagtatatggcttgctgtttgatgtaccgtggggatgttgtgcccaaggatgtcaatgctgctgttgccaccatcaagaccaagagaactattcaattcgttgactggtgcccaactggattcaagtgtggtatcaactaccagccaccgactgtcgttcctggtggtgatcttgctaaggtccagagagccgtttgcatgatttccaactcaaccagcgttgctgaggtgttctcccgcattgaccacaagtttgatctcatgtatgccaagcgtgcctttgttcactggtacgtgggtga

SEQ ID NO: 9199 - DNA, 592 bp, Gossypium hirsutum
  unsure (1)..(592): unsure at all n locations; Clone ID: LIB3828-005-Q1-K6-B8
gcatagtccaatatgcaagtggaactcatttcaaaggaagcttactataatgaaaacgggggtaccaccaataaccgataaaccgaagcggagagggattgcatcgattggaggaaggtctagtggtgcnaccagaaaaacctcaacgttcgagaagtgtgtccttcagtcctgaccgacctcgtgtgaggggcaggtcgcctgctttcaatgcacttgcatctagattcgagaatcctagtagtaggaacctttctactccacctcctatggttagaaaagtctacccgaaatccgggactccagattcagggacgaaggctgcagctatagcagctcttactgaaagttttgatcgcccatcagctcgagagactctcatgcctagaattgtgaagaaggcggcgagcccagcagcaaccaagacaacatcaccagagcctaacacaaaggagaattccatgagcagcagactagaatccctcactatacaagaagatatgaaagaaggtgagaccgaagacgaggaaggccttccgatacacccttacgaacgtcttacaacatcatcaacagatcccgtcaccgatat

SEQ ID NO: 9200 - DNA, 584 bp, Gossypium hirsutum
  unsure (1)..(584): unsure at all n locations; Clone ID: LIB3828-005-Q1-K6-B9
gntgaatctccccgcaaaagcaccaaagggttaagacaatgagggagattgagggaacccttttcccaaatcatgaaacctcaatcccaaaacctaacaaagtaaactaactcacggtgggtcaagccaacaccaatcctccactgcaacttcctgacctctaaagggcatcttccacccagaatcggtcaattgaatatctccgacccaagaaaaaattacatcatcggggctcgaatttgaaacgacaacttaaattttctcaaaagagctttcacatcccaggaccgccattgcctccaccatacaaattgtagaagcccaggtatagatacgatactctgatcttaaaatttgtcccatatcatcctgtacaataaaccctgaactcactttatttcttggtccggagcgtgtccatattaatcttgacccacaatggcagtggggggaccaatggactaccgcagtaggaggagggtgtctcaacacaaatctcagtcctcgatattcactttcatagctatgaataaagatcacgaggtcggaaaaaaccagcagaacccagggggcgccttataaaa

SEQ ID NO: 9201 - DNA, 156 bp, Gossypium hirsutum
  Clone ID: LIB3828-005-Q1-K6-C10
gggatttgagagttgtgaaggttaagaaggtcttgagtgatggcattacaagagaagttagatagatttaaacagcagcaggagaagtgtcagtcgatgctctccaacattgcagcaaaatcagcatcttctaggtccactccaaaacctgtacct

SEQ ID NO: 9202 - DNA, 761 bp, Gossypium hirsutum
  unsure (1)..(761): unsure at all n locations; Clone ID: LIB3828-005-Q1-K6-C11
aaagatccacccttcacttggttcttcgacttcgtggcggcatgcaaatctttgtcaagactctcactggnnnnnnnnnnnnnnnnnnnnnnnnnnnnnnnnnnnnnnnnnnnnnnnnnnnnnnnnnnnnnnnnnnnnnnnnnnnnnnnnnnnnnnnnnnnnnnnnnnnnnnnnnnnnnnnnnnnnnnnnnnnnnnnnnnnnnnnnnnnnnnnnnnnnnnnnnnnnnnnnnnnnnnnnnnnnnnnnnnnnnnnngnnnnnnnnnngngnnnnnnnnnnnnnnnnnngaaatacaattaccttgngagttgaaagctctgacacaatagataatgtaaaggcaaagatccaagacaaggaagggatcccaccagatcagcagaggcttatctttgctggaaagcagcttgaagatggtcgcaccttagctgattacaatatccaaaaagagtccaccctccacctagtacttcgtcttcgaggtggcatgcaaatctttgtcaaaactctcactggnaaagacaattaccttggaggtggagagttcggataccattgataatgtgaaagccaagattcaggacaaagaaggaatcccaccagaccaacaaagattgatttttgctggaaaacaacttgaagatggaaggactcttgccgattataatatccagaaggagtctactctccatttggttctccgccttcgtggtggtatgcagatctttgtaaagactcttaccggnaaanaccatcactttg

SEQ ID NO: 9203 - DNA, 707 bp, Gossypium hirsutum
  unsure (1)..(707): unsure at all n locations; Clone ID: LIB3828-005-Q1-K6-C12
cccagcgtccgcttttttcaacgatttcagattctggcttttagggttttacgatgaatgagagaagncgattnnnnnnnnnnnnnnnnnnnnnnnnnnnnnnnnnnnnnnnnnnnnnnnnnnnnnnnnnnnnnnnnnnnnnnnnnnnnnnnnnnnnnnnnnnnnnnnnnnnnnnnnnnnnnnnnnnnnnnnnnnnnnnnnnnnnnngnnnnnnnnnngngnnnnnnnnggggnnnnnnngnnnnnnngtntgatcttgaacaaggatgggagtttnatggaaaaaggaattacaaagttgaagaacattttagaaggcttgccagagccgcaatttagctccgaggattatatgatgctttatacaacaatttacaatatgtgtacccaaaagcctcctcatgactattctcagcagttgtatgataagtatcgagaatcctttgaagagtacatcacttcaacagtacttccttctttacgagaaaagcatgatgagtttatgttgagagagctggtcaaaagtggagtaatcataaagtaatggttaggtggctttctcggttcttccattaccttgatcggtactttattgctcggaggtcactacctccccttaatgaagttggactcacgtgtttccgagaactggtttaccaagagctaaatgcaaaagtgagagatgctgtaatttctctgatcgatca

SEQ ID NO: 9204 - DNA, 596 bp, Gossypium hirsutum
  unsure (1)..(596): unsure at all n locations; Clone ID: LIB3828-005-Q1-K6-C7
agnagagcagatcgttctgcagagctctctatcagtaatgccagtgacatggnaaactgaatgggttgagcaggatgaaccaggggtttacctcactattagagcagttccaggtggctcccgggagcttagacgtgtccggttcaggtatgtaactagttggttgctgttttcttggttccagacatgagaatggatggaataaaagccaaaatgttattatggtcttatgttttcgtgctgattattaccaaccggtcatttgatccttctttgctctggagtaagctttgtaccatttaggataggcgttattagtagtagtcttaaactctaaaatgctgaaatgcttgaaattctgattctcagactactagaggtaatgctagtgaattagttgttctatgtcatttgtgagatggtcatgggtcaaataaaaatagcactgcgcttttcaaaactaggataaacagcttgtatgtatgttaaatctaaaatgcagagtagacctagggattcagtttgctctttgtttatttgactgaagcatgagaccccaactcttccttgctttgagtgaagaaatggaacaatgc

SEQ ID NO: 9205 - DNA, 580 bp, Gossypium hirsutum
  unsure (1)..(580): unsure at all n locations; Clone ID: LIB3828-005-Q1-K6-C8
ggatggtacaattattgctccgactgattctaaaccctggggcaaaggtattttacatgtggctagnaattcacaaagctgaaaggtataacagttcagggnaaaaggtatcattgatggaagaggatcagggtggtggctagaagcaccatatgaagatccatatgatggtgaaagaaaataataatcccattaaacaatacagttcaagaacggccaccaatgccggtcagaaatgaactcagtggaaaaatgcctagcatcaaaccaactgcactaaggttttatgggagctttaatgtgacagtcacgggcataacaattcaaaacagtccacaatgccatcttaagtttgataattgcataggagttgtggtacacgacatgtccgtctcatctccaggggacagtcctaacacagatggaatccacctacagaattccaaagatgtgctaattcatggcactactcttgcctgcggagatgactgcgtttcgatacaaacaggatgctcaaatgtatacattcacaatgtgaattgtggaccgggacatggaatcagcattggaagcttgggaa

SEQ ID NO: 9206 - DNA, 597 bp, Gossypium hirsutum
  unsure (1)..(597): unsure at all n locations; Clone ID: LIB3828-005-Q1-K6-C9
cggacgcgtggggaaaacaacaatggcgacgtgaagaagagagangtttttcttaaaattatttttatttgtcaatttcagtggtgatgatgataacgacgtctgtcggagctcggaacttcgaggccgtggcggtttctaagtccgccacttggaggtctcataggagaaaagatccggtgagtacgaaaatggcggtttcgaataatcaacggttgatatcgttggacgtgagcggtagcggagcggtgagggagagttacgtggcggttaaggagggtttcgccgatgaagaagattacgtaaaagccggcggatctcaacttctcttcgttcaaatgcaacagcataaggaaatggatgagcaatcgaagttagcggacaagttaccaccaatatcaatcgaagacaatatactagacctagtggtcattggcagtggaccagctggtcttgcccttgctgcagagtctgctaagttgggtttaaatgttggactaataagccctgatcttcctttcaccaataattatggattgtgggaggatgagattaaagatcttggactcgaaaagtgtatggagcatgtttggccga

SEQ ID NO: 9207 - DNA, 482 bp, Gossypium hirsutum
  unsure (1)..(482): unsure at all n locations; Clone ID: LIB3828-005-Q1-K6-D10
ggtccaggaaatagtgattctgatgaagatcttcctaaaacaagttcaaagactcgttcaagcatgattttttctcataggacaactgcctctccaaatgcaagaagaggttccactcttaaaactacagtttcctctgaatcaaaggtagtttctgaccccatgccatatttaggtccaggaaacagtggttctgatgaagatcttccggaatcaagttcaaaggctcattcaagcactggtgtttctcataagaaaaatgactcttcttcaaattcacgaagaggttccactcttaaaactacagtgtcctttgagccagcggtagtttccgattatggtggggagaagaattcctcctcaagaagttgtagtgctgatgaagcactaccggagcttcagtctcataaaaggaactcagataacaggnaaaagctttcaaaactcccaagttggcaccacagaccaaaacgaattcgtct

SEQ ID NO: 9208 - DNA, 412 bp, Gossypium hirsutum
  Clone ID: LIB3828-005-Q1-K6-D12
cctgacgggttatttagtgccggaggaaagtcagacatagaaggcatattccctcctgcatactattgaatgggttccaatttcaacaaggtaattcacagagtacacaaaccttgaggaatgcatctctcacttgtgtcaatatatcacccacaatggcccttttcatggattgctcggcttttcccaaggtgcaactcttggtgctcttctactgggctacaaggctcaggggaaggtgttaaaggagcatccacctttcaaaatgtttgtatcaatatcaggatcaaaattcagagagccaagcatatgcgaggtggcttacaaagacaaaatcaatgctgaaatcagttcacttgcatcggtagctaaggattggtctaaagttagccttcagtaggatttggactac

SEQ ID NO: 9209 - DNA, 582 bp, Gossypium hirsutum
  unsure (1)..(582): unsure at all n locations; Clone ID: LIB3828-005-Q1-K6-D7
ggnagcaccggtgctaccaatcgaaccccgaggccgccacataacgaaaagactctcaaaaacaaagcactctccgtttctttcaacgagaaggatctcagggattacgttactgggtttcacaagaggaagaagaagcgaagaaaggaagcccataagaagcaagagcaggctgaacgacgcaagcgtattgaacagcgcaaaaagagaaagttagaaaaagaatttgccctatatgggggagcacttcccaatacaagctcgggacctgatggaattgatgagaacaacgaagatgatgaacaaagagagccaagtgcatcagtttctgggacaactatgtatgatggtggaaacatgacagtcactgtgattactagtgagatttctcatgaggaagaagatttcactagtgcaaagactcaaactacgatgctcagatcagtcggagataaagttgataaaaaactcgccttacctgtgagcaaaagtaaacccttcaagagagttgctaaacacagacctaagccaccaagtaaaagagagaaaaataaggggaagaaaaggagcaagaactcgcat

SEQ ID NO: 9210 - DNA, 587 bp, Gossypium hirsutum
  Clone ID: LIB3828-005-Q1-K6-D8
gaagaggaggagaaaggatggaaaaagatcgagggtaatgaagtttatgctctagcaatgtgcgtatgtattctcctctttgctccgattgttgtgtcacaaccaataccggcagacaaatcccaagtggaagcttggtttaatggcattatcaagccggtgaaggaaaggggtacaaccttagaccctgaattggttcaagccgagacagaacctagaatcataaaggtgatgcaaggtgggggtggagaattcgataccataaccaaagccatcgagagcgttccatcagggaacgccaaacgcgtgattatatccatcggacctggatcttacaaagagaaaattagaattgaaagaaataagcctttcattacattgttaggagatcctaaaaacaggccaaatttgacatttgacggcaccgccaagcaatatggaaccgtagatagtgccactcttattactgagagtaattactttgtgggtgctaatctcaatatagtgaactctgctccaaggccagacgggaaaatggtaggagcacaggcggttgctctgagagtctccggcgacaggtcagcttt

SEQ ID NO: 9211 - DNA, 586 bp, Gossypium hirsutum
  Clone ID: LIB3828-005-Q1-K6-D9
gctcgatagaagattgccgtacgcgatataatggtgatgcagaccatcatcaacgtcgcaaaagttcacgtttcctgcccgtctcatatgtggggattgttttgaggtgcgcttggatagagttttggcagatgatgctcctttcgatatctgcagttgccagtttgccatgcattattcctggtctacagaggcacgtgcgcgtcgggcgctggccaatgtttcagctttacttcgtccaggaggcaccttcattgggacaatgccagatgccaatgtcatagtcaaaaaacttagagaagctgaaggattggccttcggcaacagcgtctactggatacgatttgatgaagaatttaccgacaagaaatttaaatcttctagcccctttggtatcaagtacaagtttcatttaaaggatgctgttgactgccctgaatggatcgttccgtttcatgtcttcaaatcattagcagaagagtacgatctagaacttgttttcgtcaaaaactctcatgaatttgttcacgagtacatgaaaaaaccggaatatatagagcttatgaggaggctcggtgcactaggt

SEQ ID NO: 9212 - DNA, 527 bp, Gossypium hirsutum
  unsure (1)..(527): unsure at all n locations; Clone ID: LIB3828-005-Q1-K6-E10
ttctatggatgctgcatcattttttcgtgacaaaagccttggtgcagattcccctctatctggagtgatatcattgttggcagcagttgatgccctttctcatgtagatggtttagacaaccttaataaacagcttgtctttcttgttttcactggtgaggcctggggttaccttggtagcagaagatttttagttgaacttgatcagcagtcagatgctgttcgtggtctcaatagctcactgattcagttggtcatggaaattggatccactggaaagggcttcagtcaagggaacaaaaccttctttgctcacacacaggtttcatctgacacaaatgaagctttggatgccttgnaaacttgctcaagagtcccttttaaatctgaaggtgttacagtttcaaatgccagctcttctaatcctggnaattcctccatcattccttgatggcattttcttgaaaaagaaactcttcaacttctgggnattgtgttagaaggatttttgataccgttttttgcca

SEQ ID NO: 9213 - DNA, 511 bp, Gossypium hirsutum
  unsure (1)..(511): unsure at all n locations; Clone ID: LIB3828-005-Q1-K6-E11
attgcccgtanatcacagggctcgagcgaggcatcagcttcctgcacaggatgggaataggattcatgatatcagtattagccactctggtagcaggcttcgtggaagtgaagcgtaaagaagcggctttagcacatgggcttcaagacaaggctcattcaatcatccccatctcagtgttctggcttgtgcctcagtacagtcttcatggaatagcagaggcattcatgtcgattggacacttggaattcttttatgatcaggcacctgaaagcatgaggagcacagctaccgcactgttttggactgcaatctcagtcggaaattacatgagcacgctgctggtttctttagtacacaaattcagcgcaagagctgatggatcaaattggcttccagataacaacttgaacgagggcaaattggnagtacttttactggttngatcactgccttgcaagtggttaatcttatttactacatctgttgtggctaagctgtattacgtata

SEQ ID NO: 9214 - DNA, 700 bp, Gossypium hirsutum
  unsure (1)..(700): unsure at all n locations; Clone ID: LIB3828-005-Q1-K6-E12
gctctgtaataaaatctgcaatcttaattctgtcggtgttttttctgtacgcttcattcgggtgttagtnnnnnnnnnnnnnnnnnnnnnnnnnnnnnnnnnnnnnnnnnnnnnnnnnnnnnnnnnnnnnnnnnnnnnnnnnnnnnnnnnnnnnnnnnnnnnnnnnnnnnnnnnnnnnnnnnnnnnnnnnnnnnnnnnnnnnnnngnnnnnnnnnggnnnnnnnnnnnnttgctccagaacagcccatgatgaccccaaaaacatggacgctattcctcccattgatgcactcaaccctaccgagttgaatggacccggtgttggcattcacgaagatcatgttgtcccaaaaggtgctgaaattggtactcttggttttggttttgaaggtggtcctgataaatgttgttcttctggatgttccggtaattgtaatcctggtggtttcgttctaccatttcctcaaattccagaaatcccaagaattccagaaatcccacaaatcccacagatcccacaaatcccacaaattccactaatcccacagatcccacaagtcccacagatcccacaagtcccaaaaatcccactaatgccaggacagtcgggatgtgaagagtggaaagtgttgccgtcagggttgtggtgggaacttgtgctgagtgtggtcagcccaggtgcgcatcaggatgttgccag

SEQ ID NO: 9215 - DNA, 582 bp, Gossypium hirsutum
  unsure (1)..(582): unsure at all n locations; Clone ID: LIB3828-005-Q1-K6-E7
gttgtngaagcctccgccatatacacccaaaccgccggttgtgaagcctccgccatatacacccaaaccgccggttgtgaagcctccgccatatacacccaagccaccttactatccaataccgccggtcatatcaccaccaacactgcctccaaagccaccagtctaccccagtccaccaatagtgaatccaccaacaccgccggttgtgaagcctccgccatatacacccaagccaccttactatccaataccgccggtcatatcaccaccaatactgcctccaaagccaccagtccaccccagtccaaatagtgaacccaccaacaccgccgattctaccaccaccatcaccacctattgtgaagccaccaacgcctcctatcgtgaagccaccttcaccggaaacaccgtgtcctccaccaccacctccggcacaacaaacatgccccatagacactctcaagctaggtgcatgtgtggacgtgttgggtggcttagtacacatcggcataggtagcagcgccaaagacacttgctgccctgtactacaagggctgttggatttagacgccgccattt

SEQ ID NO: 9216 - DNA, 584 bp, Gossypium hirsutum
  unsure (1)..(584): unsure at all n locations; Clone ID: LIB3828-005-Q1-K6-E8
aaaattanaaacaatgaaagagttgtcaattattggtatcgaaacattgttattattactatnaataatacattgtcaccatatttntgactggaaaaaaaaaaaaaaaaaaaaaaaaaaaaaaaaaaaaaaaaaaaaaaaaaaaagaaaaaaaaaaaaaaaaaaaaaaaaaaaaaaaaaaaaaaaaaaaaaaaaaaaaaaaaaaaaaaaaaaaaaaaaaaggggggggcccgttttaaagagaaccaaagttaacttcccggggcagggaaaggtaaaagtttttttatggggcaaccaaaataaaatcaaggggccggggtttaaaaacgggggaaggggaaaaacccgggggtaaccaaattaaatcccttggaaaaaaatccccttttcccaagtgggggaaaaaaaaaaaaggccccacccaatcgcctttccaaaaattggcccaccctaaagggaaaagggaacccccccttaaggggccaataaagcggggggggggggggggtaaccccaaggggaaccgttaaattggcaaggccctaagcccccgctcttttcgtttttttcctttctttttt

SEQ ID NO: 9217 - DNA, 586 bp, Gossypium hirsutum
  Clone ID: LIB3828-005-Q1-K6-E9
ctccctctctccttttttccactgtcagtagccgttttattgcttcccgctccgccgccacagccatatttttgggcgctaagattctcataaagctctgctcgtctttgggcaagagggattgaatttgtaacaaaaaaagaagaagaaatgtaaggtttgtactcagcacattacatatctgtgaaaatgaagaagaaaatgatagctattggtttcgaaggatcggccaacaagatcggtatcggtgttgtaacattagatggcaccattttatcgaacccacgtcacacctacattactccacctggccaaggtttccttccacgtgaaactgctcaacaccatctccaacatgtgctcccattggttaaatcggctttaaaaacagctgagattaccccagatgaaatcgactgtatttgttacactaagggtccgggtatgggtgcaccgttacaagtgtccgcaattgtcgttcgggttctttcactgctatggaagaagcccattgttgctgttaatcactgcgttgcacatattgagatgggaaggattgttactggggccgatgatcctgttgtgt

SEQ ID NO: 9218 - DNA, 386 bp, Gossypium hirsutum
  Clone ID: LIB3828-005-Q1-K6-F10
tcatgggcggcagcttttgcggcgcctgcaattacggatgcccttaccgcaggttcaataatgggtgtggtggtggtattgcttatatggatgaactcaaacgaacgattaaggaccttaccatgaaacttgatgccaatggtcttttaggggaaaaagaaggccatgaatatacaagctatggcgccagaatcttcatagaaatcttcatagatttatatatagattatagaaactacggattctatacaaagagaaagaaaataaagaataaccaagcagcttgatatatgattgaattacaatgtgctagctgtttttttatttatttattattattacatgaataaaagaatttaaagtaagcttgattgaaaattatcatt

SEQ ID NO: 9219 - DNA, 513 bp, Gossypium hirsutum
  unsure (1)..(513): unsure at all n locations; Clone ID: LIB3828-005-Q1-K6-F11
atcagtggnaatagttgatgttattggatggatccaatcctgacaacttcaaactccagcaaagggagaaatcttggtttgctagctctgttaaatcaaggctacaatacttgggacctaatcctggtctgccccgcataagtgagcaccaaagtgaggaggaagttcgtttagatccttcaattggcccggttgctgctttttgtctgcttgttcttgatcctgatcaggttgattatttgaatttgaagaataatgagagagttaagtttgtatctacacttgatatgaatggagtgaaaaactggacatcagagagaatcaacccttgattttgttttcagtttctaaagccatgaggtggacacacaatggcatatggttgatgtggnaataacatattataatcttttatacatcaattttcgctggttgtatgtatgtattttagattccataaataaaatatagtttcttcttgnatcatgtaataagggcgcatgactacaattt

SEQ ID NO: 9220 - DNA, 63 bp, Gossypium hirsutum
  Clone ID: LIB3828-005-Q1-K6-F12
gcgagcggccgccccttaaaacaaaaaagggaaagcgaggtaagaaagacacgaagagaaagc

SEQ ID NO: 9221 - DNA, 588 bp, Gossypium hirsutum
  unsure (1)..(588): unsure at all n locations; Clone ID: LIB3828-005-Q1-K6-F7
ctaccgcggnaanatcaaaaaaggggttcccctttaagcataaatcaaacttataaaaaaaaaacacggatccattttggataaataagattcatgctctacttcttactactgattatcacgaccttgaacagacactagatacactcaatataaaatcattagcaacagaaaaagaactctctttattgacattgacagaagatgaacagggaaatatcgattccgaggatcgagtcaaaattttgaaatttttattcaatatagttataactaatcccaacaatcaaacaattagaaaaaaatctattggaataaaagaaataagtaaaaaagttcctcgatggtcatacaaattaatcgacgatttagaacaacaggagggagaaaacgaggaaaatgtaacagcagagcatgaaattcgttcaagaaaatccaagcgcgtcgtgatttttactaataaccaggcaaacgccgatacttatactaataccaaggatgctaatgatcctgatcaaacagacgaagtggctttgatacgctattcgcaacaatcggattttcggcgcgacataataaagggttcca

SEQ ID NO: 9222 - DNA, 571 bp, Gossypium hirsutum
  unsure (1)..(571): unsure at all n locations; Clone ID: LIB3828-005-Q1-K6-F8
aaagaaaatggttctgctanagaaatttgggaagatgtagtggccggactcaaccggaacgtggccttggccggctgaggaagatcacaaccaccccacccttgtccaccaaagatgaggcttcatcaatggcgatgccgacgagtccgacgacacctgggacaccgtcgacgccggtgtcggctcgtagggacaacgtgtggaggagcgtgttcaatccaggtagcaaccttgcaaccaaaggtattggcgctgaagttttcgacaagcctcaacctaactctcctactgtttatgactggctttacagcggggagacccggagcaagcatcaccgctgattgggcgatggctgacggcggcggagggtagcaaaaccactagcagaaggttgctgctactgaaggagcaggatttgcatgtaaatatantatatcgttctttttaaaagtttttcaatgggtcaattaagtagtagtagtagtaagtaagatgtttaaaagagtaagcggcagcgcagggtggtcgatgaccttatgtcattcaagattccggccgtgagcggcggcag

SEQ ID NO: 9223 - DNA, 602 bp, Gossypium hirsutum
  unsure (1)..(602): unsure at all n locations; Clone ID: LIB3828-005-Q1-K6-F9
cggncgcgtgggataattttgtgtataagctgatccataacaagattgagcaactacgcgactccaagacgattcggctgtaataaaaaaggaagacattttaactagatacctccaagtgaaggacactgacccaaatacttgagagatacaattattaacttcacaggtgctgngaaaagacacaacagcgtccactctgtcgtggtttatatacatgctttgcaaacatcctgatgttcaagaaaaggttgccgtggaagtgaaggaagcaacaaaatcaatggaggttaaagatgttgatgaattcgctgctagcctgagagaagaggctttagaaaaaatgcactatcttcatgcagctataactgaaactataaggctctacccggcagttcctatggatggaaagatatgtttctctgatgatactctgccagatggttttagtgtgaggaaagatgatttgattgtttatcaaccttatgcaatgggtagaatgaagttcatttggggtgatgatgcagaggagttcagacccgagagatggctcgacaagaacggcatgttccgatcagaaagccctttcaagtttacagctt

SEQ ID NO: 9224 - DNA, 522 bp, Gossypium hirsutum
  Clone ID: LIB3828-005-Q1-K6-G10
ctcggaatggaagtcgataggatttatgccctctaatctctggaatcgctagcttttgttaatggtaaaaatgggaagtatctggataggaaatgagcacccaatgtggcaaatgcggaagataagattaaataaggataataactttcagcatctgcctgttagtatatgcacccggcaaaccctgcattcatggccatggatcacgaggtatgagcaattcgtacaactaatccaggacttcttagttaagaagtaaggaagaaaatatgcttatttgttgtatgtcctgtcaagtttgttgaaaccatatgttagttctttggtggctaatggcatgagtttccatccttaacagcgtatcgttctcacttgcatacgatatcagagcttgaatacgactcgacatttcttggcagccaagtctggttaaacactgtaatcaattgtcagattcaaaccattcatatgtgtttcaactctctccaaagtgaccaatatctattataaacccctggcctt

SEQ ID NO: 9225 - DNA, 697 bp, Gossypium hirsutum
  unsure (1)..(697): unsure at all n locations; Clone ID: LIB3828-005-Q1-K6-G11
gccgatggccttatcgatgtcgttcaaggatcaactgccgttaccgtttctaactgccacttcagtgaccnnnnnnnnnnnnnnnnnnnnnnnnnnnnnnnnnnnnnnnnnnnnnnnnnnnnnnnnnnnnnnnnnnnnnnnnnnnnnnnnnnnnnnnnnnnnnnnnnnnnnnnnnnnnnnnnnnnnnnnnnnnnnnnnnnnnnnnnnnnnnnnnnnnnnnnnnnnnnnnnnnnnnnnnnnnngngnnnnnnnnnnnnnnnccataacgatgtgatgttgtttggagcaagcgactcttacagtgccgacaagaagatgcaggtcactgttgctttgaaccacttcggtaaaggattggtagagaggatgcctaggtgccgatttggttttattcatgtcgtcaacaatgactacaatcattggttcctgtatgccattggcggcaccagcaaccctacaattatcagccaggggaaataggtattcagcgccaggctttggggctaaagaggtgacctgtaggggcctcttaaagccgggacagtggaagaattggaattgggtatcacaaggtgnaccacttcgagaacggtgccttttttacaccatcaggtaatccaagtgccagcaagcaatttggcgccgacaaaatgattcctttncaaacctggnntcaaatggtccccgnagctcacaa

SEQ ID NO: 9226 - DNA, 270 bp, Gossypium hirsutum
  Clone ID: LIB3828-005-Q1-K6-G12
aaaaaagattaaagaaccacaaaggactcctcgcgtctatcttgaatccgagacttggattccgagttccggcattccctatagtcccgacatggtccttggagtctaaacagcttattatcaataccaacgccattagtatgcttattatcatatcattgttctaattatgtcatttttactaattagtaaacagtttttttaatcttttatctatctatgtatatatgttgaatttattggtttccgagttgttgtttccattcactt

SEQ ID NO: 9227 - DNA, 581 bp, Gossypium hirsutum
  Clone ID: LIB3828-005-Q1-K6-G7
cccagcgtccgctttctcacagcaagttcggggggatggattgcttcacactgcatgtggcactccaaattatgtttctccagaggtacttaaggataagggttatgatggcaaaatcatctgatatttggtcttgtggagttattctgtttgtacttatggctggttatttgccttttgatgagccaaaccttataaccttgtataacaaaattgggaaggccgatttcacttgtccgtcatggctttcacctggtgcaaagaaattcataaagcgtattcttgatccaaaccctcttacacgtataactatccatgatatcttaaacgatgaatggttcaagaaagggtacaaaccacccaaatttgaggaggaagaggatgtaaatcttgatgatgtagatgcagcttttaatgactcaagggaacactttgtaacagaaaggaaagagaagcccgagttcttgaatgcttttgagtttatctctaggtctcaaagctttagccttgacaagttgtttgagaagcctacgggtcatgtgaagcgagaaacccgttttgcttcccattgtcctcctaat

SEQ ID NO: 9228 - DNA, 522 bp, Gossypium hirsutum
  Clone ID: LIB3828-005-Q1-K6-G8
cgaaagaaaagtgattggccaccatgtttcgctcaatcaactttatagccatgctggtgttccttaattttagtcgggatattacagaaactgcagcagcatcaccattgtgcgatgtggttatcttttacttaagcccctgcgagggcttcataaaaggcggagccgatccggcaccggaatgttgtgttggtgctaaacgtcttattaacgaactaaaggccaaagaagataggatagaactatgcctgtgcttgaaagcaatattgccactacttgggccatttgaccctaatcgagtgcctcttcttggccagaaatgtggtatcaagaatttctttcctcccatcacccccgctactgattgttccaagatatgaagagagagctgggaaatgtgaaaagcaagagtatggagaatgaataaaaaacccctaatgatggatttcataaaattatgtataaatcaaccccttgtaatttgattccactaaataaaatatcaacttatttttaactttc

SEQ ID NO: 9229 - DNA, 585 bp, Gossypium hirsutum
  unsure (1)..(585): unsure at all n locations; Clone ID: LIB3828-005-Q1-K6-G9
ctttgccaaaaaacagggagtggagttggtggacaatgaatattttattacgngaagataacgtggggatgcttaagttggcaaaagaggcaaactcgatcctgtttgattaccgtatcccaacgattggcacctgtggtgcgggggcagccgccatggaaagtcctttgcagatgaacgggctccccatcagcgtctacgccccagagacggttggctgcgtggtggttgacaaggagggtcggtgcgctgccgccacctccacaggtgggctcatgaacaagatgaccggaaggattggtgactccccgcttattggctccggaacctacgcttgtgacttgtgtggggtgtcatgcactggggaaggagaagcaatcatccgaagcaccttggcgagggaagtaggcgcagtgatggagtacaaaggattgaacctgcatgaggctgtggattttgtgatcaacaataggttggatgaaggcaaagctgggctgattgctgtttcaaagaacggtgaggttgcttgtgggtttaacaccaccgggatgttcaggggctgtgccactgaggatgggttcatgg

SEQ ID NO: 9230 - DNA, 745 bp, Gossypium hirsutum
  unsure (1)..(745): unsure at all n locations; Clone ID: LIB3828-005-Q1-K6-H10
aaaaaaaagagaggcgtctgtaataaatctgcatcttattctgtcggtgtttttatctgtacgcttcatnnnnnnnnnnnnnnnnnnnnnnnnnnnnnnnnnnnnnnnnnnnnnnnnnnnnnnnnnnnnnnnnnnnnnnnnnnnnnnnnnnnnnnnnnnnnnnnnnnnnnnnnnnnnnnnnnnnnnnnnnnnnnnnnnnnnnnnnnnnnnnnnnnnnnnnnnnnnnnnnnnnngngnnnnnnnnnnnnnnnnnnttcgggtgttaggttgctccaggaacagcccaatgatgaccccaaaaacatggacgctattcctcccattgatgcactcaaccctaccgagttgaatggacccggtgttggcattcacgaagatcatgttgtcccaaaggtgctgaaattggtactcttggttttggttttgaaggtggtcctgataaatgttgttcttctggatgttccggtaattgtaatcctggtggtttcgttctaccatttcctcaaattccagaaatcccaagaattccagaaatcccacaaatcccacagatcccacaaatcccacaaattccactaatcccacagatcccacaagtcccacagatcccacaagtcccaaaaatcccactaatgccaggacagtcgggatgtgagagtggagagtgttgccgtcagggttgtggtgggacttgtgctgagtgtggtcagcccaggtgcgcatcaggatgttgccaggcttgaaa

SEQ ID NO: 9231 - DNA, 494 bp, Gossypium hirsutum
  unsure (1)..(494): unsure at all n locations; Clone ID: LIB3828-005-Q1-K6-H11
agcatttgatgaacaagacttgcagtactataccaggctgtttgtggaggacataaagcggaatccgacgaatgtagagttatttgatatcgcccaatctaacagtgagcatagcaggcattggtttttcacagggnaagattgttattgatggacagcccatggataggaccctcatgcaaattgtcaagagcactttgaaagcaaacccaaataattctgtcattggttttaaggataattcgagtgcaataaaagggtttcttgcataccgattactaccagttaagcctggaactgcctgcctactaaatgaaacaactcgtgaaattgatgtcttgtttacagctgaaacacataacttccctgtgcagtggcaccctaccctggtgcagagacaggtgcaggtggccgcattagggatacacatgccactggaagaggatcatttgttgttgcatccacagctggttacacaactgggnaatcttaat

SEQ ID NO: 9232 - DNA, 511 bp, Gossypium hirsutum
  unsure (1)..(511): unsure at all n locations; Clone ID: LIB3828-005-Q1-K6-H12
gcaagacaccattggcattcctgcttgtttttcatcaggtgagaagcctgctgatgatcccacagccgtaaccaggtccggccagagtgttttcatgtctgttttccgaacaaagattgccgaccagtgtcgtttagtaactatcacttggtgcaaggacctattgctccatggtctctcggtatcagttgaaggccccgggggagagagtcagtatgggtgtaaagtcgagcttaagccatggtgtttttggagaaagcaaggatccaaacgttttgtgatcgatggtaaacctgttgacgtgttttgggacctcaagctgctaaatcaatggcgaaaccgaacccatctccgagtactatgttgctgttgtttgcgataaagaattgttttactcgttggggatctaaagaaagaagcttataggaaaactggttgcaggcctgcacttattgatcccattttggtttcaagaaaaaagcatatatttggcaagaaanaagttctcaac

SEQ ID NO: 9233 - DNA, 572 bp, Gossypium hirsutum
  unsure (1)..(572): unsure at all n locations; Clone ID: LIB3828-005-Q1-K6-H7
cggnagcgtgggtttggcttcctccatatcttcttcttcttctttcaacctttcttctgcatatatatatatagaaaaaatcccaagaaagagaaaggtaaaagatcaagaaatagataatgggtgcttgtgctactaaaccaaagttttgaaagatgaaaactcaccggccaccgtccccgcaccagaaccggtcaaggaagaatccgttcagccggttgaaacaaaagacgaaccggtggtcgtgatggaagctgatgaaaccaagccgaattctcttggttcattgcttgataatgaagaaaagagcaatgaaactaaggtggaggcaataactgttgaagaaccaaagattaaagaagaagccgccattgttgaggcgccaaagaaagtggaagaagccattgttgaggctccaaaggaggccccaaagaaagcagatgtcattgttgaggcaaaaacaatggttgaagctgaaaagcaaaagaaaaaggaagaagaagaagaaggagatgaggttattgttttggctgaaaagaaaatgaagaaactaagaaagaagaacccattgt

SEQ ID NO: 9234 - DNA, 597 bp, Gossypium hirsutum
  Clone ID: LIB3828-005-Q1-K6-H8
cccacgcgtacggtctagattccaacaaacgcgaggacaagctgctgacgtgctcataacctatctctctcgtcccactgaacctttgatctgttgctgaaataaaatcaataaatgacaacttctacaaaataaggcattcactggaactttggacaagtgcaaggcttgcgacaagactgtccatgtggtcgatatgatgacactagacagagtgccataccataaaactagcttcaaatgcagccattgcaagggtaaccttgatatgaccagcttattcttggatggcatggaatactgtattgcaagcctcattttgagcaactgcataaggaatctaggaatttcaacaagaatcttcaaacagggaccagaccgactgaactgaataggactcccaacaaactttaatccctgtttcctggaaccctaaacaagtgtacatcttgcgagaaaacaatgtacccgtaggaaaaggttactatagaaagtgaatgtttgcacaagacatgttataggcgcgcccaccgtggctgcccactgacacactcatcatatgctgctctacacagtgacttatattgcaagcaccat

SEQ ID NO: 9235 - DNA, 591 bp, Gossypium hirsutum
  Clone ID: LIB3828-005-Q1-K6-H9
cggccgcgtgggttctcatacaaaatttccatgtaatacactgttttttttttctgggttttttctttcaatttgggagagttttacgaaagtttcgttcttcgtttttcatttttggttctagaatgatcttttttttcccagaatttgaagcaaattttttctactttgtgtttaatttgattttcataaatgaaatctgcgtgcatttttcttgttttgttattttcttgttcatgtttctgattttcatttttgttgttaaaaagattactaatgccatctttttttcattttggtccctgagaattgagatccttgtttgaaaactcagtgcttttaggtctggttttaaattttaaaatggagggtgacagtgatacatactcagggcttggcactggtgaaatagacagcaaggtggtgcagacatttcaaaagagttttgtgcaggtgcagaacatattagaccagaacaggttgctgatcaatgagataaaccagaatcatgagtccaagatcccacacaacttgaccaggaatgttggtctaattagggagcttaataacaacataaggaaagtggttgat

SEQ ID NO: 9236 - DNA, 452 bp, Gossypium hirsutum
  Clone ID: LIB3828-006-Q1-K6-A10
ttggattgcgacaatggaggcagagaataaacattcatcatccgtttctaatgtgggagcttgggcaatgaacgttattagctccgtcgggttaatcatggccaacaagcaactcatgtcccctaccggtcatgccttcgcttttgcgacaacattaactgggttccacttttgtacaactgccttaatcggtttggtgtcaaatgccactggttacacaacataaaaagaatgttcctttgtgggagcttctttggttctcggttgttgccaatacttcaattaccgcgatgaacttgagcctcatgttgaattcggttggattttatcagatttcaaagctaagtatgattcctgttgtttgttttctggaatggctccttcatggtaaacattactcgagtaaagtcaagatggcagtggtggtggtggtgattggtgtgggttgtttg

SEQ ID NO: 9237 - DNA, 445 bp, Gossypium hirsutum
  unsure (1)..(445): unsure at all n locations; Clone ID: LIB3828-006-Q1-K6-A11
gtggtttaatggacattgcattcgatttcattaagaagaaagtgggatcactactgagtccaattacccttaccaagctaatgatggaagttgcgatgctgccaaggtgaattctccggcagtggctatcgatgggcacgagaatgtgccagctaacgacgaggatgctctgcttaaagctgttgcaaaccagccggtttcagtggctattgatgctgggagtatggatttccagttctactccgagggggtattcacgggagaagtgggacagagctgaaccatggggtagcagcagtggggtatggaacaaccttggatggaaccaatactggatagtgaagaatcatgggagcggaatggggtgagaaagttacataaggatggnaacgtgggaatcagaaaacaaacaagnactgtgtggtataagcaatggagcttcata

SEQ ID NO: 9238 - DNA, 526 bp, Gossypium hirsutum
  unsure (1)..(526): unsure at all n locations; Clone ID: LIB3828-006-Q1-K6-A12
ggaaagtttgacaatttattaagcatactacctagcggtgtcaaccctgcccttcagcaaatttgtgggaacactgatcaccccgtcgaatgtataatagcaactatgccattcctagatgagaaaactcctattgagcctctttctgtccttaaagctgggattgaagcaatggataaccagaccaaagatgcattagctgaggttacaaagctctcaatggaccctactacacctaagaatgttgttcccatccttcaaacatgcatcgacgtctacaataacattcttaacagtgatcagaaatcctttgaagctatctccaatcgtaaccttgtccagttgagcacagagctaggcgctaatgtgngaaaacatactaggctgtgacaatgcattcaaacaggctaagctcgaatcgccgatgaaaaaagatggatgcaatgcttggnaaaaatcattagcaacaccttggaccattggnntctcgacatggtccactntttaaaggggaacaacttattaa

SEQ ID NO: 9239 - DNA, 591 bp, Gossypium hirsutum
  Clone ID: LIB3828-006-Q1-K6-A7
ccctacgatggctttgggggttcaacagttgaagaaaggatagatcccaagattgtttatgaggatcttgatgagattcatcagtttctcgatcggttttacttgtcacggattggaatccgcatgcttattgggcagcacgtcgagctgcataaaccaaatcctgctccacatgttgtgggctatatacatacaaaaatgtctccagtggaggtggcaaaaaatgctagcgaggctgcacgtgctatttgtttgcgtgaatatggaagtgcacctgatattaatatctacggtgatcctagttttacatttccttacgttccaacacacttgcaacttatggtattcgagctggtcaaaaattccctgcgtgctgtccaagagcgctttatgtattcagataaagttgcaccacctgttcgaataatagttgccgagggaatcgaggatgtaactataaagatctcagatgaggggggtggcataaaaagaagtggtcttcccaaaattttcacttacctttatagcactgccaaaaaccccttggatgagcatacagatcttggaacagatgatagaataacaatggca

SEQ ID NO: 9240 - DNA, 572 bp, Gossypium hirsutum
  Clone ID: LIB3828-006-Q1-K6-A8
cccggtcgacccggtccgggctcctcaaaaggtcataattaccgtactcggcttgccaaatgcacaaaagtagaggcaagctccgattgctcttaatggagtctcctatgtcgaaccaccactccataaaacttgcagaaactatggcgtagccgaaaaggttttcaagtatgataccattcccgatgagcctccaagtgacaacactaaggtaactttggcacctattgtcctcaacatgacacacagaaactttgtggaaatcatcttcgagaatcacgagaccgccattcaatcctaccacttgtctggctactcattctttgctgtgggcatggacgttgggaaatggagccccgagaagaggatgaactacaatcttcttgacgccgtgagcagacagaccatacaggtattccccaactcctggtcagcaatcctattgacattcgacaactgcgggatgtggaacctgaggtcggagatatgggacaggcattaccttgggcaacagctttatgctagtgttatttcccctaaccgatccctcaaggatgagtacaacttaccgg

SEQ ID NO: 9241 - DNA, 588 bp, Gossypium hirsutum
  Clone ID: LIB3828-006-Q1-K6-A9
cttttctcccggttagtctctcatcaaactttacatttcaacgcttgtggttttgagtttttgacccatctcccacttttcttttccaagttccaaaaacatcttttacaattccattcgatttctctggaattcaacacaacagggaattcctcttttcacctgagcttgtttcgcgatctgggtatgtttctgatcaagcaaaaagttggaatttgaagaagaattaaattcaggtgatgaaaaatgggggaaactgaaaatggatattcacccgccacccacactgcaatgaacgcagtgcaagccatagggaaaggattcgatgttaacttcgacactaggttgttgtattgtaaaggtgtaacaggttctaagatagttgaaatcgatgagggacatggtagggatatttacttatatgatcaaactgttctccccaatgtttctagagatatcaagaactctcaagagcctattggccgtctcagttctggggttttcaattttaatgagatggtggaatattttaataaaaacgctaatgtgtccggtagttttccccttggtagtttcaattctgctttt

SEQ ID NO: 9242 - DNA, 381 bp, Gossypium hirsutum
  unsure (1)..(381): unsure at all n locations; Clone ID: LIB3828-006-Q1-K6-B1
gctgaatttctcaaagntgtgggctgcttcatgtcttgcatcttgttgtgcggcatgtgcctgcgatgcatgccgcacggtggtttcggggattagtcggagatctgcaaggatcgcttattgtggactttttgctctttctcttgttgtttcgtggatccttcgtgaggttgctgccccgctgatggagaagctcccttggatcaaccatttccataaaacacccgacagggaatggtttgaaacggatgcagtgctgcgggttagcttgggaaactttctgttctttactatcctagctntctcaatggttggtgtgaaaaaccagagggatcctcgtgatgctgtgcaccatggtggatggatgatgaaaattatctg

SEQ ID NO: 9243 - DNA, 506 bp, Gossypium hirsutum
  Clone ID: LIB3828-006-Q1-K6-B10
gttgtaaaagatggcagatggtgaggatattcagccacttgtttgcgacaatggaactggaatggtgaaggccggatttgccggtgacgatgctccgagagccgtgttccctagcattgttggccggcctcgtcacaccggtgtgatggttggtatgggccaaaaagagcatatgttggtgatgaggctcaatctaaaagaggtattttgacattgaaatacccaattgagcacggtattgtgaacaattgggatgatatggaaaagatttggcatcatacattttacaacgagcttcgtgttgccccagaagagcacccggttttacttaccgaagctccccttaacccgaaagctaaccgtgagaagatgactcaaatcatgttcgagacctttaattcacctgctatgtatgttgccatccaggctgtgctctctctgtatgctagtggtcgtacaaccggtattgtgttggattcgggaagaggtgttagccacacagtccc

SEQ ID NO: 9244 - DNA, 272 bp, Gossypium hirsutum
  unsure (1)..(272): unsure at all n locations; Clone ID: LIB3828-006-Q1-K6-B11
ccttactatatcgatctcttccagcttttgtcagtaccgacatgcccagctcgagtaagttttgtcacctcgcaatgcgaccgtttcaatctcgaagatggaagaagccagccaaccggccaacttgtgaaccttaatgtgtctggtactcccacaaaactttccttcctcttaatgtagtgctcttagtccccttttcctttttggtaaaaaatgtaagcatgtccctaatgcaaatatatactcttcaccttataatatatanttcaatg

SEQ ID NO: 9245 - DNA, 80 bp, Gossypium hirsutum
  Clone ID: LIB3828-006-Q1-K6-B12
ccacgcgtccggccacgcgtccgattgtctgtgtatttgttgctaggaaatcgatggatgacttttctcatcatttgggc

SEQ ID NO: 9246 - DNA, 584 bp, Gossypium hirsutum
  unsure (1)..(584): unsure at all n locations; Clone ID: LIB3828-006-Q1-K6-B7
cagaaaggnttttttcttcanagcctaaatgagaattttcatcttcccaaaggacattcttagatgtccatttttngagaaacattaacgagccaactaacttttccttctcgtctgccttgccttttcccatgccggtacgaggagccaaaggaccaatatttgaagatggacccaatttcgacatggcattcaggcttttccatggacgtgacggagtagttccgctatctggacaatcatccttgcgtattgagaaagctgagaccgaaacagccccaccaaagttcaatcctttggctgcaaaggcagccaccattagtctctcatcctttggaccgggagggcctttcagttttgatgcattttctaataagtggaacaatcagaaaggaaaagggaaaggaaaatcgtccaagaaagagtcttcttcacagggtggaaaatcgaatcacgaagctatgggcaatgaatggctgcaaaacgggaactgtccgattgcaaagtcgtatagggcggtcagcggtgttttgccactagttgcgaaggttttgcagccgccaccggggatgaaatacaggtgc

SEQ ID NO: 9247 - DNA, 582 bp, Gossypium hirsutum
  Clone ID: LIB3828-006-Q1-K6-B8
ctttgtgtcgagcgggagcaaaagtcgaaaccggaagtgacctgttgttctggcctgaaaatgtgttgaaactggaccccatgcttgtgtgagacctttaagaagagtgcttctctgggtgtcactttgaatgtcaccaaagccatgactttgcctgctgcttgcaaagtctctgctccttctgccactcaatgtgcattgtctctcaatcctactggtgcaccaggtatggcaccgtcagcaatagcaggtgcgccggcagcattctcaggaggagcaaatgaggcagcaccggcaccatctcccggcagctcaggctctcaagttgtttctgcttcaatgggatctcttatcttaggcttcataattatgttaacctctatgtactaggctaccctctcgtgttgatttacttccccttttgtattgatgatgaaggtggagtaggtggcattgattttgtgagctttggaccatccttgtgagcatattagattatatattagtctgatatttgcaactcgtattctatactaatataccataatgtatgtcgaatttttctatgcttaaatttatgta

SEQ ID NO: 9248 - DNA, 453 bp, Gossypium hirsutum
  Clone ID: LIB3828-006-Q1-K6-B9
gggaaccctaaagcagagcagaagcgaaagattaagataaaaggatgaaatacctgaagcagcaggagaagctgaagaagatcatcagtgcatcaggatatcaagaaaagttccatctcacattcaagaagagaatgcaacaaagctggcaaaacttctccaagaattcgagtttttcaagaaagaaagtgatcgtttagaatctgaatcccagcatcaaaagtaaggttaacccctcccttttgagtttcttgattcgaatgataatttggatggcattattaacccctcccttttgagtttcttgattcgatgacaatttggatggcattacacttttctttttgatgattgttttgttactgtctaaacctcaccaatacttttgtttatttttaacatttgatgcttgccatgtttgttatacaagagtttacccagttagttaatagt

SEQ ID NO: 9249 - DNA, 676 bp, Gossypium hirsutum
  unsure (1)..(676): unsure at all n locations; Clone ID: LIB3828-006-Q1-K6-C10
cccagcgtccggttcatttgcttgccgctgattgttcattttagaaaagaaatggggtatgcctaaagtnnnnnnnnnnnnnnnnnnnnnnnnnnnnnnnnnnnnnnnnnnnnnnnnnnnnnnnnnnnnnnnnnnnnnnnnnnnnnnnnnnnnnnnnnnnnnnnnnnnnnnnnnnnnnnnnnnnnnnngnnnnnnggnnnnnnnnnnnnnttatccggtcggagcgaggattacaagaagccattgaaaggcgaggaggaagctcagaggtctcatcgctgagaagaattgtgctccgatcatgctccgtttagcgtggcactcagctggaacttttgattggaagaccaataccggaggtcctttcggtaccgtgaagcatcccgctgagcttgcacacaaggctaacaccggtctcgatattgccatcaatcttctcgagccgatcaaagagcagcttcctatcatctcttacgctgacttttatcagcttgccggcgtcgtcgctgttgaggtcaccggtggacctgaaattccgttccatcccggaagaccggacaaggaggaagtaccacctgagggccgtcttcctagtactgacaagggagcggatcatttaagggaggtctttattaatcaaatgggttttaccgataaggacatttgttgccctttc

SEQ ID NO: 9250 - DNA, 473 bp, Gossypium hirsutum
  unsure (1)..(473): unsure at all n locations; Clone ID: LIB3828-006-Q1-K6-C11
gttttcaggttccactcaagagagggagggggggagaggcctgcttaccgggccagggctcgcttaacccaatcaagaccagagacactacaacccgcctaaataccgattcgttgttcgatttagcaacaaagatatcaccggcaaaataatttctgctaatattactggtgatatgattcttgcctcggcttcctcgcatgagcttcctcgttatggacttgaagtcggtcttacaaactatgccgctgcttattgcactggattacttttggggcgccgtgtccttaagttgcttgaaatggacgatgaatatcaaggaaatgtggaggctaccggagaggatttctcagttgagccaactgacacaagnaggcctttccgagctctccttggagtaggactgatcaggacaaccactggaaacaatggtttttgggtgcactaaaggggnagctttggatgccggtttg

SEQ ID NO: 9251 - DNA, 774 bp, Gossypium hirsutum
  unsure (1)..(774): unsure at all n locations; Clone ID: LIB3828-006-Q1-K6-C12
ctttttcaagnaggaaggtaaattttgtcatcatgttcatcatggggttatcaatctggtcatcatggtgcagnnnnnnnnnnnnnnnnnnnnnnnnnnnnnnnnnnnnnnnnnnnnnnnnnnnnnnnnnnnnnnnnnnnnnnnnnnnnnnnnnnnnnnnnnnnnnnnnnnnnnnnnnnnnnnnnnnnnnnnnnnnnnnnnnnnnnnnnnnnnnnnnnnnnnnnnnnnnnnnnnnnnnnnnnnnnnnnnnnnnnnnnnnnnnnnnnnnnnnnnnnnnnnnnnnngnnnnnnnnnngngnnnnnnnnnnnnnnnnnnnnaattatcaattcaagagtggttacccgtccgcaatacaggngcgatgacaatgcagtagcccataacagaggaggattggaagaggaagtggtatttaaattgttatgccaagctgacaaggttggtagtttgatagagaaaggtggttccgtggtgtgggctatgcagaatgacactggtgcacaatcaagattgctgatacttctcatgattcaaatgagcggattgtagtgatatctgcctgagaggcatgaggacttaattgtctttttaaattattttgctttatagtctggagaactgcaatattcttacttattgctaattgaaaagctttttgtatttggttgtttgtctgtgaaatctggaacattttgcttgatttgtagatattattaccatatatgttgaaatcatgaatttgatggtggatgaccttttcttcgagacaataa

SEQ ID NO: 9252 - DNA, 434 bp, Gossypium hirsutum
  unsure (1)..(434): unsure at all n locations; Clone ID: LIB3828-006-Q1-K6-C7
atttttccgatggagaattactaggctttatttagaactattagaagatgaaaaaaataaaaagaaaaaagattaaaaacacaagagatctcatcannttgatgaaaaatgatataacatcatgagcagtcactcttcgaattttttttaattaaaaaaaattgtaaggctgattgctcatgatgctatacaagatctttctttctttggagtatttcgtcgatcatgttggtatttcgtcgatcatgttgtgtgcttagctcaagccttgtgatttgtaagaactatctctctctttctaatttactactaattaagacataagcttagctgctaaactatttgcgtttacttatgtatgtatatccactagtatgaatttgactgaaattaccagatgtaattttgaacgtcaattcatcgaatattatatt

SEQ ID NO: 9253 - DNA, 596 bp, Gossypium hirsutum
  unsure (1)..(596): unsure at all n locations; Clone ID: LIB3828-006-Q1-K6-C8
gtgatctccagntggtaactacatatcagctaagggcaagaaagtagtagtcatcggtggaggtgacactggtacagattgcattgggacatctatccggcatggatgtagcagcattgtaaatcttgagttgcttcctcagccaccgcagacaagagctcctggcaatccttggccacagtggcctcgcatattccgtgtagactatgggcaccaagaagctgctaccaaatttggaaaagacccaagatcctatgaggttttgactaagaggtttataggagatgataatggaactgtgaaaggacttgaggtggttcgtgtgcgttgggagaaggatgccagtgggaggttccaattcaaggaagttgagggctcagaggaaataatcgaggctgaccttgtcctgctagccatgggattccttggccctgagtcgacactggcagaaaaattaggtgtggagcaagacaatcgatcaaacttgaaggcagagtatggccgcttcacgaccaatgtggatggagtctttgcagctggagattgtcgacgtggtcagtcattagtcgtgtgggcaatctcggaaggaaggcaag

SEQ ID NO: 9254 - DNA, 598 bp, Gossypium hirsutum
  unsure (1)..(598): unsure at all n locations; Clone ID: LIB3828-006-Q1-K6-C9
gnaaatgcagattctgtgttcgttcaggtttgttgaaagataatctaataaagcctactgttccatggagcgtatctaagttcctcctgttcataacaaagggctttatgtcagccctcctgcttcagtttattaccagctttttttagatcttctgctaagattcttttaatgtcattcgacattgaagtccacaaaagactttctgtagtgtcttcagctattaatgcttgctctagaagctctcctctgtttgcatacaggatattttgagaatttatgatctgctttttgcagttaaatcattacaatatcaagattttgttcatctccaaggagtgataaatgttctaatttgctttttggatgtatcaaaaatcaagttattatatttctcaaactgggctatattacagattgaaaatttcggttttgaggggttaaatgtgtattctgaaagggaatgcatcatactttcaataaaagatagaagatccggttgtctaaattcttttggtgaatattaacttcatggttattttgttccttttcttcagacatatattcccaagacattggatcatgtcaagaatgtcga

SEQ ID NO: 9255 - DNA, 655 bp, Gossypium hirsutum
  unsure (1)..(655): unsure at all n locations; Clone ID: LIB3828-006-Q1-K6-D10
cggccgcgtgggcttcttgctgggttctttgtgtatttcattgtcattttcttttcatcaccccctgtcaatgtnnnnnnnnnnnnnnnnnnnnnnnnnnnnnnnnnnnnnnnnnnnnnnnnnnnnnnnnnnnnnnnnnnnnnnnnnnnnnnnnnnnnnnnnnnnnnnnnnnnnnnnnnnnnnnnnnnnnnnnnnnnnnnnnnnnnnnnnnnnnnnnnnnnnnnnnnnnnnnnnnnnnnnnnnnnnnnnnnnnnnnnnnnnnnaatcacaactccgaagatatcaggcatttgaaggtaagcttggtctctcatctttagggaacccatcttagtctatacacatttcagaaagaagaaagttttgtaaaattagggtttctttgcttgccattgccacaatatggtataaacaaatagctgaatctttgctaaaaacttgtttttctttgataaccatgaaccaaaaaaaaaaaaaaaacttttgaatgagtcagtcaaaatttgatcgtgtatatcttattccatccatggcgatgtagttcatggnaagaaaaaatatatattttacgtttcttgatacatccatacatcagcgcgcgcacagacatctccatatattctttccacttctgtatataaaaatttaacttctt

SEQ ID NO: 9256 - DNA, 513 bp, Gossypium hirsutum
  Clone ID: LIB3828-006-Q1-K6-D11
ttcgctgttttcccattccccaccgaatcgcttacctccctcattacattgattgcgcgtaatagggcattacgccccctcagcgccgattacccattcaacgtctttcccttttttctcttccgttttctgccctcgtcctcaacgctccgattctttcatgtttccttgcacagttggatgcttttcattcgtgtctagacactcatcgtcttctctgagaatcgatttcatttgtcagatggcattgcgaggagtttggcaacttaaaaattgattgtaagctattgtgattggggaggtagtagtaggggcatcaggcgcagtctcctaactacaatgctaccctgaaactaattttccccaatattcaacaaatcgattatgaggtatttgcttagaaattttggtaggttctggactgttgtagttgaaatgttcataaatttgcaatcatgcgtgtagtatgctaaccggtaaccatctccagtcccttgttgtctggaagcttgt

SEQ ID NO: 9257 - DNA, 74 bp, Gossypium hirsutum
  Clone ID: LIB3828-006-Q1-K6-D12
ggccgccctttttttttttttttttttttttttttttttttttttttttttttttttttttttttccctaaaag

SEQ ID NO: 9258 - DNA, 103 bp, Gossypium hirsutum
  Clone ID: LIB3828-006-Q1-K6-D7
gtccgaaaaaaaaaaaaaaaaaaaaaaaaagaaaaaacgataataaaagaaaaaaaaaaaaaaaaaaaaaaacatacaaaaaaaataaaatataaaataaaag

SEQ ID NO: 9259 - DNA, 288 bp, Gossypium hirsutum
  Clone ID: LIB3828-006-Q1-K6-D8
ccaagcgtccgctttttgtaagataattaaatggttattaaaaaaacacggtatacccgcaacaaccctttcaatatccacttcaaaaaaaatgaaaaagtgttgtttctcccctattacgcagtgagggaaaaaaacaaactatctgttagacatcgacccaccaaacaaagttgatgaccgtaacccatcgctcattcaacctcttgaaacgcttcctcctcatcgtccaataatctcaagttctccaaagcatcttccatcacaaccaccacactctgccaatcg

SEQ ID NO: 9260 - DNA, 602 bp, Gossypium hirsutum
  unsure (1)..(602): unsure at all n locations; Clone ID: LIB3828-006-Q1-K6-D9
attttgtaggaaattgcaaacagctgctngaggttccggccatagatataaagtaacaaaggatcgctgcaatttcatgtctgaactatgcaccaatcattgcagtagagctttgtcaagaacatttggttagtctcatttgaagctttttgcagtaatgttttgatattttaaatatatttcattatgtaagaatatgttgttctgaacttctcttttctgggttcgacacatgcgtccaaatttcaccaatgatggaacagcagataagattgtagccatgttttaaataagtcaaaccccataaccaaaagactcccaattattaggtgagaatgaaggggatgtgtgcatgaatgaacccccattaatggcgttgaaaattgaagtggcagtaattaaaatgggtgcaggataaatgcttttgacaattaacggaaccgacacggtgaagtgagacatctagatttcgtgatgttgatatcatcttaggaaataaaatgttgcttatatttatatatgtatatatataatatcacatcatctaagtaatttttaatttaatattataatttttgttatatataatacatatatcaaat

SEQ ID NO: 9261 - DNA, 645 bp, Gossypium hirsutum
  unsure (1)..(645): unsure at all n locations; Clone ID: LIB3828-006-Q1-K6-E10
ataacaatcaccggcggatccccattcaccagttattaaacgcaggtctcattcatttccggtgcgtttaatannnnnnnnnnnnnnnnnnnnnnnnnnnnnnnnnnnnnnnnnnnnnnnnnnnnnnnnnnnnnnnnnnnnnnnnnnnnnnnnnnnnnnnnnnnnnnnnnnnnnnnnnnnnnnnnnnnnnnnnnnnnnnnnnnnnnnnnnnnnnnnnnnnnnnnnnnnnnnnnnnnnnnnnnnnnnnnnnnnnnnnnnnnnnnnnnnnngnnnnnnnnnnggnnnnnnnnnnnnnnnnnaatccctttatacgccatggacatgaagaggtctccaccgccatcattgttgctgccgcctcaatgagcgccgtcatggccgcagatgcacctgctccttccccttccgcaggtggttctagccctagctcctctcccgctttcgccccagcagcaggcccggattccagcgtcgctgccgccactttgcctgttcttggatcattggttggggcttccattgtttctttgttttcttacatgctacatgtatgaaaaatcaacatgtgaacgaatattttattttattttttattttatttgtaagaaatatgtgatgaataatgaaaattgaatggagctttgg

SEQ ID NO: 9262 - DNA, 507 bp, Gossypium hirsutum
  Clone ID: LIB3828-006-Q1-K6-E11
aaactttacatcctcacattttcggtacctaaaacctcttttagggttatatgggtgtaaattctgaatctcctatgctcaatatagccccaaaagtacttaacattaaagatcactcggtgctccagctattcttctctcattagctgcacaaggggttttccggggattgaaggatacctaaaactcccttatatgctatcatcattggagactcgatgaatgttattttggaccctatacttatgttcgtacttcgtcttggtatcaaaggtgctggcattgctcatgtagtttctcagtatttaatttttctcatactcatttggagattagccggtaaaatcgagttgtgtccgccaaactttaaaaagctacaatttagtcgattccttaaaatggactatgatatctgtgtgctgtcaccacttcaggatttcacctattggttaaggtaatatctacaacatcctgtgtgaccgtcgcagcatcattagcagctcggca

SEQ ID NO: 9263 - DNA, 526 bp, Gossypium hirsutum
  unsure (1)..(526): unsure at all n locations; Clone ID: LIB3828-006-Q1-K6-E12
tctgattctaagaaagctatgtccgctgctaaccttgctgagcttgctcttattgatcccaagcgtgctaagaggatctgggcgaataggcaatccgctgctaggtcaaaggaaaggaagatgagatatatagccgagcttngagcggaaagtacagacacttcaaacagaagcaacatcactctctgcccagcttactctagtacagagagacaccaatggtttgactgctgaaaatagtgagttgaaactgcgcttgcaagcaatggagcaacaagttcacttgcaagacgcattaaatgatgcaatgaaagaggaaatccagcatctgaagatgctgactgttcatcctatgccgaatggtggaggaatgatgaactttgcatcttttggagctagtcagcagtactacccaaataaccatgccaagcatactcttctggcagcacagcagttccagcaacttcagcttcactcacanaagcatcagcatcagcatcagcatcagttttcaccaaatcaactg

SEQ ID NO: 9264 - DNA, 590 bp, Gossypium hirsutum
  Clone ID: LIB3828-006-Q1-K6-E7
ttccagtaaattcctagtgcccgactaccctccttcatttttttctcaaccttcacctccggcaccgatccacctctagtccgacaccaccgatcaacctccggtcctccacggctccacccatttcccccatttcccgtttcccttcttccacaaatccctaatcccttgcccgactgccctccttcctttttttctcaaccttcacctccggcaccaatccacctccggtccggaaccgatccacctccggtcctccacggctccacccatttccagaattagagatccggtttatctgaaactccaaccaaggtttcaccagcaacaccaagagtggctactaaactaggcagggcactggtcaaaacagagccgggttgaccctctcccatgcaaggtactcgccattaggttgatcgatccccgcgattgtctcttaactcaaagttgaccattgattggagatcactaaaggctgctttggcgtctgaaatggtttcgatatctagaaatcgtaaacacggggttggtaagggatgggaacggcaggctaaattgaacttggtcgaggaggatttaatgatagc

SEQ ID NO: 9265 - DNA, 596 bp, Gossypium hirsutum
  Clone ID: LIB3828-006-Q1-K6-E8
tcaatattcaagctcaagagaactacttcgggaaaatcaatggattcggcacctaacgttgtggtcgctaaggatggtagtgggaaatatgattgcatcacagaggccttagctgaagtcccgttgaatagttgcgatcgatttgttattcacattaaggctggtacttataaggaaaaaatcatcgtgaccaaggagatgactaatgttatgttccttggtgatggcccaactgagaccatcatcaccaactgcgttaattgctgtaaggataatgttaaaacattcaacactgcaactgttggtgtggatggggctggtttcatggccaagggcattgggttcgataactcagcaggacccgaaggtcatcaagcagtggcttttagggcatcctgtgataaggtcgtcatgtttaattgtcatttcactgggtaccaagacaccctttacgctcatagagacaaacaattttatagggattgtctcattagcgggacggtggacttcattttcgggaatgcggcgagtgtgttccaaaactgtcagatcgtcgtgaggaagccaggtgaaaaccaacacaacatggttacaga

SEQ ID NO: 9266 - DNA, 600 bp, Gossypium hirsutum
  unsure (1)..(600): unsure at all n locations; Clone ID: LIB3828-006-Q1-K6-E9
ctattggngagatttgagtctgcacctgttgaacatctgaatggaaattcggataacaaatggcccagcggtggccgtcaagatgaagcgaaacctcacagactcatgagacgtaacggcgnaaaatagatgatgcgtaggtgaccatcatggaagccgtaaagatctcgaaatgaaatgggaacttatacgtcagagagatgatgactagaatcgaggaggaaagagcgagggtgttcgagatcaagaaaatataaaaggcatgcttttgagaggcgtaaatggccctgcctgcgacgtgcccacattcactgtcttgccaaaccccgcccggtgggatgacacctgcttggaaggtggcggcggctatcagaccagccactaccaaaagaacgttgcgagcgtcgcttggagagtctcgcccttcttcgtactggaaatatttaaaccaactcctacctgtgctcgaagaagggctccccatttttctgatattgcagtaacagtattctctgagtttcattaccgattatttttgtttcattcaaggagttaaaaataaaaagatgagatctggacatagagttagataggagaaca

SEQ ID NO: 9267 - DNA, 753 bp, Gossypium hirsutum
  unsure (1)..(753): unsure at all n locations; Clone ID: LIB3828-006-Q1-K6-F11
cacatgatggaatttcaaaccccaatccctgtctcctttttgtcttgnnnnnnnnnnnnnnnnnnnnnnnnnnnnnnnnnnnnnnnnnnnnnnnnnnnnnnnnnnnnnnnnnnnnnnnnnnnnnnnnnnnnnnnnnnnnnnnnnnnnnnnnnnnnnnnnnnnnnnnnnnnnnnnnnnnnnnnnnnnnnnnnnnnnnnnnnnnnnnnnnnnnnngnnnnnnnnnnnnnnnnnnnnnnnnnngtggtactctgtttcactatcccaatcgcattaaccaaggcagaagcaactacaanccagcctccctgaaaacgaagcgaacaatgctgaacctgtgagcaacaatgctccatttgctaaacttgttgggaacaacgggaaacaatcccaactgggttatcaacagcagaaagacccaaactatccacaacaaggcattaaccagccactatcgtcagggttgaaccagccgtattcggctacgaaccagccttactctgccgggtttaatcagccgttttctagtatcagtcagccatttgggggcaccaaccaaaggggctcaatggnaaaacgttgctttcgaaaatggggttaaaaagagaagactgggattccaagtgttgccttggtttgtctatttacattgatggtttgctttgggttttagtaacccattgctgagtcatgaactatgaatcaaatagttaagcagacgttcatgctatgtaatctacgtactcgtttatttgt

SEQ ID NO: 9268 - DNA, 671 bp, Gossypium hirsutum
  unsure (1)..(671): unsure at all n locations; Clone ID: LIB3828-006-Q1-K6-F12
agactaaagagtgtctttgttgtagaatatacatgctttgcatgtgcatcgttatagnnnnnnnnnnnnnnnnnnnnnnnnnnnnnnnnnnnnnnnnnnnnnnnnnnnnnnnnnnnnnnnnnnnnnnnnnnnnnnnnnnnnnnnnnnnnnnnnnnnnnnnnnnnnnnnnnnnnnnnnnnnnnnnnnnnnnnnnnnnnnnnnnnnnnnnnnnnnnnnnnnnnnnnnnngnngnnnnnnnnnnnnnnnnnagtggctttgatatcgctgttactagggattgggggtaacaacgggctgcgcaagctcaaggatgcattccatgcggattattgcgatccaaaaatctcatcttgtggaaggcctttcttggtttatccagctcctcctcctttctaaactctatgctttttaatttcatacgataaatagaaataatgggtgggattgtttgtctctttgatgggggattaccaaactttaattctattgttgctttgtaatgtggtatgatgcttatattataataaagatatgctattaaaaaaaaaaaaaaaaaaaaaaaaaaaaaaaaaaaaaaaaaaaaaaaaaaaaaaaaaaaaaaaaaaaaaaaaanaaaaaaaaaaaaaaaaaaaaaaaaaaaaaaaaaaaaaaaaaaaaaaaaaaaaanaaaa

SEQ ID NO: 9269 - DNA, 576 bp, Gossypium hirsutum
  unsure (1)..(576): unsure at all n locations; Clone ID: LIB3828-006-Q1-K6-F7
gttcaatcaggcgctattgatgttgttgccaagtttggcgcaaagctgacgggaaaacggatctgagtaagccatttttggatgcttgngaaagaagcatgtgcctctgtaaccccatcaacagttgtgattcctaaagggacatatttattatcaaaagtaaacttagaaggtccatgcaaggctcctattgagattaatgttcagggcactataaaggctccggctgatcctggtgctttcaaggaccctaattgggttagattctatagtattgaaaatttcaaaatgtccggcggaggaattttcgatggtcagggaagcattgcttatgagaagaataaagatccccacaatcgtgcatttcgtgtcaaactccccgttaatataaggtttgactttgtgaccaacgcattgatacaagatataactagcaaagacagtaaactattccacgttaatgtttttgcatgcaaaaacattaccctcgaacgtttcacggtagaggcaccggcagatagcccaaacacagatgggattcacatgggcaaatcagacggcgtaaatattattgga

SEQ ID NO: 9270 - DNA, 565 bp, Gossypium hirsutum
  unsure (1)..(565): unsure at all n locations; Clone ID: LIB3828-006-Q1-K6-F8
gtggtcatcaagcttggataacttcttcaggtccttgtggcattgccatgtttgatgggaattcttaccatcagcaaacaaaatcgacttttatgaatcaaacacctccatctggtcaatgtcataatttgtagttgaagtgactcacagatatgaatcagaatccaaacttttcctgcttgtgccttttattgtgatagaattgacccagcaatggagtttttctgatggaatctgatatctggccagtgtttcctgcttaacatgataaaggctcctgtatatgaactttcttttcttttctttttaatttgttttaagcatagttttaatggggatgggtttgaaagttactcccaaatcccccaaaatgtacactaaaatactcttttgtagaaaattaagatgaacatttattatcattagtttgaaaatatgaataagattagatgctatctgaaattttacttgtaaattggagctactttgtttgcaatgagaagacgattgaaatcttgaattaaaaaacaaaaaaggaaactcaaaanactgggaaattgaattt

SEQ ID NO: 9271 - DNA, 602 bp, Gossypium hirsutum
  unsure (1)..(602): unsure at all n locations; Clone ID: LIB3828-006-Q1-K6-F9
ggngaaacacatctgattgtgctcacagctcggcgcagttctgggtatgcttggtgactgctgtcgagcaatgggagatgctgctgctgcaatcaattatttcgaggagagtgttgagttccttaccaaattgccagctgatgatcttgagatcacacatacactatctgtttcacttaacaaaattggagacctaaagtattatgatggagatcttcaagcgtcaaggtcttactacttccgatcactgggtgtccgccgtgatgttatcaaaaaccatcccggtgttgcttcacagattctggatgtagctgtttctcttgcaaaagttgcagatgtagacagaactcttggaaaagaggatgtggcggtcgatggatttcaagaaggcataaaattgttagaatctttgacactgaaatccgaagaagccggtctcgagccaaggcgcctttcagtgctggcattcctcaaatctcagcttgaagagaaacagcatgaggcaactgctagctctgtatcctcataatggaaaataactatgaaccaaaataaaggagccggtttctgtacatacagaagctcgagtttgccgatcaatg

SEQ ID NO: 9272 - DNA, 501 bp, Gossypium hirsutum
  unsure (1)..(501): unsure at all n locations; Clone ID: LIB3828-006-Q1-K6-G10
ttctcttcctgatttagatccaatgtggttcatgaggaagggagtgggagaagtcaagtgatgttcaggcggtgnnnnnnnnnnnnnnnnnnnnnnnnnnnnnnnnnnnnnnnnnnnnnnnnnnnnnnnnnnnnnnnnnnnnnnnnnnnnnnnnnnnnnnnnnnnnnnnnnnnnnnnnnnnnnnnnnnnnnnnnnnnnnnnnnnnnnnnnnnnnnnnnnnnnnnnnnnnnnnngnngnnnnnnnnnnnnnnnnnnnnnnnnnnnngtctagaaggggaagaagtcgcaaaaccgtttgatgaatggaaaaagatggggaagaagaaaatctcatggcaagttcaggtggcgtttaagatctaatgaataatgagtattcttttcactcattgttttagcagttaactgaggtaggcacaagaattaaccgtctccctgtaataacttctgattggcattgctacagatttttaatatcattgtcttacacttatttcttcc

SEQ ID NO: 9273 - DNA, 461 bp, Gossypium hirsutum
  unsure (1)..(461): unsure at all n locations; Clone ID: LIB3828-006-Q1-K6-G11
ggtgctatgtatggttcttcactattgccccgccgaaggaactttctctttaatactaataataagatgatgatgatgatgatgagtggatattaaccatagatgatcaataaagtgggttgttgcaggggtttcccttcacttcttgtggtgggattcgctattggcgtggttactacaattaatcaattctcgtgatgctaaaggtaaattgtctcctgaaatgaaagttgcgactagcatttgttcacctactcattatccagatgcttgtcataagactttcgcctctatgaacagcactggtcctaaagaattcgttaaaaaggttatctatgctgctgaagaagaagtcaaaaagttcctcaacttttctgactccaanattgctgaagctaaggacaattggcctcacaaanatggccttgaatgattgtaaggacatgatgcaatatgccatt

SEQ ID NO: 9274 - DNA, 769 bp, Gossypium hirsutum
  unsure (1)..(769): unsure at all n locations; Clone ID: LIB3828-006-Q1-K6-G12
cggaagagagcaaagatgcaatggcaaacacgaagaccttccggttccggtttactcttcactagaactggtnnnnnnnnnnnnnnnnnnnnnnnnnnnnnnnnnnnnnnnnnnnnnnnnnnnnnnnnnnnnnnnnnnnnnnnnnnnnnnnnnnnnnnnnnnnnnnnnnnnnnnnnnnnnnnnnnnnnnnnnnnnnnnnnnnnnnnnnnnnnnnnnnnnnnnnnnnnnnnnnnnnnnnnnnggnnnnnnnnnnnnnnnnnntctacggcgaagggatctcagctggaanaagctcagcttaggttcgatcaattgaagtccaagtttgtcaaagtctttggtcatcctcccgatgtcttcgctcgatctccagggagagtgaacttaattggagaacacattgactatgaaggatactcagtgttgcctatggcaatcaggcaagacacgattgtggcaatccgaaagcacaaagaaggggaggctgaaaagcttctaaaaattgctaatgtcaatgataagtatgctacctgtacttatcctgctgatcctaaacaggaaattgacttgaagaatcataaatggggccattacttcatttgtgggtataagggtttttatgaatatgccaagtcaaaagagtgaatgtaggtaagccagtgggccttgatgtccttgttgatggaacagttcctacaggttctggtctatcaagctctgcagctntggtttgctcagctgcaattgctattatggctgctgtttggtg

SEQ ID NO: 9275 - DNA, 605 bp, Gossypium hirsutum
  Clone ID: LIB3828-006-Q1-K6-G7
ctgataaagttgttcttctggatgttccggtaattgtaatcctggtggtttcgttctaccatttcctcaaattccagaaatcccaagaattccagaaatcccacaaatcccacagatcccacaaatcccacaaattccactaatcccacagatcccacaagtcccacagatcccacaagtcccaaaaatcccactaatgccaggacagtcgggatgtgagagtggagagtggtgggacttgtgctgagtgtggtcagcccaggtgcgcatcaggatgttgccaggctgaaactgtaaagagcaaagggatagaagaggttatggacagtgaacccagtccaccaaagtagagagatgataccatattaagatgaaataacgaggaagagttggttgtcgtcttattaattatacaaaataagaagtaatgatgttgcagaagggtttgctataaaatcctcttggacaaaaagagtaattatgaagaataaatagctcaaaacaatattcgatttgcaatatcctaaagttccttgaatcttgttttgtagccatatgtaattaatgcatgtgcatgctaatatatatgattttctttgttatat

SEQ ID NO: 9276 - DNA, 328 bp, Gossypium hirsutum
  Clone ID: LIB3828-006-Q1-K6-G8
ttttgtgggggagacgcaaataaaaggttcgtagttccaataactgtgttgaaccatccttcgttcaacgacttgcttaagcgagcagaggaagagttcgggttcaatcatcccatgggtggtctaacaattccttgcagagaagatgccttcctaaatctcacttctcgattgcaggcctaataagagattcaaagggccactcgttcacaattttgattcctcttttttttctttctccatttgtgaaagagaaaaaaaaaagctgtaaaccaatgtaatgtacagaagcagcaaaagttatcaacaaaattagttctttgatctc

SEQ ID NO: 9277 - DNA, 452 bp, Gossypium hirsutum
  unsure (1)..(452): unsure at all n locations; Clone ID: LIB3828-006-Q1-K6-H11
caatctttgacaaaccttgagatgtacccgaagaataaaaacgaataagcgttatgctggatcctcaaatggaccgttcaggaagttgctgaatccgttaaacaggatttcagaagtattgacattcttgtgcattcactagccaatggccccgaggtcagcaaacctcttttggatacatcccggaaaggataccttgcggctttatctgcttcaagttactcccatgtttccttactcaaacattttctcccattaatgaatccaggaggttcttcaatttctcttacgtacattgcttctgagcgaataattccaggatatggtggaggtatgagttctgctaaagcagctctcgaaagtgacacaagagtacttgctttcgaagcaagaagaaaacataaaatccgggtncaacgcaatatccgccggccctctaaaaagtcgtgctg

SEQ ID NO: 9278 - DNA, 770 bp, Gossypium hirsutum
  unsure (1)..(770): unsure at all n locations; Clone ID: LIB3828-006-Q1-K6-H12
gngnatcattttccatttattatctgcctcctatgctgtggtttccattgttgccctggtacaactatgtcgcnnnnnnnnnnnnnnnnnnnnnnnnnnnnnnnnnnnnnnnnnnnnnnnnnnnnnnnnnnnnnnnnnnnnnnnnnnnnnnnnnnnnnnnnnnnnnnnnnnnnnnnnnnnnnnnnnnnnnnnnnnnnnnnnnnnnnnnnnnnnnnnnnnnnnnnnnnngnnnnnnnnnggnnnnnnnnnnnnnnnaattcagttgagagtgtcagagtatgggtggacaacacaaaagttttccacttgatgaactttattgtgaacggattgagggctgttctattcggtttctacaagagcgtgtttctcgttaaatctaaggcacttgaaatggtgcttctggatcttcccggtcttttatttttctcaacatatacattacttgtccttttctgggccgagatatatcaccaggcaagaagtcttcccattaataaacttcggcctgcatactatagcatcaacggatttatatactttgctcaggcatgcctatggatatcagtaagattaagtcaaagcaatcttgcagtggaacttagtagactcttcatttcagtaatatcattctgtgctgcattggggttcatgatatatggtgggaaggttgttcttcatgttgaggcggttccctatcgaatcaanaagtcgtcaaanaaagctgttcgaggtcggctttgtaacaggaatctgctgtacttgttgct

SEQ ID NO: 9279 - DNA, 603 bp, Gossypium hirsutum
  unsure (1)..(603): unsure at all n locations; Clone ID: LIB3828-006-Q1-K6-H7
gnaccgatcagatttaactcagatccatctgtatcgggtcttctaaattccagatctttacttttctcgagtaaaggaagaaagaggaagggagagatgagagagattattagcgtccacattggccaagctgggattcaggttgggaattcatgctgggagctttactgtcttgaacatgaaatccaccctgatggaacaatgccgagcgacacctctatgggcgtcgcacacgatgctttcaacactttcttcagcgaaacgggttcgggaaagcatgtgcctagagctgtctttgttgatctggaacccactgttatcgatgaggtccggaccggcccttatcgccaacttttccaccctgagcagcttatttccggcaaggaagatgctgctaataattttgccagaggccactatacaattgggaaggaaattgtggatctctgcctagatcgagttaggaagttagctgataactgcactggtctgcagggctttatggtgttcaatgctgtcggcggtggaaccggttctggtcttggatctttgttgttggagcgcttgtcggtggattatggaaagaaatcaaagctcgggtta

SEQ ID NO: 9280 - DNA, 581 bp, Gossypium hirsutum
  unsure (1)..(581): unsure at all n locations; Clone ID: LIB3828-006-Q1-K6-H8
ctcatttcatttctccatatggctagnaggttgaagaaaatttgaagaggctcaatgcccccaggcattggatgcttgacaagcttggtggtgcttttgcacccaagccatcgtctggtccccacaagtccagggaatgcttgccattgatccttattttgcgaaaccgattgaagtatgctctcacctatagagaagtcattgctattcttatgcagaggcatgttatggttgatgggaaggttaggacggataagacctatccagctggtttcatggatgttgtgtccattcctaaaacaaatgaggacttccgtctactttacgacaccaaagggcgatttcgtctccatgccatcactggcgatgaaaccaagttcaagctctgcaaggttcgatctgtccagtttggccagaacggtattccatacttgaatacatatgatggtcgtactatccgttaccctgatcctttgatcaaggctaatgacaccatcaagctagaccttgaaagcaacaaaattgttgatttcatcaagtttgatgttgggaatgttgtcatggtcactggagggaggaac

SEQ ID NO: 9281 - DNA, 596 bp, Gossypium hirsutum
  unsure (1)..(596): unsure at all n locations; Clone ID: LIB3828-006-Q1-K6-H9
gttaatatggcgttagnagataacaaatacaagcaagaagctgaggataacaaggcaactcgtcctgaagagagtgatgatgataatgaagacgacaatgctattccattaggtccacagtgctctctcaaagaacagcttngaaaaagacaaggatgacgagagcttaaggaaatggaaagaacagcttcttggaagtgtggatattaacaacattggagagacactcgatccagaagtgaagttccttagcgtgtcgatcgtgtcggcggacaggcaggacatggttcttccgatccctgaagatgggaagccgcatggcttatggtttacactgaaagaaggtagtcaatatcgcttgaagttcacctttcaagtcagcaacaacattgtatctggtctcaggtacactaatactgtatggaaaacaggtgttaaggtttatagcacaaaagatatgaattggaacttttaagtcctcagctagagccttatacgcatgaaatgccagaagaaacagccccttctggttttatggctagaggatcatatactgcaaaatcaaaatttcttgacgatgatcaaaaatgtcactt

SEQ ID NO: 9282 - DNA, 606 bp, Gossypium hirsutum
  unsure (1)..(606): unsure at all n locations; Clone ID: LIB3828-023-Q6-K6-A1
gttttgnaaatagnnttaatctaaaatcaagttcactggtagagtcccagtaggagtgtaaatcttccgctgctcaaacaccgaagaccaattgtaacacccttaacttgtctccgtcgctagattagggttacggagcattaccgtacaatcaggaaacatttatcaataaatcattaattaaataaatcacattcaaaacataccaaacataagcataccatcactaaatcgagcctttcaagccctaacatttgaggcaatttgggaccaatttgaaacaaaaatagaagttttaagaaaaatatgaaaaaattcaaaatagaggacacacgacattgtggccaggccgtgtaacatttgaaataggaacgcacaataatgtctcagctgtgtccctacccctgtaactcattgagttgggctacaagaccatgtcgtaggccgtgtgccagaccgtgtaactctctaacttgtgacgcacggtcgtgttgcaggccatgtgcgaggctttgtaacacactgagttaaaacacacagccgtgcctcaaaccatgtgaggcacacggccaagtgacataggtgtgtcccaagctgtgtgtacct

SEQ ID NO: 9283 - DNA, 470 bp, Gossypium hirsutum
  unsure (1)..(470): unsure at all n locations; Clone ID: LIB3828-023-Q6-K6-A2
gggggggggtgtgctcaaaatgttggtgaagcttgccagaaatcgggagcgtggggggcgtcctcagggtctttttatcagtttgaaagaaagggtaagattgatgaatttttgttttttttttttcagaaggatatccaattttgggggggggggatggggaaagaattttgggtctaggatacctggggggggggggaatggcaatccctatggggaagctttctttatatacggcactaggaggggtctgtccgtctgcttgcttgcctgtaaccattgatgtgggcacaaacaatgagcagttgttgaatgacgagttctatataggacttaggcgaaggagagctaccggnctggaatttgccgnccttatggntgaattcatgactgcgggcaagcagaactttggggagaaagttctcattcagtttgaagattttgctnatcacaatgcatttgatttgctt

SEQ ID NO: 9284 - DNA, 427 bp, Gossypium hirsutum
  unsure (1)..(427): unsure at all n locations; Clone ID: LIB3828-023-Q6-K6-A3
cccccgcagcccttcaacagggggggggggggggggcgcgcnncccccagctngatctctcgngcgcagttgggcgagggggcggcctgggtcagcgccactgtggtctccgcctttttctcctctctcgggcgctttttttttttttttttctcncccncgnccctgtctgtgggggggggggcancnnggccttggtccttcctctcacctactggggggggtgtctctcggtacttgcgccgtcttcttctctcttgctttctcttgctttgtggtctttgtgtgccggtcctgggccttcgttttttggtgtctttccctgctctttctttgtggggcgtcctgctttgtttgggttctcttctgtcctcgtggcctttttttttttggctgttctctcctctctttctgctggtgctgtgtt

SEQ ID NO: 9285 - DNA, 603 bp, Gossypium hirsutum
  Clone ID: LIB3828-023-Q6-K6-A4
ttggccgcccttttttttttttttttgggtttctccttttatttattttgttgaaaataaatttaaaagagcagaaaaataaataaaaaagaaaaccaaaagaaaaaagagaacccaaaaatgagatttaaaatcaactttttatttttttgctttttacttctgaaaaaattgcctgtaatacaatttttttttgtataccgaaatcccctcttacattcggttcttccctcggcttatatagccgaatacatagaaaatattttctgctctcttctattgtttgttgtttttcgctctctttccttctgctttgtgtgcttctcctttgttttgcaggtaacgtcagagtaggtgagcagaggcgatgggacgggcgtctgttcgggcgcaaaatgcgctgacaccacgtgggggagggaggctgttgtatttactgatatcagttttgagaaaagccattgagtttaatgattatatctctttcatcaaggccatacaactatcatgcaaacgaggtttccacacgtgccaagcatgggcatcaattcaatatccaacgaaggggcaacaaacaggtaaaatataatagtatcaatttat

SEQ ID NO: 9286 - DNA, 464 bp, Gossypium hirsutum
  unsure (1)..(464): unsure at all n locations; Clone ID: LIB3828-023-Q6-K6-A6
tagcacaccctnnaagtggnatnntttccttttctcctcctttcgtgcccccgatctcttattagtccatgtatctgggatatgtaacactgcattgacagggggggggacttattctagaagggtcctgactgctaggtctgtcgctgggtttctttctgatgtctaccctgcggctgctgntgaagttgggaaaatacatctaattgcagatgagagggttcaaggagcagtttttgatctgcctgaggagattgcaagagagttgctggcttaggaaacacctccgggaaacaccatctcaaagatcactaagttgcctcctctgcgcgatgacggcccctcacgtgatttctatggcacattttctagctgggatcgcttttctagcagggatcgttttccacgaggcggttttaaggctcggggcggaggttccaggaccccctggggttgggtgtttg

SEQ ID NO: 9287 - DNA, 575 bp, Gossypium hirsutum
  unsure (1)..(575): unsure at all n locations; Clone ID: LIB3828-023-Q6-K6-B1
gcagcaaacgagattcgcngatgaagtcgttngatggcaggngcgtcctcagttaaaaacgttttccatggttcaccaatgccggctaccgttgctccatcaccgcattcatttttttttttccaagggtgcgggctagacgaggaggggccacggacccgcatagcattgctgaacggttgcggagggaaagaattgccgaaagaatccgagcattacaggaacttgttcctagtgttaacaagactgatagagcggtcatgcttgatgaaattgtagattatgtcaagttcctgaggctccaagttaaggttttgagtatgagtaggttaggcggggcgggggcagtggcaccgcttgttacagacatcccattatcatcggtcgaggacgaaagcggcgacggtggaaggaaccaaccggcatgggagaaatggtcaaacgacggcaccgagcgacaagtagccaagctcatggaagaaaacgtaggagctgccatgcaattccttaaatcaaaagctctttgcattatgccaatcttactagccaccgccatttaccactcgcaaccactg

SEQ ID NO: 9288 - DNA, 586 bp, Gossypium hirsutum
  unsure (1)..(586): unsure at all n locations; Clone ID: LIB3828-023-Q6-K6-B2
cgtccggcctcctcttgcaggagacccaaggaacagaacaaaaacaanaagaagcataaggagaagagcaacaggaaccgctgacaaagacgcaaaaaaatccattaaaaaaccagagaagaaagcaagtgcctccaaaatacctaccaaatcaaagccaaagcccgaattaaagcgcgggcaaaagcaaaaacaagagcagcaatggaatcccagtcaagtcccaggttattgccgacccatcttcaagctctgaatcagaacccgaagaaaacagaaacaactaccacaagaacgttaaacccgacagcaaaagaaagcgaaaggaagaagtagacgaggaagaagaagaagcaaaggtgtgtagatttccaatgaacagaatcaagaggataatcaagactgaagattcacatatggctgtttctcaagatgttgtttttcttgttaacaaagccgcggaattgtttcttgaaaagttctgcgaagatggatacaaatgctccattaaagatcgcaagaaatcacttagttacaagcacctatcaacagttgtccatgaacagaagagatatgactttctatc

SEQ ID NO: 9289 - DNA, 424 bp, Gossypium hirsutum
  unsure (1)..(424): unsure at all n locations; Clone ID: LIB3828-023-Q6-K6-B3
tttaatcagctttccacacggggggggggggggggcngatgccaataccggagccttcctcgtcttcttcatcggtggggtgttgctggccttgtcctcttcctgtccagctttaaacatcactangtcgcttgcgcctttcttttttttcngcnctctcagcgttcttttgggggggggcgagctgcctgatgctnnttnccgtcgcctgaccatggcggtgctggccctggncagtggttcgctcctttccatcgctgcctggtcctgcgttgatctgtgggtgattctcttgcttctcgttctcctcggctttttcccttggcttttgctctctgtgctggggccgcagtgcgccctctctcccgccttgttctcttcccctggttccgttctttttccccctggttttttgccgcgtttt

SEQ ID NO: 9290 - DNA, 614 bp, Gossypium hirsutum
  Clone ID: LIB3828-023-Q6-K6-B4
tttctctctccccagccatagctaatctcactccctcagcacttactttttccttcttcctttctttaaaaatgccaatcaacagagacccttctactcccccgcctatgatcggcaagatcggaccctacactgtcttcgttaccccaccttctactcctacccccactgaacctcctgtttttcagtctcctcagaaggcggtcgcgcctcctgcttctgctcctcctccggtccggccgccgcctcaacagtttgataagtcttttgttgcgtccgattctgatggctccattctgggttttttcaggaatgctatttttaaagtccaaaatgctcattcaagcttggatgaccatttagctcgctggtttggcttaaatcagtccaagtatcagtgggcactggacgattattacgagagcaagggattggaaaaggaaggtgtaaaagtgaaagaaatatcaagcaaaatgcaaagtgtgtagcatgctttttgtgctggtaatgagatatttgaagtccctcttctcttcctctgtttctgtttcccccttctaatgttattattatgtatctaatgagaatgttttaatcacggtgcatattgttat

SEQ ID NO: 9291 - DNA, 595 bp, Gossypium hirsutum
  unsure (1)..(595): unsure at all n locations; Clone ID: LIB3828-023-Q6-K6-B5
ccatatagtaacagtcaacaggatacaatctgcagtgctgtgagtgaaattcacccaccatccccgagattgttcgaaaccaaaatggtagtctccaagccaaagtgaatgatttgaaaccaaggctgaattgaaatgtccaggcaagaagcaaatcgtggcagtggagtttgcgagctatggtgatccatttggcgcttgcggagcctactttattggaaattgcacagcgccagaatccaagcaagtcgttgagaagtattgcttggggaagcccagctgccaaatcccactagatagcattcctttcagtaaccaaaatgacgcatgtacccatctcaggaagactttggccgtccaactcaaatgtgcctaaacaaatgcgtgcttcgacacagcttggattaagcttcacattttattttttttaattgagctaagacggtgcatggaggagtgctcgatctatttaatttgtatttcttaaatattaaatgaatatgtgcgaattccagannaaaaaanaaaaaaaaaaaaaaaaaaaanaaaaaaaaanaaaaattttttttttttanaaaaaaaaaaagggcggcca

SEQ ID NO: 9292 - DNA, 508 bp, Gossypium hirsutum
  unsure (1)..(508): unsure at all n locations; Clone ID: LIB3828-023-Q6-K6-B6
agttacagcaactgcaggagggccccaactcagtttgtgttgcgagtgcttgctaattgccttcttagatttggaaatagtgttgtccttttggttggttattgacaagttagctgattcagatcagagcctctgattggctgggactggtctatagctttttccatgggggggggaatgagcaacacctttcagcattgtaggcaaaatagcagttagcagcatggttagactgaatgtgactgctcaatagcgtgaggttttcttttttgtctttcatttctcatctgttttcctggttattttctttttcttaaggataaggaattgagaatgaaaaatattactcctatttgcatcttgcatttgatgaagtgggtttttgttaacatttctagtctagggaagcaaaagagttgtgttgcagacttgttgtgttcttgttcacgntctataatttatggggtgtgataaatttcttgtgtgagaaatgcttccccccaccatt

SEQ ID NO: 9293 - DNA, 408 bp, Gossypium hirsutum
  Clone ID: LIB3828-023-Q6-K6-C1
ttgttgatctatcgaacctctctacctgggtgggggggggggatgatcttttcttaccttgttgctcttcccaacgagcgacgccacctcgagcacaagaagcatgctgagcaacacggtcatcattaatcccatctagctttaaatttttttggatcgttgttgtgcccttctcggttgtatccagtaacaattcgatttgcttaatgctttttggttgtaatttgtgaacaatgtaggcagaggaagatgctgtcttgatcaaatgcaaaaataaaagagtacattttctttaaaataagtgaaagactattagactaccatggaaacacaatatgctgtttggtatggtatgtgttgctggtttctgttgatttgattaataagggtttgtttcatttttatttt

SEQ ID NO: 9294 - DNA, 555 bp, Gossypium hirsutum
  Clone ID: LIB3828-023-Q6-K6-C2
ccaatactactcggagagcttaccatatgatcccaggccggttaaggtcactaatctttacttctttttgcatgaaactctccgcggtaagaacctttcttttttcatggtagcccaagctaacaggggggggggggacaactactcatcagtgccatttggcaccctatatgccattgatgatcccctcaagataggtcctggggacaactcagaggtgattgggaatgctctgggacttgggatcttgtccggcaaaaattcaacgaccgtggtgatgtacttagattttggatttactgccggaaagtttaagggcagctctattagcatattttcaaggaatccgttaataaagatggaacgtgagctttcggtggtgggaggaagaggagaattcaggatggcagaagggtatgcacgactcaagaattactttttcgatggcaccactgttattattgaatataacgtgaccgtaattcattactaagaggacattctcttggactgtgcaaaattcacatggttttgcagcacttgattaggataaat

SEQ ID NO: 9295 - DNA, 574 bp, Gossypium hirsutum
  unsure (1)..(574): unsure at all n locations; Clone ID: LIB3828-023-Q6-K6-C3
cccggttcgacccagcgttcgaaaanatcaaatttcccttaaacaaactgccttcatcttcttcaactttccctgttactttagtttcaaaaccatgatttttccagaccaaaaatcaaaccttggcgaacttaagctttcagtttcggatctacccatgttgtcttgtcattatattcagaaaggttgtctttttactcgtccttcaatccctattaactcactcatttcgattctgaaacaagccctttctaagacgctgtcgtttttctcacctctcgccggtcgtctttatactgatcggaatgggtatatttatattacatacaacgacgccggcgttgagtttcaccatgcaaaaggtaccactttgttcatcagagacgtcattagtccacttgatgttccatggtttgtgaaagggttcttttgttntgataaaacagtgagttatcaaggacattatatgccgttcatggcggtccaactcacttgattggctgctggggttttcatcgggtgttcggtttttcatgcattgactgtcggttcgtcgttttgggatttcttcaat

SEQ ID NO: 9296 - DNA, 623 bp, Gossypium hirsutum
  Clone ID: LIB3828-023-Q6-K6-C4
tctggcaggcgcagcaaattgggtttccataaccttactgttttcagtatgtttatcggcgtcctatggtaagaggaccggaatctccaccatggctgacggagccgatgggtttcaaccaagcaacggttttccgcatgaagctgatcctgattcttcaacctctatcgatcctgatcctaccggattcggtgctggcataggtataggttatgaaagaagcccttactgtatcgactgcgacgatgtggatatcatgggcggcagcttttgcggcacctgcaattacggatgcccttaccgcaggttcaataatgggtgtggtggtggtatcgcttatatggatgaactcaaacgaacgattaaggaccttaccatgaaacttgatgccaatggtcttttagggaaaaagaaggccatgaatatacaagctatggcgccagaatcttcatagatttatatatagattatagaaactacggattctatacaaagagaaagaaaataaagaataaccaagcagcttgatatatgattgaattacaatgtgctagctgtttttttttatctttaattattatatgaataaaagagattaaagtaagcttgattgaaaattaaaa

SEQ ID NO: 9297 - DNA, 521 bp, Gossypium hirsutum
  Clone ID: LIB3828-023-Q6-K6-C5
aaaaggcgatggggggggggcgagctggtctcctacgagcagcccttcgcggcggctctcgtcctactggtgctcccacgcgtggcttcgcttcctcttctcatcacgatgatgcttatgaaaccgcaaaatgggaatagataacatatttaggtgttgctacggggggggggttagcgatttataacctatcaaaaggtcatccccaccatgaagagcctcctgcatacccatatttgcacattcgcaacaaggagttcccatggggtccggatggtctgtttgagaaaaaggagcatcactagggatggccggatggatgcatatctttccgagttcggcgcatttttatcatttctctgagaaatcaatcagataattctgtggatcttttgtaattttagcactcgatttccagtttatggacttttaattgcaagttcatcaggttttctatatggttgtgcctgcctaccatactctgtttcgaaataataagattactgaatggtttgttgtgg

SEQ ID NO: 9298 - DNA, 584 bp, Gossypium hirsutum
  Clone ID: LIB3828-023-Q6-K6-C6
cccggttcgacccagcgttcgccccgcgtccgttcttctcttttttttgggctcagacccttaatttcgattgttaattatcactgttctgcatggcgtcaggttcgactggcgccaaacaaaacagttgttcgagaacgctttagctatctacgacaaggatacaccagaccggtggcacaagctagccaggggtgtcggggggaagaccgtggaggaagtgaagttgcattaccagaaccttgtggatgacatcaagcagatagagtctgggcacgtgcctttgcccccttataagaaagctggagggaaccaaggatacaacaatttcatggacgatgaagaaccaaggatgaggaatctcaggctttagtgaagtatgaaccagaaatagctgtagaatatcaacctttcaataaaaggaaatgcaaagcagcaaacatataaattatctcttaatttcgtttacatttcctgctcatatatatgttttttgtgtgcttgaatgtaacaagcagccacaacgctcctatacttgcatgtgtcaagtatgaaattatagcattggtaccttgtttttatta

SEQ ID NO: 9299 - DNA, 608 bp, Gossypium hirsutum
  Clone ID: LIB3828-023-Q6-K6-D1
gtcaaatcatttttgcggtgggtattgtatagattattatttaaggattggctcgattccgatttcatcaccattttcatatctcaagtgatctctctgtaaccgcttgctgttaaattttatagaagacacgtccaccattactttcccttcatatttgaaggtttaatatattgatagttggaaactaaaaacaaaatgggaaggatattcatgatcactcttgaaggatgcgtttatagctgcaagtactgctttacccatctggctctccttgacgacattatttctaagtctttccactgcgggcatggaaaggcttatctctttgataaggtgcgagtatttcattgctatgcactcttttttttttctccatggagtgttctctaaaaatagtcttatctattttaaaaccatgctcatgatttcactttctatgcatttcaatgtgttgattttggtatggatgtatgatatgtcctttttttttccttctctccttttcatttatctaataaaaaaatgatgatgctgatgatgctgatgatgcttgattgccatttaatcacatgttctagttgtacatatctctgcttctcctgcgc

SEQ ID NO: 9300 - DNA, 590 bp, Gossypium hirsutum
  Clone ID: LIB3828-023-Q6-K6-D2
ggcactttacgtcatgctgtgattcaaaagagccattatggataatttttgcccatgatatgaacattaaattatcacaagagctgatggttcaaagccataagacaattgatggtcgtggagcaaatgttcatatagcatatggatgtggcattacacttcaatttgtgcacaatgtcataattcataatattcacattcatcgcgttgttagaagtagtggtggcctaattagggactctgaagatcattatggttttcgcacagtcggcgatggagatgggatttccatatttggatcatcaaagatttggcttgatcatatttccatgtctgagtgtcaagacggactcatcgatgcaatacaaggttccactgccatcaccatctcaaattgccatttcacccatcatgatcatgtgatcttgttaggtgcaagtgatacctattctaaagatcaatttatgcaagtcacacttgcattcaaccattttggcaaggaattgatacaaagaatgcctagatgcagatggggatactttcatgtcgtcaacaatgactacactcattggaaattgtatgccattggt

SEQ ID NO: 9301 - DNA, 569 bp, Gossypium hirsutum
  unsure (1)..(569): unsure at all n locations; Clone ID: LIB3828-023-Q6-K6-D3
cggccgcgtgggcttaattctgtcggtgtttttatctgtaagcttcagttcgggtgttaggttgctccaggaacagcccaatgatgacctcaaaaacatggacgctattcctcccattgatgcactcaaccctaccgagttcaatggacccggtgttggcattcacgaagatcatgttgtcccaaaggttccgaaattggtactcttggttttggttttgaaggtggtcctgaaaaatgttgttcttctggatgttccggtaattgtaatcctggtggtttcgttctaccatttcctcaaattccagaaatcccaagaattccacagatcccacagatcccacaaatcccacaaattccactaatcccacagatcccacaagtcccacaaatcccactaatgccaggacagtcgggatgtgagagtggggagtgttgccgtcagggttgcggtgggacttgtgctgagtgtggtcagcccaggtgcgcatcaggatgttgccaggctgntcctgtnnagagctttgggtttgaagaggttttggacagtgaacccagtccaccaaagta

SEQ ID NO: 9302 - DNA, 585 bp, Gossypium hirsutum
  unsure (1)..(585): unsure at all n locations; Clone ID: LIB3828-023-Q6-K6-D4
gnttttctgagcttcctagnttgaggttgatggtgggagcactggtatgtttaatgatattggtgctggtgttcgatttggaggtgcacgagatcgtggatatggtgatatgggttttggtcgttctggtcggcaagcggaatatggatttggccgttctggaggcaataggggtcctggatttggtcgtagtggcagtcagttttctgatgagatgggtggttatggaggtcgttttggttctaataaccggtctggaaattttggtggttctgcatccagtcgttctagtggctttggtaattttggttctagacgtactagtggatttggggactttggttcaggtaacccaggtggatttaaggacaatcgttctggtcaaactgctggtggttttggcggctttggttctggtggatttggtgacaagcattcaggccaaagtagtgcgagcaatggtgatcctccatctagtcgatttagccgctttggggtctctgatgttgataatgatcagagcactggaagaacacccttctaaattctttgagggaagaagcagcaatctcgatgacagctttc

SEQ ID NO: 9303 - DNA, 483 bp, Gossypium hirsutum
  unsure (1)..(483): unsure at all n locations; Clone ID: LIB3828-023-Q6-K6-D5
gcgtttcgggntgtacgatgtttttctgagctttagaggtgaggacactcgtgatggttttgtaagtcatctttnagaatgatttggnatcgaagnaatatccatacttttaaagacaatgagaaagttggaagaggagatgagatttctggggcactattgactgccattgaaggagcgagggtttcagtgtttcttttctccaaacactatgcttcttctagatggtgcttggacgagctggtcaagattatggactgcaagaagttgaatgggcacaactttgtttttcctgtcttttacgatgtagatccctcgtattacgaaacaaccattcatgcgaactacgagctcatcaaggttgagagctcacctgggagctctttattctgcaaattaccaatttgtattgaaataataataactttttgnttnananaaannaannnnaaaanannnannannaannnnnnnnnnnnnntt

SEQ ID NO: 9304 - DNA, 580 bp, Gossypium hirsutum
  unsure (1)..(580): unsure at all n locations; Clone ID: LIB3828-023-Q6-K6-D6
attcttcnaannagcgcttcgntgnatggnnatgggaaagtcggtgggtanaaatctgactggaaaaaanatgacaacatggctggggaatggaattacacttctggaaaatggagtggggatcttaatgacaaaggtattcaaactagtgaagactacaggttctatgctatttcggctaagttaccagaagttaacaacaagggcaagactctagtcttccaattttctgtcaagcatgagcagcagcttgattgtggtggtggttacatgaagctactcagtggtgacattgaccagaagaattttggtggtgacaccccatacagcattatgtttgggcctgatatctgtggaagcacaaagaaagtacatgctattcttcattacaaggggacaaaccacttgatgaaaaaggaagttccatgtgagactgaccaacttactcatgtttacacatttattctccatccggatgctagttacaaaattcttattgataatgttgagaaacgaactggtagcttgtacactgattgggatcttctcccaccgaagagaatcaaggatcccagtgcaa

SEQ ID NO: 9305 - DNA, 605 bp, Gossypium hirsutum
  Clone ID: LIB3828-023-Q6-K6-E1
gcgtttcttctctctctacactttcactttgctctctctaggaaccctctcgttaaacagtttattataaaattttcaaatccttaataaaatcaccagcaactctctgatttgaaaactgagggttttctttttttctgcaatttttttggaactgaagatttactaatggttatgggggataacgaaggaaataaaaagagagcccgggaagagacagaggctaactcggtgcccaatacaaaactcgctcgagttgacttggacgataataagggtcccgactccgactctcccgaggctactcgtgtagaacctgatcctgatgatggagaagataatttgccggaaacaaggcgtataccggaggaattgctgaacatcctcgacgattcagatccggttagtggactcagatccggcgattcagggactcgattcggtcatcaggagtttcgaagaagagatcttatttccggaacaggtggctttaccggaaacgatattggattccggagagtcgaggccggagttagggtttctatttgaagcttcggatgatgaactgggtttgccaccgagtttaccgtcggttgaggtggagc

SEQ ID NO: 9306 - DNA, 601 bp, Gossypium hirsutum
  Clone ID: LIB3828-023-Q6-K6-E2
atttatactcaaacttttcatacatcaatgtacaattgtttaatagcctcctcctacgccgtgagtgttgtacgtttagcaatggagaatatgtcaaggctgggttagccgagttagagctttggtgctgccaagcaaaagaagagttcgctgggtcatcgtgggatgaacttaagcacataaggcaggctgttggattcttggttatacatcagaagtacagaatttcatatgatgaaattacaaatgatctctgccctattcttagtgtacagcagttatacagaatatgtacgttgtactgggatgacaattacaatactcgaagtgttgctccaaatgttatttccagcatgagggtactaatgacagaggattccaatgatgctgctagcagttcctttttattggacgacaattccagcatccccttctctgtcgatgacctttccaattcgcttcaagagaaagacttcttggaagtcaaaccagcagaggaacttcttgagaatccagccttccaatttttacacgagtaaggcctagggagcttagatgcatgcttcccgtcgttatcgagtcaaggtcagcaatgtggact

SEQ ID NO: 9307 - DNA, 178 bp, Gossypium hirsutum
  Clone ID: LIB3828-023-Q6-K6-E3
ttgggggtgttttttttttttttttttttttttttttttttttttttttttttttttttttttttttttttttttttttttttttttttttttttttttttcccgggcggcgctttttttttgggggctctttgttttttttcttttggttccgggggggggggggggggttttttgg

SEQ ID NO: 9308 - DNA, 608 bp, Gossypium hirsutum
  Clone ID: LIB3828-023-Q6-K6-E4
gagaaatgaaatggcattcatgaagaactgacagtgacaaagatggatgggatgatattgaaccccttgatgagccaaagccttcttcagctttggcaaatattcaggcagctcagaagcgtcctgtttcacaaccagtttcacagcctaaaccacaagcttcaacaagtttgagaccaaaaagcacagtgaaggcggccaaagatgaagacgacgatttgtggggttctatagcagcagctcctccaaaatctgcttctagaccattgaatgtgaaaacagctggagcagttgatgatgatgatccctgggcagctattgctgctccccctccaacaaccaaggtaaaacctttatcagcaggaagaggcagaggaaatagagcagctgctcccaaattgggtgcacagaggataaatcggacatcctccactgggatgtaaaatacgaaggaacagaatgcaaatggaggagaaaaatatcaggttttgtacacttttctctatctggactggcttaacattaaaatttcatggaagtctttgttgtctgccaagtagtatctgatactgtttcttttcctcttggtatattatttgatttgtaag

SEQ ID NO: 9309 - DNA, 603 bp, Gossypium hirsutum
  Clone ID: LIB3828-023-Q6-K6-E5
ggcgcgaatctgatcgctctgctgccaagcgtgccactcacgtgctcgctgagcttgccaagaacgaggaggttgttaatgtgatcgttgaaggtggtgctgttccggctctagtgaagcatctgcaagcgccgccatgcgaggacggcgaccgaagcccgaagcctttcgagcacgaggttgaaaaaggaagtgcttttgcattggggctgcttgccgtaaagccagaacatcagcaacttatagttgattctggggctttgtcgcatcttgtgaacttgttgcggcgtcacaaggatagttctatttctcgtgctgtgatcagtgtcattagaagagcagctgatgctctcaccaaccttgctcatgagaatagcagcattaaaacgcgtgtcagaatggaaggtgggattccacctcttgttgagttgcttgaatttactgatactaaggtgcaaagagcagctgctggcgcattacgaaccctagcattcaaaaatgatgaaaacaagaatcagattgttgaatgcaatgctctacctactctcatcttaatgctaagatcagaggatgctgctatacactatgaagcggttggtgtga

SEQ ID NO: 9310 - DNA, 590 bp, Gossypium hirsutum
  unsure (1)..(590): unsure at all n locations; Clone ID: LIB3828-023-Q6-K6-E6
gcgttcggtttttggcttgnacagtggtaggtggagttttagccccacacacctagaagagttggtagccaatttctggggacggactctattgggggcaaagtgcttcaaatggcaaagtcattgctaaaggctcgactttcaggagagcgcatcttgaggtgttggggtggtggtggtggcggtgggccgggatgggccgttgaagatgtgaaacacaaaataggaaagctgttagaggaatatgaatccggaggagacattagggaagcttatcgatgcataaaggagttaggcatgccattcttccaccacgaggttgtaaagaaagcaatggtgatggttatggagaaaaagaacgaaagactttggggtttgcttgcacattgttttggctcagggctgataaccatgaaccagatgacaaagggtttctcaagagtagaagaatcacttgatgacttggctcttgatgtgcctgatgcccgaaaacagtttctagcatatgtcgaaaaagcaaagactaccggatggttggattcatcgtttcattatggcaattccataaacggtaaaggaaatgggggcct

SEQ ID NO: 9311 - DNA, 310 bp, Gossypium hirsutum
  unsure (1)..(310): unsure at all n locations; Clone ID: LIB3828-023-Q6-K6-F1
tggncgcgtgggcttaaagctcataaaccagaagcagctcaacttggtttatgagctttaaggaagagcatgtgaggtcgcgtggaacgtatttggttttgtcgtccttaaacctgatggacgtactgctttgcttttgggttgtttattttttttaagaacaagcctggccttgtgggggggggggggggagaggcacggttgcctgactgcgtacctgctttcgattttgagagatcttttagaagctattgtgctgnctggagtttaaattatgaacgatgaagctagtcctcttttttttccaggt

SEQ ID NO: 9312 - DNA, 564 bp, Gossypium hirsutum
  unsure (1)..(564): unsure at all n locations; Clone ID: LIB3828-023-Q6-K6-F2
attcctcaaatccatgaagaactaaaagaaagcgtccctccccgttgtcgggcttcggcctgtgctgccccgtttgcttgggtctttttttggtgctctgggtctgtttggtattgctgccgcggtgggaagctgcggggcccgctgctctgggtgcgggcttgccggtgggggtggggtttgttttttctgggcttgggggttctactccctagcctgcgggctcgcntctgcctatgtggtgactgttggagggtttgggacttgcttgctggtggggtcctgtgggggtgttctttgctcccccttgggatgctacccactttttcggcgcccatgtggccagtgacttgatggtgtttggctccatttccacttgggggatgttgcagatgcgtatggggggtccttgtgttgcgctcccccctatcgnccagtgctgggggtgtgtccgcctcttggtntatgtgcggctcgcgttggctgattgcgcacttggtttcggccgtggtactacccgtggcctggtgggacccatcttcgttggccctggtcctaccccag

SEQ ID NO: 9313 - DNA, 409 bp, Gossypium hirsutum
  unsure (1)..(409): unsure at all n locations; Clone ID: LIB3828-023-Q6-K6-F3
gcacatttgacggaccgggtctggtgcgtgcgtnacgggcgactgcgggtcgggtcagatggaatgtaacggactcggagctgctccgcccgtgactctggctgagttcactctgggnccgggtgggcaagatttttacgacgtcagccttgttgntggctcctttatccccatgatcgttgaaggcagtggtgggtcaggtttttgtgcttcgncggggtgtccatctgacttgaaccgtcaatgcccgtcggngctccgggttggagacggtgacgcttgccagagcgcgtgtgaggctttcgggagtcccgagtcttgttgctgtggcgcgtttcgtccacctgcctcatgtttgccttccgtttattctgagatgttcatggccgcttgtcccgggtcttactgc

SEQ ID NO: 9314 - DNA, 534 bp, Gossypium hirsutum
  Clone ID: LIB3828-023-Q6-K6-F4
gcggaagctgatggatttatgatcaaaagagaggaggctagcgatttaagatgtgtccataacaatcctcaaggcggtcattttgcggtttatgcaccacatcctgctattgttctgaagatggaagatgggaccggacttcttctcccggatcattgttttggagatgcctagtgcgtagctcatggcaacattacgtaatgtccaaattgctagacctactatgtattaagtagagaagaacatgattgacaagatgggctacacggtaaagctagttcgagttactaaaatagtacacgaagcctattttgcacagctttatctgaccaaggactgagatgagacagagtctgtctgttgtgaccttacgacttctgatgccatcaacattgccgtgaggtgcaaggtacctatacaagtgaataagtacttgacatacagggactgtatgcgcgtcatcgaatcaggtaagctgtaaacacagtactcagcttcagacggcttattattcaccgaacttgatcagccaaa

SEQ ID NO: 9315 - DNA, 585 bp, Gossypium hirsutum
  Clone ID: LIB3828-023-Q6-K6-F5
ggcgaggcttgtctcctcttgtccgagtcctgtttgcaaatcattcatacagtttgcaggacttcggccttgaaaaaaaccattcattttaatatttttttttctccaacagaatcgaataggaaatccgaacacagaaagaagctaaaagaaacaatggccggagtgggaaatagaagttttagcttgattttgtatttcctgtgcttgggggttataatccctagcctcgaggctcacatcgcagaatatgatgactattggagggaaagggaattgcaagctaaagaaaacctggagaaggcttacaatcctaacccagaggaagtcacccagcatttcaacgaccatgtggccagaaacttgatggggtttcgcaccaattccacaaggaggatgttgaagaagcgtaagggaggtccttgtgaagcaaccaaccctatcgaccaatgctggcgatgtgaccgcaactgggaaaagaacaggaaaaagttggctgattgcgcacttggatttggccgtggtactaccggtggaaaggatggacccatttacgttgtcactgatcctaccgatgatgttctt

SEQ ID NO: 9316 - DNA, 493 bp, Gossypium hirsutum
  Clone ID: LIB3828-023-Q6-K6-F6
ggaccgtgggttcgtctttattctggtggattcgaagagtcaggaagaggaaagggtggcaagggtcttggcaagggaggagctaagcgccaccgtaaggtcctccgcgacaacatccagggcatcacaaagccggcaattcgacgccttgcccgtaggggaggagtgaagcgtatcagcggcttaatctacgaggaaacccgtggagttctcaagatcttcttggagaacgtcattcgcgatgcggtaacatacaccgaacacgccaggagaaagacggtgactgccatggatgtggtttatgcactgaagaggcagggtaggactttgtatggatttggcggttagatgatttagggtctagattttaaaatagaggaaaaattgtaggactcagttaaagttacaaggtgggttttgttgttcgctgttataatttctaattcgcatcatcaattgcatatttttattgaaatttgaaggtcattttgtc

SEQ ID NO: 9317 - DNA, 498 bp, Gossypium hirsutum
  unsure (1)..(498): unsure at all n locations; Clone ID: LIB3828-023-Q6-K6-G1
ccgggtcgacccagcgttcgagnaaaaaaaaagataagtttttctgcaacaaattaaggcaggtctctccaacaccatggacatgaagaagaagacacttgcgctgtcatattcgccgctgcctcaatgagcgcagtcatggcagcaagcaccgccccagcttcctcaccagatggcgccacacttagctccgcctcagttggcgctgcaccagcttctgcaccaggcccagactccagcgttgcaacctcaaccttgcctgttcttgggtccttggttggagccttcattgtctctttctttgcttaaattatgggttacctgcagtatttgaagagattatatataacttgcataccatttgtattcaagaaggctcacattccattcccttattttgacttctactgattgaagatttctttttcttcacttgttttgtaatgtgagaatttgaattccttcttatattttgcaattaaaaattatggttatgct

SEQ ID NO: 9318 - DNA, 601 bp, Gossypium hirsutum
  unsure (1)..(601): unsure at all n locations; Clone ID: LIB3828-023-Q6-K6-G2
atgttgnntcccaaaaggtgcgtgaaattggtacctctatggttttggttttngaaggtggnntcctgatannaatgttgttcttctggatgttccggnntaattgtaatcctggtggtttcgnttctaccattttcctcaaattccagaaatcccaagaattccagaaatcccacaaatcccacagatcccacaaatcccacaaattccactaatcccacagatcccacaagtcccacagatcccacaagtcccaaaaatcccactaatgccaggacagtcgggatgtgagagtggagagtgttgccgtcagggttgtggtgggacttgtgctgagtgtggtcagcccaggtgcgcatcaggatgttgccaggctgaaactgtaaagagcaaagggatagaagaggttatggacagtgaacccagtccaccaaagtagagagatgataccatattaagatgaaataacgaggaagagttggttgtcgtcttattaattatacaaaataagaagtaatgatgttgcagaaaggtttgctataaaatcctcttggacaaaaagagtaattatggaagaataaatagctcanaacaatatttc

SEQ ID NO: 9319 - DNA, 546 bp, Gossypium hirsutum
  unsure (1)..(546): unsure at all n locations; Clone ID: LIB3828-023-Q6-K6-G3
naaaaaaaattgaaagttcactccctttcttccattttcttgctcatttaaccaatttctctcaaaatttccactacccatcttaagattttaataaaatctctatggaaactacctcctaaactcattaccatcatcaatttcaccaattttagcttagggtttatggngcttttgcgagggaagatgaagctngagagagaaaccttcaacantggtgcagacttgccaagaagttgctatgatngttacgaagcatcgcatcacccgatgatcctataaggttgtttttcaaatgttaaagtgtnatttgttttatattagtgggatgttgactaagtctcgtgatgaatataacgattgttttgtgaatgacatgtccttaaggcttcaatgtgtctaaatctgcttatttcatatgtcaaatcgtccttggaacttcggtttttttctttccttcttttttttttttgtttttttttttttttcttcctttttttctcttcttctcttttttttctttctcctttttgccttcgtgggggg

SEQ ID NO: 9320 - DNA, 586 bp, Gossypium hirsutum
  unsure (1)..(586): unsure at all n locations; Clone ID: LIB3828-023-Q6-K6-G4
anacgtggnacgaatgtaaggttgtaggtttacagtacagcttgaatgcaccatatataccacccctccctccacatacaaagcaactcaacctcgtaatagtaataaaattcccttccaaagccatttgcagctagctcaccaaatcatggcttctaaaccaggaattctcactgactggccatggacacctcttggaagctttaagtacataatcctgggtccttgggttatggagaccatatactcgattatggttaaggatccacaggaatgggacctgaccaactttacggtaatcccattcatgttatggagaatgttgcacaaccagctatggattagtttttctcgttatcgaactgccaaaggcactaacaggattgtagacaagggtatcgaatttgaccaagtcgacagggaaaagaactgggatgatcaaatattgttcaatggaatcctgtttttcttggctaacaaatacgtccccggggcttcacacttaccactatggagaacggatggtgtgattataaccatgttgctccatgtcggtcctgtggagttcctttactactggtttcat

SEQ ID NO: 9321 - DNA, 598 bp, Gossypium hirsutum
  Clone ID: LIB3828-023-Q6-K6-G5
cgcaaggcgaccatggacgacctactggctatgcaagcttgcaacttgctttgccttcccgagaattaccagatgaaatactatttctaccacatcctctcttggcctcagcttctttacgtcgccgaggactacaacggccgcatcgtcggttacgtcctcgctaagatggaggacgaaagcaacgagtgccacggccacattacctctctcgccgtcctccgcactcaccgcaagcttggcctcgccactaagctcatgaacgccgcccaagccgccatggagcaggtgtttggagcagagtatgtgtcgctgcatgtgaggaagagtaacagggcagcgtttaatctgtatacccagacgttggggtataagattcatgatgtggaggccaagtattatgcagatggggaggatgcatatgacatgaggaagcagttgaaagaaaagacgaaccatcatcatggtcatcatcatcaccaccaccaccaccatcatcatggtggtggatgttgttcaggtgatgcaagaagtggagaagcggctcacacacgaggagactcgaaatcagagtcaaaagctagcacaaaatctgatt

SEQ ID NO: 9322 - DNA, 566 bp, Gossypium hirsutum
  unsure (1)..(566): unsure at all n locations; Clone ID: LIB3828-023-Q6-K6-H1
gnaagcacacaaacctaggttaccttggtgatgctttgttccccaccgaagttcgggttgagaagttctcaccacattacttggacccgaacttgggtatgtttcaacaagagatcattgttgaaaagtccaataaccaggtgaaatacggtcagaaatttacaacgcagatccgtggaaacgtcgaaattgaccaacaaaagcttcaagtgacgatttactcgccgccatttgtgacccacggggttgctatgaatcagagattgattcaattgggaattgtggaatttaacaaatatgttgccctaaatacaaacaacattgttcttcaaactcccattaatagcaacattgcaccacctggttattacatgctctttgtgaactacaatggagtaccttgccgtcgatcaatgtgggttcgaattttaccttagatctttcacaacaagcattgaattgtcaaagccactatatgtaatacgaatcattgttcacgttttgtttcacacgttgttatttgaagatcttatataatacaaaatgtggataattagattcatttt

SEQ ID NO: 9323 - DNA, 442 bp, Gossypium hirsutum
  Clone ID: LIB3828-023-Q6-K6-H2
gcgttcggttaatgaatgtgacgtcgatattagggaaaaattgtacggtaacattgtactcagtggtggtacaactatgttccccggtgtcgctgatagaatgaccaaggagatctcggctttagctcctagcagcatgaagattaaggttgttgctccacctgagaggaagtatagtgtctggattggcggttcgatcttggcttcccttagcacattccaacaaatgtggatcgccaaggcagagtacgatgaatcgggtccatcaattgtccacaggaaatgcttctaaatgtttttcgacatgagctttgttctatcaacatatgtttattctcttgtcggatagaacgatcaaacattagagaaagagaattggaatttgtgtggaccaattctttcaattctttttaatgagaagttggtgtttttaccatctaac

SEQ ID NO: 9324 - DNA, 347 bp, Gossypium hirsutum
  unsure (1)..(347): unsure at all n locations; Clone ID: LIB3828-023-Q6-K6-H3
acctgctcctatnctatggtgggaatgcaaattatggaatggctcatccctccactcgagcttnctggtgggtctacgtcataccctccatcttatggtggccctgtgggtggttntgctggtgngggtttgngtgatgtgaggactggtggtcgtggtggccctcctggggggtgtggttctggtggtcctcgttttctgggaggtggttatggtggtcctcctgtttgtgctccggcttggatctcgctgtgtgacggcttctgtggggtttcttgcgttcgctcctgtttgttcttttctgtttttgcctcctgctgtctctcttgccgttttgtgagaccttt

SEQ ID NO: 9325 - DNA, 613 bp, Gossypium hirsutum
  unsure (1)..(613): unsure at all n locations; Clone ID: LIB3828-023-Q6-K6-H4
gtgatgagcttacccttgnaggtatcaagcaattttatgtcaatgttgagaaggaggaatggaagcttgagacactttgtgatctctatgagaccttagcaatcacccaaagtgtcatttttgtgaacactaggcgtaaggttgattggcttacagataagatgcgtagccgtgaccatacagtgtctgctacccatggagatatggaccaaaatgcaagggacattatcatgcgggaattccgatctggatcctctcgcgtgcttatcaccactgatctcttagctcgtggtattgacgttcagcaagtctcacttgtgatcaattatgatctcccaacacaaccagagaactaccttcatcgaattggtcgtagtggaagatttgggagaaaaggtgttgccatcaactttgtaaccacagatgatgagaggatgctatatgacatccagaggttttataatgttgtaattgaggagctgccatcaaatgttgctgatctaatttgattctggttcaggctggctaggtaaatggctctctgggaatgacaaagcttaggaggtccagttacaactgggagggatttcgttcctgcacatttagttgagct

SEQ ID NO: 9326 - DNA, 557 bp, Gossypium hirsutum
  Clone ID: LIB3828-023-Q6-K6-H5
gcagtgcttcagcttgagccatcgatgggccttgtgcagaggtgaccgaaactgttcggagaaattgaaatccgatctggtttcatccgtgggtgtggtgatgtgcacagatgggttaactacaccgagcatttttggtctgtgggtcaaattttatgatgatttttaaatttcaaaacgttttaatcacgacatttactcggaaaaaaaaatgtccaataccaatgaattccagttcataagcgctcgatcttatagcacttatcagtgaggccccactgctaatacaattagatttcctcttcataggcttgggattggtttaggattacgagctccttttctctttcaaacttagaagaaaaagaaagaatcactcaattggatgacagccacaatataacctattaaacattctttttccctttctagattagtctaattttagtattttatctgtttgaaattttcttacaagttcattgtcttgattctatataaaatactttgttgtcattcttattatactacaaatgccagtttaaaaatgacctttt

SEQ ID NO: 9327 - DNA, 590 bp, Gossypium hirsutum
  unsure (1)..(590): unsure at all n locations; Clone ID: LIB3828-023-Q6-K6-H6
ggccactggtttcgtgtggcttgaaacaaagnagnagcataacccacaagtttgacaagattggtaagcttgtttcctatgcaactgaggtcacagctgtggttngagaaaaacaagatcaagaagctcactggggtgaagaccaaggagcttctggtttggatcacactcagtgatatctatgttgatgatccaccaactgggaatatcactttcaagacacctgctgggctgttcagaactttccctgtatcagcgtttgaggttgaaggtgaagttaagggtgctgttaaggacaagaaagaagaaaaggataatgtgaagcctgctgctgtggaagcagtgaaagaggtctagagtagtgagactagaattaaatttccaaattccatccatctgcggggttgtttttggacttgctatcttttaacaagcctcttctattaatatcatcaatagcagcaatcaataaaaaataacagcatgttagtttacattcagaacactaatgttgcatcgcattgcaagtcaaattgcatggaccatattatatttcaggtacgaccttgcctgaggctgagatacctata

SEQ ID NO: 9328 - DNA, 604 bp, Gossypium hirsutum
  unsure (1)..(604): unsure at all n locations; Clone ID: LIB3828-024-Q6-K6-A1
tctgttctatgatcctgatccaaatccgaaaatgaggaacaggcagttgctagagctcaccgaattggacaaacaagggaagtcaaagtaatttacatgngaagcagttgttgacaaaatctctagtcagcagaaggaggatgaattaaggagtggaggtacagttgattttgaggatgattttgctggtaaggatagatatatgggatccattgagagcctcataaggaataacattcaacagtataaaatcgacatggccgatgaagtaatcaatgctggacgttttgaccagagaacaacacatgaagagagacgcatgactttggaaacattgttgcatgatgaggagaggtatcaagaaactgtccatgatgttccctcattgcatcaggtaaatcgcatgatagcaagaagtgaggaagaagttgagctgtttgatcaaatggatgaagaactggattggactgaggagatgacttgtcatgaacaggtacctaagtggcttcgagccagtgtaagagaagtaaatgctgctgtagctactttatcaaaaaagccatcaaagaacattttatttactgctggtggcggtactgaatcc

SEQ ID NO: 9329 - DNA, 652 bp, Gossypium hirsutum
  unsure (1)..(652): unsure at all n locations; Clone ID: LIB3828-024-Q6-K6-A4
cccgggntcgnacccacgcgttttgtgtttttaagtttattcaagttagcatgggtgcgcatagtgaaaaccttgctatagtgtattgtctgcccttgtttaatgtagctgttgtaaaataggggaaagatgttttcttgcattttgttgatgtgagtactatcaatatctttttgtttatgtaaattcaattgttttattggttgagaggatagataaagatagatactatgcatggatgtgccgatttgggaaagaagaataagttgggttgaggtttagggagttttggaaaaatcttattctcttatttgatgtataacgaatgtttaactttgtgatagcaggatgtcggaggcaacattcagacttagggaaaagcttatcgagtattagaaatattttctaagcatccacaaacacacttacttgaaagggatgagggatctataacatgtctcatggaattggaaaaaaggaatgagagctgtcactcatggtacattcagctattcagcgaggacttccagttgtgttagcaaaagctcaaaagcttataactctgagcaaaacaataccctcttttaatacattctttaatttagagttaagattatgctaccggaagcaattgcaattgttatggccccaa

SEQ ID NO: 9330 - DNA, 548 bp, Gossypium hirsutum
  unsure (1)..(548): unsure at all n locations; Clone ID: LIB3828-024-Q6-K6-B1
gtatgaatctggggggtggtggggctacaaactatgtggaaccaccctgccggacccaaaaccattcacttttgggcaccaacttttaaatggggcattagcataacgaatggggctgactttgctaaactttttttttaactttcctaccctcaacaaagaggggggggtgcaactggaattatccgggcacgctacaccactggcagggctgcgaaaaactggaatctgttcagtgtaaacattgctatggcctgcaacaggcatataccaactaacttcgaaaaataaaacatgattacttttttgaggccaagccgtgcattgcatctgacatgatgatgaaatcttccaaaattctgtgtttttaatggaacaaattttcagttatcttgccttgtttttttgttaattaaaagttacactttggctctctggcttggctttgaattactcaagcatgttgtgttgcggaaaaagtggaacttgatgatgatgattgtagtgcctgnccttatcgcctcactttcaacggtttatcataaccc

SEQ ID NO: 9331 - DNA, 106 bp, Gossypium hirsutum
  unsure (1)..(106): unsure at all n locations; Clone ID: LIB3828-024-Q6-K6-B3
agattcngtcttgttccgtgggcgggtgcttgttggggtcctttcttatcacctgttgaacggtgggggtggttccnctcttttttttgctttctgttcccttctt

SEQ ID NO: 9332 - DNA, 602 bp, Gossypium hirsutum
  unsure (1)..(602): unsure at all n locations; Clone ID: LIB3828-024-Q6-K6-B4
gnaaactnnggcaggcctnnaaaatccgttgaaaacgcccacgacgagtcggtttggacggccacttgggttcccgccacgggcagccgcccgccgctccttttaacaggctccctcgacgaaaccgttaaggtgtggaggcctgacgagctcgacctcttgcgcaccaacactggccactgcctcggcgtcgtttcggtggccgctcatccttccggcgtgatcgccgcatccgccgcgctcgacagctttgttcgcgtgttcgacgttgacaccaacgctaccatcgccactctcgaatctcctccgtctgaggtctggcaaatgcaattcgatcccaagggtacaacacttgcggttgccggagggggtagtgcatcgatcaagttgtgggacactgcgacgtggaggttggttgcaactttatcaattcctcgtcctgaaggatccaagccttccgaaaaaagcggcagcaagaagttcgtcctatctgtcgcatggagtcccgatggaaggcgacttgcttgtggctcgatggacggtacaatttcggtttttgatgtagctcgtgccaaatttctacgtcaccttgaaggccatta

SEQ ID NO: 9333 - DNA, 488 bp, Gossypium hirsutum
  unsure (1)..(488): unsure at all n locations; Clone ID: LIB3828-024-Q6-K6-B5
ccccccgcccaccaccagggggggggggcggagggggaagaatcagancagttggggatgtctcatgggactctggtttaggactcaatttgttctccctacacttggtcaactcactttgcttctcatgtttaacacataaaatttcagatattgctactctttaccttctcggggggggggcaaattttttggaataaaactcaggcctagaatacttgtgtcttcacccactgatgttgacattttgggcatgtcgcaagcctgcagattgtttgtgcagctccatttcttcattcttgtgtaagtgaggttttgataatgctggaacactagcatcattcaggaagaaaaaaggaatgaaagagaagggttattgggtgctttttagtattgctatttattgaatccttttcttctcatgttcatagtctcgttctaagtacattctgcttggaaaatctttattatcatttggctttgaatcg

SEQ ID NO: 9334 - DNA, 204 bp, Gossypium hirsutum
  unsure (1)..(204): unsure at all n locations; Clone ID: LIB3828-024-Q6-K6-B6
aacttatctgagggggggggctcgnngatgctgcacccgnctttcttggccatgccttggcgctttcccgcggtgtttttttcttctatcaaccagctttggttttggggggggggatgaagctctatgctgcgtctttggcccggtttccgggggggtccccttttctctgtctcctctntgggcttggccactcgtctcgcg

SEQ ID NO: 9335 - DNA, 555 bp, Gossypium hirsutum
  unsure (1)..(555): unsure at all n locations; Clone ID: LIB3828-024-Q6-K6-C1
gggggggggggggggggngagaaaaaaggaggaagaagaagctaggaggagagaggagggaggaggagctaggagggaagaggaagaggaggccagaaggagagaggaagaggatgctcgtatttttttttttgaagaggaagctacnanatgggggggggggggggggagagaagaagaagcaaggagagagcatgaggaaggggggggacaggaagcagaaaggcaaaggagagcataagaagccgcagcaaagggttggagggagagggagaaacaaagaggacaaccagaggaaaaagaaacggaagaaggtggcgacgagggccctaaccgaagaagggctgcgaagaaagtgtggttgatttagtcttaatccattcgcagatggttttgcagtagtgaataagatctgccctactatgctatcaagtctaggttattagattccatgtttagcgtctgtgaaaagctttctaaatctatggtttttttgggtcttgatcttaaataagctctttggctttctttcaccatttccctccgccccttgtt

SEQ ID NO: 9336 - DNA, 627 bp, Gossypium hirsutum
  Clone ID: LIB3828-024-Q6-K6-C2
aaaaaaaaaaaaaaaaaaaaaaaaaaaaaaaaaaaaacaaaaaaaaaaaaaaaggaaaaaaagaaaaaaaaaaaaaaaaaaaggaaaaaaaaaaaagaagaaaaaaaaagaaaaaaaaaaaaaaaaaaaaaaaggaaaagaaaaaaagaaaaaaaaaaaaaaaaagaaaaaaaaagaaaaaaaaaaaaaaaaaaaaaaaaaaaaaaggagaaaaaaaaaaaaaaaaaaaaaaaaaaaaaaaaaggaaaaaaaaagaaaaaaaaaaaaaaaaaaaaaaaaaaaaaaaaaaaagagaagaaaagaaaaggaaagaaaaagaaaaaaaaaaaaaaaaaaaaaaaaaaaaaaaaaagaaaaaaaaaaaaaaaaaaaaaaaaaaaaaaaaaaaaaaaaaaaaaaaaaaaaaaaaaaaaaaaaaaaaaaaaaaaaaaagaagaaaaaaaagaagaaaaaaaaagaaaaagaaaaaaaagaaaaaaaaaaaaaaaaaaaaaagaaaaaaaaaaaaaaaaaaaaaaaaaaagaaaaaaaaaaaaaaaaaaaaaaaaaaagaaaaaccagaaaaaagaaaaataagaaagaaggaaaaaagaagagaagaaagagaaaaaaaagaggagaagaaaa

SEQ ID NO: 9337 - DNA, 364 bp, Gossypium hirsutum
  unsure (1)..(364): unsure at all n locations; Clone ID: LIB3828-024-Q6-K6-C3
gccaaatttgatccaagccaagtcgtcgacgtcttcgtccgcgtcaccggcggtgaagtcggagcagctagttcactcgctccgaagatcggtcctctcggtctctctcccaanaagatcggnnaagatntcgcnaaagagaccggcaatgaatggaagggtctccgcgtaaccgtcaagctcactgtccagaaccgccaggcgaaagtcatggtggtaccgtcggtggctgcgctggtaatcaaggctttgaaggnaccggagagggattggttgaagaccaggaacatcaggcttatcgggaacctcggactggctntcgttttagagatcgcttttgtaatgagggggggggggggtggtt

SEQ ID NO: 9338 - DNA, 578 bp, Gossypium hirsutum
  unsure (1)..(578): unsure at all n locations; Clone ID: LIB3828-024-Q6-K6-C4
gcgttcggcgggntacggccttgcgtggctgcatttgggagcanaccagttcgatgaaacagatccaaagcaaccaaccaagacatgggaatacttcaactggtactattttgtgatgggggcatccatcctagcggctgtcacagtgattgtttatattcaagataacatcggatggggatggggccttggaatacccaccatttctatgtttctctccatcattgcattcgtccttggatacccactttacagacacatggatccggtggggagtccatttacccggttgctacaggtctctgtggcagctttcaggaagaggaatttgactatggtttctgatccaaacttgctgtaccagaatgaagagcttgacgcatcaatttctatcgacggaaggcttgtccacagtaaacaaatggcatttcttgacaaggcagccattgtgactgaagaagataatgtaaaagctccaaatctatggagactaaacagtgttcatcgagtggaggaattgaaatctttgatccgaatgggaccaatatgggcatcaggaatcctcctcatcacagcct

SEQ ID NO: 9339 - DNA, 249 bp, Gossypium hirsutum
  unsure (1)..(249): unsure at all n locations; Clone ID: LIB3828-024-Q6-K6-C6
tttcttgtntncctnaatctatactgtgtggggggggtcaaaatcaaatgtttctttccaaacttctcgaggaaccaaggggagggtgggttccanaagaagagcagcgttggttncctatntggngnacttgnccaatgntggaactttttttgctttttctgngttcaaagccgttttgttagggcgagtggaanaaatcttanaacnggcttttcccattgcactgttgaagggtagacttactat

SEQ ID NO: 9340 - DNA, 578 bp, Gossypium hirsutum
  unsure (1)..(578): unsure at all n locations; Clone ID: LIB3828-024-Q6-K6-D2
cggtccggttttttttgttttttttttgtcgtccggccagcngaggggggcccctggggcaaaatgggggacttggtgatgtcctcggtggacttcctcccgcatggctgccaaaggacaccgtgttatgacagtgtgtcctcgctatgatcagtacaaggatgcatgggatacaagtgtgttagttgatctaaaagtcggagacaaagttgtaactgttcggttcttccactgctacaaacgtggagttgatcgtgtctttgtcgatcaccccatgttccttgagaaggtatggggcaaaacagcatccaaaatctatggccccagagcaggtttggactacgaagacaatcaactgcggttcagcttgttatgccaggctgctttggaggcacctagagttctaaatttaaatagcagtaaaaatttctcaggaccatatggggaagatgttgtctttattgcaaatgattggcacagtgctcttcttccatgctatttaaaaagcatgtaccagtcaaggggtatctacatgaatgcaaaggttgtattttgcatccacaacatagcctatcagg

SEQ ID NO: 9341 - DNA, 432 bp, Gossypium hirsutum
  unsure (1)..(432): unsure at all n locations; Clone ID: LIB3828-024-Q6-K6-D3
gaaaaaaacaaaaaaaaaagaaaaaaacacaaaaaaaaaaaaaaaaaaaaaannnanaaaanaanttttattttttttttttttttcccccccccccccccccccccccccccaccccccacacaaacaaaanaaaaaaaaaaaaaaaaaaaaaaaaaaaaaaaaaaaaaaaaaaaaaaaaaaagagaaaagaagaaaaaagaagaaaaaaaaaaaaaccaaaacaagcaaaacacaaaaaaaaaaaaaaaaaaaaaaaagaaaaaaaaaacgaaaaaaacagaaaaaaacaaaaaaaacaaaaaaaaaagaagaaaaaaaaaaaaaaaaaaaacaaaaaaaaaaaaaaaaaaaaaaaaaaagaaaaaacaaaaaaagaaaaaagaaaaaaaaaaaaaaaaaaggccaccggagaaggcaacacacagagac

SEQ ID NO: 9342 - DNA, 614 bp, Gossypium hirsutum
  Clone ID: LIB3828-024-Q6-K6-D4
ggtcgacccagcgttcgctccatgttccagaacagacttgggtggcgtattgttttgatggttggagcactcccagcggcgcttacctactactggaggctgaagatgccagaaaccgctcgttacaccgcccttgttgctaagaatgctaagcaagctgcatctgatatgtcaaaagttttgcagatggacattgaggcggagccacaaaagattgagcaagagaaaatccgatatggcttgttttccaaggagtttgctaaacgccatggacttcacctgcttgggacaaccaccacttggttcttgcttgacattgcattctacagccaaaacttgttccaaaaggatatctttagcgccattggctggattccatctgccaagaccatgaatgcccttgaagaagtttacaaaattgcaagggcgcaaacactgattgctctttgcagcaccgttccaggctactggttcacagtggctttcattgatattatgggaagatttgccatccaattgatgggcttcttcttcatgacggtgttcatgtttgcactggccatcccttacgaccactggattcataaggacaaccgaattggcttcgttgttat

SEQ ID NO: 9343 - DNA, 590 bp, Gossypium hirsutum
  Clone ID: LIB3828-024-Q6-K6-E1
gtcgccccaagctgttgaggtcactggccccaacggcaaccctgttcgtggatcatctagatccggacgcggcggcggcggtggtggcggttatggcggtggatccggtggatatggtggagggggaaggagaggcggttatggtggaggaggcggtggtggtggtggtggaggcgccggatgttataagtgtggtgagatgggccatttagcacgggactgtgggcagggtggcggtggcggtggaggcagatatggcggaggcggaggcgggggcggcggtgcttgttacaactgtggaggctctgggcatttcgctagggagtgccccaacagtggtcgctaattttgaggagggatttaaatgtgtcactcgcatctcctccgatccatcctttttttcctcttccgctactgtttctgtcggtttggttattattgtatggtttgctttttatgttttccttttccagtttatgcaggacgatttctcttagtcagtttgctgtttttgtctttttggattttgaagttggcaaatggttgtaatgggtgctttcgtagtagtcttacagtgagggtggacatta

SEQ ID NO: 9344 - DNA, 563 bp, Gossypium hirsutum
  unsure (1)..(563): unsure at all n locations; Clone ID: LIB3828-024-Q6-K6-E2
gtcgtttcttttttttttttttttttttgtaccactttacaagagccactgggncgggggctagtactgagcaccaggaaatagaaagctgcgtctgaaacaagaagaagaggacaggcttaatagactgttaattgagaataagataaaggattttgaagctgggtggataaggaaattggatgcacacaaggatgcagtttctcttctgagtgacaaattgactaacgcagagaatgaagttaaacttctcaaagagctttgcaacctaaaggtttcagcaggtactccagaatgtgttccaaatgaatctggaatgtctagttagtaaggtatgtctagtaagtttttatgtagtgcagaactactcttatttatatgtcaaacaatatgcatcatgcgcggcatctacgaatggaggcttttgttctagttggctcactatatggcagatttgatttgcaaagtttgtagcagcaggacttcactgggaaaatgctgagaaccgaaatggatgccttaatctgtcttcttcattgggtcagtttggatgaggactccgc

SEQ ID NO: 9345 - DNA, 587 bp, Gossypium hirsutum
  Clone ID: LIB3828-024-Q6-K6-E4
ctttacatctccatcgccatttttagcttcaaattctcaaccaaaccaagtcttaaaggataatcaaaatcaaacccaacaaatcccagaatccatagacatggaggaaacaataatccctgttacagagcaaaagcaatacccacaaacacccaaacacattttcatcctttcaggccaaagcaacatggcaggccgaggcggcgttcaccgccaccactgggatggcgtcgtcccacttgattctcaaccacacgcttccatcatccgccttagcgccaaactccactgggaacctgcccgggagccgctacaccacgacatcgacgtccgtaaggcctgtggagtggggcccgggatgtcattcgccaatgcggtgaaggaccatctcggcggcggcggagagtgtttgggtctagtcccttgcgccgtgggcggcactgcaatcaaggaatgggaacgtgggcagcacctgtatgataacatgcttaagagaagtaaagagagcgtggagaagactaaaggggaaatcaaggctttgctttggtaccaaggggagagtgatacgccgtcgtatcatactgctg

SEQ ID NO: 9346 - DNA, 561 bp, Gossypium hirsutum
  Clone ID: LIB3828-024-Q6-K6-E5
ccttgttgcttttagtccgcctcagatctccgtctccacaggaatggctaccaagcagccaaatactggcctctttgtgggactgaacaagggccatgttgtaaccaagaaggagttggctccacgtccctctaatcggaaaggaaaaactagcagaagagtccattttgtgaggaacttgattagggaagttgctggttttgcaccatatgagaagaggattactgaacttctgaaagttggtaaggacaaacgagcgctcaaggttgctaaaagaaagttgggaactcacaaaagggcaaagaagaagcgtgaggagatgtctagtgtgctccgcaagatgagggctcaccctggaggtggagaaaagaagaagtgaagctctctggtgacaagtcaccttgatgatttcattagagaactttgtttagcatatatttcaacttattggtttgagactgaaaactatgcactgaatctcgtttgtttaattttataatgtatgctaaatttttgtgtttagttgcatgtccttgacatgttgggtattgccttgttttc

SEQ ID NO: 9347 - DNA, 532 bp, Gossypium hirsutum
  unsure (1)..(532): unsure at all n locations; Clone ID: LIB3828-024-Q6-K6-E6
ctaaacccacagagtaacaaaaaatcaggcaaaatgggtagcaaccaagccgcagtttctttcttgaccaacctcgcacgcgccgcttttggtctcggcgctggcgccactgtcctcaacgcttctatgtacacagtcgacggcggccaaagagcggtgatatttgaccgcctaaggggagtatcggacaaaacggccgatgaaggaactcactttttgatcccatggctccagaaacctttcatctatgatatccgcatgaagccccataccttctcatctgtctctggaactaaggatctccaaatggttattcttacccttcgagttctttctaaacctaaggtggagaaacttcctgaaattatcaacaccttggnctacattatgatgagaaagtgcttccctccatcggcaatgaggttttgaaagccgtggttgcacagttcaatgcctgatcagcttctcaccgagcgtctccaaagtgtcgacccttggtaccggaattcactggacacagcgtgtcaagggg

SEQ ID NO: 9348 - DNA, 616 bp, Gossypium hirsutum
  Clone ID: LIB3828-024-Q6-K6-F1
gcgttcgttgtggcttgaaaaatatcctcgtcatgccagtgcagccaagctccaatgcaaaaaatgcaggaaatggagcagttagcaaacgttcagggtctgccaaccgataggaatacgctgaataagctaatggcattacatccgggaataaacaacccgttaggcaacaaccatcacatgggcggtagaggaactttaagtggttcagcacaagctgctttggcacttactaactaccagaatctgcttagtaggcagaactctatgaattcaaaccctaactcgcttcatcaggaagcctcttccttcaatagttctaaccagagtccatcttcaaacttccaagggcctgctgccattttaccgggatccatgcagagtctgcctgttagtggcttatcgagtcccctgttaccaacaccacagcagcagcagcagcagcagcaacagcaacagcttagtggtaacttaatgcagaagaaccatccacagtctcctcagggtaaccaggttttacaacaacaaatgatgcaacagctgtaccatgatatgtctaataacaatactgcagttcaacagcaacagcagtccctgagtgggcagaatgggaatg

SEQ ID NO: 9349 - DNA, 421 bp, Gossypium hirsutum
  unsure (1)..(421): unsure at all n locations; Clone ID: LIB3828-024-Q6-K6-F2
ccaggaacgggggcngagngnggncagcccaggngcgcatcaggatgttgccaggctgnaactgtggagagcanagggatagaagaggttatggacagtgaacccagtccaccaaagtggggagatgataccatattaagatgaaataatgaggaagagttgggtggggtcgtnttaattattcaaaatangaagtantgatgttgcagaagggcttgctataaaatcctgttggataaaaagagtaattntgaagaataaatagctcaaaacantatttgatttacaatatcctaaagttccttgaatcttgttttgtggccttgtgtgattaatgcatgtacatgctaatatatatgattttctttgctgtgtgcggccgccgtctcctcctcttctctctcttttccttttttttaag

SEQ ID NO: 9350 - DNA, 283 bp, Gossypium hirsutum
  unsure (1)..(283): unsure at all n locations; Clone ID: LIB3828-024-Q6-K6-F3
aaaaaanaaaaaacccaaaaaaggggtttttttttttttttttttttttttttttgtgtttgggggggaaaaaccccccccccccccccccccccccaaaccaccccaaaaaaaaaaanaaaaannnaaaaaaaaaaaaanannnaaaaaaaanaaaaaaaaaaaaagaaaaaaaanaaaaaaaaaaaaaaaaaaaaaaaaaaaaaaaaaaaaaaaaaaaaagaaaaaaaaaaaaagagagagggaagaaggcagggaaaaaaaagagggggggaagagagcg

SEQ ID NO: 9351 - DNA, 338 bp, Gossypium hirsutum
  Clone ID: LIB3828-024-Q6-K6-F4
ggcatcagcccaagtgaatcccccaaagcgttggcctcaaactggggggctattgcggcaagagtaccatgtcctgctccatgaaatgcggttatctcggctgccttgcaggctgtgtgacatctccctcgataggatgcggctataagtgctttttcgaaaacaccagttgccaatttggctgcaccccctttgatattcgaggccaatcagcccgtgttaagacctagagggatatatatatatgtgagcgcgcgcgttgtttgtttattattaagtgtttgttattattattacaaaacaaaaaacatgatgatacacaatgaataatgtcttcg

SEQ ID NO: 9352 - DNA, 512 bp, Gossypium hirsutum
  unsure (1)..(512): unsure at all n locations; Clone ID: LIB3828-024-Q6-K6-F5
caaacaccatcgcgttgccgtcgcatttccgccgccggggggggggggatgtcnagtcggcctgaattgcaagccccgccggtgattttctacgacgacgttttttttttttatccacttcctcatctcgtgtggggggggggcggacaaagctctctgagagagcactggaacttctggctgtgcccgatgatggagtcccaaggttgctccttgatatcggttgtggctcagggcttagtggggagacattaactgggaatagtcaccaatggattggtttcgctctttctgaatcaatgcttaatgttgctttgcctaatgaggttgcaggagatttgttacttggtgatctgggtcagggcttacgacttcgacctggagttatcgatggagctattagtttctctgctgttcagtggttttgcaatgctgacttgtcctctcacgagccaacattgagattaaaggcttttttccggtcattgttttcatgctttgcaaggggagct

SEQ ID NO: 9353 - DNA, 121 bp, Gossypium hirsutum
  unsure (1)..(121): unsure at all n locations; Clone ID: LIB3828-024-Q6-K6-F6
aaaaaaannnnaaaannnnnnnnnccccaaaaaaaaaaaaaaaaaaaaaaaccaaaaaaagggggttttgaatttttttttttttttttttttttgttgttggttaaaaaaagcgcccccc

SEQ ID NO: 9354 - DNA, 600 bp, Gossypium hirsutum
  unsure (1)..(600): unsure at all n locations; Clone ID: LIB3828-024-Q6-K6-G4
tatctatagcatacagagatggagaggcaaanaagcaagcaggtttgtttgttgatgtgggttttggttgctgcctttttctcccacaatagggtcattgcagtgacctccactggccttggtgagcagaaaactactatccagctcctgaccctcatgctggaactcccccttcaggttcacatggcacaccaccatcttcaggaggtggatcacctccctctcatggaaccccgtcacatggaggtggttaccacccttcaccaacaccatcaacgccttcgggtggaaattgtggaactcccccacatgacccttcaactccatcaacaccatcacacactcctcctcatggtactccaccatcatctggaggtggtagtcccccatcgtatggaggaggcagtcccccatcgtatggaggaggcagtcccccatcgtatggaggaggcagtcccccatcatacggaggtggcagtcccccatcatatggaggtggcagtccaccaactactcccattgatccaggaactccaagcattccctcacctccattctttcctgctccaactccaccaattggtggtacatgcgatttct

SEQ ID NO: 9355 - DNA, 191 bp, Gossypium hirsutum
  unsure (1)..(191): unsure at all n locations; Clone ID: LIB3828-024-Q6-K6-G5
ggggggngggggagggggggggggggggtgggggggggggggggggcgggaccaaaaaaaaannannaaaannaaaaaaaaaaaaaaaaaaaaaannaaaanaannaaaaaaagggnnggggnnnnnnnagnnnnnngggggggggggggggggggggggggggggggggggggggggggggggggggggg

SEQ ID NO: 9356 - DNA, 601 bp, Gossypium hirsutum
  Clone ID: LIB3828-024-Q6-K6-H1
ggcatatcctggcccatcatcgcagtacaacatgtcgcagcctccttatgggggctacccgtcccaaccttcatctggtggatatgcctctggttgggaccagtcatctatacaaccaaaccagcaaacctctgctgcaagtggttatgattactataaccaacagccttcacagcagcagcagcagcaaacgtctggtgattcggtaactccagctgataacagtggttacaattacagtcaacctccagcttctagctatatgcaaccaggacaaggttattctcagtatggctatagtggataccatcaatctggttatgggcagccatcatcatacgatcagcaacaaagttatggttctgcttcgagctacggtaacgtgacaaatccaactcaaggtggtcaaggggattcaggtcaggcacctacgtctacccaaccgtctgcaacaggccaacaagggtataatactagtcagcagcctaacccaaaccctggaagttatccacctccaggaagtactcaatctggttatggaatgccgccttcccaaactggctatgggaatcagccaccagcacagcctggttatggagct

SEQ ID NO: 9357 - DNA, 67 bp, Gossypium hirsutum
  unsure (1)..(67): unsure at all n locations; Clone ID: LIB3828-024-Q6-K6-H3
aaaaaaaaaaaanaaaaaaaaaaaaaaaaaacanaaaaaaaaaaaaaaaaaaaaaacaaaaaaacaa

SEQ ID NO: 9358 - DNA, 593 bp, Gossypium hirsutum
  unsure (1)..(593): unsure at all n locations; Clone ID: LIB3828-024-Q6-K6-H4
accctcgtttaccttcntttcctttacttctctattgctacgtttttgaatttttagtgagcgaaaatgagagagtgcatttcagtccacatcggtcaggctggtattcaagtcggaaatgcctgctgggaactttactgccttgaacatggaatccagcctgatggccagatgccaagtgacaagactgtcggaggaggtgatgatgcttttaacacctttttcagtgaaactggtgctggaaagcacgtccctcgtgctgtctttgtggatcttgagcctactgttattgatgaagtgaggactggtacttaccgtcagcttttccaccctgagcaactcatcagcggcaaggaagacgctgccaacaacttcgctcgtggccactacactattggcaaagagatcgttgacttgtgcttggaccgtatcaggaagcttgctgataactgtaccggccttcaaggtttccttgttttcaacgctgttggtggaggcactggatctggtcttggctccctccttttggagcgtttgtctgttgattatggcaagaaatccaagttgggtttcactgtcttcccatcacccca

SEQ ID NO: 9359 - DNA, 55 bp, Gossypium hirsutum
  unsure (1)..(55): unsure at all n locations; Clone ID: LIB3828-024-Q6-K6-H6
aaaaaanannnnaaaaaaaaaaccaccaaaaaaaaaaaaaaaaaaaaaaaaaaaa

SEQ ID NO: 9360 - DNA, 653 bp, Gossypium hirsutum
  unsure (1)..(653): unsure at all n locations; Clone ID: LIB3828-025-Q6-K6-A1
tccggntttccactttccttctcttccaggatctggaatcgcgaaaagggnaatttatcagtntnngaaaaagnatgggnntcgcggnagnnttagcanngtggcggnnntgggcagnagcttcnnattaggttattttnngtttgnngtagcggnagaaagccttcctaaaccagggnaccaaacaactctccatagctgnnctccagctnngaagcaccagcgtgtgctcgcaaacccctggcccnntgctcctgaacnncagtagatatttcccaagcaaattcctgcttggtattnaacagtattntccgcaaacaattacatgcgtgnccgatggtcagaatactggcaatttccttacggatcgaccttccaccaaggtttattctgcccctggaggcggatcttctctggactacctatttggtggacctggaggtagtaaatgagattgtgccttaataacatctaataacatctttgataagggagagtattgtttgttgatttgggggaagcagtaaagctgtggatgaaatgctgttcttataatctttgaacacagaagcaatgaaaacatgcctgtctcttgtggtgtaatattgcaggtcttgtgggggtttttttgttgattcaatcaaatgagttct

SEQ ID NO: 9361 - DNA, 122 bp, Gossypium hirsutum
  unsure (1)..(122): unsure at all n locations; Clone ID: LIB3828-025-Q6-K6-A2
cagcgtgcttcgccgcgggggggggggggggggcttgcnctcggtnnggcctttcccggcttctttttccgcgggggtgcttggtggtgggcttctccgtgtttcccgttgccctgctgtct

SEQ ID NO: 9362 - DNA, 612 bp, Gossypium hirsutum
  unsure (1)..(612): unsure at all n locations; Clone ID: LIB3828-025-Q6-K6-A4
gtcgacccagcgtctcgtacatgncgttgacttgngattctgaggtctgcctctcccaatagcggtgcagagccaatactactcggagagcttaccatatgatcccaggccggttaaggtcactaatctttacttctttttgcatgaaactctccgcggtaagaacccaacagtagtcatggtagcccaagctaacaacacaagcaacgacaactactcatcagtgccatttggcaccctatatgccattgatgatcccctcaagataggtcctggggacaactcagaggtgattgggaatgctctgggacttgggatcttgtccggcaaaaattcaacgactgtggtgatgtacttagattttggatttactgccggaaagtttaagggcagctctattagcatattttcaaggaatccgttaataaagatggaacgtgagctttcggtggtgggaggaagaggagaattcaggatggcagaagggtatgcacgactcaagaattactttttcgatggcaccactgttattattgaatataacgtgaccgtaattcattactaagaggacattctcttggactgtgcaagattcacatggttttgcagcac

SEQ ID NO: 9363 - DNA, 587 bp, Gossypium hirsutum
  Clone ID: LIB3828-025-Q6-K6-A5
tcgcaaacctcaacgctggagataattgtcttgactgggagcaggttggcaaacatgacaagatgggcatgaatgttgttccattgaaagatcttacacctgaagagccaaaagtttttactcttgatctgctgaaaaattggatccaaatgatcaacaaaatgagaagtcacgggggcggcttgtcttggaagccttgtacaaacctttcaaggaggatgagataccaaaagacgttgacgactcaattatggtacaaaaggctccagaaggaacacctgcaggtggaggtttacttgtagttattgtgcatgaagctgaagatatcgaagggaagtaccacacaaacccacatgtgcggctgttattcagaggggaggagagaaaaaccaagcgtgtaaagaaaagcagagatccgagatgggaagaagaatttcagtttatggtggatgaaccacccacgaattataaaattcacattgaagcgttcagtacatcctccaggatagggctactgcatcccaaggaatctttgggttatgttactataagcctagctttttttgtgaataacagaagaatcaatg

SEQ ID NO: 9364 - DNA, 568 bp, Gossypium hirsutum
  unsure (1)..(568): unsure at all n locations; Clone ID: LIB3828-025-Q6-K6-A6
gcgttcgtgntgctataattaaccacatatagggttaggagatccacatgttctgttagtttggaaagtgagctgtcgtaaaacgtctgatactagggtctgagaactatcccgtattaattttgattcccttttctagtttgaaaacgatgaagttaataccgcatcatatgactgcattattggcagctaattcggttctggtgctgcaggtgggaattggacaatgccatctaaaactgtttgttgtagccgtattatcatagtaagttcgttctttatgcctagttattcaatgaatttcttaagatttggatcggaaaaaaaaaaaaagaatctaaaacagtttttttctcttcacctcatctggttccttgaaaattttgtatctcaatcatgattttgcctttgtgctaccatgacttacgtattttctcgcattaggtcagtccctatcgatggttataaaatatggaaatcaatgaaagaaacttttgggaggttatggttgctactacaatatgttgctgacaatggttttacaatctttctatttctggaccttttt

SEQ ID NO: 9365 - DNA, 582 bp, Gossypium hirsutum
  Clone ID: LIB3828-025-Q6-K6-B1
acaaaccttcagggtggggggcttggcgcatgtagataatgcgaccatatcttcactcctatttggctaccatcttggggtggttaatgaaccgcttgaaagcatctctatagatttaggtttcaggggcaatactctgtttgaaggtctggtggtgagtacttgttgggggggggcctttattggatctttgttcagtggttggattgctgatagtagcgggcgccgtagggcatttcagttgtgtgctcttcctatgattattggtgctgctacaagtgcaacaacaagaactttggcgggtatgctcattggaaggttcttagttgggactggaatgggaattggtccacctgttgcttctctttatttggcagaggtttcccctgcttctttaaggggaacttatggaagcttcatccagattgcaacttgtctgggacttatgggggctctgtttattggtatccccgtcagagaaattgctggctggtggcgcatttgtttttgggtctcaacagttcctgctgggatacttgcatttgctatgatattttgtgctgaaagtccacattggttata

SEQ ID NO: 9366 - DNA, 542 bp, Gossypium hirsutum
  Clone ID: LIB3828-025-Q6-K6-B2
ctgccagcaggggtgtgggcggaacatgcccgaacactaacatggtaacggtctttggggacatcaccacctacgcctgccgatactctgacaagagtgttgcgacctacatgccgctccatgagtttagtttctgttgatggggaacttggtgctgtcattagcatggtctcgcttatccttgcagcattgtatctcttggcttgcctgagtgggcccatggcacatcccggttcttacatgctatatgggaactacagtgcggtgccttgtcttcggtcgttgcgctgacgaatcccgtcatttcattcctattggccaggttctttcgtctaagcccctatctctaattactgaattttggatgtatggctccttgtcttaggtactgtgtgtacgttattttcgcgccccttatgggttctacgatcactttggggctttggtttctgtatttgtgaattctgttgttatctccccccaacatgatgaaactggggcagacgttttaaaggatgctgactttccgggcgcctgtaatc

SEQ ID NO: 9367 - DNA, 509 bp, Gossypium hirsutum
  unsure (1)..(509): unsure at all n locations; Clone ID: LIB3828-025-Q6-K6-B4
gcgttttgcttntacttgaactgaaagtctgtacaagttgcgttggccaaagcatccatggtggatgacctccaaacaaaatcaggagttgatgaagcagatagaaatttgccaggaagagaacaaaattttggacaaaatgcatcgccaaaaggttgcggaggttgagaagcttacacaaacagggggggagctggaagaggctgttcttgctggcggtgctgctgcaaatgctgttagggattaccagcggaaagttcaggagatgaatgaggaaagaaaaactcttgatcgagagctagcacgtgcaaaagtaactgctaatagggttgccacagttgtagcaaatgagtggaaagattctaatgacaaagtgatgcctgtaaaacaatggctggaagaacgaagattcttgcagggagaaatgcagcaacttcggggacaagcttgctataaatgagcgtacgggcaaaatctgaagctcagttgaaagagaaatatcaattgcg

SEQ ID NO: 9368 - DNA, 335 bp, Gossypium hirsutum
  unsure (1)..(335): unsure at all n locations; Clone ID: LIB3828-025-Q6-K6-B5
ccccccccccccgccccccccggggggggcgagggggggggaagcccaagggcactcatgggaacacgatgatcaagaactcgtccacatcgcctgcccacattatgggaccacggtgtnnttnncaccactagnntcttttttttnatttagcatttagttagtagttttgtcttttnngttccatggaaattttttcagaggggggggggggganttgcngatagatttagcactccaaagtttcctgggggggggttgtggaatcattctaaaaaccaatagcattaggatctgtnttacctactaatagtggtttatatccaaaagggaaa

SEQ ID NO: 9369 - DNA, 377 bp, Gossypium hirsutum
  unsure (1)..(377): unsure at all n locations; Clone ID: LIB3828-025-Q6-K6-B6
tcgacatggtactgggcatgggagtggtgtcttacctaaatgttcatgaagggcgcattacattagctccagtaccacagtctcgttttgtgccacttcaaggtctcatgacaggggcagaggagcctggatattatgaagatggctgctttggtttaagattggagaatgtactctttatccaggaggctgattccgaattcatcttcggtcacatgggatttttatcattggagcatatcgcatgggcacctgtgtcccatcctttgatggacttaagcatcttggcaccgggggaaatactgggggttaataggtaccattggaaatntcgggaaatttctaggcccttacttggcttcctttgtgatgtgatg

SEQ ID NO: 9370 - DNA, 466 bp, Gossypium hirsutum
  unsure (1)..(466): unsure at all n locations; Clone ID: LIB3828-025-Q6-K6-C1
tgttgctactccanaacagcaaggggggggggggggggggaactaaatccactcgttgagcagctggaacccgatgcagcagccaaagtaacagggatgcttctggagatggaccagacggaggttttacacttgctcgagttattataatctttaaaagccaaagttgcagaagcgggggggggtctgaggactgtagcacagcaacagcagcaagctgggggagctggtgatcagctggcttcattgtctttaaatgacaaccttgtttcatgagttggtagtagtgttggcctttaatgtgctgaaaatgagtttgattggttagaaggatgatagctgggttcttttttattgattcagtactgttttggaacttgaaaaatactgtcactgttatggggttatagttgtgactgaacttggtttttcactgttcatttttatcttttttggatttggaatt

SEQ ID NO: 9371 - DNA, 610 bp, Gossypium hirsutum
  unsure (1)..(610): unsure at all n locations; Clone ID: LIB3828-025-Q6-K6-C4
ggtcccaccggtggnacctgnatctgatcgtggnatgatgagtggcgatgccctactcttgttgatccatttgaaggagttaaagccgaggaggtttatttgagaaaaccgggcagctcccagnatccgtcttccaccgacaatngccgagtttcagattgttttgacgataattagagatgggttgaaggcagatcccaagaagtatacaaggatgaaggagagattagttggtgtttctgaggaaactacaaccggtgttaagaggctttatcagatgcaggccaatggaaccttgttgttccctgctattaatgtcaatgactctgtcaccaagagcaagttcgataacttgtatggatgccgtcactctcttcccgatgggttgatgagagctaccgatgtcatgattgctggtaaggtcgctgttgtctgtggttatggtgatgtcggcaagggttgtgctgctgccttgaagcaagccggtgctcgcgtcattgtcaccgagattgatcccatctgtgcccttcaggctctcatggaaggacttcaagttttgacccttgaggatgttgtctccgaggctgatatctttgtcaccacgactggt

SEQ ID NO: 9372 - DNA, 547 bp, Gossypium hirsutum
  Clone ID: LIB3828-025-Q6-K6-C5
ggggggcggaaaaaagggtaggagaggctcgattgctgttaatatcgatgctatttctctgggcaggatcaatccttatggttcagggtggagatcctaccctttttttcgaatggaacgtcacctatggcaccattgctcctttgggagtgccgggggggggtattcttattaacggacaattcccaggaccaaatattaactctaccaccaacaacaatattgtgatccatgtgttcaataaccttgatgagccattccttgtaacatggaacggcattcagcataggaagaactcttggcaagatggtgttctgggaaccaactgtcctatcccccctgggaagaattacacatataaattccaggtgaaggatcagattggcagctacatctactatccggtgacggctatgcataaggcggttggtggtttcggtggcctccgtgttaacagccgtctactcatccctgttccctacgctgatccggctgatgactatactctcttagtgggagactttttcaacaagggacacaccagcct

SEQ ID NO: 9373 - DNA, 625 bp, Gossypium hirsutum
  unsure (1)..(625): unsure at all n locations; Clone ID: LIB3828-025-Q6-K6-C6
tttcgtctcgctttcgctttaaaaatggcggtggtggcctaccatgctttgngcaacaacagtgcgcagcgagccctcttcgacccgttttgcgtggggacgttgtgggatccctgccaagggagtgttcgatttcccaaccggtcacnnatcgtttcctttcactcttcccgagtaaaacctccgcnntttcgtcaacagcgcggcggggggcgtggaaggtanacatccggagggcacaccgtgtttcaagggcgggacctcgccggggtgtgaatgaaagagggaggttgaaggtgtgagattcgaagggcgatagtggttctccnnaatcagtcggagagaggcacgtnggtgaaggaagagaggaacgactcgtggcatcgagtggagcggagcatcgtgaagttctcgcggaggttcaggttgccggagaatgtgagattgggcgacgtgaaggcttccatggcataatggggttcttgctgttgctgttcctgtttttgtggtggacttacctgtgatcactttcgtgtgccttctctgctgttttggtgttataacgtggttttggccttctctgggtttctgtttggttttggctacttttcctgattgctggttt

SEQ ID NO: 9374 - DNA, 512 bp, Gossypium hirsutum
  unsure (1)..(512): unsure at all n locations; Clone ID: LIB3828-025-Q6-K6-D1
gcgttcggtggctgtattcccttggnctgggaagtctggtttatagagttgagaaggtctgtgatggttctggtgaggatccaacctgtagtaggtcggtgacaggtaacagcatcatggaccatttgaactattatggtgtcgatttaatgtgccaagaatggagatcatgcagaatcgtgatggatcctcgtgttgcggagtatggcaaaacggatcacaaaggaaatttcattttgtccagagcaccagccatgcgtgttcggtcgaatgaaggggaagttaaagctagtgcataattgatcaatttatggtttcaccctgccacggtttatcgagttctgactgcttcaggtaactacgttttcgttctgccattgaagcaaatgtaaaaaataattgaaaaagagcattactaatgtaggttttcgttaggaatgaattcatgtaaatatcctccaaaatgtgtacatttcttattatacttatggatattaggctaatggccagtt

SEQ ID NO: 9375 - DNA, 629 bp, Gossypium hirsutum
  Clone ID: LIB3828-025-Q6-K6-D2
ggggggggggggggggggggggggagggggggggggaagaaccccgggggggggggggggggggggggggcacggggggggggggggcggagggggggggggggggggggggggggggggggggggggggggcgacggggggcggggggggggggggggggggggggggggggggggggggcagggggggggggggggggggggggggggggggggggggggggcggcgggagggggcgcggggggggggcggcgggggggggggggggagggggggcgggggggggcggggggggggggcggggggggggcgggggggggggcgaggggggaacgaggggggggggggggggggggggagcggggggcggggggggggggcggcggggcggggggggggaggggggggggcgggggggggggggggggggggggggggggggggggggggggcagggaggggggggaggccggggggggcggggggggggggggggcgggggggggggggggggggagggggggggggggggggggggcaggggggggggggggggaaaagggggggggggggggggggagggcggcggggggggggggggggagggaggggggcggggggggggggg

SEQ ID NO: 9376 - DNA, 539 bp, Gossypium hirsutum
  Clone ID: LIB3828-025-Q6-K6-D4
aaaaattggacaggagaggctgctttatctgaaagacattggatttcttcaagtgttctcccctttgtctcagggacccagagtgtcacaaatacaatggtgaaagcactcaccatcatgtaaattgtaaaggttcctgttgaagatgaatgtaggttgagttagctgggaaaagccaaaacaacaaataaaatgcctcaggttgcttttgagttgagtttatctgaatggagtcaattcgggtttcgatcattttgagttttggttatttgagattctgatcatttcaggtttgggtcattttgagattggtttgagttagattgggttataggttttatagtcaaattgggttgagacgaactatgtttttggattcgggttagaattgaaaggttgggggtgcaggtgtgagtgagagaagagagagatgtacctccactgctccaatccaaaagcaagttggcagtcattgtaaccacccaagcaaagaaccagttggaaagtgttgctatgcttccagctagacccttgatgtt

SEQ ID NO: 9377 - DNA, 588 bp, Gossypium hirsutum
  unsure (1)..(588): unsure at all n locations; Clone ID: LIB3828-025-Q6-K6-D5
gggggggggggggggggggcngggggngggaganacnacanacaaaacaagggggggcgaaggagaaaaaaaagggggggggggggggggggggggggggggggggggggggggggcgggggggggggggggggggggggggggggggggggggggggggggcgggggggggggggggggggggagggggggcncccccacgggggggaggggggggggggaggggggggggagggaagaacgggaagggggggggggggggggagggggggggggggggggagggggggaggggggggaggggggggggggggggaggggggggggggngggggggggggggggggggggggggggggggggggggggggggggagggggggggggggggagggggggagggggggggaggggggggggggggggaggggggagggggggggggggagggggggggagggggggggggaggggggggggagggggggggggggaagggggggggggggggggggggggagggggaaggggagggggagggggggagaggggggggggaggggaagggagggggggggaggcaagggg

SEQ ID NO: 9378 - DNA, 587 bp, Gossypium hirsutum
  Clone ID: LIB3828-025-Q6-K6-E1
caaagcaacaaccagtcggcaacagtgattgccggcggaaacatatttgcatcaagaatcgccactgtttaaatcagcacatgaaacccatgccataaatagcacccaccgactcctccgcccatctatctccaatcaaaactccccacgcaactcatcaaatcaaaacaaaggattaaattttcagctataaaatactcccgcaaccccagccctataccgtccaattttatgccacatgcttatattctctcaccctaaatttctttatataattaagtaaatcattctagtaactgttggttttccttactttttcaactggagtgtgtactgcggataagttttttcatcttcagatcaagttcgtaggaaggtaacaatgccggaaactcaatctcaagggaccccaacgctcttctctccttacaagatgggcaagttcaacctttctcacagggtggtgctggcgccgatgactagatgcagggcgttgaatggaaacccaaggccagcgctcgctgaatattacacgcagaggtcgactcccggcggctttctaatcaccgaagggacactggtgtccg

SEQ ID NO: 9379 - DNA, 398 bp, Gossypium hirsutum
  unsure (1)..(398): unsure at all n locations; Clone ID: LIB3828-025-Q6-K6-E3
ccccccgtcgcggcgcgaatcggatccagtccagtcgtcgacgtctgggcccgcgtcaccggcggtgaagtcggagccagctagtttgactcgctccgaagaacggtcctctcggtctctctcgcaggaagatcggtataanatgtcgcttgagagaccgccaaggaatggaagggtctccgcgtaaccgacaagctcgctgttccagaaccgccgggcggaggtcatggtggtaccgtcggcggccgcgctggtgatcatggccttgaaggaaccggagagggatcggattgacaccgtcacctttctgcttgtcgggcccttcggtctcgatgtcgtgntggagatcgctggggttggggggcgaggtccctggctgtcgctttgcgagggacggt

SEQ ID NO: 9380 - DNA, 595 bp, Gossypium hirsutum
  Clone ID: LIB3828-025-Q6-K6-E4
aaaaatccgcccaagaaaaaaaaaacagctgtcattgttcaccttccctatctcttcctttccctccttttcttcaactaggcctttcaaggtaccaacttttattccccaacacatgcaataacaacaggtatctttgtattttgtgttgttgatgtggacgaagttttccgacatcgtacgagttgaaatggacagacggttcgactcatgaccatatcacggttgactcacgatttttactaattattctatggctggatcacgatcgtggataggaggggttcttaatcggttaagcaataagcgtagcgacaagtttctcgactaccctttgacacctattcaggaacaaagacttcaaaagcttcaaaaacgaatacaaataccttttgatgagactcgtcctgatcatcaggaagctctcagagaattgtggcacattgcatttcctaatgttgctctaaaaggattggtctcggaacagtggaaagaaatgggatggcaaggccctaatccgtccactgattttcgggcttgtggtttcatctcactggaaaacttgctgttttacggccgaacatatccggcatct

SEQ ID NO: 9381 - DNA, 543 bp, Gossypium hirsutum
  unsure (1)..(543): unsure at all n locations; Clone ID: LIB3828-025-Q6-K6-E5
caggggggcanagntaggngcggncacaagtggtcgaattgcagatacgattggtcgaaaggggcaatgagactttcagctgttttctgcattgctggatggcttgctgtttgatttctctaagagtgatgtgtcattggatcttggggggtttgcaactggctatggcattggaattttctcttatgtggtccctatcttcatagctgaaatagcaccaaagaacctcagaggaggactcacaacattaaatcagctcctgattgtgattggtcaatcaacagcattcttaataggaacagtcatatcatggagggaactggctctggcaggacttttgccatgcattgtcctgtttgttggcctttgtttcatccctgaatctcccagatggctggcaaaggtcggcgaccagaaagaatttcatgcagctctaaggaaacttcgtggtaaagatgctgatattaccgaagaagctgaagaaattcaagaatatattgaaactcttcaaagtcttcccaaaacaacaatatgggaacttgt

SEQ ID NO: 9382 - DNA, 242 bp, Gossypium hirsutum
  unsure (1)..(242): unsure at all n locations; Clone ID: LIB3828-025-Q6-K6-E6
gtcaagtctttctctaggagtgctaaacttgtctatagttatcccacagatgttcgtatcagtaattagtggaccgttgggagatgccattcgggggtggcaactngcctgcttttgtgctggggtncatagcggntgctgtcagtgccgttgtgcctatattggcattgccgaacccacctaacaagtgtccctttcgccngnatgggtggtggccattaataataatcaatccccagctt

SEQ ID NO: 9383 - DNA, 564 bp, Gossypium hirsutum
  Clone ID: LIB3828-025-Q6-K6-F1
ttctatttgtacatcttattgatgttgttatcttcttaagaatttgaggggaatcgtattaattgtttaattacacaagcttaacaaaaaatgaattaccccttcccatctcaaggctcttattccataaccctcatcatgcattattgtcataatttggtgtatgttcttaaggttgcaacagctttaggtatcgtttatttatttttgccttctgtttcactaatttgatggtgctataaaactttttaggggttgcgtctagtgatgttgcgacatttggggttggggccattcaggtcattgcaactggggtgactacatggttggtggacaaaactggccgcagacttcttcttatggtatcctcggctggaatgacactgagtctgctaattgttgcagttgccttttatgttgagggcatcgtcgctaaagattctgacttatatggcataatgggaatactgtcattggtcggtcttgtggcatttgtgattgccttctcactgggaattggagcaattccatgggttataatgtccgagatacttccagtaaata

SEQ ID NO: 9384 - DNA, 546 bp, Gossypium hirsutum
  Clone ID: LIB3828-025-Q6-K6-F2
aggcgccgcctcatctatccaaagctcctctttcgtctcacaagttgaatggtgacaatggaagtctggattttgagaagttgtggaagcaaccttctaatcgcgattttgtgccttgtgtgcagcccggttctaattatacggcccctgatgagtcaggaggctaccttctagttcatacaaatggtgggctcaaccaaatgcgagctgggatatgtgacatggttgctgtagcccgtataataaatgccacccttgtggttccggagcttgataaacgatcattttggcaagatgcaagcaatttctctgatgtttttgatgaggaccattttatcaatgctctggctaatgatgttaatgtcataaaaaagcttcctaaggatttgtcttctgctacaaaagtagttatgcattttagaagctggtctggtttggagtactaccgggatgaaatagctagtctgtgggaagaatttcaggttattcgagcagcttaatctgattctcgcctagcaaacaaccatctgcctcctgaaatgcaaa

SEQ ID NO: 9385 - DNA, 624 bp, Gossypium hirsutum
  unsure (1)..(624): unsure at all n locations; Clone ID: LIB3828-025-Q6-K6-F3
aaaaaaaaaaaaaaaaaagaaaaaaaaacacaacacaaacaaaaaaacacnaaaaacaaacaaaaccacaaaagaaaacgaaaaaaccacaaaaaaacaaaaaaaacaaaaaaacgaacaaaaaaccaacacaaaaacaaaaaaacaaaaaaaaaccaaaaaaaaaaacaagaaaaaaaaacaccacaaacaaaaaacaaaaaaaaaaaaaaacaaacaaacagacaaaaaaaaaacaaaacaaaacgaaacaccaaaaaaaaacacaaaaacaaacacacaaaaacaacaaaaaaaaaaaagaacaaaaaacaaaaacgaaacaaaaaagaaaaaaaaaaaaaaaaaaaaacaaaaaaaaaaaacaaaaaaaaaaaaaaaaaaaaacaaaaaaaaaaaaaaaaaaaaaaaaaaaaaaaaaaaaaaaaaacaaaaaaaaaaaaagaaaaaaaaaaaaaaaaaaacaaaaaaaaaaagaaaaaaaaaaaacaaaaacgaaaaaaaaaacaaaaaaaaaaaaaaaaacaaaaaaaaaaaaaaaaaaaccccaaaaaaaccaacaaaaccaaaaccaaaaaaaaagacaaaaaaaaaaaacaaaaaaaaaaaaaaaaaaaacaaaaa

SEQ ID NO: 9386 - DNA, 609 bp, Gossypium hirsutum
  unsure (1)..(609): unsure at all n locations; Clone ID: LIB3828-025-Q6-K6-F4
cccagnagattactttgtagttttggttggtgatatgatcaccgaggaagccctttcaacttatcaaacaatgcttaataccttggatggaactcgtgatgagacaggtgctagccttaccccttgggccatttggaccagggcttggactgctgaagaaaacaggcatggtgatctgcttaataagtatctctacttgtctgggagagtggacatgaggcaaattgagaggacaatccagtacttgattggatcgggaatggatcctcatacagagaatagtccttaccgaggattcatatatacttcgttccaagaaagggcaacttttatttcccatgggaatacaggcaggctggctaaggagtatggggatattaacttggctcaaatttgtggtagcattgcctcagatgagaagcgccacgagacagcctataccaaaatcgttgaaaagctgtttgagattgatcctgatgaaacagtcctggcatttgctgacatgatgaagaagaaaatcgccatgccggctgagttcatctatgatggcagagattataacttatttgaccactactcagctgttgcccaaagaaatcgggtttacac

SEQ ID NO: 9387 - DNA, 580 bp, Gossypium hirsutum
  unsure (1)..(580): unsure at all n locations; Clone ID: LIB3828-025-Q6-K6-F5
cacgcgtccgctttngttctccttaaggctggnagcagggnaataagttcatgtggtgtcacactgtcccttgatgtggcatattttagcatttaagcaaatttgtctctactctatacctctcttatccatctgcagcctcagcctcagcctcccaaatgacaccaaagtgaatcaaccctcaatatcaagcccctcaaatcttctcaatttgaagcacatcatagaactgctcgcccttggttccactcttctgttactgttgaagggtcatgttgaataagctagccttgccagaatccagcactttcccaggaaagccaatgccacccacagctgaatgctggtttgatgatgcatgcatccttgacatggactactttgtgaagaccatctcaggcataaaggccaagggtgttcgtcccgacttagtaggctcaatcattgcacattatgcatcaaaatggctacctgatctatccggcaatgacaccgaaaagggtcctatgagtctccaagagtcatcgccggagagtgtcacagtttcatggatgaaaaagagttctttgttgaaaccttg

SEQ ID NO: 9388 - DNA, 503 bp, Gossypium hirsutum
  Clone ID: LIB3828-025-Q6-K6-F6
aaaaaaaaaaaaaaaaaaaaaaaaaaaaaaaaaaaaaaaaaaaaaaaaaaaaaaaaaaaaaaaaaaaaaaaaaaaaaaaaaaaacagagaaaaaaaaaaaaaaaaaaaaaaaagagaggagagagggcaaaaaaaaaaaaaaaaaaagcaaaaaaaaaaaagaggaaaaaaaaaggaaaaaaaaagaagaagagcggcgccgcaaaaatccccaaagggcgggcggaggagagaagaggacgagaaaaaagagaaacgcgcgaacaaacaaaaaaaagagaaaaaaaaagagaaaaaaaaaaaagaaaagagaaaaacgagaagaaagagaaaagaaaaaaaagcagagaagagagagaaagagaaaagagacaaaaaagaaaaaaaaaacaaaagaaaaagacgaaaacaaaaaaaaaaaaaaagacagaaaaagaaaaaaaaaaaaagaaagaaaaaaaaaaaaagagagaaaagagaaggaaaaaaaaaaagaaggagag

SEQ ID NO: 9389 - DNA, 547 bp, Gossypium hirsutum
  unsure (1)..(547): unsure at all n locations; Clone ID: LIB3828-025-Q6-K6-G3
ccacgcgtccgcggncgcgtgggcaaaaacgggggaaagggnnacctctaagattatagctctcgccggtcctgtttgttcgtgatgccttgtccgtatatgatcccagcatggtccccaacggcgcacttttcttcttcctctncgctctttccccctagcttctcgtgcgggcctgcttctgtgtcccatctccggggctcctgtctccgccggtccttgtgaatgtgggttcttgcgagatcttgttgtctggtgcgtgttgagcgtttggctctttgttgggatcctgcnttctctgcgtggttgggttgtgctctntgtggtttcttcctgttcttcctttgcctctgttcggggtgtttgttttacgtttgtgctttctgtctttgtcttgttctatctttttttttttttttgtttttttttttgttgttttttttttgttgtttgtctttgtttttctattttttttttgctttttgttttttgccttttttttttttttttttttttctcttgtttgcttggtttcttccttcttttt

SEQ ID NO: 9390 - DNA, 597 bp, Gossypium hirsutum
  Clone ID: LIB3828-025-Q6-K6-G4
tccggaatggcaaatattcccataatcgctcttttctgcttcaccatttttgtttcgtcctcactcaatttcgtctatggggctgaaaattgagctacgtcgtcgtaggccatgtttactgtgacacttgccgtgttgagtttgagaccaaactcagcgaacccatcgctggagcagtagtgaaactggaatgcaggaatcgtacagacaatcaccttaccttccagagccaagaaatagtgactgacgaacgtggagactatcacattgtagtggaaggcgattatgaggaatcagactgcgacgtcgccttggtgaggagtcccaacccggattgcaatgatccctccgaaatgtggaggatatccagggtggttctcaccacacttgacggcgtcagcggtgaacttcggtttgccaacaatcttgggtttaagaagaaggttgctcttcctcagtgtactcaagttcttcaagagataggctattatgagcttagccaagaagctggagacattgccccttggtcagaactataatatgtattttcacttcaactttttctaaaagctcggcattagcctataataaaaattg

SEQ ID NO: 9391 - DNA, 580 bp, Gossypium hirsutum
  Clone ID: LIB3828-025-Q6-K6-G5
tggatccggtggggagtccatttacccggttgctacaggtctctgtggcagctttcaggaagaggaatttgactatggtttctgatccaaacttgctgtaccagaatgaagagcttgacgcatcaatttctatcgacggaaggcttgtccacagtaaacaaatggcgtaagcttcctcttaatatctaatctctgttatattcaattcattcatctctaattatcagacactatatatttgcatcaattgatccaatcacaaaatacacgaacttgtccataaaccgacagtggtaccataacttagtcgtggcatcaaagcaagttgttataaagttcgtttgtttgttttatagagatatcctatttaagcacatgcatatcataactgacgtgaaaaatatattttacactttcaaattctcttttgatatttttatatgtaactttcctagcgatttggatttacatgttcacttttcggaaccattccaaaatcctttttcaataaacaattacaaatacatatattcatcacttcatcgtacaaaaaaggtttgatatgaaaattttaatttat

SEQ ID NO: 9392 - DNA, 590 bp, Gossypium hirsutum
  unsure (1)..(590): unsure at all n locations; Clone ID: LIB3828-025-Q6-K6-H1
ttcgggaaatgcggcggagtgtatttccaaaactgtcagnnatcgtcgtgaggggaagccaggtgagaaccaacacaacatggttacagcacnacgggaagaaagaacaagaaactaacacagccattgtgcttcaatattgtaccatctcgggcgcccctgactacctcccagtgaaggacaagaacaagacgtaccttggtcgtccctggaaacagtttgctacaactgtcataatgcaatgtcaaattgatgacatcattacaccagagggttactcccccatggaaggcaccgtaggcctggacactggttactttgccgagttccaaaataggggacccggtgccaacaccgagggcagggtcacatggaaagctatcaagaaaatcgatatggatgaagccatgaaatggactcctcgtgtctttttgaattccgacgaatggctggcacaaattggcgttccctttgatcctgacatgacccctggagtttaaacttccaaaaccatcgccattaatcttcttttattatcattattatttgaaataatggtgtcgattattaattaatccgaacaacctttt

SEQ ID NO: 9393 - DNA, 595 bp, Gossypium hirsutum
  Clone ID: LIB3828-025-Q6-K6-H4
ctcttgtttccctttctcaacataaaaagaaaatcaaggttgctttgaaccaaatttatatattgaaagggttcagggggctgatattaatgttaatagttcttttttttttctagctttctagtaatttattgttcataaatttttttttcaaaagccaggcttgtgaaatattagtaattaaaaagtttatatttgggtggaaattcgtcatgggtgttttggttgattcccaaaaggaagggtttggatcttcatggggtggtttaaagagtttggtaagaagaaaacaagtagattccgctcattccaagcgttctggtcatcatcagttggctaaagagttgacagttccacatctcatagcaattggtgtgggatcaacaattggagctggagtttatattcttgttggaacagttgcgagagagcattcagggccagctcttgccatttcctttctaatagctggaattgctgctgcactctctgctttttgctatgccgagcttgctagtcgttgcccgtctgctggcagtgcctatcattattcatacatttgtgttggtgaaagtgttgcctggttgattggttg

SEQ ID NO: 9394 - DNA, 578 bp, Gossypium hirsutum
  Clone ID: LIB3828-025-Q6-K6-H5
aaaaaacagcagcctttctctcctctcttgtagccttttgtttggccgaccaagggaggcaccgtcccaccgccgcaccgccactgaacacgatggccgacgacgcgcgagggcaggctttaagccgtgtttcaaggcgtccctgaaggctgagccttctcagcccaaagttgcgaaagaaaagtcttcccctccttattcgacccgatcccgacgacgaaggagaaccctccggcgacgagacgacgagcgattccggtgaagccttcttccctccttattatttttgttttatgtctacttttatttaatagatttgtattaaaatcaaaagaaatattagagaaataaaaagaaacgaaatgaaaataaagagagaagaatcagatatcaaccttttgtgttttttttttgatttccagtgttcgtaaccgattacaaatgatagattttggcttttaaaagccaatttacaaaccgttcattccatgttttttgttctttagctatttatttcttctgcatgctctctgttgttgtgttggatttgattgcaggtgtcagaggtgtgaaaagcc

SEQ ID NO: 9395 - DNA, 227 bp, Gossypium hirsutum
  unsure (1)..(227): unsure at all n locations; Clone ID: LIB3828-026-Q6-K6-A2
agcgggtttgggactctctgncgtgggtggcaggcccatctgttttggttggttggggggttccccacgngcanaagattttttttttttngnncntgnngnnctttgtgggggggggggttncnccnnccnnnaccnnngatttctttgggggggggtgtacccttttccgggcgggtggttctgcttctggtgtttttcgttgctcctttggcttgggcgctccc

SEQ ID NO: 9396 - DNA, 453 bp, Gossypium hirsutum
  Clone ID: LIB3828-026-Q6-K6-A4
tcttaaaaatccaaaaccccttcccctctgctttgctagggtttcaacctaggcttggggcacagtcatcggcccgccgtggtacggcggccggagttcctaaagggaaccctttttggctgatccaacctccccaatctcgatctaagggttatgtacccaaactacccagccaaactgcaagataaaagtgaaaaagaggagaaaataaaggggcctttcggctccctaataatgccgatgggattttcaatcgagtcccctaactcggtgaccttctaggccggagaaagctccaagcacggcgctaaaggcctagacgaaagcgatgggacggggcaaagggtggttgaaaggtgtcaagcatcacgtgggtgagcggcgcggcgcaaaggggaaccctagggttcctccgaaagtgttaaatttctgggctagggttttttagtttta

SEQ ID NO: 9397 - DNA, 396 bp, Gossypium hirsutum
  Clone ID: LIB3828-026-Q6-K6-A5
ttcaccatggctggtattaagggtatgatcaagttggcattgaaatgcatgagttttcccggggaaaggcggccagatatgaacaccgtttcgattgaactcgaacggatccgtgaaaacgagatggaaatgacaacagttatatggtgaaggtactgcaaaaatcgctctaggtggtgagctatttgcttcaaaataaggatccatcccaatgtagttttattaaagcttggggccaaagcttaggataaaaaatgaagtgtttataaagtaggggtagtgaagctgctatcataaattaatggaaatgtgtatatttattttatgggattttattgataaatattaatgtatcatacagcttattaacagccatgcagattagaagattttcgg

SEQ ID NO: 9398 - DNA, 217 bp, Gossypium hirsutum
  Clone ID: LIB3828-026-Q6-K6-A6
gcgttcggtaaaataagacccccctattcccaagtaagcttttgttgcatatctagaattctagtttcaaaatgacaagtgccagggggaacttcatatctttcaagtagctctggataagcatatttagcctttttcggtcccttgtatatcataaaccttatgatgtttcatggccaactttgagtatgtctaaaaggtttatatttcttttatc

SEQ ID NO: 9399 - DNA, 663 bp, Gossypium hirsutum
  unsure (1)..(663): unsure at all n locations; Clone ID: LIB3828-026-Q6-K6-B1
tctgntgttagctccggnngcgtttaatatgcggggagggggcgcagagggtgttacatatacagttcttttgcctttggtctaggagcatnngctcatgcgacgccgttgaacaaaaggcctcatcagtgtttccttggaggtagagcaagngctgnnttccttgctgggtttgtttcttcaggnnatctttatnngcctttgggtaaggcgggtggggatnnccggataatgcttccttcacattnaataataacaattgggaatacacaacatcagtngcccatgtngaagcaaacaaacccaacaagtaaacagcctccctcaggaaaggaagagatacaaacacactcaccaggattttgcccactgtctggaggcgagctcagcttctgtcttttactgctgttaagggtgctatcggaagagttctgtggtccaaccgcctgaccatgttcttcagtaagcgtactcttctcaaaacattccacttcattctctcttttcttttgacggtctcctcctttttgatcttctttgctcctctcgtctttatgccttttcttatgaccacgctttttactttcagcttcaccactgtcccgagacttatctctttctttcttctcccgtttttccttttttttctccttcttttctttc

SEQ ID NO: 9400 - DNA, 121 bp, Gossypium hirsutum
  unsure (1)..(121): unsure at all n locations; Clone ID: LIB3828-026-Q6-K6-B2
ttagccgccccgctatctcctttgttgtgggggggggctaaaaaagttttcccttgttgttttgtgcgtgggggcggggggggggntntttttttttgttgctttggctgcgcctgcgccg

SEQ ID NO: 9401 - DNA, 515 bp, Gossypium hirsutum
  Clone ID: LIB3828-026-Q6-K6-B4
cacatatagtcgctataattcaatactcaagggagcttgaaataagaaacgtatacggaagttggcacatcccatttctctagattccatgtcacattttcttttcttttttttcctgagaacataactttcagtccagctagtatgcttgatttgaggagaaaatggaaggaggtggggggcactaatgtctataacaacagagtgagtcagttatcaatgaaaccataaccaagtgatggtcctcttgagttctgtcaagcttgagagccagaggagcctaaaaccaaagcttttagcgccggcacttggccctccaaaagctcctttttactcaaaattctatcagatgaacagtctgcttcatcaccagctgcagcagaaataagtgctaaaagtgtcactgttgcagtttggaaatctgtcaagatcttgtatgctgaatcatctagtttattctaaaataagagacagcaaagcattacataaaaatatttttggttgaactatttaaa

SEQ ID NO: 9402 - DNA, 583 bp, Gossypium hirsutum
  unsure (1)..(583): unsure at all n locations; Clone ID: LIB3828-026-Q6-K6-B6
ccggttcgacccagcgtttgctccgtcatacttatctggtgcgggggggggggggtactcgtcattgttctgagacggctccagtaaccattccacttccactggctggcagaagtactagatatctttctcccaactcttctgatccaagtaggcattcccttccccttttgtctcctagaagcctcaagcacgaggggggaggctcagantctccttctgggattcggtcttcccggagagtggaagctctaagggcaggagagtctccttctggcttatcgaatnnttattctgcacagaaggtggtttgagatngtaaagatgactcgggtcgnttctctgcnttgttgtcttctagtgggtcacctcatattggattctctagaagctctagtggactatctttccaggatgacctggatgattgtgagttctcttgcccttttgctgttggtgatgtctgctgttctgattcatccagtcccaacacagaggggcaaaacggcttcggtaattcactgcacagtctagtgtggttggtgataatctctcacgatgcttgctgttgggcttcttgttc

SEQ ID NO: 9403 - DNA, 386 bp, Gossypium hirsutum
  unsure (1)..(386): unsure at all n locations; Clone ID: LIB3828-026-Q6-K6-C1
acttcgtggctgcagtgcgcgctcagttcttcgtgcggcttgaagatggctttctcatatctactttccctgcaccctgctatttctttcttcttgaacaaaccctccctcttcactccatgggggagttgagccctaaaccctatcctgaggaaaatttggtgggccttcgatcgcttaatattccgcttttccagttctgaatcgaggggaagactggctcttatattgtttcacttaaagatgccatttatggggctctctagatcttaactgttttgggttatcattctgctttgatcccttgcatctttgtttggcgtcgtacgtgtttcctgcgttggcgcttgatgtatttgattttttttgcttgncatcagtgtttg

SEQ ID NO: 9404 - DNA, 556 bp, Gossypium hirsutum
  Clone ID: LIB3828-026-Q6-K6-C2
tcatcttggggggggggggggggggattccaaaaagtgaaatattggttgttccacggcagttaaatcccggaaaagtgagaccaatgccatcacagctcatggcagaactgatcctgctcaatcaactgttttttttttccataactgctccctcaatggggggggtggctacacgaaatactactatagcaaccctaaagtgcacaagaactttttgggaaggccatggaaggaatattcaaggacggtttacataaactgtgtgatgggagatcttatttctccgcagggatggttgccatggagtggtgacttcgcattgaaaacacttttctacggagaatatcagaattcaggaccgggttcaaacatgtcagcaagagttccatggagttctccaattcctggacagaatgtatatacttactctgtccaaaatttcattcaaggagatcagtggattccaacaaaagcttgatccccccccccaattattacctacaatactatcttcttgattgctatgtcaaagaaataacaaggctaatgctttg

SEQ ID NO: 9405 - DNA, 587 bp, Gossypium hirsutum
  unsure (1)..(587): unsure at all n locations; Clone ID: LIB3828-026-Q6-K6-C3
cccggtttgtcccagcgttcgcccacgcgtnccgcttnacatatggggggggggtgggggccgggcacgtaaagccaatcagagactatcaatagaagtcggtccagcgggggtaatataccgccactacaccttattataaattctcctctcatttgtttttgtttttctgttcttccccacattaaaagcctgccttgtgggggggggggggaatatttctcttctctaatccacctaaagctccttggaaggtgttgaaaaacgcantagtattagagaaaaggataactaaaaacacctttttgaggttttgcgatggcatcgaagcggatcttgaaggaattgaaggatttgcagaaggaccctcctacatcatgcagtgctggtcctgttgctgaagacatgtttcattggcaggcaacaatcatgggtccaccagacagtccatattctgggggtgttttcctagtgactattcattttcctccagattatccctttaagcctcccaaggtggcatttaggacaaagggtttcccaccccattttaacagcatcgggaagctttgcctagacaatcttga

SEQ ID NO: 9406 - DNA, 609 bp, Gossypium hirsutum
  unsure (1)..(609): unsure at all n locations; Clone ID: LIB3828-026-Q6-K6-C4
tgaacattcctgccttacacacaaacctttatttgtttgtttgctttatttcttgggtttgtgtgtaaattttgttactctccattttcgttcaattcgaagtttttctcagataccatttgttgaagaatcaacagcttatagatccctngaaaagacaagtttacacttgacaaaatgtttgggtttatgaaaccaaagcagaaaggggactcaccagctgagtcagacacaatgacacctgctcgaaggactacttctgagccggcaatgttggtcccagagtcaatcgaagatgacaatggggngaagaaaaaagcaaagctcagcatccactagggcatcaccagcaagaaacaatagagacaaatacaaggacgatttccgtgactccggcggactagaaaaccagaccatggaagaccttgaggggtatgctgtctacaaggccgaggagacaacaagtactgtcaacaactgcttgaagattgctgagaacatcagatcggatgctacaaagactcttgatactttgcatgcacaaggagagcaaattgaaaggacccaccaaatggctgttaatattgacaaggatttgaataagggtga

SEQ ID NO: 9407 - DNA, 607 bp, Gossypium hirsutum
  Clone ID: LIB3828-026-Q6-K6-C5
gcgttcgttttggataagaaatggcccgacttgggggccctcagcttttctttctactgaccttggtggtcatcatccatccctcatacggacttaagcatttgaaaggtcagccctcgttgacgaggtttgccgccacacatcccacagtgaatattgcgtcaataccatagtcccaaagccggcgttatccggagaaaggatcgccagtaccactttgggttgggcacagataaaagctctggaagccggaaccatcatagctagtctacttaatgattcttcttccatcttaccagtagcaaagaaccctctacaggccaaagagcttctacaaatatgttgggattctaacatgaacaccatggaggacctttggattgctagcagtttgctttacaataagatcatcaatcccatgattgctcgtctgtatcatgctgcaaataccactagagtttgccaagatggcgtaaaaggaaccggttttacagccttagctgctaagatcgaggatataattaagctctgtgaaatttgtgtcgtctccaccaacttctttgtgaacggtgctcattaaaagcttttacccatgaattatgtgtgc

SEQ ID NO: 9408 - DNA, 567 bp, Gossypium hirsutum
  unsure (1)..(567): unsure at all n locations; Clone ID: LIB3828-026-Q6-K6-C6
ttttctctagcaatatcaagaggcggggcgagcaaggtctccgattttaccgatctcttttcgcagtagccatgggnaaaatcaagggggaaaatcgacccccaaagttgaagcagcacctgctgtagcttctcccaagtccgggtaaaaaggtaagagagaagctcaagaaactcttgaggggggggggactgtgaaaaagcagaagaaaaacgatggggtggcacaggctgttgtaaagaagaaggttgaagcaaagacccaaaagaagaagaaagacgaaaccagtagttcttcagacgattcttctgactccgaggatgaaccggtgcctctgaaaaaacaggcagctactaccaagagtggctctgtacctgcaaagaaagcaaagcaagctagcagtttgaagtcttccgagtctagtagcgaggacgattcatcttcagacgaagaagctcctcagaataaaaaacctgtagtttctaaaaatggccctgttccagctgccaagacagtgaaagctgatagtagttctgagtctagcagtgaggaagattcatcctctga

SEQ ID NO: 9409 - DNA, 332 bp, Gossypium hirsutum
  unsure (1)..(332): unsure at all n locations; Clone ID: LIB3828-026-Q6-K6-D1
ggnaactggctggaaagacctgtttcatttattccggagagcgtaacactattttggctcagatgcacaagaagtgcagtgttgaaagcgaattccttgggaaggacaagtttatggtgacgatatatccgaatgtggattatgctttcgtggtggctctcatagccatccttgatgggattaacaacgacgacgattttgagtgatcactcgtcaaaattaaatgatgctattagaactacaagtaactgtgtcttatgtgatcagttaacataaaggaggaagaccttttgcctgcttgatgcttaatctattgaaatctactttttact

SEQ ID NO: 9410 - DNA, 578 bp, Gossypium hirsutum
  unsure (1)..(578): unsure at all n locations; Clone ID: LIB3828-026-Q6-K6-D2
gcctactatgcctgctttatgttacccatttgactctcagctccaanatcggcagtgcgggtcttatgaggtgtctatggcaaatgcttcactggtttggcagaactacacgtgcatggtatcagaatctgggctatgcaacaccactggaaggataacgccagacagattcacacaggtggtggcagcgattaacgagagttatgctcttgagcactataccccacccttactgtgccttcaaaattgcgattttgtccgggatacatttcaaaatatcacctcgaattactgccatccattggagcgttaccttaaaatggtcaatgcaggattggggttaatctcagtaggagttttgctgtgtctgtttctgtggatattctatgcaaaccgccccgaagggaggaagtgtttgtgaagatactgttgccgatgaaactaatgagctgcaaaaacattttcaacacaaacaacaagacaacatagtcaagcgcaaatagtgtctaaaattatagaaagaaattaggttcaagtctatataacattctttttcgttgtatccgagaccgggaaag

SEQ ID NO: 9411 - DNA, 471 bp, Gossypium hirsutum
  unsure (1)..(471): unsure at all n locations; Clone ID: LIB3828-026-Q6-K6-D3
tttctctgtcgatatccgggggggggagggggggcgcattcaacgacctgggttctgctgctggcttgaagaagctgggtgagtntctccttactcgcgagctcctctctgggtcccangcttcanaggatgatnttaccgttttctgctgctctntctggtgccccttcgtgggggggggtcgatgtttctcgntggtccatacacattgttgccctttggggaatctcacgtgtttctggggagggctgtggtgtgactgttgagggatttgctcccgctgtggctgttgcctctcctcccgttgctgtttcccgggctgccgctgctgtggttgtcgtcgactttgttgttgttctgttcggcggcgcgactgctgcggttctgatggccgctgctgaacgtgctgctgctgttgtggcctgtggctcgtggcttgtatctggctagtcctctgtgttgttgggtttt

SEQ ID NO: 9412 - DNA, 660 bp, Gossypium hirsutum
  unsure (1)..(660): unsure at all n locations; Clone ID: LIB3828-026-Q6-K6-D4
ccgggtcgnacccacgccgttctggtaaccaaaattcacttattcgggtgccattattagtgtccattctggcaatngtggatcagnatgcttaagggatcanncgatcgccaaatccaagnaagcnntgttcggcgagcacccgactcgnannaaagcaaagnaaaagnaaaagnnttcagttagnaagccgaaccattatgtcaacnncacttcattatttgtgtgctggtgcgttngaactttaaactttgtaaacagcanaatcattagttgagcattgntcaagatgatcacttgcaaataatttggcttgctgattctcttgtcaaatatccactcaagtagtccagtggatactttttttgtataggatggtgctttgttactcggactcaggcattagtggcagatacaggtatgaatatgattctcgcacgagtatgttcaagttttttaagttgtgtcatgtatttgaaaggcatttccaagttatttaggagtaagatatggtgagagggtcggtgtttttaggaagctggcttagtagtgggcatatatctagctaagcttgtagcttgttaagaaaaccttttgtccgtgatttatcatttgtacatttctttccactcagcaactgcaattctgcatagatatggt

SEQ ID NO: 9413 - DNA, 171 bp, Gossypium hirsutum
  unsure (1)..(171): unsure at all n locations; Clone ID: LIB3828-026-Q6-K6-D5
ccgggttgacccagcgtctggttcaatgnacccggtgttggcgtgggggggggggatggtgtcccaaaggttccgaaattggtactcttggttttnggttttgaaggtggntcctgaaaaatggttgttcttctggatgttccggtaattgtaatcctggtggtnttcgtt

SEQ ID NO: 9414 - DNA, 424 bp, Gossypium hirsutum
  unsure (1)..(424): unsure at all n locations; Clone ID: LIB3828-026-Q6-K6-D6
ttttctccgtttcgcatttcgtctttcggtgggggggggtgggtttgctggttcatccatctccatgcaacctcgcccctttggtgggggcagtgtttctgggttgnnattgggttcctttctgancccgggtagtagcaccctctcattttctatgcgtccaatgcctgctcgcttggggggggggggtgctgccnnnccagagaccgtggttttggtttgtgggggggtggggtgactcttngcttttgacactggctnacctctcaccggtgaatcttcttttcttgatcttggcgctgcttctcttgctccggttgtgattgtcgatgggccttgtggccgacttcggtctctcggtggtcgaggtctttgctcttttcctctcttctgtttttgttgcctgcttttcttcttgccatgc

SEQ ID NO: 9415 - DNA, 607 bp, Gossypium hirsutum
  Clone ID: LIB3828-026-Q6-K6-E1
aactttttgggttacattgatgaaacaaagcggtccattgatattgtttgtgaaagacatagagaagtctgtggcctaggaaatacagatgtgtatgcttccttgaagagtaaggttgagaatttgcctgcgaatgttgtagtaattggttctcacacccagatggatagtcgtaaggaaaaatctcatcctggtggccttttgttcacaaagtttggagtcaaccagactgctttacttgatcttgcatttccggataattttggtaaacttcatgagaggagcaaagaaacacctaaaaccatgaaacaagttactcggctttttcctaacaaagtgacaatccagttgcctcaggatgaagttttacttttagactggaagcagcaactggagcgtgacgctgaaactcttaaagctcagtcaaacactgttagcattcgctcaattctccatcaaaatggtttggattgccctgatcttgaaacactttgcattaaggatcaaactcttacaaatgagagtgtggggaaagttgttggctgggccctcagccatcagtttatgtattcttctggagtattgctgaaagatgctaaacttgtag

SEQ ID NO: 9416 - DNA, 447 bp, Gossypium hirsutum
  unsure (1)..(447): unsure at all n locations; Clone ID: LIB3828-026-Q6-K6-E3
catttggcttgaccatctttctctttatgattcctctgatggtcttatcgatgttattcagggttccactgccattaccatttcaaactgccatttcactgaccacaacgaggtgctgctatttggagcaagtgacacctatgctgccgacgagaagatgcagatcactgttgctttgaaccgcttcggtaaaggattggtggacaggatgcctaggtgtcgattaggtttttttcatgtcgtcaacaatgactacactcattggttcatgtatgccattggcggtagtagccaccctacaattatcagccagggcaataggtatattgcgtcaagcatctatgtaactaagcaagcngaccagtggggcttcttatcaccggnacagtggtagaattggaactgggtttcacagggtgaccactttctgaacggggcctatttttc

SEQ ID NO: 9417 - DNA, 605 bp, Gossypium hirsutum
  Clone ID: LIB3828-026-Q6-K6-E4
ccccgcgtccggcagcactaaggttttggttgagaaaaggaacttcctgaaaagtcgcttcctcttcagctcctggggatcctcgacgctgttgtcaagtgtggaacaaaatggtgcaaaggattgctacactcgagtttgaccgtgatcggaagtccatgggagttattatcaattccagctcaggaaacaagtcattgctagtaaagggtgctgtagagaatctattggagagaagctcttttatccagttacttgatggctctaccgtagaactagataaatattcgaaggatcttattttacaggttcttcgtgaaatgtccaccgatgcattacgttgccttggtttcgcatataaggaggagcttccggaatttgcaacatacaacagtgatgaagatcatccagctcatcagcttttgctaaacccctccaattattcttctattgagagtaaccttatttttgttggtttagttgggttaagggatcctcctcggaaagaggttcgtcaagcaattgaagactgcaaagcagctgggattcgtgttatggtcattacaggagacaataagaacacagcggaagctatttgtcgcgaa

SEQ ID NO: 9418 - DNA, 486 bp, Gossypium hirsutum
  Clone ID: LIB3828-026-Q6-K6-E5
gtcgacccagcgttcgctctctctcactgtcaataagtctggctcattaataagttctataataaagttccaaatggatcgttcctctctttcagtctcagttactttctttcttctgctgattcttttaaccacagagatgggaactatgtcagcggaggctaaaacatgtgagactcaaagcggtaaattcaaggggatgtgcatgagttctaccaactgtgctagtgtttgcaaatcagagcctggttttgacggtggacattgccaaggttttcgtcgtcaatgcgtttgcactaagccttgttaaaccactaagctttgttagataagtaacctattatatttcattgtcaccaagatttcccttttttttttgcttatcatgcattatgtgcttgagagttgagagaaataagacatctccaacatattttgtataccaataattttgttattataattaaataaatcttttacgatgtt

SEQ ID NO: 9419 - DNA, 478 bp, Gossypium hirsutum
  unsure (1)..(478): unsure at all n locations; Clone ID: LIB3828-026-Q6-K6-E6
tcgcggncgcgtggggngaagctaagcgaggggacagggcagcaaagatcaacattggccttatatccgcaatggcttgttccatagtagcatctttcatcgagaaaaacgtcggaccgcagcattgaaacacggctcattcaaatcccctatgagtatcttaatgttgttgccacaggggggtgtatcaggactagtcgaagcatttgcagccgtggcaattatggagtacctaacaactcaattgccagagtccatgagaaccgttgccggtgctattttcttcatcagcttatccatggcaagctacttgaactcgatgctcgtcaatatcgtccacaaaacgaccaagaaaggtgggaaaacatcatggctaggcggtcataatcttaacatcggtnagctcgaaaacttctattatctcgcggcntttatagaagcactcaatttcctttacttcaatctntttgcgagacga

SEQ ID NO: 9420 - DNA, 602 bp, Gossypium hirsutum
  unsure (1)..(602): unsure at all n locations; Clone ID: LIB3828-026-Q6-K6-F1
ctatattcccggngccatacgagggtcctccatttgtttgcgtgcctcctaacggccctttcccatctggattttccccatttttcccatttagtggatcaaacccaaatcctaatcctaaccaaaacgatatcaatccaactcctgccccggttcggccatttacagctgaaacttccaatggccaaaatgtgtcaccgatgggtacacatgttaatcaaggacaaaaaccggctccttcgtatcctgtcaagaaaaggggaaggggaagaccgaggactcggtttccttagaaaccacaatcggttagtttcaatcctggaattagtttgtctgaacaataaagatgttaacatggaataagtagaaaaatgtgcttttgaggtttgatgctagcagaagaaaagcttagccaaatggaagaggcgaatgagtcgaattccggcattgtttaacatgcagagttgaaagctggcaacatgagaatccgggctgtttgatgttggaaccggtgacaatcgttatcttccaaatggagttgtgcttggtgaggttatattctcggtttagtaagggtgtgatttagaggggatagctagtag

SEQ ID NO: 9421 - DNA, 559 bp, Gossypium hirsutum
  unsure (1)..(559): unsure at all n locations; Clone ID: LIB3828-026-Q6-K6-F2
gcgttcgggnatacaagcctgaccttcacattgtgtccaatgctagctgcactaccaactgccttgctccattggctaaggtcatccatgacaaatttggcattgttgagggtcttatgaccactgtccattcgattactgctactcaaaagaccgttgatggtccatcaatgaaggactggggaggtggtagagctgcttcgttcaatatcattcctagcagcactggagctgccaaggctgttggcaaagtgttgccatcattgaatggcaagctgactggaatggcattccgtgttcccacagttgatgtctctgtagttgacctcacggttaggcttgagaagaaggcttcttatgaagatatcanggccactatcaaggcggaatctgaaactaatttaaaaggaattcttggctacgtngatgaagacttggtntcaactgactttgttggggacagcaggtcaagcatttttgatgccaaggctggcattgccttaaatgacaattttgttaagcttgtcgcgtggttcgattacgaatggggttacagttc

SEQ ID NO: 9422 - DNA, 436 bp, Gossypium hirsutum
  unsure (1)..(436): unsure at all n locations; Clone ID: LIB3828-026-Q6-K6-F3
cccgggttcgnacccacgcgttcctgtgttaatattaaattttttntttgtaaaaacagcanccaataagggtgagtatgtnccccaaaattgcangaatggttttgatagggccttctgttctaaaccttgngatcccgcanatgggctcactttaaattggcgcctctttgtgcgtgcagtacctaaagttttgaatttgtcatgcccaagtaatgagcagttgggggccctaaattaactgtgattaaaacagaccctaactgaaattgcgtttccctaaccctaaatcctcgtttttccttcctcctttttccctcattctttatatttgactgattattttaccttctcctgcctttttttgagattttcgcgtttcatatgtatttagttccggggttcttttttgacactgttggcttttccggctcct

SEQ ID NO: 9423 - DNA, 597 bp, Gossypium hirsutum
  unsure (1)..(597): unsure at all n locations; Clone ID: LIB3828-026-Q6-K6-F5
cttaaactatgaanataggaaacaatccccgccgaggttttggtgtgcggtggaacgccgcatgatgcatatacaaaggccgatttgcaacgccctaaggtgtttttgccagggaacaccgattgtgctcgcattgacatcaccaaaaggaatggcaagtggaagatccaaaacatgccctcagctcgtttattgggagacatggtggtgcttccgacgggagatgtgttacttgtcaacggtgccaagaccggttcagccggttgggatgacgccagggacccgaatttacacccagttttgtacaaattccaaactgatggaactggttccaagttcaccgtgcttaacccatccaacatcccccgcatgtaccactcttccttcgctgtccttcccgatgcaaaaatcctcattgctggaagcaacacaaacccaggttaccttgatgacgcattgttccccaccgaagttcgggttgagaagttctcgccacattacttggacccgaacttgggtatgttccaacaagagatcattgttgaaaattccaataaccaggtgaaatacggtcataaatttacagtgcaaatccgt

SEQ ID NO: 9424 - DNA, 68 bp, Gossypium hirsutum
  Clone ID: LIB3828-026-Q6-K6-F6
tccgaaatcccgttcgacccagcgtccggttctagaacgctagcgatctagtaaagggcgcgtgggtc

SEQ ID NO: 9425 - DNA, 481 bp, Gossypium hirsutum
  Clone ID: LIB3828-026-Q6-K6-G1
tttttgtcattctggctttgtgatgatccactccagcccgccaacgtagagtgtgtgcgctttttcttaataaaatgaatgctgcagaacctgttagtcagtatcagctggcagttagtcgtggcctcgctcagggcttttgcatttcaaccattgctattccaaatggtcttattgcatattctgccttctgtttaccagtggcaagcacttacacgcgaagccagacccacagtaattttgcatctcagtgttgagcttcatggatctaaaatcactgcataccccttacttgaccaattcacctgagactataccctctatgatgtggaatacatgaggtgctttactgcacctctcaactcctatatgagaatgaaataatgggtcaaatctaaccatacaatcagtctcctggtcattatgataaccggacattccagtccactacatcgctcttgattgtctttactgtagctgc

SEQ ID NO: 9426 - DNA, 528 bp, Gossypium hirsutum
  unsure (1)..(528): unsure at all n locations; Clone ID: LIB3828-026-Q6-K6-G2
gcgttcggatggcgaggctagcctttcttgtgcggttctggtggcaaataatgcatacagagcggaggacgtgatgactagaaaaaaaccatgnaatgtttatttaaactacttgcttgccaacagtaatgctattggcgtgaataacggtcgacagaagaagatgctatgcggaaacacagggcctatagtgcagaaatgactgggtctaaattagattttatatcttcctagtgtcttggcgggattatttatnccctcatcctacggagggtcacatctgcgagagtatgtatgactattagaagggaaagggacttccacgctaaagaatgcctggacatgctccaacgctaacccatagaaccgacccatcttttaaaccaccatgctggcacatcctatatggggttacacacctgtttcttgaggtggatttggcactatcgaagagtaggttcttgccatgcagccatcgctaacccataatggtcgagatatgaccgaaactttgaattgaacacgcta

SEQ ID NO: 9427 - DNA, 420 bp, Gossypium hirsutum
  unsure (1)..(420): unsure at all n locations; Clone ID: LIB3828-026-Q6-K6-G3
gctgactctgctttcagaaagttcaggttcaggggggagacactgcatttgatgcatatgtggttggcanagaagagcacccgggattgttgttcttcaggagtggtggggtgtggattttgngatttaaaacctgccttgntgatctctcaactgggcccaggattcaaagctcttgttccagatttgtctcgnggaaaggttggtcttgntgttgctgaggctcatcacctaatggatggtcttgnctggcacggtgctgttnaggatatctgtgcttcggttgtttggcttaaagctaatggttcataataggttggagtgaccggcttttgcctggggggtgctctctctattgctngttctgtcttagttcctcatgttgctgctgttgctgccttttttggggttccttctcct

SEQ ID NO: 9428 - DNA, 583 bp, Gossypium hirsutum
  unsure (1)..(583): unsure at all n locations; Clone ID: LIB3828-026-Q6-K6-G4
gnttttgagggttgatcctgccgtaacacaagnatgacaagtacagcttgttttatcattgtgagccgaatgacatcccatatatgaagctgaagtgggatctgccgctaaaagagaagatgctgctcagctgcatcaattcgtattacatgcagctctggatattgttcaagaccttgcatggaccaccagtgcaatgttcttgaaagcaattgacaggttcaatgatttggtggtatcggtatatgtaacagctggtcatacacgattcatgctacttcatgactctcgtaatgaagatggaataaagagctttttccaggaggttcatgagctatatataaagatccttctaaatccactctacctgcctggttcccgcattacatcgtcgcatttcgacaccaaagttcgtgcccttgcaagaaaatatctatagactctccatagttgaagatttcatatgtctgtttcatgttctctcatgtatgctgaagagttaacccttttttatgatatcggtttgtgtgttctttacattattagtggctctgtcggaatttcatgggtccagttgcctgta

SEQ ID NO: 9429 - DNA, 601 bp, Gossypium hirsutum
  unsure (1)..(601): unsure at all n locations; Clone ID: LIB3828-026-Q6-K6-G5
ggagaccganaatccgtctttttagggtttggttcggattttaattttgtagcaatggcggaggaatcggagagtaagcagtcggcggtggagtcggtgatggagaagatcagcgagaagattcacggccatgattcatcgtcatcttcggattcggattcggatcatgagaaaccggcttctccttcttccgttaaggctaagatttatcggttgtttggaagagagagaccagttcatcatgtgcttggtggtggaaaacctgctgatgtgttcttgtggaggaacaagaagatttcagctggtgtccttggtggagcaaccgcaatttgggtcctttttgagttgattgaataccacctacttgctttaatctgtcacatttcgatactctgtcttgcactactgtttttgtggtccaatgctcataccttcatccacaagtccccacctcgcatccccgaaattcatttgccagaggagccattcctccaagttgcctctgcattggcaattgaacttaaccagggattgaaacttctgcgagatattgcatctggaagaaatctgaaggagttccttatggttatagctgcattct

SEQ ID NO: 9430 - DNA, 568 bp, Gossypium hirsutum
  Clone ID: LIB3828-026-Q6-K6-G6
gtgattctgttattattattattattatttttaactctattccatactaaaaagaaaacatttgtgaagaatccatgagccttttaatcagttattcccattaattgatgggcatgcactttttttttaaaatatgacttttccactttgcaagcaattgtctccaactgtttgggcctcaatatttaagtaggtattatgtcattttcttttctggtgttggtaagtgcaactttgacaagcttgctgcaacccactcaaggatttcttccgtctagcattgaatccggttaagaacagagtatgtatgtatgcttgtatgtatgcatgtaggtatgcatgtatgtatgtacatgattccttaaactttggattttattcaatgctattcattctccctatgcttgatttcaaagtgtggggtttgggtggaacaagatgatacccaacagatttttgctcaaataaatagcattgatcgtgaattcagacttttccaggtcagcttctttcgcaaagtttggtatcttttgcataggaccaggaccaagcttctaacgaattaagt

SEQ ID NO: 9431 - DNA, 564 bp, Gossypium hirsutum
  unsure (1)..(564): unsure at all n locations; Clone ID: LIB3828-026-Q6-K6-H1
ttcggncgcgtgggcggccgcgtgggctttggaggtcatgaaatgaatgaaagtgtgtcttggaatgcatcaggttctcttcttgcaacatgtgggcgagataaaactgtttggatttgggaagtgatgccagggaatgaatttgagtgtattcaagttttgcaaggtcatactcaagatgttaaaatggttgagtggcatccgactatggatattttgttttcctgtagttacgataacactgtgaaggtatggtggtcagatgatgctgatggtgattggagctgtgtacaaactttaggtgaatctagcaatggtcattcttccaccgtctggtcgcttgcttttaatgctaagggagacaaattggtgacttgtagtgatgatcttaccatgaagatatgggaagcagacatcataaggatgcagtctggtgatggttatgcaccctggaatcatctgtgcacactctcaggttatcatgatcgaaccatcttttcagttcactggtcaagagagggaattattgccagtggagctgctgatgatgctgtaaggttgttt

SEQ ID NO: 9432 - DNA, 546 bp, Gossypium hirsutum
  unsure (1)..(546): unsure at all n locations; Clone ID: LIB3828-026-Q6-K6-H2
gcaaaacattactttcgacatttcaccgtatctgcacctaacgaaagcccaaacacagatgggattcacattgggagatcggatggggtcaatgttcttaactcgggntaaaaactggtgatgattgtgtttcaattggggatggttccaaaaatttggttatcaatggagtaacttggggaccaggacatggtatcagtattggtagtctcggattatttaaaaatgaagaaccagttgatggagttacagtaaaaaattgcaccatgactaatacttccaatggtgttagaatcaaaacttggccaggtgctgaacctggcacttgttcgaacattcactttgaggatattaccgtgaccaatgtcagttctcctattataattgatcagaaatattgcccatggaacaaatgcnaaataaatgaagaattcgaagttaaactaagcaacattagtttcaaaaacattcacggcacttctgcgcgttcagaagctgtcaagattatttgtagtgctactttgccttgtggaaatgtagaacttg

SEQ ID NO: 9433 - DNA, 430 bp, Gossypium hirsutum
  unsure (1)..(430): unsure at all n locations; Clone ID: LIB3828-026-Q6-K6-H3
cgtggctgcgccgtcttctcttgcccattctttccgtgactggcntttccatgtgtctgatcagcttatatttcctcacagtctagacccaaatctattttggagagcangcngnangattaagggatgccgactcaggctngcttttgggagtccatcngatctgggatttgggggagcaccacacaaatcgttgaccccctcttccttgntgagaggagaacccttacctgtgaattgtgcttgtgcacgtctcacctgaggtgaagttgttcaccttctattctcttctggcggagatgtggatgtcttcgagcttcgtgccctatgtgttttggttggctggccgtggcgacccttgtcttttcttgcagcggcttttttgttttgtttcctggttgccgcgttgccttccgccttgaatttgcct

SEQ ID NO: 9434 - DNA, 602 bp, Gossypium hirsutum
  unsure (1)..(602): unsure at all n locations; Clone ID: LIB3828-026-Q6-K6-H4
gtgtatcagtgtttcttcccctctttacttaatttctctccgcctggctctctccgtcgagaaaaccgccgccggccgtgagtacaaggtcaaagacatgtctcaggctgacttcggtcgtctcgagatcgagttagctgaggttgaaatgcctggtttaatggcttgtagaaccgagttcggccctgcccaacctttcaaaggagccaaaattactggttctcttcacatgaccatccaaaccgccgttcttattgaaacccttaccgccctcggagctgaagtccgttggtgttcttgcaacattttctctacccaagaccacgctgccgctgccatcgctcgtgactccgccgctgttttcgcttggaaaggggagaccctccaggaatactggtggtgtactgagagagcccttgattggggtcctactggtggacctgatctgatcgtcgatgatggtggtgatgctactttgttgatccacgaaggtgttaaagctgaggaagtttatgagaaaactgngcaactcccagatccggcttcgactgataacgctgagtttcagattgttctaaccattatcagagatgggttgaaag

SEQ ID NO: 9435 - DNA, 436 bp, Gossypium hirsutum
  unsure (1)..(436): unsure at all n locations; Clone ID: LIB3828-026-Q6-K6-H5
naaaaatcccactaatgccaggacagtcgggatgtgagagtggagagtgttgccgtcagggttgtggtgggacttgtgctgagtgtggtcagcccaggtgcgcatcaggatgttgccaggctgaaactgtaaagagcaaagggatagaagaggttatggacagtgaacccagtccaccaaagtagagagatgataccatattaagatgaaataacgaggaagagttggttgtcgtcttattaattatacaaaataagaagtaatgatgttgcagaagggtttgctataaaatcctcttggacaaaaagagtaattatgaagaataaatagctcaaaacaatattcgatttgcaatatcctaaagttccttgaatcttgttttgtagccatatgtaattaatgcatgtgcatgctaatatatatgattttctttgtt

SEQ ID NO: 9436 - DNA, 578 bp, Gossypium hirsutum
  unsure (1)..(578): unsure at all n locations; Clone ID: LIB3828-026-Q6-K6-H6
gttgttcaagcatattaaaaaagcgaaccaacagtggnaagacaaatcttatatatgcggctcaatcaaagaaataaaggtgagagcccgacgatttcaatatagtagtttcggattcatgcctggaaccgcaaatagcgcaaaccatgttctagcagaggaagggaggcgctatgtctcctttgagtacgggatagaagaggagccggtgagggtggatgaagaggcatgccaagattgaagcgggttgcagagaaaggaataaagggtggattttttagccggaggataagccatttagggactccggcgaccacagtattaaatgggcagtctcgcacctacacagaccatatacctatcaccggatgatggaggaaaggaaccagttttgctgcagttttacttttcgttttgcttagaaggataaggcaccgtttaaggagccaataggggtgcagcagccgaatagtattgcacttatgatttcctttgattaattaagggtgagtttggataggcggtatatttacttacggttagtataaaaatagtaataacggtgagattaaatattg

SEQ ID NO: 9437 - DNA, 558 bp, Gossypium hirsutum
  unsure (1)..(558): unsure at all n locations; Clone ID: LIB3828-031-Q6-K6-A1
cgggtcgacctacnngcgtccgggaagctgttgtgttaatggttcatggatggggccagagaggggacgaggtcctggtcatangtgaagagcgggtgggcggaacagtatccgggtgggatgttgtncgtacatattcagcatgatgatgctcaagaaacgctggatcgttgatggaaacgcttctctaacggactttattctcatgggggaggacctcctcgaaactactctcatggggggattgctattcctatcactaattatagacaaattacaccattatattaaagaactccgtataagaaggaagaccatggagactgccaagaaacaaggtcagggatttgaagatgcaggtgggtcagacaaagttacccctggaggaagaaatagccactctgagggcaaggattaagcagcttgaatctgactagagcttgtcacattcaggtggtaagaagaacgaatacctaaggaatttgagcacctcttgcgaatgtgtttttgcagtttcattagcgtttttccaataaaggtcttcaggagttctgtaat

SEQ ID NO: 9438 - DNA, 528 bp, Gossypium hirsutum
  Clone ID: LIB3828-031-Q6-K6-A2
taaaaagatgagtgtagcagttcttgatagaaaaacagttatttgattcgtggaagcaaaagaagcattcaagaaatgcgtggaaaagtacttcaaaatgttggattccaacgggaacggagtgatttgtcggaggaaacttagagaagggctggatttgcttttcacggtggaacatgaatgcacggtgtccaaagaagatattgacaattttcacagcatgatattcgataagttcgatgaggatcgcaatgggaagctggatctctatgagttcgcggcgctggtgaaggagatcatgatggccatggctcgtgggatgggcagtttgcccgtcatcgtggctctcgatcaagatagcttgctcatgatggcggttcaacatgaaattggctcctaattccatgtgggatttttgtgaacattttttttttggttaggaaaaacaagaggggagtgtttttaggaatttatttaggataaagtacactaactctcatccaactttgatcttaatgataaaacggt

SEQ ID NO: 9439 - DNA, 522 bp, Gossypium hirsutum
  unsure (1)..(522): unsure at all n locations; Clone ID: LIB3828-031-Q6-K6-A3
tggcctttacaaggaccacaaaaagggcaacaggagcagcaancatcgatgcaaacacagatgaggcctccatcaacaccagcttaccctccctaccctcctacacaatcatcaaacccgtctcctccagaggcattagcacacagcacccccatgcaggttccattttctggagtggggggacctctgtctagttgtgtcgataccattccttatgggtacagagtgcctggcagaacagctccccagccaatcaagggcacttttgaagcacaaccaagggatgggtatcaggtgcctgtctcccatcccccccttcctccaggaagtgcatacatgatgtatgatagcgaagggggtagagcacatcacccaccccaacagcctcacttctcacagggtgggtatccccctgccaatgtctctcttcagactcctcaacctggtcctagccctaatgttatgatgaggaacagtagccattcccagtatgttcgcaaccatccttacagtgatctgata

SEQ ID NO: 9440 - DNA, 531 bp, Gossypium hirsutum
  Clone ID: LIB3828-031-Q6-K6-B1
caaatcttcttctccttctcagaaatcttagtatcatcactatggcctcaaatcccaaggtcttctttgacatgacgatcggtggtcagcccgctggtcggattgtgatggagcttttcgcagattgcactcctcgcactgcggagaacttccgtgccctctgtactggcgagaaaggcgtgggccgcagcggtaagcccctccactacaaaagctcttctttccatcgtgtgatccctaactttatgtgccaaggaggtgacttcaccgccggaaacggtaccggaggtgaatccatctacggatcaaagttcgctgacgagaacttcatcaagaagcacactggtcccggtattctctcaatggctaacgctggaccgggaactaacggatctcagttcttcatttgcacggctaagactgagtggctcgacggaaagcacgttgtgtttggacaagttgttgaaggcatggatgtggtgaaagccattgagaaagttgggtctagcagtggaagaacttccaagcccg

SEQ ID NO: 9441 - DNA, 526 bp, Gossypium hirsutum
  Clone ID: LIB3828-031-Q6-K6-B3
gaaaacgcctcatagtcatggctagattaacattggtctcctccatcatccttatgctatgctgcgttaccgcagcatcaactgtcgaggattccacccctattcggatggcatccgacgggctccgtggctacgagatctatgctcttagcgttatcggccatacacgtcacgctatcggcgtcgaccgctatgcttacaagcatggaaggaagtacaagacggcggaggaaatgaagcttcagtgtcagattttaaaaaagaatttggattggatccgatccactaacaaaaaaggctgatcttacactatcgctgtcaatcggttagctgattggagctgggacgagttccaaaaacacaggcttggagctgctcaaaactgctcagccaccacacagggcaatcaccaactcactgatgtgcccctccctgaatctaaagataggagggaagcagacattgacagccctgttaaagaacaaggctcctgtggatcttgctggacattcagtaccactggggc

SEQ ID NO: 9442 - DNA, 544 bp, Gossypium hirsutum
  Clone ID: LIB3828-031-Q6-K6-C1
cccgggtcgacctcgcgtccggtttttatcagctgaatcaaggaaaggggatggccagctgactgcgtgcgaggtattatttgtgcaccatgaaaatatgggtatacgatgggaaattgcaaagcttggggtcaagctaggcatgtggggaactgccaggaagatagaccctggcttacgtgcatatcaaaccgaaagaggaggggcagcgcccttttctcattcagtcgttccatggactcaaataaacaccaaagtaactcaagactatctgacatccttggaaagcaataataatgattcatcagacgcttgaaacacacaattcgtctgagaaaccagggaagaacaacatttccaaacttgtagttgatggtggggctatcgcggttgcatgtattctatatcgagggctcttaaccaaagctgttatattcggagtaactcgaaggtttgcaaaaatccgaagaaggttgtaatcctgaatatttttgtgggtcaatcgaaggaaaccgcacccaccagcaaagcagattgccattgc

SEQ ID NO: 9443 - DNA, 528 bp, Gossypium hirsutum
  Clone ID: LIB3828-031-Q6-K6-C2
ttgccgtcgacagtctgctagtttgaagttaatcaagttgaacgacgtgctcattagtggcattacctccgtcaactctaaagggttccatatgatgatcagcgtttgcagcaacttcgtgatcaccaacgttaatatatcggctccggatgaaagccccaacacggacggcattcacatgagcaaaacaaataaggtcagaataagcgattgtatcatcggcactggcgacgattgtgtctcaatgatccatggaaccaccaacgtcaccattgagaacgtcaaatgtggccccggacacggtttcagtattggtagtcttggacactacgaagatgagttcgatgtttttggaatcaccgtgaggaattgctcattatcccacacagaaaatggtgcaagaatcaaaacatacagaaatgaaagtccatctaaagcttcaggcattattttccaagatctcatcatggacaatgttaagaaccctattctcatcgatcaagaatatgcaacgattaaaggcagtgt

SEQ ID NO: 9444 - DNA, 561 bp, Gossypium hirsutum
  unsure (1)..(561): unsure at all n locations; Clone ID: LIB3828-031-Q6-K6-C3
tgggggcggacatctcccgggtcgatttatgcgttcgccgaaactgaanaactgactgagtgaagagcaataatgaagagttttaagaaacttttcacgagtaaaccaaaaacacataaccctgaatctagttttaagattggaggaatggcttcacttaaagtacttgatgtcattccttctcctgaagatgactctcacaaactcaagaaagcttttcaagggttcggaacagatgaggatgtgataattgagatattgggacacagggatgcaaatcaaaggaagaagattagagaaacttatcaccagctttacaatgaaactctcattgatgctcttaagtctgaactttctggtgattttggaaaagcagtcattctttggacatatgatccatccgagagagatgctagactggcaaatgaagcattgaagtcaaagaagaagggtatcaagcatctcgagatcattgttgagatgtcatgtgcgtcgtctcctcagcatgttgtggcagtaaggcaggcttattgcactctcttcgatcattcaattgaagaa

SEQ ID NO: 9445 - DNA, 521 bp, Gossypium hirsutum
  Clone ID: LIB3828-031-Q6-K6-D1
atttcagtaccttggaaagcacttccgaagagagtgtcaaagctttactttgctatgagagtgatagagcaatttgaagatgctgaaggtcgtaatcccggggaaacctcaattgctgatcttcctggtgttctgaagctcagaaaggaactttgtgaaacgaattcagtgaacgagtctgaaatacccgatgcactcctagaaagactgctaatggatacaagtgagtaccctccagtttgtgccatcattggaggaatccttggacaggaggtgatcaaagcaatatcaggcaaaggagatcctctcaagaatttcttcttcttcgatgccatggatgggaaaggcttgatagaggacatatctgagcctaaaccagttagctgagctactttgatcgatgagggtttgtgtatgcaactttttcacctccttcgcttgaactattaccatggggcgaagctaagttgatgttgaacgctttaataggatcagctaacattctcacctactgattttgt

SEQ ID NO: 9446 - DNA, 547 bp, Gossypium hirsutum
  Clone ID: LIB3828-031-Q6-K6-D2
cccgggtcgacctcgcgtccgggggattttcttgcctcgatctacatgcgaagttatagttaccatgcaagcacaaaaggaggcccctgctgatatgcaatgcaagggcaaattcctccttcaaagtgtaaaagcccctgatggtgttaccgcaaaggatataactgcagaaatgttcaacagagaatctgggaatgtgggggaggaatgcaagttgagagtggtttattttttttcgcatcaacaaacttcaccttcacaagaagggtctgaattagtgcctagaggctctatttcagacaattctgagtttgttatggctgcaagaacatttatggatcagcttgacactcaagacaaatctcctgaggcaaaagctcttataacgaagctgactgatgaaaaaaataaagcaattcaacaaaataacaagcttcgccaagagctggaactgttgaagcgcgaaagcagcaaaagtgggggcaatctgtctttcatgtttgtcgccttgatcggcttgattgggttaattatgggatacatcatg

SEQ ID NO: 9447 - DNA, 543 bp, Gossypium hirsutum
  Clone ID: LIB3828-031-Q6-K6-D3
cgggtcgatctcgcgtccgttcgattatcacgacgtaaacaaggatgggaagcctcctaagaaagataagtattaacgctttcatttattttgttttttacatacggggacgaagatcaaagaaaaatagaagcaaaaacgaaagacaaaaaatgagatttaaaatcacctttggaaaactctttttcctattcaaactgggggtatagattttgtatcgtctctcccaaaaatccccctttacattcaatttcatttcgttttatagctgaaaaataagaataaaataaataagaaaatcaaatttccttgctgtaatttctgttatttgctgtccattgctcttttgtttgttagtctgttgtaggtgtgtatggcgtggagaagccattagtgggcatgtcgacgtggagaatgaagcaacggcgcgcgtgaaagctggcacgaaggtagcagcggcacaagggggaaagggaaccctatagttctaaaaatattaaactttcgggcctgggctagtttttgtcattgggccgttgcaat

SEQ ID NO: 9448 - DNA, 468 bp, Gossypium hirsutum
  Clone ID: LIB3828-031-Q6-K6-E1
cccacgcgtccgcttcactagcactagatattggaaggtgtaccatgtcaagcatgttggccaatgttaacactggaaatcaaggcctacagggtgaactgtaaatctagctttgccaagtttcaagatttatgtccgaagacatggttagacataagaggcaagggatcaaagctttggagggctcctagtcgggatgatcatctcaaattcacatgcagtagcgggtctattcctggaagattattcattagttgctaatttgaagcaagagttaattgtttgaatcccctcttggtttacgtggtgcagagctcaacttagtgttgaagaactactgttagttgttgaagttggtcatacgaggtacatgtctaccgtgtaacaagttcctttacatagtgaaaattttcagcggactacggtcccgtggtttttccccttgaaatatcaaggggttttccacgt

SEQ ID NO: 9449 - DNA, 528 bp, Gossypium hirsutum
  Clone ID: LIB3828-031-Q6-K6-E2
cttttctgttgtgggtggatctacattggattctcatcatggttttgttgttgaatatggaattgacagggacgttgagcttggtttccatgtggacgattccgaagtcaccttaaatgtttgcttgggtaaacaattttctggaggggacttgttttttcgaggtgttaggtgtgatgggggtgtcaatacagaaacccagtcggatttaattttggattattcacatgttccgggacgtgctgttcttcatcatgggcgccataggcatggtgcaagagccacaacatctggtcaacgattcaacttacttttgtggtgtagaagttcggtctttcgtgagctgaggaaatatcagaaagatttctcaatctggtgtggagagtgccaacgtgagaaaaaagaacatcagcgtgtctcgatatctgctaccaaacaggaactgctgaagagagaagggaaacctgccacataactcaagctgtttgcaagtttttgggtgtgacattgtaaaaataagcttcttga

SEQ ID NO: 9450 - DNA, 551 bp, Gossypium hirsutum
  Clone ID: LIB3828-031-Q6-K6-E3
ccgggtcgattttgcgttcgccatacattggaagagagacacccgggggcgggcgcaagctaaaaaccatgcagtaacaatgagtgggtataagagattacctaccaacaatgatgacagtctctgcaaatagcagtttcccagcaacctgtatcggtcgccatcgatgcagcagggctcgaatttcaattctatttcgggggtgtgttcactggtagattgtgtgaaatgaactcaaccatggagttgcaatagttggctatggagaagttcttaataaaaagttctggatagagaaaaattcatggggtactgaatggggtgaagctggctatgtaaggatggaacgtggagtctctgataaaaggggtctttgtggtattgcaatggatactagttaccctgttaacaagtgaacagctttttcagtgaaattggcctaggaattctgcttgcttattgaaatatttcacttccttttatatgttctataattataatttaagaatacatgttgaagaaaaatatgtgtggacctgcaaaacatgcaa

SEQ ID NO: 9451 - DNA, 532 bp, Gossypium hirsutum
  Clone ID: LIB3828-031-Q6-K6-F1
attcaatttaattttgtttcatccatgttaatactcgtacttctgtccatatcatccgttgaaggtcaaggaggaggaggtggtggtgttattgatgttgttgcaaagtttggtgcaaaggcagacgagaaaacagatttgagtaagccattgttggatgcttggaaagaagcatgtgcctggacatctccgtcaaaaattgtgattcctaaagggatatattttttaagtacagataccttagatggtccttgcaaggctcctattgagcttcaagttcaaggcactgtgaaggttccggcagactctggtgctttcaagaagcctaaatggatttctttcaatagaattgaaaatttcaaattgtctggcggaggagttttcgacggccagggaaccactgcttataaaatggaaggttgcaaaggtcatgattattgtggttcacttcctattatgggattcaccttgggagatcagatggggtcaatgttcttaactcagagataaaaactggtgatgattgtgtttc

SEQ ID NO: 9452 - DNA, 543 bp, Gossypium hirsutum
  Clone ID: LIB3828-031-Q6-K6-F2
ccgggtcgacctcgcgtccgtgtttacttaagatgctgaggttctgggaattcttaaaactggagtgctgttcgttagtgctagtcaacctataaatgctttagcatttatatttgatggtcttcattacggtgtctcggacttcccttatgcagcttgttctatgatgttattgagtgccatctcttctgcatttgtgctgtttgctccaaaagttctcggtcttttaggggtttggttgggcctaactctctttatggctctgcgaatgacagcaggatttgtcagaacactatcaaaaaccgggccttggtggttccttcacagtgacttggagagagcttgaacgtgccgtcaagaagctctgctacccatctacatctcatctctgagtggccaagatgacaaggtccgcttctatcggtgaggtctcgccttcgaccaaaacgccattgttgcagaaactaaagcttggggcctttttcaatttgatttctccattttcaaccttgtcatagaatttttcagggacagttgagatca

SEQ ID NO: 9453 - DNA, 514 bp, Gossypium hirsutum
  Clone ID: LIB3828-031-Q6-K6-F3
catattgatattgagcacattgggtctaacatgattggactttatttctttggatataatataggaagaatctttggacctgaatatttgctgaggttgtatctagctggggcaatgggtggttcagtgttttacttggtgcaccatgcatttttggctaagggacaggcggcacggatgatggacccttcaaggactccaggattgggggcaagtggagctgttaatgctataatgctgcttgatatatttctgaacccaaaagctactctttattttgatttcatcataccagtgcctgccatgttactgggcatatttctaattgggaaagatatattgaggataatagagggaaatagtcatatatcaggatcagctcacttgggaggtgctgcagttgcggcaatagcatgggctcgacttagaaggggacgcttctgaattaaataatagacctgctagctaacatttacttgctcttgtatgttgctttgccacatgtttcattcta

SEQ ID NO: 9454 - DNA, 549 bp, Gossypium hirsutum
  Clone ID: LIB3828-031-Q6-K6-G1
cgggtcgacctcgcgtccgggaaactttcttgtctggagttctaggggtgcagttcgaatcaagactgctgctggaagaggtggttatgttacagatataacgctggcgaaatcttacatttgataatgcccgagttggaattgtcatcaagacagactacaatgagcaccctgacgatgactttttccgaaaggccgggggataataagggacattagcttcaccgagatacatggtcacggagttcgtgtacctgttagaatacacggaagcaaagatattcccatcagaaacgtgacgtttagggatatatctattgggataacatataagaagaagcatatattccagtgtgccttcgttgaaggccgtgtaatagggaccatcttccctgctccttgtgaaaaccttgatagatacgatgaggaagaaagactcgtaaagctctctgcggcccagaatgtaacagatatagattatgacatatgagaaagcaggtgttcaccgtcagccagccattctttccgggataaaaaacgctgtaagtc

SEQ ID NO: 9455 - DNA, 543 bp, Gossypium hirsutum
  Clone ID: LIB3828-031-Q6-K6-G2
ccgggtcgacctcgcgtccggcttttcttactcatttagcccctttcattagcatcaaaatcactccagttttctttatcactgaaaaatgtcttgctgtggtggaaactgtggctgcggtactggctgcaagtgtggcagtggctgtggaggatgcaagatgtatccagacctgaacgctgccgagatgaccacaactgggactctggttcttggtgtagcacccctttaaagcacactttgagggagctgagatggaattcggggctgagaacggctgcaagtgtggagacaactgcacctgcaacccttgcaattgtaaatgattagagaccaaagccaaagctccctggaagcagaggcgcctttgtctttaagaaataatatgttttgttgtttatgtgtttttagaataaagtagccatggcttgtcgtaggttttgcctgttgccgccacggttacttggtgcttgccaatagatagagtgaagtactaatatttacttgtttttctgtccagtgtgagcatctctgctatctcag

SEQ ID NO: 9456 - DNA, 531 bp, Gossypium hirsutum
  Clone ID: LIB3828-031-Q6-K6-H1
cccacgcgtccggaaatcaccatcttcttgtttttcctccataagctccatgaagatgaaagctctaattcaaaccctaatctacactcaggctagtcgtctcattcgagcattttccaaagcaaaatccattgtcattcaaatttacaaacaaaacaatcctatccaatatctcatttccatctccaagaccgcagagaagaagtacaagcacaacaagctattctttggttcattcaggctgcactataattggtgctcttctcacgtcacaccagttccagctccagttcttgaagggtgtaccactactcatttctactatgattcaacctggaattcggccatttcaactcatgatcagcaaaaggaggatggtttggagtcggagctttcaggttaccttcaatggcttgaagaaaacaaggttaacagggaagctaataaagcagagacagaggtggatgatattgatcggttagcagaaatgttcatcgcaagttgtcatgaaaagtttatgttggagaagca

SEQ ID NO: 9457 - DNA, 494 bp, Gossypium hirsutum
  Clone ID: LIB3828-031-Q6-K6-H3
cgggtcgactttgcgtccggagaccatttaattaaagttgaaagaggtgatagcagtttcgcacccaaaagagaggacacgacaagaaaaggcaaagccggaggaaagagagacaaatttaaaaaggacaaggccgaaaaggaataaagatccatcaggccgagacgtgggagacaaacttgatattcttattgaacagtggggatctaagttctcacagccgagatccggaacacccgacgcggaaaagcaaggttctaagaagcttataaggtggtttcaagcttaattccattggcagcaggttagaaccagttttgtagcatatcccatcatactcatctttaaggggaaaatatgagaatattagatgaggcacttgataatgcaattgctataaatttagtaccttgttgaaaggttttaacaattttgtgcactctgtaacacaaatgtaccaatttcatactagtctgttgaatattctttacgct

SEQ ID NO: 9458 - DNA, 549 bp, Gossypium hirsutum
  Clone ID: LIB3828-032-Q6-K6-A1
cgggtcgacctcgcgtccgctctcgctcaataaaaaaccaaagaaagcctttggtaaaccaaaaatggctctcaccaactcctccattcttcccaccaactccatgcgggaatctcagccatcaacgccgttctctaaggctaagccattgtctgtccttcggatctccgccgtccattcttctgactcgcctaagaacggggtcgtctccgacaaatccgtcaagcagcccgctactgctccactcgctgctaccaaatctgctaccgcgcccaccactgctccaccgaagaatgctgttcctgggaaatggaccgtggatagctggaagtcgaagaaggctttgcagttgccggagtatccggatcaggcggagctcgagtcggttctcaagactctcgatgctttccctccgattgtcttcgctggagaggctcggagtcttgaggagaagctcggggaagccgccatgggaaacgcttttctgttacaaggcggagattgtgccgagagtttcaaagagttcaacgctaataacattcgtgacac

SEQ ID NO: 9459 - DNA, 545 bp, Gossypium hirsutum
  unsure (1)..(545): unsure at all n locations; Clone ID: LIB3828-032-Q6-K6-A3
ccgggtcgacctcgcgnnccggagactttaaaacatggtcgctctggcttcgatggttgcactcaaccctaccgagtncaagggacccggngttggcattcacgaagatcatgttgtcccaaaaggttccgaaattggtactcttggttttggttttgaaggtggtcctgaaaaatgttgttcttttggatgttccggggggtgtaatcctggtggtttcgttctaccatttcctcaaattccagaaatcccaagaattccacagatcccacagatcccacaaatcccacaaattccactaatcccacagatcccacaagtcccacaaatcccactaatgccaggacagtcgggatgtgagagtggggagtgttgccgtcagggttgcggtgggacttgtgctgagtgtggtcagcccaggtgcgcatcaggatgttgccaggctgaaactgtaaagagcaaagggatagaagaggttatggacagtgaacccagtccaccaaagtagggagatgataccatattaagatgaaataatgaggaaa

SEQ ID NO: 9460 - DNA, 548 bp, Gossypium hirsutum
  unsure (1)..(548): unsure at all n locations; Clone ID: LIB3828-032-Q6-K6-B1
ccgggtcgacctcgcgnccggccagttttaaaggggtgcaaaacggaggaggctcaggcattactgatactgatgcctgccgggctgcggttgtcccttgcaggggggcacaaggttggagactctgctggttggaccaccattggcaatattgactacaaacagtgggctgcaacaaagaccttttaagttgggggggggatgcttttcgagtacaatgctcagttacacaatgcgatgcgggtaacccattcgatgtacagggcctgcaatacctcatcccctttggctacatataccactgacaatgactccattaaaataactactaaaggtcaccatttttttttctgtggtgttcttggacactgtcaagctggacagaaagtagacatcaatgtgcttcgcttacttgaaacagctccggcctcggctccctctgggtcaactttgagcccgccgcccgttcattcagtgagtgttccagtatcctccccgagcaacgctctcactttgaaagcttccaaggggaatttttccaaacttgg

SEQ ID NO: 9461 - DNA, 518 bp, Gossypium hirsutum
  Clone ID: LIB3828-032-Q6-K6-B2
aaaacatgtcaccacaccttaatattgttccttccatgtttgtgcttttattattattcatttcagcctctaaagttcaatcaggcgctattgatgttgttgccaagtttggcgcaaaagctgacgggaaaacggatctgagtaagccatttttggatgcttggaaagaagcatgtgcctgtgtaaccccatcaacagttgtgattcctaaagggacatatttattatcaaaagtaaacttagaaggtccatgcaaggctcctattgagattaatgttcagggcactataaaggctccggctgatcctggtgctttcaaggaccctaattgggttagattctatagtattgaaaatttcaaaatgtccggcggaggaattttcgatggtcagggaagcattgcttatgagaagaataaagatccccacaatcgtgcatttcgtgtcaaactccccgttaatataaggtttgactttgtgaccaacgcattgatacaagatataactagcaaagacagt

SEQ ID NO: 9462 - DNA, 216 bp, Gossypium hirsutum
  unsure (1)..(216): unsure at all n locations; Clone ID: LIB3828-032-Q6-K6-B3
ccgggtcgaccttgcgttcgggaactttttaattgtcagtgtatgtgctttcaggtgttaagctcgatnccccctnaagctaggagaactcaactcgngaatgaaaaaacaaaacaaaaatgagttgcatttttccacttcaaaaaaaaaaaaaaaaaaaaaaaaaaaaaaaaaaaaaaaaaaaatttttttttnntntggggggggggggaaaaa

SEQ ID NO: 9463 - DNA, 529 bp, Gossypium hirsutum
  Clone ID: LIB3828-032-Q6-K6-C1
ctcaaatctcagctgctatggcacccatcgcacggttacttttgctcgcgcttctctcaactgcactcacgatttcatcagggtctggggatgggtacaccatcaatggtcgagtgaagatcccccaaggtctgggtacaaaagggtttgctttgcctggaaaaacgtcaaatgtcaaagggatactcaatggtggccaaattgttacttatctgagacctgatggatatttttcatttcagaacataccagcagggactcatttgattgaagtggctgctattggctatttcttttctcctgttagagttgatgttagtgctagaaacccaggcaaggtacaggctgcattgacagagaacaggaggggtctcagtgaattggttttagagccgttgagagatgaacaatattacgagattagggaacctttctccataatgtcggttgtgaaaagcccaatgggtctcatggtgggatttatgctggtggtggtgtttttaatgcccaaattagtggaaaacatgga

SEQ ID NO: 9464 - DNA, 523 bp, Gossypium hirsutum
  Clone ID: LIB3828-032-Q6-K6-D1
ctggaattcgcatgtctatcaagctcggtctgcatattacatgttcaagttcttgaagaagacaaggaaaggtggatggatgtccgggggaggcatactgctctgcataacagggtctgaggcgatgtttgctgatcttggtcacttctcttattctgcaattcagactgcttttaccggggtggtttatccagctcttatattggcatacatgggccaagctgcttacttgtctcaacatcatcatacgagttaccaaatcagcttctatgtctcagttccagaaagtgtgagatggcctgtgctcataatagcaattcttgcttctgtcgtgggaagccaagcaatcattagtggaacattctccataatcaatcagagccagtcacttagttgtttccctagagtgaaggtcattcacacctctgacaagatacatggccagatttatatccctgaaatcaattgggtgctcatgatcctctgcattgctgtgactattggctttagagacacaaaacac

SEQ ID NO: 9465 - DNA, 525 bp, Gossypium hirsutum
  Clone ID: LIB3828-032-Q6-K6-D2
gttcactttcatgtctggctgttgaaagcatgaagtagatgaatcgagagatttatcttcatactggttttcttcctagttcattcggtatatatgctatgagcctctcatcagggttatttctacttgagaaacctgcatgggctgttgctgttgcagctgtgggtgtaatcctaggggggccattttcaatcttggcatttcttccactgaccttctactctttagataaacaattcaaacaagcatttctttctggtgctgtcacctcaatagctcttcttgcactctccatactcgttgatcactgctactaccaacgctggacatcatctgtttttaatctcttagtatataatgtattaggaggtggcgagagccatttgtatgggactgaggggccacttttttatataaggaatgggtttaacaacttcaacttctgtttcatccttgctttgcttttcctgggaattctgccaaattgcaagaaaaaagtatgcccctgacttgtttatcgtaatc

SEQ ID NO: 9466 - DNA, 550 bp, Gossypium hirsutum
  Clone ID: LIB3828-032-Q6-K6-E1
ccgggtcgacctcgcgtccgctcaaacctagatttgttctctctctggctctctctctccaatcaattaattcctccattggaggagcttagggtttgttggtgtgctgatctttgctctgtctgaaaaataaacagaattataaaccaacaccaacgccatgggaagatttgaagagggaggattcgattcagtggggggggctaagcctatacgaacctttagatggtctaccaacagctgttatcagactgagatggctgattcaaaagctggtgcagagcttcttgatataatcctctccgagggagggtatggggccgagaaccccaccgaccaaatggcttcatcaccaccgtatttctgtggatcaccgccgagcagggcgtcgaatccggtaatccaagatgcccgattcaacgacgagcagccggtgctacctccactaacatccccgggaccctcctcaaggggaggatgcgtgagggtgaaattcgggcagatgccagctgctgtacgaatcgagggatttgattgcctcaccagagat

SEQ ID NO: 9467 - DNA, 515 bp, Gossypium hirsutum
  unsure (1)..(515): unsure at all n locations; Clone ID: LIB3828-032-Q6-K6-E3
tcgcggacgcgtgggcggtcgcgtgggtcctaccaacaatgtgtcagttttgttaattgctatttctcagcaacctgtttcgggcgccatggatgcagcagggctcgaatttcaattctattncggaggtgtgttcaatggagattgtggaaatgaactcaaccatggatttgcaataggggggggtggagaagttcttaataaaaagtactggatagtgaagaattcatggggtactgaatggggtgaagctggctatgtaaggttggaacgtggagtctctgataaaaggggtctctgtggtattgcaatggatactagttaccctgttaagaagtgaacagctttttcagtgaaattggcctaggaattctgtttgcttattgaaatatttaacttccttttatatgttttataattataatttaagaatacatgttgaagaaaaatatgtgtggacttgcnaaacttgcgatgtgaccatgcntgaatgtnatatagagaggtagttagat

SEQ ID NO: 9468 - DNA, 540 bp, Gossypium hirsutum
  Clone ID: LIB3828-032-Q6-K6-F1
ccgggtcgacctcgcgtccgcaaagctttctttctctattctctttggcttatctatcgctttgatttcgcgtccttactgtgcactcgatggcaaatcgatggttgaggcctgaggtgtatccgctgttcgcggccgtaggtgttgctgtcggaatctgcgggtttcagttggtgcgaaatatctgcatcaaccctgaggtcagggtaaccaaggagaacagggctgctggggttttggacaactttgctgagggagaaaaatattctgaacatttcttgagaaaatatgtccgcaacaagacgccagaaatcatgcccagtatcaacagcttcttcactgacccaaagtgaggcttcactcttgctttatgctgaaactaaaataaaaaaatagaagaactaagtcttattcaatcaataccaagttttgccctttctttctgctgactgtgatgcaaatttgtgttggttttgcacttggatgaggtgtgttttttaagagaataaaaggtgttgtggatttttcgaagaagtgttg

SEQ ID NO: 9469 - DNA, 527 bp, Gossypium hirsutum
  Clone ID: LIB3828-032-Q6-K6-F2
gcccctttttctggagtccgaattcatgctatggccccaaaaagggaaatcttcttcagacttgcctgccggtaaaagggttctggaagtgacgtcaaagatggttcaaattcctgcaggaccagcaccacggcaggttgagcctggaagtcagactgagcaagcacctccatctgctgtagttgatttggctcctgaggaaatgcatggcttcagattcctgactatctcagttgcacctcgtccgtgactttgtggtgctcagactatttcaggcaggcctccaccagccacttccatggcagttgggcagttctttaatccagatgaaggggaaatagactttactcctgtatcgatgcttctatcaatacactcccataaggatatcttcttgaaggaggaccacccccttgctttcaatctgtcatttgcaattagtttaggccttttgcctgttactttttctttgaaaactgcaggctgtggaataaaagattctggacttcttgatgaagctggtgata

SEQ ID NO: 9470 - DNA, 549 bp, Gossypium hirsutum
  Clone ID: LIB3828-032-Q6-K6-G1
ccgggtcgaccttgcgtccgagcctgtttgccagatgccaagtgacaggactgtcggaggaggtgatgatgcttttaacacctttttcagtgaaactggtgctggaaagcacgtccctcgtgctgtctttgtggatcttgagcctactgttattgatgaagtgaggactggtacttaccgtcagcttttccaccctgggggggtcatcagcggcaaggaagacgctgccaacaacttcgctcgtggccactacactattggcaaagagatcgttgacttgtgcttggaccgtatcaggaagcttgctgataactgtaccggccttcaaggtttccttgttttcaacgctgttggtggaggcactggatctggtcttggctccctccttttggagcgtttgtctgttgattatggcaagaaatccaagttgggtttcactgtcttcccatcaccccaggtctccacatctgttgttgagccctacaacagtgtcctctcaactcactcccttttggagcacactgatgtggctgttcttcttgacaatga

SEQ ID NO: 9471 - DNA, 332 bp, Gossypium hirsutum
  unsure (1)..(332): unsure at all n locations; Clone ID: LIB3828-032-Q6-K6-G2
ccgggtcgacctagcgnccgatatttttttatctttatgccccatgggcttagatagtgttatcttctctatcattctctcaaaattctcatgtggtgcttggggcggggtttgattgttaggtgatactgaacctttactacggtgcaagcttttcaattttcatgaagtgatttttttattctattttctgtataggggggattgtcaggggtttgatcttcgataattatatttatatatttggattcagattccaaattactttgtatatcaggttaggggctggaaaataaataacatacatgctaatatcaagatatttttaagag

SEQ ID NO: 9472 - DNA, 548 bp, Gossypium hirsutum
  Clone ID: LIB3828-032-Q6-K6-G3
ccgggtcgacctcgcgttcggagcaatttaatttgtggtaggacaaagcgaggatgaggcggcatccccagaactccttatgtgcgactttggggagcatttcaacaaaataataacagaccctgcctttaagtcaaaactcgttgagaagtttaaaagctctgttggagatgattccgagagtgtggatgggacaactggtgccttagctgatgagcttgcagcatccccagaatccatgagggtatttccggcttcagttatgtccgactttattattgcattgcaagatggcggagtacaaggggaacaattgaacaaaataataacagaccctaactttcagtcgggggtggctaaactggttgaaaaatttaaaagctctgcgggagatgattccaagagtgtggatgggacaacttctaccttagttgatgaggttgcagcttccccagaatcgaaagtagaaattgatactgaaattgtcggtagcttgtataggaaaatgggaaaggatagattagtagacctgaaaaagattgctaaaa

SEQ ID NO: 9473 - DNA, 429 bp, Gossypium hirsutum
  Clone ID: LIB3828-032-Q6-K6-H1
gaaggcaagcacgttggcatactatagagcgagccagaatccacaagcaaggcgcgataatgagtgatgcagtcgaaacgctggaacctttacaatgcaatggagggagcgcacatgaaggcttcccgagtgtgaactcacaagtaacaggaggtagtgctggtccgtctgcagtggggggagcagcacattatcgactgcgacacagattttcgaaacactgttaggtccaggtgccgtatgtagagacggctaatacaaattgaaccccatgtggccctgcagaacgcatagttcgatgaagatgccacctactagaatacttggctggtgtgggttgagtagcatgacccaccgtcaaaagtgacaaatgcgctggataaaacaagggtggctcaactaaatagtacctcaggtgtaagctgaacg

SEQ ID NO: 9474 - DNA, 417 bp, Gossypium hirsutum
  unsure (1)..(417): unsure at all n locations; Clone ID: LIB3828-032-Q6-K6-H2
ccgggtcgatttttcgttcggggaaattgagncctgagaagaggaggaacnacaatctnctcgacgccgagagcagacacaccatacaggtattccccaactcctggtcagcaatcctattgacattcgacaactgcgggatgtggaacctgaggtcggagatatgggacaggcattaccttgggcaacagctttatgcgggggttatttcccctaaccgatccctcaaggatgagtacaacttgccggaaggtgtattgacttgcggcatcgtgcaaggcatgccaaggcctccacctttcagcagttaatttaaataagcttataaatctgtatccaattctggtgtatggggagagagagggtgagaaaagcttgagttccaaatgtatttaatgaaataaaatattttgggcc

SEQ ID NO: 9475 - DNA, 550 bp, Gossypium hirsutum
  Clone ID: LIB3828-033-Q6-K6-A1
cgggtcgacccttgcgtccgaaaaaagtttctttgctcattttgcggggttgcccaccttgctttgattgcctaccgatcaagtttcagcttgagtcctcttttgggggttttttgtcaacgataaaagcttgattgaagtgaaggttgcctctattcggttcaattcgggttttacgattactgttctttaggcctttggggtacatattatacgaaagctttggctcttgattgctggtaatcctccttcacttgtcaaagtttttttttgaacaaaatacatatatctcgaaaaaggggcggaaaattagaaaaagcaaattcaataaaggattgtatatcggacaaaagaataggatcatatttcatcccaccgtgtatgtaaacaaaaggcaaaccatctatgatagaatatatacagggtatttgcggtccctctcctctctaagaatgaatcagggttagcatgttaggctaggccctaatccaaaagttgatcaaatatagccaaaactctcacaaactgccgttctaagctccaaataaag

SEQ ID NO: 9476 - DNA, 527 bp, Gossypium hirsutum
  Clone ID: LIB3828-033-Q6-K6-A3
gtttctgtttcctctctttttattgaaaaattagggtttccgtcagcggtattgagaatcaatggcgtcgacttcgaggaagataatgttgaggagctccgacggagagacttttgaggtggaggaagcggtggcggttgagtcgcagacgatcaagcacatgatcgaggacgattgcgccgacaacgagatccctctcccaaacgtcaccagcaagatcttgtccaaagtccttgagtactgcaagaagcatgtcgatgctgctgccgacaaggaaaagactcccgatgacgaactcaaggcttgggatgctgattttgtcaaggttgaccaaaataccctctttgacctcatcctggcagcgaactatctgaatatcaagagcttgctggacttgacctgccaaactgtggctgatatgataaagggaaagacacccgaggagattcgcaagaccttcaacatcaagaacgatttcacccccgaggaagaagaggaggttaggagggagaatcaatgggcattcg

SEQ ID NO: 9477 - DNA, 530 bp, Gossypium hirsutum
  Clone ID: LIB3828-033-Q6-K6-B1
gagatggtgtctgtaataaaatctgcaatcttaattctgtcggtgtttttatctgtaagcttcagttcgggtgttaggttgctccaggaacagcccaatgatgacctcaaaaacatggacgctattcctcccattgatgcactcaaccctaccgagttcaatggacccggtgttggcattggcgaagatcatgttgtcccaaaaggttccgaaattggtactcttggttttggttttgaaggtggtcctgaaaaatgttgttcttctggatgttccggtaattgtaatcctggtggtttcgttctaccatttcctcaaattccagaaatcccaagaattccacagatcccacagatcccacaaatcccacaaattccactaatcccacagatcccacaagtcccacaaatcccactaatgccaggacagtcgggatgtgagagtggggagtgttgccgtcagggttgcggtgggacttgtgctgagtgtggtcagcccaggtgcgcatcaggatgttgccaggctgaaac

SEQ ID NO: 9478 - DNA, 531 bp, Gossypium hirsutum
  Clone ID: LIB3828-033-Q6-K6-B2
ttgcgtccggggaaggttacactgctgaagctgatgacaggtgaattgactcctattgatggaatggtccgacggcataaccatctgcgaattgcacaattccatcagcatttggcagagaaactggatatggaaatgtcagctctgcagtacatgataagagaataccctggaaatgaggaagagaagatgagaggtgcaattgggaagtttggattgtcagggaaagcgcaagtgatgccaatgaagaacttatctgatggacagaggagtcgagtcatcttcgcgtggttagcatttcgacaaccccacttgctgctgctagatgagcccactaaccatttggatatcgagacgatcgattcactggcggaagcattgaacgagtgggatggtggattggtactggtgagtcacgatttccggctgataaaccaggtagccgaggagatatgggtgtgtgaaaatcaagctgcaacacgatgggaaggggacatcatggacttcaagcagcatctcaagagtaaagct

SEQ ID NO: 9479 - DNA, 505 bp, Gossypium hirsutum
  Clone ID: LIB3828-033-Q6-K6-B3
gtacactttaaccttcacaagcgccttcatggctgcacattcaagaagaaagctcccaaggctatcaaggagatcaggaagtttgcagaaaaagccatggggacaaaggatgtgagagttgatgtcaagctgaacaagcacatctggagcagagggatccgaagtgtcccgagaaggatgggggttcgcatcgctcgcaagagaaatgatgatgaagatgccaaggaggagctgtactctctagtaacggttgctgaaatcccagctgaaggattgaagggtttaggcaccaaggtcattgatgacgacgaggaataatttttgtctgtctcttgtttacttaaaacttgcattttgttctcctacaagtttcatcagagttttgactagttttacaattgtgacattaaaaatacttggtttgtgttatttagattcttaagcatgtctctttattttagagctttataaatagattcaagtgatgagtgtttggatttatgtt

SEQ ID NO: 9480 - DNA, 528 bp, Gossypium hirsutum
  Clone ID: LIB3828-033-Q6-K6-C1
aagaactcttggcaagatggtgttctgggaaccaactgtcctatcccccgtgggaagaattacacatataaattccaggtgaaggatcagattggcagctacatctactatcccgtgacggctatgcataaggcggttggtggtttcggtggcctccgtgttaacagccgtctactcatccctgttccctacgctgatccggctgatgactatactctcttagtgggagactttttcaacaagggacacaccagcctcaagaagattcttgatagcggtcgcaaccttgggagatgtgacggtgtccaccttaatgggaaagttgcgaaaggtgatgggaaggatgaacctctgtttacgatggaggcaggcaaaacgtacaagtacaggatttgcaatacgggtatcaagacatctctgaacgtcaggttccaaggccacaccatgaaattggttgagatggagggttcccacacaatgcagaatgactatgactcccttgatgtgcacgttggacagtgcttcagt

SEQ ID NO: 9481 - DNA, 522 bp, Gossypium hirsutum
  Clone ID: LIB3828-033-Q6-K6-C2
aaaaaataaaaagggaaatcccctttctctgctagggttccaggcttagcattggaaccccgccgccgtccctccttcccacttctccgatcgtgccgccgtaatagttgacgggcagagacgaaagacgggcttttaatcccgcttttaagtgtggtgaatgacaccagtgagggggagcctaaagagaaaaaggagaagtctaaccccctttagcccaaccccgacgacgacgaaaggatctccgtcgacggagccacgcggcggtttcaggcgtcagacgcgtggacgaccggtggttggcgagccttgggcggtggcggcgtgcgaggaggtggaacggcgcgcattgttggagcctggcatgcggcgctggggcttagggtttgctccattctgtcgaaattgttaaagtcatttgggccaggtttttttactttgggcccgttgggtgtatttaattttggctttgggctactactgtaatagactgtcttattttggattttgggtttctattta

SEQ ID NO: 9482 - DNA, 116 bp, Gossypium hirsutum
  unsure (1)..(116): unsure at all n locations; Clone ID: LIB3828-033-Q6-K6-C3
ccgaaagacatgattcattgtttcagctctttgaccacattgaggacaacttgtattggctgctagtttcctgtgttgtaaatntacctttgtaggcagatagttccatgacagtc

SEQ ID NO: 9483 - DNA, 522 bp, Gossypium hirsutum
  Clone ID: LIB3828-033-Q6-K6-D1
cccacgcgtccggacgacggctaccgtgcccatcatcgacctcaatactacagacgcctcctccacatcggagatcactgaaaaggtcgtcgaagcatggtaggattctgaagcgatgtgcttcagagccatgtctgtggagctctacgcgcactttcatggggtctaaaggggaagagggggctttgtttggacctcaaactagcatcgacgccttagcttcttctccttctttttctttgtcggatttcgcttctccaaaacagagttttgaggtaaactctcattgatcatcaaactttgcattaatacacgtccataaaccataatggagattttaatggtgttccctctccttgttgatgtcatgcaagggttacaacaaagaagctaaagttgtgatcaacgtatgggttgaaagaagtccaggaccagtccgaaccatggtgaaattaggggccagtgtcgaagacgctataaagcttgttctgcacaagtatgctgatgaaaggagaactccta

SEQ ID NO: 9484 - DNA, 426 bp, Gossypium hirsutum
  unsure (1)..(426): unsure at all n locations; Clone ID: LIB3828-033-Q6-K6-D2
ccgggtcgaccttgcgtccggaaatttttggattcttgtgtaaaggggacacgcgcacacaaaaaaaggagttgatgcataaatagatgggagttttgaacgaggggggaattgcttatatagcaaagaaagcaggaaaatctttgttttattcaaggagtagcattaaattgtaactattattgtcataaatatatgggggggaaatcttttatttctctcaaaaaaaaaaaaaaaaaaaaaaaaaaaaaaaaaaaaaaaaaaaaaaaaaaaaaaaaaaaaaaaaaaaaaaaaaaaaaaaaaaaaaaaaaaaaaaaaaaaaaaaaaaaaaaaaaaaaaaaaaaaaaaaaaaaaaaaaaaaanncacccctttttaaaaaataaaaattaccaccactttcctttcaaacaacattttctttccta

SEQ ID NO: 9485 - DNA, 488 bp, Gossypium hirsutum
  Clone ID: LIB3828-033-Q6-K6-E1
ggcaggcgcagcaaattgggtttccataaccttactgttttcagtatgtttatcggcgtcctatggtaagaggaccggaatctccaccatggctgacggagccgatgggtttcaaccaagcaacggttttccgcatgaagctgatcctgattcttcaacctctatcgatcctgatcctaccggattcggtgctggcataggtataggttatgaaagaagcccttactgtatcgactgcgacgatgtggatatcatgggcggcagcttttgcggcacctgcaattacggatgcccttaccgcaggttcaataatgggtgtggtggtggtatcgcttatatggatgaactcaaacgaacgattaaggaccttaccatgaaacttgatgccaatggtcttttagggaaaaagaaggccatgaatatacaagctatggcgccagaatcttcatagatttatatatagattatagaaactacggattctatac

SEQ ID NO: 9486 - DNA, 302 bp, Gossypium hirsutum
  unsure (1)..(302): unsure at all n locations; Clone ID: LIB3828-033-Q6-K6-E2
ccgggtcgacctcgcgtccgattttatctatttgtgtcacataggatggcttttgtaccccttcaatgctgaaactcgtcttttgctcctcttatcgtggacactggctcaacacagtagctcctagactccgagtcaaatccgattcaaattgcgtcntnctntncgatgcagtgggtcgacttaccggattgtctcggaggaggggtgggaattctctatccagggctttcttctgttctgattccaatgatgggtnccggaatcgggttcaggggtncccaaaaaccccttgggttttt

SEQ ID NO: 9487 - DNA, 525 bp, Gossypium hirsutum
  unsure (1)..(525): unsure at all n locations; Clone ID: LIB3828-033-Q6-K6-E3
ggagggttcttagctntcttctttaagttaaaaaaaaattttatacattttagtatnnnnaaaaaaattaaactntgaacaaattgcaaagattttgattttcttctgcaatttctcatccaccaattgaatcaggttgtgaagtattgagggtgtttattatttgttgtttttttataggggctgatgtctccgccgctgcttggcgtggaggaggaaggggttcagagcaatgttactttactcggttcttcaggctcaatggaaagtgtgtgccagaatagtgctgaattgaaggaacggaactacatgggcttgtctgattgttcttcagtggatagctctgttttttcccctccctccgaggaaagaaaggctagtttgaatctaaaggcgactgagcttaggctcggacttcctggattgcagtcgcctgaaagaaatccagagctttgcttgttaagttcttctcagcttgatgagaagccgcttttccctttgcatccttcaagtgatggtcactgc

SEQ ID NO: 9488 - DNA, 547 bp, Gossypium hirsutum
  unsure (1)..(547): unsure at all n locations; Clone ID: LIB3828-033-Q6-K6-F1
ccgggtcgacctcgcgnccgatttttttttctctttaatttttttagggattatggcttaaaagatacagggaccacatttgaaaacaaaaatgacacgccaactgggggttcttgctttggttttgattgcccttgctggtctggtttctgtcgacgcttcatccgccagtggcagccctgcatgtgcaccaactgaggggtctatagatggtagtactgctagttcctcccctccttctcaagctaccgctccaagtcgtagcagtggtgtcacttttgaccttgatagatagatcaaaaatagaacgatcaagttaaatataataagtaaataattctatcatttggactggtgagttggttgtttcgctgtagagccatattcataaggttcatccatagaatgattctcaaggaaatgccgacaaatcattaaacaatttgcaattttaaaaaatcgtggggtttgggcaattaaaaaaaaaaaaaaaaaaaaaaaaaaaaaaaaaaaaaaaaaaaaaaaaaaaaaaaaggggcggccgttt

SEQ ID NO: 9489 - DNA, 251 bp, Gossypium hirsutum
  Clone ID: LIB3828-033-Q6-K6-F2
cgggtcgacctcgcgtccgaatttcgtgaggcatataaaagagcggggagatgaaacatagtacaggaattgggtaccaccattgctattggtgtccctaattaagtgacggggaaagtctgattgatcgtatatgtttactggctaggaaaagctcgacatttttattacattctgtatcattattttagtgtaataggggggtaattacaataattatttagtcatttcaatgatcatttggcctatct

SEQ ID NO: 9490 - DNA, 298 bp, Gossypium hirsutum
  unsure (1)..(298): unsure at all n locations; Clone ID: LIB3828-033-Q6-K6-G1
cttaccggttatgcgtttctaaagcacagcatgttaaagtatatgaacttaagagaggatatttctgggctaagttcactaattatggtgcaactatgctctctgttattctccctngnatnaaaactgggaaattggatgatgttgttttttgttatgacgtgggtaatgattacaagaatgatacaacctattttggagccattgtaggccgagtggctaatagaattggaggggctaagtttattttaaaatggtgtcacttataaaaccgatgctaatgatggaaaaaacaccc

SEQ ID NO: 9491 - DNA, 522 bp, Gossypium hirsutum
  unsure (1)..(522): unsure at all n locations; Clone ID: LIB3828-033-Q6-K6-G2
cgccgaaaagatttgggcttttgncactgggtggggaagcaatgattgacgaagaatacattctaatggccgaacctgaccatgtatggggaaatcctttgcctaacttggctcgtggaaaacatccagcagggtttcctttcttttacattaagccatctgacctcatgcatgttattggggggtattatcctgaggagaagggtcctgtgacaaatattgatccaattggcaattctccagtgattattaaaaagtctgtgctggagaaaattgcacctacatggatgaatatttctttgaggatgaaagatgacccagtgactgacaaggaatttggatgggtgctagaaatgtatgcgtatgctgtggcatctgcactgcatgacgtgcaccacatacttcataaagacttcatgctccagccaccatgggatacggaagtagggaagaagtttataatccattatacttacggatgtgactacaatttgaagggagaattaacatatggaaagattg

SEQ ID NO: 9492 - DNA, 548 bp, Gossypium hirsutum
  Clone ID: LIB3828-033-Q6-K6-H1
ccgggtcgacctcgcgtccgggctattgtagcagttgcagattaagcattaagaagtgtgatgctacacaaatcaaaagactacaaggttaccgtgatgctatgcttaaggcactaagcatgtttcaaagaaacgaggaagggggtatgtttataaattcttgcttttctcattgccagacatcatattctgcatggcattcacccaattctccaagaatcaacaataagaccatggccgagtcagtgggtgattggtacttcaatcggaaagaatcgaagcttatagactgcccttatccatgcaatcccacttgcaataacgatgactacacgtcgtccgttttatctgctgctgtatgaatggattccatatgtttgatcgacttttcaatacccctggcaagttggatatactcgctctgtattctttattttaaataacattgatgtacactttgtatatcatcctctaattggtaatttcaaaaagctttaaaatctttcattcaaattgcatttaatttgaatcaagcagcactgagatta

SEQ ID NO: 9493 - DNA, 545 bp, Gossypium hirsutum
  unsure (1)..(545): unsure at all n locations; Clone ID: LIB3828-033-Q6-K6-H2
ccgggtcgatctcgcgtccgcggacgcttgggngcgggcactagggggcggacccatnnngcaaggcccaaatggaagaacgttgtgtctaaactaagttccaagcattgcaacgcaaggataggggttttttattgtggggcaccggttttggctaaagagctcagcaaactctgctacgagttattccaaaaaggttggggtaaatttgaattccacaaagagcatttctaattctgagaggagtatacaaggggaggaaatagcattcttaccatccagggccctaactcctttctttacctagagaaataagaattttgcaatagtaggcccagaagacaggagccaccgtacagccttagaatagaaaaaggagatatgaaaggaaaaaaggcatttaggtctctatccctaccgttgaatacccacaaaagtgaccgaagaggccatcatggtttttgggaaattaaattcaatggtccggcgagcaagagaaatgagagttgagaggtagggcaggcctagcccattcatgggtaggt

SEQ ID NO: 9494 - DNA, 521 bp, Gossypium hirsutum
  Clone ID: LIB3828-034-Q6-K6-A1
aaaacattgcggattaccatttcgtgggacaaagacgtcgaaggagcttccactcaatgggatgatattcaaagaaagcttgggaaggtacccccaaagccaccagctttcaagcctgacccttttgaacccgcacctgacccggattccgtccctaaggacaagtcttggatcgatgggggggctgaagaagagcttgaagaaatcgaagatgatgtcgatgatgatagattccttgaagaatacagaaagaagaggctggctgagatgaggaaagctgttaagatttcaaagtatggatcggttatgccaatttccggatccgattttgtacgggaggtttcgcaagctcctcaggatgtctgggttgttgtcattctctacaaagaaggatttccagagtgtgggctgctcttgcagtgtttggaagaattggcagttaaataccctgcaacaaagtttgtcaagataatatctacagattgcattcctaactacccagatcgtaatcttcccacact

SEQ ID NO: 9495 - DNA, 518 bp, Gossypium hirsutum
  Clone ID: LIB3828-034-Q6-K6-A3
catgaatggattgacctcatattcgggtataagcagcgaggcaaggaagctatatcggctaataacatgttcttttacattacatatgaagggacagttgatattgataagatctatgatccagtacaacagcgtgctacacaagaccagattgcttattttggacaaactccatcccaacttcttactgtccctcacatgaagaaaatacctctttcagaggttcttcatttgcagacaatcttccggaatccgagagaagtaaaatcgtatgcagtcccaaaccctgatcgctgcaatttgcctgcagctgctattcatgcgtcttcagattccgtcataatcgttgacacagatgcgccagcagctcatattgcacagcataaatggcaacctaacactcccgatggtcagggagcaccatttctgtttcaacatggaaaggcaacaacaagctctgctggtggagcacttagaagaatgttcagagggccagcagctgcaggctctggttctga
